United States Patent Application Publication US 2015/0052636 A1 - sequence listing, part 4

SEQ ID NO: 10802 - DNA, 827 bp, Oryza sativa
  Intron number 3 from transcript LOC_Os08g44540.1 (locus LO C_Os08g44540) derived from phytozome v7.0 (chr-ID Chr8; po s 28007831 to 28008657)
ccattggggaagaaggccaggtgacaggtagtgtgttcatattcatgtctgtatctttcatcggaatattcacattctgctagattaattaccatgggtttgttataccctgtgtaattgctgaacgtaagggtggatggtttttctggatattgttggtcattccgaagttgaatagtgaatagccttgtaattttcagctactaaattggtttagatcatggaagagaccaagagaagtatatttataatttataagatggttttttctaaggctagaaatgcaaggtttcttatatctttttctttttgggagagagttgcaaggtttgttatgcctgtaatcagtgatacctccatgcttcaagcttcagattaatgaatgacctcatgctggtgcattgcacaagaccaaaccctgtaactctgtaactattgtatagtgtatacatatttgcatgttccctttcatgtaatattttccctcgatcttaatatcatttggccatcctggaaaaaaaaaagtattcccttgaatattttattttcttttagccattttataaggtgacaaatatttctgtaaatatccatatatgcaaaataacttaaagttggacgactatagttgaacaagccatatccagtggcaagaccatataaacatgtttcaaaacaccttagatatgcatgtgcaaacattcaaaacataatggacaacattatatctctagcacaaggaaactctgaatatttgttagatccttatttgcagtagtgcttctgtcccaggtggcaacctgccattctgatcaacaaaccatttc

SEQ ID NO: 10803 - DNA, 976 bp, Oryza sativa
  Intron number 1 from transcript LOC_Os09g20370.1 (locus LO C_Os09g20370) derived from phytozome v7.0 (chr-ID Chr9; po s 12227559 to 12228534)
tggcgctgctaattctcccttccctggagacggcggtgaggcctccccccctctctctctctctccctcctccttctccactcaggcaggcggtgagcgacaaatcctcctcggggaacgcatggcgcgcgtggtgggcagggcgaggcgggcggcaccgaggacattggaggcggcaggctatcgtgacgagtttgccgcccatccccgtcgtccccgtgcccgattgttcctccgccgcctccgctccaatctcctctccttcccgatgccctcgccggcggctctaccccactggtcccgtcacgacgtgccctccgcaatctcgccgtgcaccagagggaagaaagagagaagagagattttagcagtactccgactgccgccgcatcctctgcgtgctcgctacgccgcccttgtctccgcctccatgccgctgccggcacgtgccgccctcgcttccacctccttgccgctgccggtagtgccgctctactgtgtcgctccgtctccccctgccgccgtgcgctttagaaggagggagaagagcgccgcgtcgttccctctccccagccaccacccgctttagaaggggatggagaatagagaggtggtggggattctaacgagtgggatctagcgattttttttaaaaaaactgatgattggactgtcacgtgtgctatttgaatcctaaaccgcttgcaacagtgagcgatatctggttttcgagtttagggggtaattcggtcgatcgcgatagattaagggggtaattcgtactttcctttatattatggattgagaacaagaggatagcttattcttcaacgcatccttgtgacaatctcctgcactcccagataaacagatcatgcatgagcatatatatcgatcttgttagaagatatagctagctttgattgtcagtcaaagatatggctccctttttatcaccatcacagtcaggggcaac

SEQ ID NO: 10804 - DNA, 767 bp, Oryza sativa
  Intron number 1 from transcript LOC_Os12g40990.1 (locus LO C_Os12g40990) derived from phytozome v7.0 (chr-ID Chr12; p os 25333290 to 25334056)
ttgcccatctttgccaccctcctcttcatctcccggtgagttttgccaccatctgatgtttttatcttttttgatgtcgtcatacgaaaatgaaaaagaaaatacgtaccacaaaagaaattggattatttgacaaataaagggtgaaaataagataagattcgtcggacattttttcccctcttctgtactccatgcctgctctcaaataaagaaagaaatagaaaaaaaagtagaaggacgagtcatcgatccttaatttccttccaataagagtggaaagctaggaatcatacatagcaatcattagaacgagtgtacaaaaacacacttgtaaatcatgctgtccggggactccggcgtccggacaccatgtggtccttgctacgtttgtttctttgtgaaaacggaatgtgcacatatttttcaaataaaaaacttgaaatatataatctctgtatatatacgtagacgtattttcaaccagaaatagattaattgaaataacacacatttacgtacaaaccttagcttcatcttttagacaccgtatatgaatatatacacacacgaacgaagatatactatattaatttatacccccggtgtgttatagttaaaacatacccaatattaataattttttactgagataatcccttggctctcctatatgtcttaagagatgctaaactatcttccttaactctgacggtttctgatgcctttttctcttcaggactagtggaagtagatcctttgaaagt

SEQ ID NO: 10805 - DNA, 883 bp, Oryza sativa
  Intron number 1 from transcript LOC_Os09g38560.1 (locus LO C_Os09g38560) derived from phytozome v7.0 (chr-ID Chr9; po s 22181369 to 22182251)
ctgcagcgtacgccgccacgaatcccctttcttgccctccctatctctctccttgcctccccgacgatctcccgctcgctctgctactgttcgtggataggtggatcggggggattcgttgtctcgtgtgcatctggtcgttagaatttcaatttcggggggcgaattttttgcgatctggtaggtcgattttgctcgcatccagtaataataattcgaggatactgggagtggttgcgaatccccgagctccaaacgctgcgctgccagcgctgaatcttgggtggacaactctcgatgtagctctgcttcgtgcaatggctatcctatgcaattgggcttcctttggtttctctctctaaccatttttcatctggagttcatatgaaagtgctactgtcggtttgtgatttatgatttatgttaatccttgcagtgtaagtaccctagaatttctggtaattatgcaatccctatctactgataactgatccaagagagtaggctgaaattttgtcacaagtccatataatctgcctggtgttattttattttaaactggttcttcgatgtattatagcgcatatattgtcaacttagtcatccccaggccaatttttatgctcaagtggaagtgctgcacaaagagcatggggattatgtttgaattttgactagtgataatggcatagttttcttgactctgctacatctgcctgtgttgatatcaaaagttaaaccataggcatagtccgaatgaatcagcgatgaacaagcttttttttttttgtgctgataacactactgacagttctgcattctatcttttccgcccctcgtggtaacatactaatagtgttgatatttattatgtcttaaacag

SEQ ID NO: 10806 - DNA, 779 bp, Oryza sativa
  Intron number 3 from transcript LOC_Os10g36480.1 (locus LO C_Os10g36480) derived from phytozome v7.0 (chr-ID Chr10; p os 19454641 to 19455419)
tgctggactgttggccattgtgctgggagaaataggtgatgctcatgagttggtctcaatttcttcttatgccagtaaataaaccggattagtagtctctctgatctttgacttgagtagtaaaacaatttgcgccacttttttaaaaatgataatcaactaaaatatgatacagtataagaaaaggtcatgatggacaatcgccaatggagcaattctggttactgcactttgccatgtaggagaatggcgaaataaaggagggtgttccaaattttcctgatctgttgggtgattccatttttgttccctagaaccagcaagcaggttttactaattggtatccctaacacaacacctttttatagtagaatagtataacacagtatacgctcttgcgttcaaaactgatcatgttaggaccaagttaccaacaatgacagtgtctttaaatcatatatcattatgggccttccatactgaccagcaatttgctgcaatgatcacaaatgtaaatcctaacactttcttcttcgaatagcctcaaccaatctctcaacatacgatagaatgatgaagttattatagttagttatcccaaactttttcccctaccagtctgtaaatgtgctttgttcagagaaaatctgaagtagttatgtactagtacacatcacatgtgcttctacaatttgcattccttttgtcagaatatgttttggattctcgtttcatctaagctgatcttgtactgatgttccacaggacgtaggcggaca

SEQ ID NO: 10807 - DNA, 736 bp, Oryza sativa
  Intron number 1 from transcript LOC_Os12g07540.1 (locus LO C_Os12g07540) derived from phytozome v7.0 (chr-ID Chr12; p os 3752956 to 3753691)
cgtcgctctcctccacttcttggcgtcgcagcgtgagcgagcagagcagcccaactagttcttgcgattcttgattgtttcttgcctttgattttgggttctcgcgattcttgattgtttcttgtgagaaacatttctttcttgtcttttgatttttgtgttcttgcttctttgtgcgttgtaacacgatggaataatgaatcagaagataatttcgggaccatttcgtttattttgctccgattcatcacgggaaagatgcgcaatccgttcttgtttcgtgagatgtgcacttcttgatgctattcttcagaaaagagaagaaacaagttcagttcttgattcctttgtgccgttctttgtttctttccccttttctggttacagacgatggattttagtgagctcacatgccttgcgcattatgattttactgtacggacgcttcattctgctttgcttgctcatgattagatgtagtacttttgtacttttgggtgacagcattatgcttgatgagcatttagtccatgattttaattcgaccggtgaatatgtgctttcatagttagtgcaaaaccattcttaggatgctccaaaattgggtcactaaaccatcctacttttgttcttcgtaagaaccaacttttacatttcagaaagattcctggttctatccattatcatgtagtactaatatatggaaatatttgtttgcatttgtatcgtgcagttg

SEQ ID NO: 10808 - DNA, 614 bp, Oryza sativa
  Intron number 2 from transcript LOC_Os11g13890.4 (locus LO C_Os11g13890) derived from phytozome v7.0 (chr-ID Chr11; p os 7655897 to 7656510)
gtgccggactacctcaacggagaggtccccggagagtaagtcacaagctcccatttttcgctgtcttttgctgtagtttcaagaaaaaagtttagatctttttgtgtggaaaaaatccagacctttttgtaggcagtacaagttgggaatttgaaaccaggtgaaatgctagtacaggttgtaaacattgtagcatcaactgggaaattagtggagaaaatagagtacaaatgaaattaggacttctcattggagaaggaatagttttgtcccgaattgcattttgttttcatgttgtataggaaaatattgctgtttagtttagctgttccataaaatcaaaagagcacggactatctctgaaacaaactagcatctgaattttcaggtgctcaattccccaatcttaaagagcaattttcacctaccaaaagttcgatattgttcttcacttttagttgtacaagtagcatgatgttgccactccactaatagcacaccaacatgaacaaaatgctcatgaaaatgtaggtttcttaatgcaactaaactaaattatcatgccctttgaacttgcagctacggctacgacccttttggcctcagcaagaagc

SEQ ID NO: 10809 - DNA, 480 bp, Oryza sativa
  Intron number 1 from transcript LOC_Os12g10820.1 (locus LO C_Os12g10820) derived from phytozome v7.0 (chr-ID Chr12; p os 5821865 to 5822344)
gcacggcctctaccacctcgacgataccagcgaaagtaagcaaagcatcaagcatctccaattccccccaattaatcccactactcctcatctgctctcaaagttttcatcaatttaacagttatctgttctccaccttttgattgataaatctgttctccattttatattacaagtcatttgactttttctttagtcaggcttctttgcgttttaacaagtttatagaaaagtttaccaaacatccaaaacaccaaattaatatcgtaaaatgttgcattgaatattttttgttaatatgtttgttttgtgttggaaatatcgttatattctttcataaacttggtcaaatttaaaaaaattgagtagaaaaaaagtcaaagcgatttataatatgatgaaactgaaacggagggaggagtatatactaatcactggttacttaatcgattcattccatcatcagctcgcctggaaccg

SEQ ID NO: 10810 - DNA, 753 bp, Oryza sativa
  Intron number 1 from transcript LOC_Os10g05790.1 (locus LO C_Os10g05790) derived from phytozome v7.0 (chr-ID Chr10; p os 2921712 to 2922464 reverse strand)
gacgccgagaccgctttcaagggtaagtacgaatgcaagcaactactcgctccgtttcgaaatgtttgacaccgttgactttttagcacatgtacaccgttgactttttagcacatgtttaaccgttcgtcttattcaaaaacttttgtgagatatgtaaaattatatgagaatcaaatgataggaaaagaattaataattacttaattttttgaataagacgaatagtcaaacatgtgataaaaagtcaacggcgtcaaacatttcgaaacggagggagtatatacggagtacactcttgatgatgggacagtggtatttgacaaagattacaattgacacctctcataaattaaaagtagaatatacgcgatatttgggtacaaaataaccatcgagtcgattatataaacattgttatgtttagatctaaaagtgcgcacatcctctaccataacgacagatgttgtaacagacacctattgacatgtgtgggcctgttatcacagatgatattgcttgggccaaaaacttactagcaggccataggattatgctttacctaggctcaagaaaattcttggatcagtcactgtaaccgattcgctttgattaaaagaaactgtgtcatctaactgtgcatttgcatgatcaccaatcaaagcaactattaaatgcacaaaaatgttgtgtttatttttgttcattttgttgacaggacttaaggtggcgatcaagtgcaagaacggcagc

SEQ ID NO: 10811 - DNA, 883 bp, Oryza sativa
  Intron number 1 from transcript LOC_Os11g35870.3 (locus LO C_Os11g35870) derived from phytozome v7.0 (chr-ID Chr11; p os 20587666 to 20588548 reverse strand)
tggagctatttcttggaattaaagcatcttctcaggtatgaattacaaacttctacctcctttctagattcagttctatgcatttatttttcatggtgacttgttgttggaaacaatttgtttaactgatcggcttgaaatatctttttacctggttcttacatatggttatttgttttgtttgtgtcttttagaactcctgtcggtttttatctcactgttgatcatgagttcctatattgttattcattatgaacatggaaatacttttacatatacctgaccatcatgttaaagaacatgacaggttaatcataagacataactgtctttgtagtttgtacacttaggctcactctttattcatttacacaactgcagttcttcatggtacatgcctataacttgtattgaaaacttactttgttttgggatgatgtaaattatagctctttgttgggctggctctcaattgtaatgtcttcgaagcagtaatgcagtttcactgcattgaggcaactctctaatatctgtgatatcataaattcggaacaacacaaatttattgtggaggacaagaggcacctctttttgcagcaacccagcagacaacttgtgaatcattttttttttaattcatggccagcctaaatttcacaaccaactctatgctgtaacttacaaacctttccaatttcaatatttgtattaggactggtgctggtttgtaactttactatccttcaccattctgtatgcttctgtcattcacctttgcttacacaccttgattagagcactttatagctggttatgttctagctcagtgttaatgcattagattttttattcttcgaattgcagtatccaaaagcacctcctc

SEQ ID NO: 10812 - DNA, 642 bp, Oryza sativa
  Intron number 1 from transcript LOC_Os09g14700.2 (locus LO C_Os09g14700) derived from phytozome v7.0 (chr-ID Chr9; po s 8728006 to 8728647 reverse strand)
ctcctctcctctcatcgccccttccatctcccaaggtatccaatttatcccattgcctccattaatttcctgtttcaatccagcaatttggggttctttacccaccagaccttaaccaggtaaattaggtcatgaccattgaaggcatgtttaggtttttatggatatcttggcttcttccttggccatgagtggtctagtttgtgctccatttggtaggaatcatgtaaaagatgtgttttttatgtctattttggtggccctgaatggaaaattacagcatctaggatcttgataattactttggatgatacatgatatataaactacagtatctgtgtttttcgtctgcgtgcattgcaccaggaataggatagtggaatttaatgggaaattcaggtcactggttacatattagaagtagagtcaggagaaatggaggtaaaatcagtgcaaatttaagcaccaaaacgatcgagtgcattagtgttcttatgtttggttcatcctgaactaagaggaaataatcaaaaagttggtgatattaagatgtttatatgttgatcaataatatcattgcattaattttcttttcttactgaaacaggtgaccaagcatagttcgaacaatatctgttgtca

SEQ ID NO: 10813 - DNA, 1044 bp, Oryza sativa
  Intron number 1 from transcript LOC_Os10g02490.1 (locus LO C_Os10g02490) derived from phytozome v7.0 (chr-ID Chr10; p os 923288 to 924331)
ggccgtgtcttgccggcgctcaggaggacgctccggtacgtcagcatcattcacaaaccaacctctaaacaatcacttgtatgtttattaatttagtgagaaattttagctacgttgctccgataatgatagagatcagtcgaccggtggggggagaaaaaaatcaggcgctcccccgccccctgccccgcgcgcatgcatgccacctgggcccccaccacaatccctgcctccacctgcaacaaatcacccacatattttggaaaccctctattaaaagaatttggtttatttttttgttccactaaaaatgtttcactatctatagatttaatattgcagtgaagtgaaatattccattgcaatgaaaaaacccacatattttggaaaccccctattaacgtaattcgttttatttttttgttccaccgaaaaatgtttcacctagtgtacttataatgtttcactatgtatggatcaaatgttgcaccgaactaaaacattctttcgctatttgctgaaacattgtttttatataaggtgaaacaacacccgatttaaatgaatgaaacattttcgatctacttagtgaaacaattccgatatacttgatggaacatcgtgcaacatttaaaaataattcaataataagctaacttttttcatcggaatatatccatgtgtggtcttgttttgaaaatttaattgcaacgaatttaatagtgcaatcggatcataatttggataagtaatttaagagaaaaattagtttaaaatagttttgcacgtaaatcggacgcttcagccccgatttttctccaaaccgatcgggagcccgacccgtagactcgtccaggttcctctcaaaaaattaatcaattttacactaaaatgattgatacatctaaggtaactagtacataattgtgtcatgtttttaaaatagaaaatatagcatttttggtactttcttgaagatgataaaattaccattattttgtttgttttgcgtgagtcttcatgtactactgcaggaacctgcag

SEQ ID NO: 10814 - DNA, 617 bp, Oryza sativa
  Intron number 1 from transcript LOC_Os09g30466.1 (locus LO C_Os09g30466) derived from phytozome v7.0 (chr-ID Chr9; po s 18567046 to 18567662 reverse strand)
acctcttcatcacccacgcccacctcgaccacatcgtgagcgccccgagccctgtcctggtttgattcattcctgtgctgcttgtgcttcgtgaatttcgtgtagaggcaactgcgcctctagctaagcttgggtgcgccatcggtgaagtttcatagaaaagctgatgtaaggggattgattcagtaatttcaagggaattgtcaccggggaaatgcctgcttaatttactatttggactgtggcctttagtaaatgtctgcttagtttatttgttcaacaacatgctatcgtgaattcgtgatggataggatttttatcaccaattcttctgataagttggcctaagttagtctgcgtgtaattcttaaataataaatagtctcatcttgctctatacctgcttttactttggagcggtgtcaagaaaatcatgattgtgccaacatatttctcctttgcatagcaacgggagaattttccaatgtttttccctttaaactgacgaatatgcttcactgtcagtttttccatttgctgctctaacagaatcacaacataaatgcagccatatccacctcagttttgttattttgattgttcagggtggtctccca

SEQ ID NO: 10815 - DNA, 744 bp, Oryza sativa
  Intron number 2 from transcript LOC_Os12g42044.3 (locus LO C_Os12g42044) derived from phytozome v7.0 (chr-ID Chr12; p os 26050403 to 26051146 reverse strand)
gtaaacctgaaaaagctcattagtttcacccaaaggtatactctctgagtctcattaagtccttacctgctatcactcgttcaacttggttaagcacagtttgacatccatagtttgttccatctggccttttacctaccccgcatttgcacaaatagtttcctggtatgttctggcacatcccatgtctgcagggatatagctctttatacttgggatcctccttacgcaacttgcactcatctatgtctgaatagaattgaaacagacaagtatgtatttgggataatacaatcaaagcttgaactattttggcttgttacggaagctgaaaaaaaggtactccctccgtcccaaaatataacaacttttagcacttaggatttgttacaaaatatagcaacttcttcaccaacattccattcccaaccaatcacaaccctccaccattcacttttcccacctacctccacttttcaaccaattacaacctcttcctatttaattctacacactttcttaataaccgtgtctaactctaaaactacttatattctgggatggagggagtaacaaaaagaataaatattacgcagcagcattaaaactggctataattatgttctggttatgttgttattcctggagttgtttatcttggtctccaaatataatctagagaaagtttatatgtatgttaccttgacagcctttgggaagataaggattcccttcatatccttc

SEQ ID NO: 10816 - DNA, 848 bp, Oryza sativa
  Intron number 4 from transcript LOC_Os09g04210.2 (locus LO C_Os09g04210) derived from phytozome v7.0 (chr-ID Chr9; po s 2218145 to 2218992 reverse strand)
aagattgagcccaagttagccaacagtctcattcggtaaaggactggaactccacattttctccctttttaatgctaattatagcattctcatttacaaatttcaattcaggaatttagaactgaatttaccaagaacttgaatggattgtttactctgttctgcgcaatttagtcgataaaaaaacagagagatggcattgttttaggttacgctgtattatgaattttataatgttacatttcgaatttaatttctcttgataggactttttctttatgtcatcgtctaagagttaaataaaaatcttaatttgaatatttcttgtcaaaaagactgaatacatatttgtttaattcatttcaggaatcattgggattcagaatctaaaccccaactaatttaacagaagcttatataatgatttaattgtaaagaatgtacatatattgattacaattcgtatgttggcatgaaattggaattttaattgttttgttgatagtttcttcaaataggaagtttgaattatgtgtcacagttgcttaatttccgatgtctaaatggcatgtgtatctttattgagtgaaatacatgagcagtccctaaacttgtgtggtggtgtcacttaggtccctaaaagtggtcaagtttagggacctaagtgacaccaccccagaagtttaaggaccggccatgtatttcacttatttatttgacatgtttgtctcttcttttcatgtgctgttatttttcttttgttacggtttgactataattaacaagtgggctatatttagagcagtgatgttatcaatgtgactgggtttcaggcaattgagtcaagc

SEQ ID NO: 10817 - DNA, 925 bp, Oryza sativa
  Intron number 1 from transcript LOC_Os09g35860.1 (locus LO C_Os09g35860) derived from phytozome v7.0 (chr-ID Chr9; po s 20637759 to 20638683)
aaggcccagatctgggacaccgccggccaagaacggtaaccatccatgcacacaccgatcatcttctttcctcgcaaacgcatcagttcatacgcagttatctagactcatgacttagaaatactggaaagatcatttttacttgtgataatactgatagtatatataatagagcaacgcaatgatagtcgctgcgaaatcgtgatcgttgctgcgtttttgttagcgtttacgtgttcaagctatcccaactgatctggctgttcttgcatttgattagtaatttggtactccatatacttactccatatacttacatagcgtcaatgactcatgttctgttgcttgctgcgagggagatggtgtcacatgcatgtcagccaagacaccagcttcattttgctttcattgtgattaattaagccgggagctaattggatcggtacaaggactcgtggaagattggatttgtattggttgggaagataaggatgcatgtatagtggctgtcagttttcatgaagccagctgaaattaaagctatgaaatgcgatgctactactagtagcttctgctaaagacaacgcgtcagaacagagcacgccgaccaccgaaagtgatccctgcaagaaccactaatgcctcctttttgcaggagaagatttgatagaaactgtcatgtagcaaatcagtcattacctgcctaatctaacctgcccttggattaggcagttgtcgcctaattaagattttgatctgttttcaatgcaacaaagcgggaattctgtgtgcaattcgtgtgttcccgagggagactgatgtgttcgtggcggaaatatttgaatttttggaggaaatttgagcgaagtttggtctttttggtttcgcaggtacagggcggtgacgagcgcgtactaccgcggcg

SEQ ID NO: 10818 - DNA, 960 bp, Oryza sativa
  Intron number 2 from transcript LOC_Os09g36100.1 (locus LO C_Os09g36100) derived from phytozome v7.0 (chr-ID Chr9; po s 20787595 to 20788554)
gcaagacgttgttgccatattgccaggggcttgaggttggtttccatctcgtagttattaattacagtatggaatctcaattcttttcgtcgatgttgatatgaggttggtttccatctcgtagctgcagtatgaaatccttagttctctccattgatgttgattggtaatcacaaacatattaatgccaatgaggcaatgacttattatgtaggtagtgaatcacaaaacacgtgatcataggaatctcctacaagaaggaattagagtagtagatgttgatcatactatcttccatgatctttgcattagttttaagacttatatcaaatctcaacattttttttatttcagacaaaaatctatgtttgcctaagcactgtaactaaatgtgatagacctatcttacgattttcgtgtatcaaagcttctttacataaacctataatacgacatttcacacgtaaaacatctgattgcgtaatactggaagtaatcatgctaggcatattttggtatctacatgtatcaaagattctttatgtaaactacaatatgatcctgcaattgagcactagtttcattcataagcatccagaaggattttcttttcttgcatttccatgtgtaggatattggttggcatcatcaacctataaggttgaggtgggaccacatttgtgcaacctgaagaatggttggtaattttgttctttttctgactgcttggtggttggactctgttcacttattgacactgctctctgagaacaacatgaatgaaacttatgcctcttaatagtttctgttttttattgaaaacacatacatgtataagtgtatattttatagtcattataaatcttttttgtgctagcctttgtgctttgcttctgtctaatgacaatgaaaaatgtcactacagctattggtggacagcagattggttgagaagaaatc

SEQ ID NO: 10819 - DNA, 797 bp, Oryza sativa
  Intron number 2 from transcript LOC_Os11g05140.1 (locus LO C_Os11g05140) derived from phytozome v7.0 (chr-ID Chr11; p os 2255290 to 2256086 reverse strand)
atcctactcatcctgtcagcaagggggttgcgaaggtagaacttgtgccaaccgttaagtctgaaattgggattggcggttcacctagcacaattatagtttgtttttccactactaagttttgtagattttttccagaaccaaaaagaatagttgatagaaatttcaacttgctgtccttgtatgatcctagaggctagataaatcgatccaatatttgtacttctttttgcctatcaactgttcttttgctgcataatctatgtctttcatatgtgcgctgtgaaaacatgatttcaagattgagaacgaaatcattgaagttgttactcattagaagatcatgcatttctcgtgcacttagttcaaatgggcatatatgataatctttgtttacaagaactaggttgtttagcacatgcatgataaaaagtgaaacttcaaaggcatctaatcaagtcaaggatcttgtagtgcgcatttttagttctagtgagaacagaaactctaatacatcctatattcctatgatagatgtggtgttttgtaacaaaaaatgctggaattaagttcaatggaggcatatctattgcaaaccatggtttggattgtacattccatttttcagcaccagatcagcacaaaatattcccaaaacaaggtttttcatgattgcatctaaatcttgtttgcactttgtgatgattttgttcgcatacaaagttcagagcttcctgtatcacctatatacatttgcaaagtcttagtcttttaaataatccaggaggtccggccat

SEQ ID NO: 10820 - DNA, 761 bp, Oryza sativa
  Intron number 1 from transcript LOC_Os09g30400.1 (locus LO C_Os09g30400) derived from phytozome v7.0 (chr-ID Chr9; po s 18498900 to 18499660 reverse strand)
caatcattcggcggcgacggccccgcccacttgaggtaccagttggaaatttccccccttttctttgtgcttttgtttttgctggtttgtgcttatctcttactacttgaggtacatctttttgaccaggtttttttttgtggtaacggcgatttttggggataaagtttgcatcttaggtcgggattttttcttgtttcagtggtggaatgtctccattttgagcgaaattgcgtcttttgtgggttcatgtttggggatttgggggaaatcgtgcggcctggtttgctgtggtggggaatttttttcttgtttcagttgattggtttctccatttcatatcaaaccgtgtcttttgagtttctcgtgcatatatggagaggatatccatggttatctagaaaaaaaatgcaaagttttcaacttgctctgtaatggactcttccaacgttttgcattcatttcttgagctcctcaccttggttttcttcattattgtgttcaaacctactctgatcttggttctgaacttctgatgtttgtctggttactggtcatgtaggattgatggctttgtggtctggtctcttgctaacttcttgtgcttctgtgattctgataagcttttcttcgtgttttgtgtagagataacagtttttttctcttatcaattatgctatgagatattccatgtttaatcaggactaactaatgctgtattacctgatactcgtttcagttaaacttgattgctctgtcgc

SEQ ID NO: 10821 - DNA, 899 bp, Oryza sativa
  Intron number 1 from transcript LOC_Os10g23220.2 (locus LO C_Os10g23220) derived from phytozome v7.0 (chr-ID Chr10; p os 12044021 to 12044919 reverse strand)
gccgacctgctcccccatctggttcgaatcgaaaggtatatcctcgttcttctgtccttggcccttgttccactccaaccttctcgacgccgctggatggatgggcggcttagattcggaatccgtccgatttgggattgggtttcttcccgtcgaattaacgcatccggttctttgtgcatttcgttttattttatgcgtggtagagagtactagtagcatcttgtagcgtgtgtttccgtgaaaacaaaattgatttggttgggggattatgtgatggtgaagccatgaagctcgccgaccactgtcacagtgtgactgcagagagatgggtgagagagggggaggaaagggattgatgagctttccctctgtaggctacttgcgctatcgcaggagatggcttcaaatggatccttgttccattgcaattgttgggttactggagatgactctggagaataagatctgaatgagtaaaatgtggttcgtatcgtgccccttgggtaacccggccatcgattggattgatgttaggttttgcaaaagttgaacttcattttgtagtttaattttgattccctttgtttggcgtgaatgcagtcgtatctctggagaatttttgctgaaacgttaaatgtgttagagcaatcgaatgcttgtcgtggtttactttgtgcgaggatcttttttttgcctcatgctagcatgtgaactgcttatgaaatatgaaccattgctatgttggtgaagaaatctggttataacttttgttgaatgcaatttgtaggtctagtggtaaatgtatgacctgacttgaatagtatcttttcaggtggatgccaatcggttggtcggttaaaaacaactaatttagctgatcctgtggggaagaagta

SEQ ID NO: 10822 - DNA, 650 bp, Oryza sativa
  Intron number 1 from transcript LOC_Os10g35660.1 (locus LO C_Os10g35660) derived from phytozome v7.0 (chr-ID Chr10; p os 19000967 to 19001616 reverse strand)
ctttaggtttgtttttttttttcaccccttgatgcatacacactgttctgaacattggtattaacattaacaaattgatgtgctcccatcataaactaaaacgaaaagaaaaacttgcttatgtgaaaattgtgtttttttaatcaaatcgtcctcttcattggagcattttattgtagtcaagtaacctcttgcaaatgatctgctgttgctgtctagatcagttaatcttctgtttagggtaatagaaaatagtaggtaggtaaccctgttctactgcatgttatttactgtaaaaatggaaggcatgtgcagttacttgactacaataatttgtgcaacttttatgatctcaacagtttatattagttgcagaaaacactacaaaaattctgtttttattactagtagccccattatttatttatttgatcaatcctctaactgtacagtttcttattaattttttagacaagaaatatttctgttaggagtttaactgctatctattctcttctgattctctcagaaaaccatcactatatcgtttgctcatatctgacttgatcatggcaatgtatgaaacaagtgttttttttttccgatggttcgcagggctgcagaggtgtggccggagctgccgttcccgg

SEQ ID NO: 10823 - DNA, 828 bp, Oryza sativa
  Intron number 1 from transcript LOC_Os12g25650.1 (locus LO C_Os12g25650) derived from phytozome v7.0 (chr-ID Chr12; p os 14845127 to 14845954 reverse strand)
aagctgttgccactgaccggacaatccgcaacctggtagacaaacattcctaagtcttcatcaatgatccaaatgcaaacatcaataaatagatagaaaaagaaagtaaaaaactctagacaatgctagcttcatagacatcataaaagaccaatcataatctaactaatatacctaaatcttctaaatactttatttggaagaaacctaaaaaccttactggagtaagtcgaaaaagggttccctccccttgtcattggccaaacactagagacaaaggagaaggggaacgaaggctaatggcagttgaggccaccctcagcgattacaagtaatgaaatcttgtggaaacattttttcttcaattgaaagtattgcacattttagttgaaaataatttgttttgaaggtgaatttagcatttatagttgaaggtggcatttgtttagtttgagttatgttgtattttttagttggaagtttcatgcagtttttgatatggaagatgaaattacattcctaacttctactccctctagtttttaatatttaacaccattcacttttgaacatccatgcaccattggtcttattcagaaaactagtgcaaatatgaaaaaaaatatgtcatgtttataatatgtttaataacaaaacaaatcacaataaaataagtaataattacacaaatttttaataagacaaattgccaaatgtatgtccacaagtcaacaacatcaaacattataaaaactggaagaactatattataagatgaactcaaccaaaagtttccttatgatatattaaattaactgttttggaggt

SEQ ID NO: 10824 - DNA, 477 bp, Oryza sativa
  Intron number 1 from transcript LOC_Os08g39490.3 (locus LO C_Os08g39490) derived from phytozome v7.0 (chr-ID Chr8; po s 24984091 to 24984567)
acggaatatcgtccaggcaactagtaatgatttcttcttttaagatgctctttgccatgctactactagtagttgcttttgctgatgattggtttcttggccaatggtttggttgttgttttttttaaaaaaaactttcagggggctctgatttcttgtttcagttaaccgcccatacgaaggagtctactggcaaaattttgctctctattttttttttctgcggaatgatttcattttgatgtatgatagcacttcatagtatgataagtctggattttgattcactgcataatcttctgaatcataaagttggtgttttcctcggtgtcgatagtgctcgatcttaattgggcatgctttggttttaattagttgatcgcctagcaaaagttgctacaaattataatgattaatcatttggactttattatttttccaggtaccacaattctagcagagattataaatattcag

SEQ ID NO: 10825 - DNA, 752 bp, Oryza sativa
  Intron number 1 from transcript LOC_Os12g34380.1 (locus LO C_Os12g34380) derived from phytozome v7.0 (chr-ID Chr12; p os 20805203 to 20805954)
tgcacgggctcgtcgtcggcgaccgcgccgaccctgtaacgcctcttctcctcctaatttggtttcacaaatcgcaagcgcctccctctcgcctccatggagaggttgggatctgttcttggatcggctaaggatagttttaccaagatcgagctataggttggactcgtgattctttcacggtttgagtagttactggtgaagtatacatgagtagcagtgtagcactgtgagtggctgagagtttactaataattttgtttcatcgcacctcttgattactgataatttcctatacagatgatgtaggaaacacagaaatatatgtctgcaattttgtttccgaaagagcaaccataattgtcgggaaaagtacatgagatgttataacattctctttgattcagctatcttgaaaaaccactactttgtttatagtacccaatttcttcggtaaaaccactactttgtttcttggacttcttaggttactttgttttggtttaggtagcgcatttctgcatttcactcttggtttggctgtgcttaatgtcttttggcagaatggtagtactagatacagaaaacatggttgcctcagaatcaactgttgagtaatatagtgaaattttgtggtaaaccttcatgcgatgaactgaattgaggtgtttgaaaagcatttgtcctgattataacattgtcattgatctctttcagcgatctggaacagtccccggcgttggtttggttca

SEQ ID NO: 10826 - DNA, 1043 bp, Oryza sativa
  Intron number 1 from transcript LOC_Os11g04740.1 (locus LO C_Os11g04740) derived from phytozome v7.0 (chr-ID Chr11; p os 2018409 to 2019451 reverse strand)
ccattcgggagcagcaggtcggcggcatcattcaggtcagttctgtagcttctgctggaatgaaaagaatatgtagctatctagagtgatttattggagacttgatagtaagaaattaatgattttaccagtcagtataaaagtataattggcaaatttgttggatatgttcaatgaaatgtagtagaatttgtttcaattgacatcaatagaactttcccagataaattggtgagatagagaggctttctgattagacgatagtcatccaacaaaaagtaacaaatcggaaaaatgtcacggttatctctactctacaatcttgttgtaattttttatgcatttgatagtaatttgtggaagctagaaatgcattcactgtttgttcttaacatggcattgcattccgatatactgaaaacttccgcagttattgttcttccttgtatttggacaaggaatataactttttttttgtcactctgttatcacatatctgttgattctcatgtatggaatgacatggctaccttataagcattcactgagtttactgttgaaatgatggaaataagatctactgtatgttgttcccttcgatgaaagttggcttaagcttgttagggaagatgtgtttgtggattaggtagggaggataaagaagtactacctccgtttcatattataagtcgttttgaattttttttcttagtcgattttttttaagtttgacaagttaatagaaaaatgtagcaatattttcaacacaaaacaaacatattgtcaaaatatatccaatgttacatttaatgaaacttgtttggtatagtagatgttgctaaatttttctataagtttggtcaaacctaaacaagtttgactaggaaaaaattcaaagcaacttatactatgaaacggagggagtattactcaaaccagaataaatagatgggacttaacatgcagttcaggccatatgcatttctgtacagcttacctcggaatcagatgatcatttcatgactgattgcaggttggtgccc

SEQ ID NO: 10827 - DNA, 713 bp, Oryza sativa
  Intron number 1 from transcript LOC_Os09g11280.1 (locus LO C_Os09g11280) derived from phytozome v7.0 (chr-ID Chr9; po s 6261762 to 6262474)
ctcctccacttactttgagcttagtaagtgcaaaattgttacactgatatgatacatgcataggtgcaccaaatttgcataaaaatatgaaatttgccaaacaaggctataaatatgaaatatgccaaatagagactacttgagtatgttgaaacttgcaatacatgtatagatagtggttagatttgtttatatatgggtgagccaacatgatgttaataatgcagaaactcttgttgtgttcgtcttgcagtagtgtaacacaaaatataattttgttccattagtgataatgccttcaccaccataaaaatgcaaaacaaagtactcctttcggcatttcatcaaacatatgtcatgcatgaccaaaattgcaaaattgcccgtatatggtagtaatgatcttgacgttacccatcttgtacagagaagacctgcacaatcaaagtagtaaaccaggagccaaaccgccaaacccatcattaacacccaagaggtcaatatatataatcagatagatctgcctccttttgcaaagaatgattttcacccgttgttgaggaagctgacgaaggcggcgacgggaagaggcaggaaagaagtagcagctgaggcggtggtcgtcaccgaactgtctatcgagttcttagcctctcgccgttttctggtgctctgtagcactgttcggggtggacgcggcggacgtcggcaga

SEQ ID NO: 10828 - DNA, 405 bp, Oryza sativa
  Intron number 2 from transcript LOC_Os12g36310.1 (locus LO C_Os12g36310) derived from phytozome v7.0 (chr-ID Chr12; p os 22197079 to 22197483)
ataggcgaagcggcgggagaggttgaaggcggcggttgagagcagagacagaaatagagaaagaatgagagagggagaaaaggataaggaagaaaaatgaaaaagaaaagaaaaaaaatcaaagggttgaaccgtacttacacagctgtttctctctccaattcttctagatataataaaataatcccgcgggtgtccaacaactataattaccagttttttacagtgctctatagcagaaacacgttcttgcgttgtctcgtagctaattacactttttttggatatcctgtagcaagatttgcctattaattaagaagaattgttgtgccttcactattcctgtctactgagttcattaaaacttgatgatactccatatttttttttcttacagggtcttcg

SEQ ID NO: 10829 - DNA, 765 bp, Oryza sativa
  Intron number 1 from transcript LOC_Os10g39790.3 (locus LO C_Os10g39790) derived from phytozome v7.0 (chr-ID Chr10; p os 21228459 to 21229223 reverse strand)
tgcagaaggtactattagagatagagtagtgcgtgcctttggtctggcaaagttcaaagttttcatccctgtttgactgtctttattattgcatattaatttgactgatcaaaagctatattcatagtatgttctagctgttcttttctgtggttaaagtttaattgcactaaggggcatggatgatccaaacaggccctaagacaataatatttcttctttggagctatgtggatataactgaacttaaaagcagtaccgaatatttgttcaaaagaatagtgtgcctgacatagccagtataattttaccatctcaaacttataatagttatggttcaccgtggaccaatcaccaactgaagtctgctgtgccgtggtcctgtgtgcacgggggaacaattgtttcatgtacatagagatgttgtagtgcatgtgttgaaagagccaaagtcttcaggtgtatatactttggattatcaaaatacatgtttatataattttagttcttactgtatggttggaacttggggcatataaaacaaaaggtggttataaacaactgattttttttttgttcgtgatgttctatgtacctacctattcatttctttttaaagcttgttgattttattttatatgcagtattgctgctgggtagtttggctgtacttttgagaaccttgatggttacctgcatgctgctctaaacaagggtttcttctgaagatatgtatcttaaccctcatatcatttcaggtcagag

SEQ ID NO: 10830 - DNA, 930 bp, Oryza sativa
  Intron number 2 from transcript LOC_Os12g39420.9 (locus LO C_Os12g39420) derived from phytozome v7.0 (chr-ID Chr12; p os 24213930 to 24214859)
tctcgcctactgcgtccactccaacccttcctggggtaaggaaaccccaaccccttcattcctcctcttttttatctttccttgtgtgtttttgtgttggttggtgaatggattggatatgatgaatattccctttcatccctaaaaatttgggagatttgatttttaggagtatctgctggttggggtttttttgactcaagatattttttgcctttggagtgggggagcttctgtgttgtgttgtttttgtatgattcttgaattggggggtgtccagagatatttgatgtgtgttttgatttgaagatttttttttagcataactcctgtttcactcccctgctaatatttgaagagattatggtgtctactggtgcacactattgatgttttccagagagttgtagctactattattttttatagactagtaaaaggaattggtggtggtgatgatttgctttacaccccactacttcatcagatctttagtgaatggatctatgtagacatagctattgtttgtactactacatgcttatgtatgtagatgttgaattctttgtagtacatacgtatatgcagttgctggttgacctagtgtgaatattttaattgtgaaggtaagtataactgtatttgtgtaaccatggaacttttgacatgttcatttgagatcccctgcaatatagaggcaaacacactagttctgtcaaaagaatcttagaagagtagtaggatgttcaggcaaaaacgctatgaagtgctatcttgatttttttaaattatcaaatgtacttctggaaattaaattactcatgtcgattgcagaaatgattaagacatataaagcttgtgctcactaaattactattgttgatattaccttcagttcaggtggccgcacttgcattcctccactatctt

SEQ ID NO: 10831 - DNA, 467 bp, Oryza sativa
  Intron number 1 from transcript LOC_Os12g32840.1 (locus LO C_Os12g32840) derived from phytozome v7.0 (chr-ID Chr12; p os 19819294 to 19819760)
atcgacgcaagggtgtgcacggcccacgaaggagggtgagttggcatgcgcgcattctgaggttgattggcggggtccatggctacttgggcccagtagtagtgagaaagagagtggggaatgggactagaggctaaggctgggtttgatcgaatcttctacttggctgggctatttttattttttccatggagcacgcttttcaaattaaaatggtgtctttcgtacaaaaacaaagagtttcttaaacatcaaataaatatatttgaaaatttataatagttaatacttagtcaatctcgctaatgagttgtctcattttgcgaggacagatcagctcggccgaacagaatgtttgaacgcagcctaagtgtcatgatgtggtcagttagttgttttcgcccgttttcaccaagttagaaaatggttaaaattgtgacaaaattactggtgcagtggttagcatt

SEQ ID NO: 10832 - DNA, 707 bp, Oryza sativa
  Intron number 2 from transcript LOC_Os12g40730.1 (locus LO C_Os12g40730) derived from phytozome v7.0 (chr-ID Chr12; p os 25183057 to 25183763 reverse strand)
aataaggtgcgtgtaataattccattaattaatttagacaggtcggtatatatatgtgactgtgatatgattgaagatgatcggagtaaatcatctacagagtaattttttcatgactacttatctccttaagaaatgaaattactttccctaattaatatctaactgaaaaattataggatcgagtgtagcccctcaaagtttaaatttaaattcgtgtccttttaaatttgcttaaacttttgggtgaactgtctggtgcgtaaacaattcgataatatcgatagttaattaatttctcttcgaaccaaccctttatctcgcttattagttacttcctccgcttcatattataagtcgtttgatttttttaataaaattaaacttctttaaatttaatcaaatttataaaaaatatactaataatattttcaatgcaaaacaaacttattatcaaaatatattcaatgttaaatgtaatgaaactattttgtgttgtaaatgttgctaatattttataagcttaatcaaaaataaagaaatttgactaagaaaaatatcaaacgacatacagtgtgaaacggatgaagtacttgattaataagctgattagtgaaccatatctctcagctgatctctgtacattaattctggagctgatcactctgaatctctgatgagcctgatcgtcatgcatgtatcacagg

SEQ ID NO: 10833 - DNA, 339 bp, Oryza sativa
  Intron number 1 from transcript LOC_Os11g03140.1 (locus LO C_Os11g03140) derived from phytozome v7.0 (chr-ID Chr11; p os 1130728 to 1131066 reverse strand)
aacgtctacatcttcaggtacctaacctagctgattaattaatttgttgatgacaattgataaaccttctttttctttgataaatgataatagctttgtatacatgcacggtttagttaattaattttctaatctccatacataattaacttgtacacatgctactaattatgatcacttttacttatttaggtgaaatcaatttatataacttttcatccgtggttggtactagtgtattttgtttttatagatagggaagatttttatttgtttgacatgcacgtgcgaattctttttttagaaaaagaattaaattattgttgaacaattgtaata

SEQ ID NO: 10834 - DNA, 1002 bp, Oryza sativa
  Intron number 1 from transcript LOC_Os12g38560.1 (locus LO C_Os12g38560) derived from phytozome v7.0 (chr-ID Chr12; p os 23641204 to 23642205)
ggaagaggaagaggaagacgaagaggaccaagaaggtacatgatgagttctaaatcgcttatctgaaattaccttgttcaattctcggttttaaatgttccccttcctatttagttagtgcgctagccacagagttcttgctcttcttgatgataggcaacatatatttctggtttaaagtaatttcaggaatttgattgtcttatgataaattgataaaccatgctaaagagaggggaggggggatagcataatgcaagtctgctactgctgaataacctgaaatgttgttccacatattgcctcattccatattgtacaagaaacagaagaggagcattaggtacatatatagctgagaaaaactgactagcaatcttttctgaactattatcaaggtgcagttcagttcaatctgtgttccctctccacagagttacagtgacgtgcttggagaatgttagcaactcaattttacatgccacagtataatgttaaatgcagtgcagtgccagtggcagtccaccattcagttaatctagtgcctccttgcttgtttttttttatgttcccctctttgattcagactgaaatagaattgaaaaaagaggtgctaatcaatttccttaattttttagcttgtgattgactacctggattaggatttaggatccagtgcttgctctttgattgggtgacacttcaaggaacatcactaagaacatcttgctcgaattagttcctacctgatcctacttgttatgaactttgacaataataatgcagaaaaaaaaaacatgcaaccttttattttacgttcagtatacagcctttttgacttgtcgatttccattgccatgttttctgttaattgtctaatttcatcttccacacatatgattagatggtggtacatcaaactccagagccatggaaattgtttgagttgatttgattatcctatgattttttatgtaggaaagcaccgcccttttacagttg

SEQ ID NO: 10835 - DNA, 944 bp, Oryza sativa
  Intron number 1 from transcript 13113.m00169 (locus 13113. t00042) derived from phytozome v7.0 (chr-ID ChrUn; pos 110 177 to 111120)
tacgtcttcaccgatcggctggccttcgccgactggtgtttccgcctgcacggctggcctattatgccgccgttgttggatgtctacatcttcaccgttggctcaccttcgttgccgtcgactggtgtttccgcttacacggctggcctattatgccgccattagtgggcatcttcgctttcaccgtcgaccgccttcgtcgccgccgacaggtgtcttcattgtcattgatggactgtttcgttcccacatcggctacttctgctgccaccgagggaatacgacaaagctaagtcatcatttattttattctttatatgatatttttccttttcctctgcctcactacaccaattggtcttccattgagtagtgagtcgggggctacagatgttatatcatattttttataatatttatcttgattgcttgcgacataatctgagtacaaaagtacctatcgagttatggagttctatcttcctatgctttccgtttggtttgccaatggatggttgcctttgggccgattcctagcacccgggggctcgttggatggaccgagtaacgcaaggtgctaagtattattcggaataaatcaaaagcatagagatgagataaatttattttctgctcttaataattgcaaaagtacctaagtagtaaattctgatccgtgaaactttgttccattaatgacgaactcatgtcactcatatgcatgtttgggaaatgcctaggccgactcccgatgcttgggggctatgactagtcggacagagtgtttaaacgtacagagtcatctgctcggggaaatcaaaattgacaagaggagaaatacatatttataaatattttaaaatacttgattttttctcgagtattatatttatatcagatactactcatcctatatgtttgttctgcaggatccagatccagat

SEQ ID NO: 10836 - DNA, 558 bp, Oryza sativa
  Intron number 2 from transcript LOC_Os11g10780.1 (locus LO C_Os11g10780) derived from phytozome v7.0 (chr-ID Chr11; p os 5918674 to 5919231 reverse strand)
acaaatccgacaaggttgcgatcgaatatcaaaaggtctgatcctttcccccttcaatatgggtctcttgataatacatatagatctatattgctaccagcaatttgaaatattaaaaacaaactgttcttttgttctgtatgggaatgcaacaatatatttttggaacttggaacagcccagcaggtggacttactagatacctgtttctctttaaccataatggatgttttttcaacttcgatatatccaacgttagacccaatataggttttggacacttggacaatgtttcggtaattagggtgcttgttgtcacaggcccacaatcagtttatgctgctcaacatagccacctcaaacttctgcctcttgcttgtgcctactgaggccttagtagtttgttttcacagggactatttaattatacaactcaacttctgatagaatataagcgacaaacttgtgtacttagagtctcttagttaaatttgattcttccttttttttgctggagtaccagatttattgctgatatttttaaaactgaagagcggg

SEQ ID NO: 10837 - DNA, 1066 bp, Oryza sativa
  Intron number 3 from transcript LOC_Os11g09680.1 (locus LO C_Os11g09680) derived from phytozome v7.0 (chr-ID Chr11; p os 5165099 to 5166164 reverse strand)
caaagttttgaagtatctgtctacatttaacatacgtaacattcttcattttttgtacatttctgaaattttcttttcccttcatacgcgtgaaatgtagtaagcagtatcgaaactgtaagttcttgggaaacggatgttaggaccatggattaattgggaaatgaaagcatgcactgtatttggtatgattgggaagacattatctagactactcttttggctagtattacttacaaaaacatattaagatttctaaaattttcttgcatcacataactagtatgtcaacatgtatgttagatgtatgttattatatctttcaatcatttgatttgatttcctttcccatcagttgtatatttgtgaaagtcgatgttgccatcttataacttgcatgtcatttgccatgtacacaagtactacctcgcataccattttatctcgttgtcaaactctattattgtgagaaaactttgttctgctgtaactatcagtttaccgtaccagaggtgctgagtgtgacagcttgctgcactacccatcctggttatatcatagcagctactagaaaacaataattgggaaagattgcttagcagttttgtttgcctaaggtagtctttttcggtgacactagattttatttgttatgtccagcgcctggtgtggcctggtgtccaaaaatcttatttacgaagtgccataagtatccgtatagtccctagaccatgcaattttctccttgtcgtgtgctaggctatagagaaaccagcaactatgcagcataggatgcaaccatattataaaggaccaatgcttctccaagtgagggcattttattatatttcctttctttgaatgaagtagtggacataatcagattttagttatggagaagtaatgaagtctttatgtcaatttgtattttgaagggttgtcaatggatttgaagtttttattttggagtgaattttcaggttggacctcttgaaacttactgtgctattcttatttgtttctttgtgcagtttttagttttaaggaaatcgagattttggaagga

SEQ ID NO: 10838 - DNA, 689 bp, Oryza sativa
  Intron number 4 from transcript LOC_Os12g02910.1 (locus LO C_Os12g02910) derived from phytozome v7.0 (chr-ID Chr12; p os 1072575 to 1073263 reverse strand)
tctacactgtaagccagggctttgttgctattctggtattaccaccccaaaattgttctttgccaatgacactgacaaatggacttggactgttgctgctgtgagcaacatttctgatgaactgcacatctttccattttaactggtcttatttcttttatgtttttcttttgggccttacattgttgccttgctttcctcctaactgctgttgtcacacctaattttcaattaacatgctgttgtgaaaaatatatctactaatttaccctgcggtacttgcatgtaaatgtatatgtcctgtgactcatgtaactgaaaactgctctacagcactgcagcagactcccaagtggggcttcggtcgaatactatcgcagtatgccactacggctatagtatatttgctattcgtgcctggtatcgtcatgttgggggtgtaacatatggattagcagttttgtactaaatgtattgtattacaaattaataccaagtagatgaatcagctcgtatgcgatatggtttacactgctgcctaaacttattttgaatgtgcactgctattgaaatgaatcacccatgccattttgatatttgcttggttacaataatctttaagagcttgctccactgacctctcaaatgattcctattattttggctaatctcctttttgtggaaccagg

SEQ ID NO: 10839 - DNA, 912 bp, Oryza sativa
  Intron number 1 from transcript LOC_Os12g32180.1 (locus LO C_Os12g32180) derived from phytozome v7.0 (chr-ID Chr12; p os 19396598 to 19397509)
gtcctcatcggcctcaccgcctaccaggcaagctcccctcacctcacctcctcccgtttcgcttctgaaccacgccgatttagttccaagatccgtcgggcgaaatagtggatctcctggtagttttgggtttgggatgttttaggttttttttgtcggaattttcgcacgaattggtgccgtgttgggtcaacgggtgcggttcttggtgttgctccttgcctcattagctggtcaaacaggacaggtttaggtagcgttaactgcgatttatacttgttttccctctctgattttccgtattcatgtaactaatgtgtttaacttgagggaaagttaataatctttgtataaatttgaactgtatatttcattaaattggtcctaagtttgtgcagtagcagatttatactagtttgttgaacttaagggagaaaaataataatctttgtataaattttgcacggtttattttattcaatttgccctaagtttgtgcagtagcagattttgtttgcttgctgccatgttaggtggaaaaacatatccttttccacagtgtgttttcagattacatagatggttcatagttgatgctcaccacatctcagtccaattcaaaatagccatattggttttgttggttgtgtttttgcaaccaatgttagttgccatgcactaacaaatccaacattattggaattccattacagaacatactttggtttaagaattgtacatttgtggtcgtttgaagaattgatcttggagatatatgtttcaactatgagcaagttgaatttgcaaataaaatttacattcttcctatcttcttgcaagataggctgtactctcttctttctcatttttatttcactgattttgttttctccttgttctgtaccagcttat

SEQ ID NO: 10840 - DNA, 292 bp, Oryza sativa
  Intron number 3 from transcript LOC_Os09g36300.3 (locus LO C_Os09g36300) derived from phytozome v7.0 (chr-ID Chr9; po s 20950250 to 20950541 reverse strand)
acaaaaacgggtaagatcttgtttgttaaaaatattagtttatttttgttgctattttcctgcactacattgtcataagtctgttgtagctgttattttgtacagctccacccttttcttccactttccattgtagttatgccgatagtttggtggtatattagtttattcttgtaccttctttgttaagtgccttttgaattcacctaatatcaaattctaacacttacattattaatgtttgtgcaatttgctagagttggagcacgcagagcaggacccagatctcatt

SEQ ID NO: 10841 - DNA, 499 bp, Oryza sativa
  Intron number 2 from transcript LOC_Os09g36300.3 (locus LO C_Os09g36300) derived from phytozome v7.0 (chr-ID Chr9; po s 20950667 to 20951165 reverse strand)
ggaaggagaccattcactggcacagccggtgtgtaacattgccatctttgctaatatgtgtttttccatatggtcatatctctgaacaagatttaaagaagaaattcctttgaatatgtcgggaatagtgggaaaacaatagcatacgattactaaaggtaaacaaactagtgttagtgtgggcacatgctcttattacattctatgaacacttgataagttgatagaagcaaataattttctttctgttgggcgcactatgcgttggtgtgacattgcattaacttgcagtgggcttagataaagcaagagggttaagattggttgatagtggtcaactcttctttgacacaattatttgattgagaactgttggaaattagtcaattttgttgtgttttcctacctgtctccctttctccaaaaaaaggtgtgtaacactttttcattccgtccatctataggggagtagctgctagggctttgcacctttccagag

SEQ ID NO: 10842 - DNA, 777 bp, Oryza sativa
  Intron number 1 from transcript LOC_Os09g36300.3 (locus LO C_Os09g36300) derived from phytozome v7.0 (chr-ID Chr9; po s 20951432 to 20952208 reverse strand)
gccatcgtgcggatccgctgcaccaaccccagcaggtaagtagtgggggcggcgtcgtcgtcggcgcccctcgagcggattccgcgcaccgcgagattggggggtttcacggtctcgggttgtgtgggttttctagggtggaattttgggtggtggccgatgggctgattgggcgcgcgggggtttgggtggtggatggattattagtccaagttaggtttaatcagcgtgtggttggtaaaatcgcagtagcttagctttgtttgatgctattgtattggcttagtcagcttagctcatgattcgtgaggcctttttcttcgatttcgtctgtggttttgtgaatttgtgtggagcaagtagaaattgctttttcttctttttctttttctgcttttttgtattgtagtcgtcacttgttgttttctcgatgggatgatctcgtctgtgatgtgaacagttaaaaagtttccagcgcagtttgatgaactcgctgaatccaaagtggtttagagcggctttggttgctttatggttgactaattcagctcctaattatatctgtttggtgttcaaaccttctaggcgtgttgtacttacttgtggttcagattagtattgagatttttcctctgtgtatgcgtacgatggctttgctagtgtgtgttgacttggtgggaagggaaaattctgccttttggtttggattttgacttcatcaatgtacttgtttctcctgcagtgtgaagcttgtggagcaggaactctggcaacggg

SEQ ID NO: 10843 - DNA, 901 bp, Oryza sativa
  Intron number 4 from transcript LOC_Os08g44430.1 (locus LO C_Os08g44430) derived from phytozome v7.0 (chr-ID Chr8; po s 27954132 to 27955032 reverse strand)
gacaacattgagaaggtatgtgctcaaaacagtgctttctttgctgaaagaatatagtatattgtgtacggaaacaattgttgtgtaagtaaggtttcccaaaaactctggattatattgttctagacacctaacagttcccctgttctattcatgtatggccatatttctgtgtgatttatttctttgatgaagtaaacgtggatatcatgtcagggtatgatgtaaacatgtttcaccttttctgctcaatgaaaaatcgcgtaaacttgtttcacctttcctgctcaatgaaaaattgcaaatggaaacattttcaatagttcatgggccacatcccatgctgcttggaagttcctgcagaatattattactgtgtgcagtctatgttgctatgcatagaagtgctctggtgtctgttggtgtgattaatttacgaattgaacaagtaatgatgggatcttgagttttaaaataaagatcagtttttcccccctttttgtgagttagtacatactgttgtcattgtggtgatgaatcgtctgcttattgttttgcccacgtatttgaactttttttttgttacaaagtcttcactatgacagtatggttattggcattctagtttcaatatcttgggatataggagtatcattttagttatgctgactttccaatatagaaacccatgtctagtactcctacccagtatgtaattagtcagtctggcattttacaggaagccagagaatgcaaacaatatttgtggcctcatgtcattttagtatttaactgaatacagaaaaaataaactcctttcttgatgtttcatactactgactcttactgtcctggattttgtatagatattggaacgtggagagaagattgagcttttggt

SEQ ID NO: 10844 - DNA, 1010 bp, Oryza sativa
  Intron number 3 from transcript LOC_Os11g40140.1 (locus LO C_Os11g40140) derived from phytozome v7.0 (chr-ID Chr11; p os 23474597 to 23475606 reverse strand)
ttgctgtagagaaacgtgtgacctcgccactgctggtaattgcatcttatcctatttcttctatcaggctggtgcaattgttcaatagcacctatgattgctcactgcattttgacaatttagttcaagatttgactgaatttatctagctaatgtttgaattatcgatttcttaccagttcaggcaagataaatcttatccttaggtagacctgtattcttacatgattccatcaggatgatcctgtaaaacatggatgttgctggtgttgttcctcatgatcttgctgctttcatttttcacaactacatgctttttgtaatctccaacaaacaaaaagatgtagattagataatgctgtttagagtaattctgatggagtctcaatcttgttgaattttatgatttaataatatgatcagtttttctggcatgtgttatttttatttatgcaaatgccaacaaaacaaggacattcagtcaaacaaacacagaaatccaagtatttcacatgtcaaagcctggaacctaatggttcatggatatttttatttaaaaataaacaaggaatatattgcaactgaactctgaagtgctcatataggagttctttttcggttaatgcataaacaattcttttctttcagcaaatagcccagtttgtttttcttgtacgtcagctttatgggttgtgacaatctgacaatttattatatcttactctctgcgtactgtagtactttgtatgtcagtgctgttgttttttttgtttaaatgatatcatgtagaagtttttttacaccctataggcctattgcccatatatgtgttatgttaattaagaagttacgtaatacctctgcataatttgtaaaagttaactacttgattctgacagaacttgatgttagactcccatttcactcccaagtttctagtttttgtgtgtgatgccactcaagttatcttttctatgattatgcaggaaccaagcagtgtggagaaaatc

SEQ ID NO: 10845 - DNA, 981 bp, Oryza sativa
  Intron number 1 from transcript LOC_Os12g02589.3 (locus LO C_Os12g02589) derived from phytozome v7.0 (chr-ID Chr12; p os 893957 to 894937)
caaccccactgcaaggtactcctgccactaatctcctctgcactcgattcaactcattcccaactgatagctggtgttcgtaactatgtactcctatgtgtttacgcctttacggtagcaggtccaatcgctatagtaaaaatactaccgtgtggaatttgctcagatggtcaaactccaaacactctggctaccatttccattcatttctcattagaggggaccggccagtgatggtctggtactgttaagacataatttttcaaagctatgagtgtagttggcatttgtttcatttgatggtatatatggcaaaactgttgtatgtgcacgagagataatggttgtctcacatcttatacaagctctcttaggtttactagaaccaaacttttctactttgatatcatcttttttttccctctgtgctcttgcattgttcacatgctattaactcacttactcacagatgttttacttgcttcaatattggatattttcaagggagattaagactggatattttgttgcccaacgattacaacagcgtacaatttaggaagcagactgtttttctgaaggattttttttttaataaaaggaaccatactgttaatctgtagtgatttggttacacttgtagttttcttgtctttgcagttcattagatcaaatccatgtttctacatagaatgactgaataacttattttaaacatgttttgctaaagatagagaaatacataatgctttctagttatacgcttcctctgcaaagtactaaaattatttccatttcccattctacgctactagcaggatttacacagccactcattcatttagtacttgacatgtttttgagtagttcgtttctgctttggtcatcttttcctccttctcttcgttaatctagttactttcatggagtataagctgggcatggttttgtttgataacgattcaaatttgcagtgtgtgg

SEQ ID NO: 10846 - DNA, 852 bp, Oryza sativa
  Intron number 1 from transcript LOC_Os11g37880.1 (locus LO C_Os11g37880) derived from phytozome v7.0 (chr-ID Chr11; p os 21986294 to 21987145)
agctccgagaatatcttgacaacaagaggtacgtgtgttgtgccaccaaatcctgatggaaaattctatagtgatctcacattaatgttgaccactaattccattagatcttattaaatctaagggccaaatatctcttaccacctaggagatgtaatgaaaagaatattagtgccaagggtaataatgacaatcacaaactataacaagaaaagttcaggagaagaataataagagtaatcactatcatttagagtatgctaactgcattcagcacacaaataaagtaataacaatgagtattgtttatgaactggccgtgctatttgttttctcatttgacattaattggaacggaattttaaagggatgcatctagttgtgtcaaaccaaaagaataattgatagaattttttattgtatataaaacttctaacggcatgcagtttatttttatttgaacagttttagttaatttggtatatattatatgtgttttgatgaatcaagctagatatttttatttggcatgttacaaaattttgaaattaaaacattatcttcagaattatgtgttattttaaattttgtgatggtttgagtgcatttgtatatatcatatacattacgcacataaaaatggcttttttatgcgatagatgtatacatttctgcacaaaaaattatagaattatccaataaatcgctatggaaagaaaagatatgccaattttggatcctcgactctgtatattaaatagattaaatttattggatgagtacaccacacaataaatttaatctattcatgccctttctattaccatgaggatagatacttgattgtgattg

SEQ ID NO: 10847 - DNA, 916 bp, Oryza sativa
  Intron number 1 from transcript LOC_Os09g29570.1 (locus LO C_Os09g29570) derived from phytozome v7.0 (chr-ID Chr9; po s 17980820 to 17981735)
aagttggcggtggtgtgctcgtcctctagatcgggcggcgaaatcaacagccggcgaggggctgccagatccgcccgcgacggattgaggtcaaggtcgggggttcttgggcagtagtgactcggcactggcggcgagccgtctcacaaatgagaagatggggaggagatagagaaaggaggggattaggtggggaaatgggacccactgtcatgtggtcccactattatttaatcttattatttgaccgacatgaggtccaacatttttttattttttaaattgttaaattttgctttatatgccacgtcagatgaaaaccgagtcaaattagccacgcaagggccacgtcagctgaaactgccatccaaatcgtcttgggtcttattttgtgctggttttgacagttgagagacccgttgtatctggttttccggttgaagaatgaaaatcagattcgttgacaagttaagggacctcatatgaacttattcccatagaaaattagtctacggaaaaagtatactttgactcccttaactatcgctcgagtatgattcatgacctccaaccacaaaaccgggtatattgactccgccaattatcaaaaccggtgcaaacaatgtcccacggtggttttagaggtggtttttgctgacgtgacgcccacatggcagtcttgaccgagtttttgtcctacgtggtgcttacgtggtattagaataaaaacaaaatcaaaaaaatatgtgggagccatatatcattcacacaaaagaaaagtattgtgggacccacatgtcatcctccctctcctttccttcttcctcccctctctctcccttatctctctctctctcccccggcctttctcttggctggagcggcggtggcggcggttggaagcggcggtggcggt

SEQ ID NO: 10848 - DNA, 835 bp, Oryza sativa
  Intron number 1 from transcript LOC_Os12g41800.1 (locus LO C_Os12g41800) derived from phytozome v7.0 (chr-ID Chr12; p os 25858419 to 25859253 reverse strand)
accgcgcgcactctgccgccgccgattcattcttggtaccaattctttaccccaacccttcttcttgatccgatgcaatttcttgggttcctgttcatgcatgttttttttttttacctttaccgccgattcttggtttggtggtgtttggattgggcgagattggtggcggatgtgggaaaattttggtattgattggtccaatctggatttgtggggggaaagattgggttttgcaccgtggtgtggagcaatctggtagcttctacggttgtcacgtcccaattttattgggttagaattctgatgatagtgtgtgttcaaaggcttctggttttacacacctgatgcggcaatacatgcaaaagaaggaaaaaaaatctacctttgtgttatacatactctaattgctatattttcctcgattgttttgaagaatgtgcataggtgtctacctttttggacagtaataagaattcttcagcgttagatattatgttgcataaagatatgtgaatataatccaatatacacggtgatttcagaagtcactacctttacttgagacaaatttatgtattcccctctttgcttacaagtgtccaggtgtattaggagactgatctgtttggagtatctctacagtgttttggcatatgaatatagtatatttatgcgaattcttcatgcaaccatagatccactcatggattgtttttcttttaatgctcaaaactcattttcagattgactactccttttaagtgctcgatttgattctgacttctatcatgtgccagattgccctgtgaggctgcataaaggctccatcata

SEQ ID NO: 10849 - DNA, 791 bp, Oryza sativa
  Intron number 1 from transcript LOC_Os11g01594.1 (locus LO C_Os11g01594) derived from phytozome v7.0 (chr-ID Chr11; p os 345710 to 346500 reverse strand)
cagagtccacaccggaaggtcatagagccatagaggtgaaataaattcccatttcttgctcttcttcgtattcatttctatattcattactgatgaatcatggaatgtggcgtgtccttatgtcaactatagatttcatagcttcgaaaaataatactcctatatgaagaattagtctagatttggaatcacttgttgttaactcttctcgtagcaaccgctaatgtctagaatattttattcaatgagtttggttatctctcggtagaatgaaataagcaaagggatagcacgggtatcagtttttttttttaatgagcacaaagttaaactgagttttctgtaaaactatttcgcatttgttaaaaaaaaaaagatagatagaccttcctgctacgaactagtatttgttttcctactgatgcaactattaacatttcactcgtcatcgaacaagtcttgatcacctcccagcacagatagttttgcctcacaatgtctagtagtagattgggggaacaaatttctcacatgttgtaatatgtaggaccccttttgcttcccctcaacccctgtacccttcacaatctgtatgtaaatattacaattttgatcaatactaaaatgttcaggctggccgcatgccttccacagttttccttcaaaaaaaattgtggtaactctgaatgcccatcccaaaaatgccacgcccttcatggtttgttcatttgattgactgccctttttctttggcagctagcaagagctgagtggggtgcgagagtaaaaaa

SEQ ID NO: 10850 - DNA, 1009 bp, Oryza sativa
  Intron number 1 from transcript LOC_Os12g29040.1 (locus LO C_Os12g29040) derived from phytozome v7.0 (chr-ID Chr12; p os 17190162 to 17191170 reverse strand)
tagccatctatacaaacggcaatcaactgcctcatgtaaactagacaattttttctttcactgaatttgggtgagacagggccttgtttaacacaacatttgaaaaaaccaaaagggacctccagatgctatatattcaattttaccatcacaaaagcttttgttaccggatgtcctcctagctagccgtaaatatgtacatgctctgatcatattgaaatgtttctaatgaaaacatccaacactgccaggtcatatataacgggaagaggatttcactgaggtagaaggtaaatcactcgtgcctcattgactactagtacccataaatccagatcagttttgaactgtttcttcaaagtaaaatagtagtaattgcagagattcaatccaattcatccattcgaaggcattgataagacaaaggaaagaaacaaggatttaattgttggcaacaagtatctatgccaaaaaaaaaaacagagcatctgatctacacttgtgcattcagtttaattagggaggcataggacagataacacatattctctgcatcatctcagctagtcaaccaatgcagccgcatcagcactgaatcgattcaagtttcaagagaatgaccccaaatatccagacgtacccgtcaacagcgaggcacctgtggtaacttcgtcaatctcaaaatatgccagcccagtcttccggaggtgctcataggggtagggtgtgcatgtgtgcgttcataggggtgagcgtgcgcacgttgtgagcgtctgcgtttgtactgtgtttctcaaaaaaaaatatccatgagttcactgttcttcaattgaaaatgtgcttgattgaccatcaaaatagcaaatggcaagtactattggtacaaaggtgaccataattattcgttggcttaactcgcgtgagagaaatttccactcaaattggaaccgtacatgacaaaaattgaattgcagagtaaccagatgctgcctataaatagcatcagata

SEQ ID NO: 10851 - DNA, 870 bp, Oryza sativa
  Intron number 1 from transcript LOC_Os09g20510.1 (locus LO C_Os09g20510) derived from phytozome v7.0 (chr-ID Chr9; po s 12364162 to 12365031)
ccttcctcgtcgccgtctccggcaccttcctccaggtaattagtcgctcgcattgcttgtttggttcgtcgatcttaatcagtttggttaggaaaaaggcagctgctaattgatgtctcagctctctctgcaatcttcgtgtgttcgaagtgatttgtttgcttaaatatacttattagtagtactccaaatgtcaaatgctacgaagaaatttgccaaatcgacgaatttatgcaagagaaaacagcaaagaattttctgctggagctgcgacttggtagatggaatttgctaagtcagtttttagaatttttttcccacggttgaaatgatgataattgattaaggatgttgaagtcacacttgactcttgactaagcaaccattgcaacttgattattgtaagcgacacatggtgaattggtgatggagaaattgctgaattatttggacatcaatgtgccaaggtcaaaatttccaagatctaccttgtcattcttgacttcttgatacaagttcgaaatttctgtgaattcgctcacttgacttgcctgtactaatctcaatcaactgcaaaataaaattaggtcaatgtacccagcttgaataattgtgtgttacttatcttggtctggtcacttttataatgtttgggtgtgtttaattctatttgaactacactctttgttcgagtgttagattgtaataattggttgtagctctgttgaataaaggccgggatgttatctattccattatctaaaaaaacccagctgaaaactgacagtgtgtgtctctgtgtgtgtgtgtgattttttattttattttattttattttatttttgcaggtggcgatctcgagaggcctca

SEQ ID NO: 10852 - DNA, 390 bp, Oryza sativa
  Intron number 3 from transcript LOC_Os10g12620.1 (locus LO C_Os10g12620) derived from phytozome v7.0 (chr-ID Chr10; p os 7044594 to 7044983 reverse strand)
aacttggtaaaggtgggtttggagtggtctacaaggtatggtctagcacttttccatttgagagagtaacctaactatttgaagccaatacttaactattagatgaaagaaagcgctaaaattctgtttgattattttcgttcgtgtcagataaccattgcgactgtcgaactccaatctatatgttgctgtagtcgaattggaatatagctgttgtttatctacaaaacttatggtaaaaatatatactgcaaaactatatatgaataccaccacattctgtatgaactgatggcacacgtcaaaggtcaatgtcagatctttcttatttggatatttgaaaatccaaatctacattaagaaaagaagtttaacagggaattcttgcaa

SEQ ID NO: 10853 - DNA, 719 bp, Oryza sativa
  Intron number 1 from transcript LOC_Os10g12620.1 (locus LO C_Os10g12620) derived from phytozome v7.0 (chr-ID Chr10; p os 7045653 to 7046371 reverse strand)
gccgaaagccagctaagatccctgatcattgtttggtgagattatgagttcatttgtctgtgctcaccaactgtttggggaaatgcttgtgagattccgagtactatatgggcactaaatatatcgattttaatgttggtacagatatggctcactatctgtttttgtgttttgtcatcactgggaagttaattcctttatagctatagttgtaaaatttatcaactgtttgattgtttgatcatccattagccttctccagatgtcaaattaagtagttgagttcattgttatagacatacataccaatctgccaaaagctacaagatttctgtctgtacccagtttggccagacttcatccttgtagcttctctccttcatcagatgacttgatgaaaattgggaataagaatgaacaggattgattgcactactatcgacaaatctccactgcacgccatgtctgcatcgggaatgtgattgtgctagtgctcttggaagaacattaattttggaatgagatttctatgttgtaattgtcctttgcagctggcccgcttaaataaatagtgatttgtgctatggtatacatccaacacctattataattggaaaatgctttttttttgttatatagaaatctaggaacagaaaacgttctaacttaaagatgctttgacagctgagcgtacaacacaaaagaacagtaaaaagggg

SEQ ID NO: 10854 - DNA, 951 bp, Oryza sativa
  Intron number 1 from transcript LOC_Os12g07350.1 (locus LO C_Os12g07350) derived from phytozome v7.0 (chr-ID Chr12; p os 3618700 to 3619650)
agctccgcgtcgccggcggctgggtcagggacaaggtgagttccccccccttccctttttttttttgagaaaaggtggacacatctccttttccgcattgtcagtagagtacatggagaacagtacgagaagtagtgattgtatcaaaccattttggagaaaaaaaatcttgggaaacttggtttagggcttttggggtttgtggcccttcgaattttaactttgaagagctcgatactagtttgtttaggtactggaatgtgtgctttgtcatgtaagttttaggggttttttcctgggcattttgaagacattgttttgctatgtcattgacattttttttataaaaaaaaatcagtggatttttggctgttatagtttcaaattagtgtttcctgtggagagttccttgtatggctatgtttagggttcctgacaggagaaattaggtgactgcctgtgaattgtggggattgtcaggctgatgggctcagggaatggctcaatcaacttgttttgttggtcttggcttcttctagtctgtaagcgggagacatgtgcttccactgcatttagttggaaattttagatgcaaatagtgcacctgcacatggcatagtgtaatttacaggcatcttcctttaagagcagagaagtgaatatttccttgttgatatgcataatttgggtcttattggatgtgtgctatgtgaatgttgtattacacattcaaggtttgcatgatggatattggatactgcattgtatgacaaacagtcaaaggagatgcaggtagatccctgctttgaaaaacaaggatttgcactactgttgtcatttgcagctcatctctaataagaatatattgttgagtagttttgctgactcaacctttctcttttcatataatcgtcagctattggggaaagactccactgacattgatattgc

SEQ ID NO: 10855 - DNA, 533 bp, Oryza sativa
  Intron number 3 from transcript LOC_Os11g03930.1 (locus LO C_Os11g03930) derived from phytozome v7.0 (chr-ID Chr11; p os 1567746 to 1568278)
ggtatcttgctggagataaggcaacaaataatcaggtaatgtcatgtatatatacgaaattataagatataatttttttattgcaacaataattgtaaatgaaatatttcacacatgcttataaatctgtcatgttttggtaactcctaagaatagcaacaagacaaagtcagcacatcactttttgaaaggttaatatatctcggtttcaaataacatttgcttcttaagcaacataagcataagagcctcactcagttggcacgatggaagaaaaactctataacaaccaaaggtgtgttacattgcatatatttatgatagtaaaactttactagttagcactccattcaagttatccaaattagaccacctattatttacctttttctaataatgtttctttcataaaatgtcttgggggtccatggttctcttttttacagtatctaactttcaagtccaatgattctatttttctttcaagtcaaacgattttattttctgtcattctttaggtgcggaagtggtag

SEQ ID NO: 10856 - DNA, 777 bp, Oryza sativa
  Intron number 2 from transcript LOC_Os08g41460.2 (locus LO C_Os08g41460) derived from phytozome v7.0 (chr-ID Chr8; po s 26175323 to 26176099)
ctaagtaagtggtataaaatattccttttcttctagcttgtacgagatcccggcccttactgtacactataagtgtgcatgccgctgaaaagaaaaagattattgttggaaattcagagataatcctatctatatccctgtagctagtttatttagctgctatcattttctggctgtctggttgcgcatgtcgtgtcatgcgccgtgatcggggcgtgtgggatggcacacactgagaaccgatcatggtgcactaaggtgtggatcgtggcgatttgcccatccgcatatatcgcaatggaagagaaacataaaatggccatcttatcgcagcacaaataccttgtgttctggatatactagttcatatcgtcttgtgttcgatatacgacagtgagtttgtgatagcgttcgctggattggtgccgttatattatgtccacccaatgcaagtaacattggaagctcaattcttaagacaacatatatccatcattaagtgaatgcgagacatccctgctaattttcaggaaaaagagaaaatgattgtaagcattcttatcaacactgcacactttatattttgagtttctccaataacattaaaacgataggagagacaggaaaatggatgaactgcaaacagaggaatgtttgtgtccaatttatataaaaaaaatactaggagaggtttttttttaattcagtcatgctaatgttgtcatgttaatgcttaatcgttgctttttatttaatattttttttcgtcaggccctg

SEQ ID NO: 10857 - DNA, 584 bp, Oryza sativa
  Intron number 1 from transcript LOC_Os11g26030.1 (locus LO C_Os11g26030) derived from phytozome v7.0 (chr-ID Chr11; p os 14420280 to 14420863)
tcgccgacctcgtcctcgaggtccgcgacgcccgggtgagtgccgcgctccgctccgctctgtttgcgctcctcggtatacctgcctctttcttcgccttctcgaataaatgccgctcggtgggtgattctagtcgctccgacggtgttcgacgaaatgtctcgcctgtctgtgagtgtgtcatgtaggaatgcggtggaacgtgagtagtggaatcaactccgaaacagcacttgattgtgcagagtttcatactctatgtactataattgtgatcctcgtgcttaagtagcttctacttactttaaaactagttcttttttttttcttttagaaattgtcttttacaagttggtgaataatttggctgtgtgcctacgggcagaggctggagatgtaacccatttccattatctaaaaaaaaacaagttggtgaataatgttccattcaattcaattatcatcttttgattttttattgctgcattttcatgtgcagttcgtttgttcgtctgtattgtattcctctgattactgatgtacacctattgtaagttatgtccagattccgttgtcctcagcga

SEQ ID NO: 10858 - DNA, 785 bp, Oryza sativa
  Intron number 2 from transcript LOC_Os11g28330.1 (locus LO C_Os11g28330) derived from phytozome v7.0 (chr-ID Chr11; p os 15830785 to 15831569)
gcatcccagaaccaggtaaaaaccagctagtggtaatttgaacggtttcagtaattagaggatgttaaatacttggttttgaagtttgaggatgtattatagacaaaattaagagttgagagatgtaaaatggatttctgtctagagtttaaaccccgtcaccaccttatctcatcctattgccaaatgggcatgtagagcttgacaaaagagagaatgagatatatagcgtacatgatattcattctattatggataagatgaatcacatgagtactaattttataaaattattgctaccacaaggaggattcaatcaagatcgtgtgttcaaagcctttagaagactctttccttctgcctttgtctgcccaagcttatgaagaatatctgctcctggaggatgacttatctgaaattcactcgcagccggttcatgggatagttggagttttatatggaacagtgacatctacacaactaagaggttctacaaactcaacttcaatgcataccagcctccaagaccttttgtttggttgtggaaaattaagtgtgtcatgaaaatcaaagtgtttgcctggttactattcagagataggctcaacacccatgatatgttggatagaaggcattgtgaaaaagaggatgatgatctcacttgtgtgctgtgcaatggagggcacagggaaacaagactccacctcttcttcacatgttcttttagtgtcagatgttggcagcatcttggaattgtcttgaaccctaatgttgattttttccag

SEQ ID NO: 10859 - DNA, 710 bp, Oryza sativa
  Intron number 1 from transcript LOC_Os12g27520.3 (locus LO C_Os12g27520) derived from phytozome v7.0 (chr-ID Chr12; p os 16195882 to 16196591 reverse strand)
ggctggggtgggacgtcggccccgagatccaccaggtattggcctccgatccggtcgcctcgtgtccatcttcccctcgcggatctgttgatctggtgcgggttattattattacggcggtttgagttgtgtttcttggttattatgtcgatttgggtcgtctcggtaggtgaggcgagagtagatctggtggaaattagccacctgctctctcttaggtggttggtttgaccagatttctgtgttatgttctaggattaggaggattgtgaggttatttgaactagtttcctgctagttttggcgtgggcgaggttaatcggtttttggatacatgcatgatgggctcttggattgattatgaacacagatttatggatcgatttgttgtatgttatctgcctgttattggacagatttttagagtttcaggtcaaatcgtcacgcgagttaatcttgcttttctttatatctagtacttattgtttattgaatgttctgttttgagatttatttgttgtttaattatatatagtatatagtatgcactatttgttgattagcggatctgtatctatatgcaatatttttttctatacatacatgtagaagttcagtgaatcaaatattcagaattttgttgcagaatataagttgcagcagtttatctaattaaattttgggcactatttgtaggttcagatagggtt

SEQ ID NO: 10860 - DNA, 609 bp, Oryza sativa
  Intron number 1 from transcript LOC_Os11g14800.1 (locus LO C_Os11g14800) derived from phytozome v7.0 (chr-ID Chr11; p os 8326942 to 8327550 reverse strand)
accaaagtaaaagttatagatattgatgacttatataactttgttgttaatgaatatttcatttgaaatcatttactatttgaaaatagtgttttaagttgtcataatttggaattcaaattcaaattattgaaacaaagtcatatagaaaaatgaccaaaacaaaagttgtagatcttgataagttatacaactttgttgttgacaagtttttcatttgattttttttcattcataaaatgagagtagagatgacttcaatcctaaatcctaaaataagagactagaaatgctgtagacaagaagagtccacctaggacaaataatttgtggtctggtagcaatgtagtataacaatattttttttgtttctaaaaatataatagttctatattttatgacgatccactattgtcatcgtgctatcgtcatagagcccatgcagagtatagtgtgacgataattatgacagatacaaggtttggtcataaacagttgtcatcctgtgaacagtcattataaacagcctctgtttatgacagatatgtgttctgtcatcaggtaatcgtcacagaagcctagatttgttgtagtgggctactccaccgt

SEQ ID NO: 10861 - DNA, 962 bp, Oryza sativa
  Intron number 1 from transcript LOC_Os12g05090.1 (locus LO C_Os12g05090) derived from phytozome v7.0 (chr-ID Chr12; p os 2235181 to 2236142)
tccggccccggtacccgccgccgattctacctccggtgagtgagtctcccgctttctctcgcactccctacaccctgggggcgtgtctgtcttgtgtttggtgtggtgagttggatcggttggttcggcaggctgttgttttgaatccccgtgcggaatcgtagcatatatgtgcttttttatgggattcggaaaattaggcgcctttggttgtaaaatgtccggtttgggtttaaactagattcagtctcttgaggacgccaaattcatctcaaattcaaatcattttgcagtttgcaccttgccgaatgaaccccgaatgctcgaatcaagtgctatcgagtgtgcacttcaatactactggagtagtttgtaagcagttaggcgggattattatggcatgacagcatattatgtcatatcccgttgattttgacgatagtaccgacaattagttctgataaatctgtccaattttctggagttgctaaaagtctctaagatttatacaagtgcaatgcaattatgtaacgtaccaactaaacagtaacctagctgttcttggcacatgattcatgctttacagggttaggttatgctacttgattgagtagttgacactacaccatataagtacataggcatagatggtgtagcactgggacctttggcctatggtgtttctaagcaaaacagatgtaaatactcctgtatccatgggcgcacatctagaaaactgtaagtatatcttccgtgttgggttagtcccacatcgaatgatgcgcaatccttttgtgtattccccaaaaaactggggcgcatcaaatgtttgatgttggatgtagttcacagtactttgaatctcctttataaaatggccacactacagaacagtgaattgtcttattcaagaaattcagtactatgtctgaacatgtgttttggttgtttaggtgctagcg

SEQ ID NO: 10862 - DNA, 837 bp, Oryza sativa
  Intron number 1 from transcript LOC_Os12g41940.1 (locus LO C_Os12g41940) derived from phytozome v7.0 (chr-ID Chr12; p os 25964976 to 25965812)
gagtacgagaggatacacaaagttcaggtaacaaactcactatccgagtattccattacagtagtagtcgtggtggtggtagttcattcctccatatgcttgtttcttagctacaatttcaaccttagtttgtttaggttgtgtttggtttgtagaattaagttcatgctcatgtctgtaggtatgtcattttcatttttcatgtatcatccaatatccatgtactactatgcttgatccatctctcttttttaaccccttcttgaagctaagtactgctataatgcaatgtgactactcccctttctcatctatcatgaacatttttggtgggtcaagatagtagtggcatagtgccactaattactttactttccaatattgaactctctagccatgtccatttatggtgcttttgatttattattgctactaccacaacagggttcctatacatctctctctctctctctctctctctctctctctctcttggactttttggttgtggattctaccttgctctctcaagctcaaagtagccaacattcatggctgctctattcaaagctgtggctgctctccaatggcaactgcagtatgagcagttaaaaatctctctcttctttgcagcaggaagccagagtcaattcttgtagtaaattttttgccccaatttaccaagccattaattaaactagtactactcctgaatcttggatactagtaatgacagtttgaaatttgtcctgaatcttgggtgattgattttcattggaaaccatcaaattggttaaggtttactatgtatttagtgataattttgttgcaatgcag

SEQ ID NO: 10863 - DNA, 1027 bp, Oryza sativa
  Intron number 3 from transcript LOC_Os11g38860.1 (locus LO C_Os11g38860) derived from phytozome v7.0 (chr-ID Chr11; p os 22663597 to 22664623)
ctgctcccgctgcctcatcccctggtccgccaacggtaagccctaccctcaccgccaccgccgccgaacacgactcccaatgcacacatatactacctctgggggcaactccaaaatttaagattagggggtgtggggtggggaagaggccataagaccgaataaccaatatcgatagcaaatgatgtcaaatagtcaccgttaataacaatcaatgtgtaaaatagttctttaaaaaaaacttaaattttagctttttaataatatcattaaaagtttggaactagactttattactaaatccttttaatgtaaactaatgaataatctcacaaataagaatcttctattttactttaaaaagatgagaaatcacaaagtaattttgtagatcatgtttcttgctaatgtttttagactttctaactaactaaattgataataattgtaagctacacaaataaactagataaatacatatcttagttagcctcaatatagagtaaaaacaggaggcgtgatggtggcggtgttcgtataggggggtgttgacctcctctggcacccccatagttgcgccactgactacctcaatttcaaaatgtgagacaccattaacttttcatatgatgttcgatcattcgacgaatttaaaaatttagtatatatatgcacaagtataagttaagactatagtttctttagtggtaaaacaagtcagaacaaaataaattaaattatagttatatttttttaataagacgaatagtcaaacgttatatgaaaactaaatggtgaatcgtcatacatttttaaatggacggagtatatgctgctccctccgtcccataaaaaccaatgtgacacattctagtactatgaatctagacatatccatgtccagatttgtagtactaaaatatgtcacatccagtcctagatttttttttttttgagatggagggagtatgtagcaagcgagcatgaactttgatgcacatgtcgccggctcgcgcgcgcaggtggg

SEQ ID NO: 10864 - DNA, 992 bp, Oryza sativa
  Intron number 1 from transcript LOC_Os08g43360.1 (locus LO C_Os08g43360) derived from phytozome v7.0 (chr-ID Chr8; po s 27395553 to 27396544)
gccgccgctcaagcgcgcgcgccccgactacggaggttcgtccgttgctcgcgctctacgccatcttagatctggatctgtactagggggttaggctatatcctcgttttggtggttgttttgctccccgatattgcttgcgtgccatgatttatgaaattattgacgaagatctagttgaaatttcacgttgtttttacccttagtttcgccacgagatctacaagaaatttctatacgaactttgttcgttgtatgtaacagtcagtatgtttaccctcgcttttaggtctcgtaaagcttgcaatataggatctaatgctgcagtatgattatttgatttagccagtaatgattatttgatttagccagtaactgcctctttcccaagatagttacatgtttgaatgtttgaaaatatttctttattatttgtgagtttcaatcttcccggaactttcaaaggggtgaaggtgtactgataagtttctaactatgcttattgcactatcttccatgcagtgttacagccctgtaacacaatatgtgcctgtttagaattattttttatggtcttgactaaggagctccggttgggagtcactagtttcattgtctttggagccttgggaagaattcctgctgctccctttatgggaaatgatttacacaaagcatatataagttgcagatgtttatattctgttgggtgtagattctatgctatcttctgacagggtgtagatccttcaatagattctgttgggtatagatccttcagtatctaagttactgcatgttgttttattggtagttgtggttggtggcataatttatgtcatcatatccttttccttgttactataatatcgtttcctccttttctcatcaatttatctattgaaggatcttgaacttaccattgtattgattgtatcaattatatgagatagttggaatcgtcttttaaacttaatattattactttgcag

SEQ ID NO: 10865 - DNA, 687 bp, Oryza sativa
  Intron number 1 from transcript LOC_Os10g04910.1 (locus LO C_Os10g04910) derived from phytozome v7.0 (chr-ID Chr10; p os 2402404 to 2403090 reverse strand)
cactgtctatccctacgtgagcttctatagcacaggtataaatatcagataccaattttctttttcttttttgcagcaagtacaaacactatatgtttttcacatgcacagtagttaacggggcctgatgcattaagtgtattgtgctctgttgatttcgttttgttgaatgaatttgcttgttctaattatttgaggtgtgaggcagcatatatattattctctcttatataatattatatgtacaaactcttgagtttatatatgatttcttaactccatgaaaaactagttgagctgcatgccatgtctatttcacacatgtcccctcaaccgccgttgcaccaacacaatacaagttagaaccatatcatagttacgttctgttaacgaccaaatttggtaatctaagtatcggagatgaagaagaaatcaaaacggagttcgagatggagatcgttccggagacagagtaaggatcggctggagtccgaatcggctgcgactaggatcggcagagtccaagttggacagggttagccgatcgggccagatccgacaatatgacaagggatacgttgtcgggtcgagttaatgagcttcatgaggattaccatgcatggatagagtcctgagaaggcaattgtatctattaattatgatattttatgtaatttccttagagat

SEQ ID NO: 10866 - DNA, 701 bp, Oryza sativa
  Intron number 1 from transcript LOC_Os11g45250.2 (locus LO C_Os11g45250) derived from phytozome v7.0 (chr-ID Chr11; p os 26915673 to 26916373 reverse strand)
ggaggtacgcctcgaatcctcagtttatgattacaagatccttgatagtagatgataatctgacctgactttcatacggagaggggaaatagtacagcgttactgaattttctgtgttaaattaactttactgaatttctgtgttagattgtatttgatctgagtgtactacaagcttgaaatgagctcactgggttgtaatcattgcattggcggggctcatttatactagaagaaattcccatcattccacttgctttccattttgtaatttttttggtgagtttgtattccactagctcatctctagtgagaaaggattaaaggcaagagttatatgctcgttctggttgttcatagtccaacatgggcaccactgtttaggcagttctagaattctagcagagcaagttaaaccgatttgaagggcaatcaaattatgaaagcattaagctagtgttcttcataccaacattcgtcttgtaagtgcaataaattcttaatcagtttcatcaccttgaggagagtgcaataaattcttgtacaaaatgtagaggttgatgtcttacatgtagtttatcttacgctatcttcatgaccttcatgctaaggtttatcatatatgtaaattcaaatgagtaatgcagttcacattctatcatgcagaggaaggggttcaagaactgttctgaagtggctca

SEQ ID NO: 10867 - DNA, 579 bp, Oryza sativa
  Intron number 1 from transcript LOC_Os10g35170.1 (locus LO C_Os10g35170) derived from phytozome v7.0 (chr-ID Chr10; p os 18702052 to 18702630)
gtgatctcgttgtctatgtggagctttacctctttcttcttcttcttttttgtttcctgttcggggatcgtggagcatctacctaattggctaaccaggctattagcgtgtataatggggttgagttgattcgttgaattgattgctcttagtgcgattgtgcgaatttgaaatgtaatatgacagctgaaacgaaaaggaagaatagaatcgagattttagcaatgctgattaatttcttaggcagtgtgtggttacaacttacaagcagtgctgaatttgccgaggtgtggattcttacgaacgttggtgtttggcattctacacgattagattgatgtatcagtaatttggtttttacatgttgctatattttgatataaacttggttgaacttgaagaagtttgacttagtaatctgccaccaccactgcatcttgcatctggttggtcataaagagtcatccttgttccaacttatacgtgccatttcttcattacatatgttttaattataatcaaatgagttttttttcctgtcattctgtagaagggagtctgtgggcttaatttgaagtc

SEQ ID NO: 10868 - DNA, 1011 bp, Oryza sativa
  Intron number 1 from transcript LOC_Os12g37980.1 (locus LO C_Os12g37980) derived from phytozome v7.0 (chr-ID Chr12; p os 23309793 to 23310803 reverse strand)
aggccgtcgtgtcgccgccggcggacttcctccaggtatatacgttataaatttggataaattttgttgttcttttttaagaaatgaatttcactttgaggcttttttaacttgaacagtttaccgagcggtttctctgtgtgaaccagcaagaatggctcataagcatgtaatcgagagattatattgtcgatttttaaaacaccggttatcacatctcttagtacaaattctaaaagatataccaggcaccaccagggttcaaaatttcagaaccatttcggccgaattttttaattttttttgtgaacgttagcaatatttgtacaaaatttcagaccaaaattttgccatatcagcaccctccgatacaaataccgaaatcgaaatattgaaccctgggcaccacaatttaacaatgcaggattttattcttcctttcaaatcataattatacataggaaaccaatgttattaattacatataatttatcttgagccaactactcatctcttagaaatgaactagctggtgcatgcagctcaatatagggtctatttgggagagtttcacaattgcaatttctctcagaatcagaagcttcccaaatagtttttttatctaaattttaaaaagttataattatagaatgtagaaaataaattagaagctagaaaattttttaaaaaaactcaatttttccatatccttagaaattgactatcaaccatccgtttgctagagttataatttggtcgtgtctgccgattgctaggctctataattttggaataaaacttttataaacgtgttcttagcggtcaaaaagcaaatgctgaaaaataaacctcgataaaaaaaccccaaaatcaactttaaatttaaggttaaaaatttaaattttggccaatatacataaacataaacgataagcgaaaagatggggctgctagttaatttgcgaatcttctacaggtgtgcctcgtgaacatagggaagggaacgccgtt

SEQ ID NO: 10869 - DNA, 746 bp, Oryza sativa
  Intron number 1 from transcript LOC_Os11g30210.1 (locus LO C_Os11g30210) derived from phytozome v7.0 (chr-ID Chr11; p os 17097966 to 17098711 reverse strand)
gcggcggcggcgccagcaagcgcaagcgcgaggaggtaaattaattaattaattaatcaactagtccggtcgctgcatctgctgacgaaatctattagactatcattagtggggtagtagcacgttgtctgtgctgtgattagtcatagtattttatactgattactagttttagctatactttgcaagtcccattcaggtcccaagtgtctgaaccctgaacaaaccccctgaagaggggataaaagcaaacagaaaactgtaacccctcttccatttttttttcccattagaaagctacaagacaagcactatattagtatattactgaattagctggttcagtactttgtcctagctgaatcaaaaccatcaaatggagttttctagcttggtattggtagtatatcgattcccaatgaagttagcttgaatcctaaacaaatgtgtctataggtagagacatgaaaagaatagtgaactgtcttcacggctgcacccagggttctgggattcgggccaaaaggtccgaatttcgtccattttggtgaggtccgagacacaatttcactcccatttcgtctgaatttggttaaaattgtcaaatttgatgttttgtccgaaatttctgaaattcgtccaattcggtggagcacgatttatatttgcaatcggatcccaaaaccctgtctgcaccatagatgactgaacctccctctttcaattctttttcaaaaaaaaggtac

SEQ ID NO: 10870 - DNA, 722 bp, Oryza sativa
  Intron number 2 from transcript LOC_Os09g36560.1 (locus LO C_Os09g36560) derived from phytozome v7.0 (chr-ID Chr9; po s 21089174 to 21089895)
agttacctcgtcgtcttctgccctatcatctccaggtaattaagccgaacagatgaatcgtcgattcagatttcagtgagcctgatcaaatgcagtatcatgtgccactgccaaccatcaaatcatttgacaagaacgtgggttggatggttggtcaatgatcatgcatgatccaatgtacgtgactacgttgaagatgattaattgcaggctttattaacgtcttgtgccgactgattaagttacaagcaactactttctccttttttatatattataataagttgatttaattagaaaataataaaaaactttaggtttgatcaaaatttttaaaaaagctagtaaaatctacaatatctaattagtttcgttaaatgttactatatttattttataaacttgataaatgaaacgacttgtattataaaacggagagagtagataatttgcctcgttgaatatgctcgccatagaaagtcatacacgtataagccatagccgtgcaattagcctcctttttgttcttgccctcagcaacggtcttctggccgattgtcgattactttgtgtttattactttcttctaatatattggtgtgtaatatttttccgtgttcgtgataaaaacctaatgagtgatcaaccaaccctgcgttagaaagctaactctggtatgatatccagcctcaagtcgtcggtgggcggcggcgccacgaatc

SEQ ID NO: 10871 - DNA, 1040 bp, Oryza sativa
  Intron number 1 from transcript LOC_Os12g29750.1 (locus LO C_Os12g29750) derived from phytozome v7.0 (chr-ID Chr12; p os 17757559 to 17758598)
gaggccacgaggaggagacgtcgtcgctgctgccggtagggatcgtggcggccggctcgccgccgccgctgccgtcgtcggcgcgcggccaccatatccaccgccaccgtaccggcatcgaggtgaggtgattctttcgttcaaattcaatgttaatgttttcctctttctttctccttttcttcccaaaccccccttcttttctttgttttaccatctgtgtaaattttattcctcttaatataaaagtgcgtaatccttttgcgtattacccaaaaagatgtatgatgccgttaacttttgttgtacgtttgatcattcgtgttattaaaagtttaatataaatatgaaaaaaaatgtaatgtgagattatattttatttgatgataaaacaagtcacaacaaaattaattatataattatatttttttaataagatgaatgatcaaacgttatgtgaaaagttatcgacatcatatattttgaaatggaggggacgtgtagactgtagtaatttgttcttctaactttatactccctctgtactcgtaaaggaagttgtttaggataatgtttaaatcaaatcttaggaatataaatcatgaataactcttaagttgttgagtttgaaaatgtaaaaattaaatgaatagatttgtcttgaagaatactttcataaaagtatacatatatcactttttaataaatatttttatataaacaagaagtcaaagttatattttggagaccgtattgctgtccaaaacgacttactttatgagtacgaagggagtatatgtaatcccctactcctttctcgggtattgacatttgaactattgttctggcaaaaaggaatattagtttgttgaaccattacatggtgacataatatagagaacatacaggtatttcaacttgtggaaaagaaaaaaataaaacgatatgtcgtaacttaacgtagttgtaataatgtgctatataacattaacaattctagcctcgtggcaggcattttcaagggtgatacgcagctgggc

SEQ ID NO: 10872 - DNA, 809 bp, Oryza sativa
  Intron number 2 from transcript LOC_Os08g40610.1 (locus LO C_Os08g40610) derived from phytozome v7.0 (chr-ID Chr8; po s 25700350 to 25701158 reverse strand)
gggttaaaattcgaccgggtgaagtgagtatactttcagtgtttatccttgttacagtaaccgatcataaacgaacaccatggttcatagtcatgtcagaacaatctgaaattgggttattgtcagctcgtaattttcttttttgttggttttcaatgaagcaactatccagctagtcatcggtgttaatgcctgtaattttgttgacagcttgaagcatagaaagatcaaagtgcaactaatttactcatcctttgttgctactaaaaatctcaaatcaagatctacctaaatattgccttagccctttaggatgaacgcataatcttcaatatctagagtattactagcaataattattttgacataatgtaattacagtagtttctaccagtctaaaaaaaattccagtagtttctggtaaataacagacagtttttttttatgcatgtcttgttgattctaaaaaatgggggtttcattctctatttagattttctcatagatttatgcagaaagaagctgttttgttacttttgtatgatgcaattccttatatttgcaaattaagcaacttggcattagtcatagcaatgagtgtgaagtttttattatcatttttatcctattgatgtctgatagccatagggcctgaattcgatcttttgtgttgtctaattgcttaattgacgcattaccattcgagtgcatccttcagcattcttcattgacactgtccaaagttcatcatctgccactattgccctggatcaggtattggctatcagttggagcacagccatcggatc

SEQ ID NO: 10873 - DNA, 918 bp, Oryza sativa
  Intron number 3 from transcript LOC_Os11g34230.3 (locus LO C_Os11g34230) derived from phytozome v7.0 (chr-ID Chr11; p os 19580744 to 19581661 reverse strand)
ttcggtacttacaggtcttcacatgacgtgagtggcccttctttcgtttccttcccattgttttgttgccaaatcaattagtagcaatgttgcatcatttgtgattgatgcattctttttcttttttctgtttgtgtcgagggagcgtaaacacaatcttctggtttattatcatgctcaaaaacatttccaaactccccccccccccaaatttctccatgtaaatcatatgccctaaaattgcttacctgctactctctctgtttcatattgtaagtcgttttgactttttttcctagttaatattttaagtttgaccaagtttttagacatataataacattttcaacacaaaacaaacatattataaaaatatattcaacgatacatttaatggaactaatttagtgtagtagatattgctattttttcttataaacttggtcaaacgtaaaaaagtttgatttaaaataaagtcaaaatgacttgtaatatgagacggagtgagtaattgctagtagcttggaatgattgagaaagtcactgtattcgagcgagtgaggcaacacaacatgagatggataacacgtgattaagggagaatatcacaaggaaattggcaagataaaaggaaaagatgataaaaaggcccactaggcatcaacatcagcttaacaaccattctgtgttttattttcaaatacacgttgtcaccttagcatatgaaacttttctgaattacactgtaaagatgtgataaacaagggcttgaatgagggtattttagatgtacctgctgaactgagactgattgagacatttcatgataattggttaattatttctttctgcctctcaacgtgctcatctttgtctttctttaccaggttatctggctgaaggaatttcagaaatttg

SEQ ID NO: 10874 - DNA, 941 bp, Oryza sativa
  Intron number 2 from transcript LOC_Os12g38730.1 (locus LO C_Os12g38730) derived from phytozome v7.0 (chr-ID Chr12; p os 23762146 to 23763086 reverse strand)
tgctttcgagagtagtaagccatcaaaatcaacaggtaatttcagcatcatgctgcagttattgcaatacaataaacacataactccatattctaaatattttttctcctcatgtttctgtcacctagaatactagataaaattcattggatcaaaataggtcagtgttccttggagttgatcctcatatgctctgacatgtcacagtaagcacaactcctgaatttttgttttcaacagaacacttttattaggttaagtgttgcaattgatgaagtaaaacttttttttttcaagtgaggtcaattacatcgttcttaaaataaatggaaaccatacaaattaggctaccatgcctattagagtttggctatgttattcattggttttctgagaacccagacacccagttctttgtcctgtgtttcttggctcaaccacataggaataggataggagacttacatctatcatctgatgatgtggtcaacactgacatctatgccccagtgctatactggaatgcttgcagtggctcttctgttgaacttctgttcgttgtgatgagattagttcaattattatgtgcttcacttatgcactactcttctcaagtcagtttccaatgtttaacaatgttctcagtggtttaaaatgtattgatgattatttcaagaaattgtttaatctgtgctcattactttgtactctgagaactagagctcttaattgctgagataatttagaagagattacagtccatttatcatcgagccttgtatgtcaacatgatttcgtgggcatttgtctcttctgatgtcctctttctcaaacccaagtaaagcctattaaagtatcattttttaagcatgaattacatgctaaatacatacatttgatctgcagatttacttgctcgactgcgcatattctctactggt

SEQ ID NO: 10875 - DNA, 949 bp, Oryza sativa
  Intron number 2 from transcript LOC_Os09g15820.2 (locus LO C_Os09g15820) derived from phytozome v7.0 (chr-ID Chr9; po s 9656805 to 9657753 reverse strand)
ggaggtaattctaggtttggttgatttggggtttctttttattttaaggtgaaatatttggggtggataacttgtgtgagattcttggagggattgtggtagtttggtttgtgagtaggaatgttagatgtatggtgccaaaggtggaggaacttggttgtgtttgtttgcttgttttttttttttttttttgtagagatgggataaatatttgtactgcattgaactgggtaatgcagcatgagtagcagaagaactgattcggagaataatttaccattcggttgcttttagtttctggatatttctctggccagtactcaaaaactggaaaagaaatgaatttttagaatggtgattttgtatggtttggtcttcttattttctacaacgtacttgattgttggactgtgaagattacggaagtggtttcacaaggctggaatggaaggttcattgttcagaatttggcgctgtgagatggaactgtgcactacataatataatcatacagttgctatgatactgaaaagctttgagatatactgagagaacaaaatggtttcagtgaaaaatgaagcaggagcatttgccacgtgttttcaaaaacacacagatgtcacaatgatttattgtgcaacttgccattcaagtccaatcttttccattgtgctgtgtgattagtcagctagtacaaaataacactacgagccatgaattgctagagttggataatcttgaaataatattgaatggtccagatttgtataatttgggatcttgggtacctcctaacttacccttcaaagtttcaagttactatcggtttctttcaattgacacaacaaaggtgtgttatcaggttttgtactttttttcaatttgttaattatgtgctcattttatgcatgaagtgaggctgaaatttatctatttggagcctgcgtaa

SEQ ID NO: 10876 - DNA, 897 bp, Oryza sativa
  Intron number 2 from transcript LOC_Os12g37760.1 (locus LO C_Os12g37760) derived from phytozome v7.0 (chr-ID Chr12; p os 23151938 to 23152834)
ataaacgcaacccgagaattcctaacgaacaagaggtatgctcattacttagtttcaaagatatcttcgctgtaggtcatgcatcaccttttgaccaacattcacaatatctgctaaaatacaaatatgcatgtttttagataacacagatatttatgttgattatttatccaattgattgctttaagttaaatgtataaggatgccgtttgtgcttctagaaaatgcacattatcggtatgttttcatgggtagtttctgtagtttttattctcactattgtacagaatgcagctctcctgcattcttttcaagaaaacaaaatgcgcaaattctaaacataagtactacccccgtcctaaaatatcgcaactttttggctatgaatctggacaagtaactaaaagttgctatatttttggggcagaggtagtatctattagtagttccatattccaataatattccattagaaagattggatcgactgtgacagggtgactcactacaaaagtttcatattgtcagttgttttagtggccaagccataggtaataatgactatttgtgtcagctgttatatagtgcaagaagtgcttttgtatctcatggaaaacggttgcaatgatcagttgctttcatctcaatttatatggccactgtttgtgggccataaaatcaatttcctttttcttgttactgtatgtatctttttttttttgcaagaataaagtacatatctattacttcctagtttgaactagaaaggtagctatattttggggcggagggagtatttgtggaccttatgccattttgatttttctaactcgtcctactttataagaggtctaaaagtatgaacttgcattgcacataggtactttgtcgtcattg

SEQ ID NO: 10877 - DNA, 709 bp, Oryza sativa
  Intron number 2 from transcript LOC_Os12g26044.3 (locus LO C_Os12g26044) derived from phytozome v7.0 (chr-ID Chr12; p os 15126168 to 15126876 reverse strand)
tgcttcgatgtgagtttttttctatttcacctcttgttgatgagtagtactcctacatcctagttattattgcacgcactttctgtttccttgatgaatacaatgtgtgaattttgcccaaatcagaggatcaactttgtaaggaagacaaacaaaactttttaatgaaggattttgtgctatgtgctgcacatgtaagcttcttgagatcgaaaattcagattttttttttcttttagggacaaactagtgattgtttggttcggagtcgtatattgcaaaaaaagaaaaaagtccctttttcagtgaatcaaaggaagcatcgaccatggtgaatactagcaggtggtagtggaataaggattacaaccattaagattagtccatccctaattataaagaagcatcttgtgtgaagtgtctatgatggtagagggagagatggggatctggctgtattccataatgcaatgttatatctggatctaattattctatctgcagcacttctgtgacataacatgatatatggttcaagaatctaattagtcgcaacttagatgttgttttcctgatttcattacttttttcaagttgagcttccatccagatgtgttattcttatgtctgtccacgctatgttggtagtgatgttatgtatgaatatgttgcaggcattttacatacgatcttcttccaccgaactctt

SEQ ID NO: 10878 - DNA, 871 bp, Oryza sativa
  Intron number 1 from transcript LOC_Os10g40900.1 (locus LO C_Os10g40900) derived from phytozome v7.0 (chr-ID Chr10; p os 21909446 to 21910316 reverse strand)
gggagaaggagaaagaggaagcagaagaggagggggtgagttagactgacatggcgggcccacgttggtcccaccattattgttattttttttgtgaaactgacatgtgggtcccacggggtttattattttcccagatcaaattgctaagtaagcgctacatcaatgccacgtcagatcaagaccaagtcaaaaatagccacgtaggcgccacgtcagccaaaaccaccatcgaaaccgccagggaacctaatctgcatcagttttgatagttgagggacccgttgtatctggttttgcggttaaaggacgaaaattggattcgttgacgagttaagggaccttggatgaacttattccgcgtgcttataccgtttcgtttcttgaggcctcgaatggatgggcctcaatctcggcccacccacatatatggtcctaaagtagtaaagtgaccattcaaaagaaattttctgaaagtgatatgcagatgttttctttggggaaaaatatgttctttgacctccttagttgaatgcagcattttttttaatacttcataagatccatcaccaaatttgtgtcaggtgagacattgttaagtccaattggaatataactaagacttttcactgacagatcatgcatgtgattttctcccatgagcttgagtatctgaccaaacactcctacggcttaattagtctccaacatgctagcatcaccagtactaattaattgctaatgctccatggccggctaagtacaaataccaatcacactttcttccaaaggaaaagtacaagacttgatctgaaaacaatatttgtctgctccaggaagacacctacacggctacacgactacacctact

SEQ ID NO: 10879 - DNA, 638 bp, Oryza sativa
  Intron number 2 from transcript LOC_Os10g33290.2 (locus LO C_Os10g33290) derived from phytozome v7.0 (chr-ID Chr10; p os 17417886 to 17418523 reverse strand)
aggttggtacagcttttctgaaactaattttgattttgtgacgattgcttggtgaatgcgaggtttctctgaagtctgaacctgtttctcgtgaatatatctgtgctttcctgggagtaatttatcatgacagctaatatgtttcctagttaagttaatcttgaaacattcattttttttttcattttatgctcatgtgaagataagtgtatacaaaattcaacatgtgctgaacttacctgtttttgttgacttactttaatagatgtatacctgtcttatctgctaccagaattggttcaccggttccctgccgtaccttttaataaacaatttcccatgtccttcttattctatgatttgtcaacaacatgtactcttactatacctacaatatatactggtgacagaactggcacttcagatgattattttgaattttgattacctcttaagtctctcattctctgtttaatgatcagatgctagtatcttttgttacttcacatcttcaggattttaatatctgtggacttattgattgcaatcttgacgaacacccaaaccagggcaaaatcatcacatataattaaaattttgcaggaagcaagggcattactaggaaggctagagtacca

SEQ ID NO: 10880 - DNA, 535 bp, Oryza sativa
  Intron number 1 from transcript LOC_Os10g33290.2 (locus LO C_Os10g33290) derived from phytozome v7.0 (chr-ID Chr10; p os 17418805 to 17419339 reverse strand)
cgtgcggcgtggcggccgcggagctgaactcgaaggtgttcttctctcccctctccccctccgcgtgacagttctttgtgcccgcggtttctggaggagatccgtccggattcggattgattcctctgccttcagttaaacacatccgggttcttttgaatgcgttgtgcagtactaaaaacgcagtttcgttttttttttgttcataataaaaaggtagtaaaatttttgggcccagattaaccccccttcatgccctgcgttaggtcgggcgaactgctgcgaattttgctgtgctcgagtttggtgaaattgtgttcttccatcgaaaaaaaaacaaagaagttttcttcttttttttttgggcataccgcaaattctcgtgttgtggagtatccgtgatattttggtacaagttgtgcttgacttagttctgtgctgaattatgacgcgaatcttgtggttggttgtcacattgtactagttggtgataatcttgaatgtgctatcaaatgttaggtgattgtgtggcgag

SEQ ID NO: 10881 - DNA, 608 bp, Oryza sativa
  Intron number 4 from transcript LOC_Os09g14510.3 (locus LO C_Os09g14510) derived from phytozome v7.0 (chr-ID Chr9; po s 8586790 to 8587397)
ctgcaacagaaatcttgaaagagtaagtgtttctttccctgtccatatggtcattacatcaccaattttttatttattactctctccttccaaaagtctaagtcctatttcattctttggtttttccaaaagtctaagtcctatttgtagtcattatgtgctatattaaatttttgataggaactcaagaagtcattttagtacttattggttgcatgttcattggtttcgtcacatgatgaatgagttaactacaccttggtcttggtgcaaaaagaaataggacttagacttttggaaggagggagtattgtataaccaacatgatcagcactttagcatttaatgtataaagagaaaaaaagaagagtgtttcagttttacttgctgaaataagcattacaccttccatcccaaaaagacctgtccaggtgcatagccagaaatcaagtctttttgggacagagggtgtacagaaacagcactgattcatcagagtgtatccagacttccgtgttcgcttcaaattacttagaattatataacatggtgtgtttctcttagtaatacttcatgggaaaatatgcaggaaacaactgaaagaccct

SEQ ID NO: 10882 - DNA, 748 bp, Oryza sativa
  Intron number 4 from transcript LOC_Os09g27060.1 (locus LO C_Os09g27060) derived from phytozome v7.0 (chr-ID Chr9; po s 16464626 to 16465373 reverse strand)
atgtgagttctagcttcatacatggagtaatttggtttcctatattctaaattaatgggatatgcttatgttgaccttgctcatctggatttcaaatagtactaatgttgccagtttttcaatatttactaaatagctttccacctgtagtacattgttagaaaatcataattagaaggggtgtttaaagactcgccataacacatttgcaaccgccttcttctggtaccctgatatttttaggggtttgaatgtggggcacaaatttgtggcaaatgttagcgattagtatatcaatcaaataggctcttttgactgttagatagtgaaccaggaggttagagaagcaagaaaataccagagtaaaatgctcaatactagtgagtgtcagaggaaaatcaccttatatatgttattactatcttgctaattagaggttgtttattcatgaatgctgaagatagagggacaccgtatgaaggaaaaaagtttaaaaaccattaacttttgcttgtgccttatatttttgggcttgtttcaaatttctctagaaccatgcacacttattcagaatttcagatcctttcgtaggatcaattatattatttaagtgaatagcttgctcagtgttctgtatgaatgtggcaacttgttttatacatagatcaaaatttcaagcaaaccatttcatttctaaccgacaaaataaaatattgttcagaaaaaagccaagaaagcagtggcagtc

SEQ ID NO: 10883 - DNA, 451 bp, Oryza sativa
  Intron number 1 from transcript LOC_Os12g12514.1 (locus LO C_Os12g12514) derived from phytozome v7.0 (chr-ID Chr12; p os 6889110 to 6889560)
tgcccacctacatctcggactttgtcccaggagaggtaatgatttgtataatgtcacaatataaactccttataattgaatatctactttgtagtgatcatttgtggccataagctattcctcaattacaacttctatctgacattcatttcaagacttctttatgaaaccgaaactgataatttttcctaaggatgtttgactctgaatgttttccagattccctgttgcaaatctctactgtatttcttttctgggactaattttgtccaatatctgaatccagttttgttttctttttgtaaactgatcccattgtccaatgactattgggagcagggtaagtgaactagctgtcgagaaatggagtctgaaatgaacattacatctctctgtattcactcaaatatgtgtgctttcctcattgcaaacttgaaggttgtgacaagtc

SEQ ID NO: 10884 - DNA, 595 bp, Oryza sativa
  Intron number 1 from transcript LOC_Os12g07260.1 (locus LO C_Os12g07260) derived from phytozome v7.0 (chr-ID Chr12; p os 3570184 to 3570778 reverse strand)
cctcaagccctaaacagctcctcataggtgagttactcattttagtctttactctttagtatttacttttaatagatcggtcatcgatgaattgaaaaatgtggatgaaaaaaatgtgattgaaaactgaaacttagattttttttttatcaacaacttagttagtagtcaatataacttagtgtatgaaggatgggaagaaactattgtttcattttgcaataaacatagtatccaagttccaactttcgatggaaaaatatgtgcctcatggaagatctccacggttttatccggaccaaacaaatgatgatcattttagaaaacaagtgtacattggtgtacaaagaagtagtgtattgtaatcttctacctatctattgtaatgtaagatatttgaattatttatgttgtaactttcgtaacttcgaacttaaatgttggttttaatcaatttgtgatgttctgagctatattgcaatatttgaattatatttccaccgtatttgtcaattttgatttgattttgtaacatcgtgacaatttgggatgccaagtaggaccacccaacgaatcgatcctagagccgccactg

SEQ ID NO: 10885 - DNA, 549 bp, Oryza sativa
  Intron number 1 from transcript LOC_Os09g28290.1 (locus LO C_Os09g28290) derived from phytozome v7.0 (chr-ID Chr9; po s 17174343 to 17174891)
gattttgggtaagttttgaatttgatgtgaatcggattaatgctacttatctagttggacgctcaattttatgaatattaatttttattttttttctccttctttccccagtcggttggcttaatgctaccgtacgtggaaaccgattttcacacgggagtgtggaacctagtgcggaaactgacgattttcaaaaagcctttggttagaggcgggcagtccaccagccaatatttctcctgtgttgtgtcaacaatgtgcctcagtttctcttgaagatctcacaacaatgaacctagtgcggaaattgaccttctcctttaggcttgcatagatcttccgatgtttgaccgaccatgatttgaaaagatcaacaagtttatttggtaatgcaatatcctcctgtgagtatccgacaacggagaaatctattctaattggtgtgccgaatattattccctcaaagctttatttacattttacagttttatgttgtactgtcttgattgtgtgtaggagactactttatctattactttaactagctag

SEQ ID NO: 10886 - DNA, 653 bp, Oryza sativa
  Intron number 3 from transcript LOC_Os11g10510.2 (locus LO C_Os11g10510) derived from phytozome v7.0 (chr-ID Chr11; p os 5742669 to 5743321 reverse strand)
aagctggagggtatgtgtaatctgaaccaaccctgtccaattcttgttcttctactacactgtttagtggttcagtctattctgttcttgtattgttttttttttgttttaaaatggcttttggtgtttagtggaatttagtgtgtacttgtacgtcataggttgtttggtttatggtattcggttactaactatagttagtgtgcacgttggggagtcctgattagtcagtggcattttcattaagttcagtaaagaaatctaccaagtgtccaattgtgcatgatattttactggtttggtataaaatcatatgaagaatcaaagaacagcgtcattgatgacatatacaacgacaattggattcctaggataatatacttttcttcatgtgctcctctatgctagtgctttattactttctctcctttgatgttttgaggtactcaaaggaaaaagacacactgaatcattatccatcttatgaactgtttaaacttgacttacttatcacttctctgctcaaatggaccccttttttttttccatttccatggaagatatatgtgtaatcctaacaatcaaattgatctaacaaaacaatttttttgctcacagcattgtggagagtgtgggagagggtgtgaccgaac

SEQ ID NO: 10887 - DNA, 910 bp, Oryza sativa
  Intron number 1 from transcript LOC_Os09g29470.3 (locus LO C_Os09g29470) derived from phytozome v7.0 (chr-ID Chr9; po s 17918405 to 17919314)
gttcgctcgtcgaggagaccaagtcggcataccccgtaagaagcttagctcctctcgtgctttgaataggggaaccccgagttaagtttgtgcgcttgctgttttgtattttaggaaacctaaggagtaaggagacctttttaacttctagattagagtagtgaagaagagtgggaacttgttgatttgaaggttgttttgccgcttggttttgaaattttgatagaagtgatatgtacagtgctcttttttttttctgtataaagaattctgattgggaattttgacctggactgctgcttaatcaagggtttctatttatttcccaattcgattatatgtaatttaaaatggcaaattcgttctggtagtatgtaacttaaaatttaaaatcttactttatttgtggtgaactgaagtaatacgactgttcaatgctcgtcttaccattcggatttgggatattgcattgcatgagtcgtacatttcattaggataacggatttcgaatcatgtatggtttacagttttagctgctaaagtagaatcattctctttagttggtttgataattttaaagttactacgtactaaagtgtatgaactagagcaatttcacaagctctattacctttcaatagcatatatatcacattgttttgtcagtgcttaattgagaaatgatatgttgtttgagggttgaataatgaatgttatgctaaaacgatagcttagcatttaggagcctatgacatgagtgccttgttacatatttcccattttcttgcaatgttatatatttcaatagagaatcacatatttatatcctttctaattaaaacaccttgccatttaattcttccataacaactttgtgacctcatacttcttagaaaaccaacttcaagga

SEQ ID NO: 10888 - DNA, 678 bp, Oryza sativa
  Intron number 5 from transcript LOC_Os11g01490.2 (locus LO C_Os11g01490) derived from phytozome v7.0 (chr-ID Chr11; p os 288025 to 288702 reverse strand)
ccgccggcgaactcggcatcttcgctaacaaaggggtatgcgcttcctactgaaaatctctcctttctagtataaaattgaacatccatgttgacatgattacttactttgcttgagttactaaaaagattagaccaaacaatcttgcttcgcattaggaacaagagtcaacctagccaattccaacgaaaagaagtgttcttttttcacatggaaatgaggcaatgttgtaccataattttgatctcagcagacaacaggtgttaatttgttatgctggtaccatgactttgatgatggacatgaatagggaaagtttaagcccatctcttagttaatgaatgcgatttgtttcgaaaaaattcaatgtgtctatgtcgctttttggtggaaaccacacagctctctttaaggactactaaaatgcgcatatggttatactatttgcttcaattacactgctttgattccttggagtataaagaacaactcgtccactgcagtttctttgttttttctactgcaattttactagtgaaccatgaatcaagtttcataacctactttgctgggagtagaatgccatgatggctaatatctgctgcatgatttcaattgcttttcaaatcttcttgtgtcatccatataattccttttgaatttattgcagactagatc

SEQ ID NO: 10889 - DNA, 1013 bp, Oryza sativa
  Intron number 1 from transcript LOC_Os08g41960.1 (locus LO C_Os08g41960) derived from phytozome v7.0 (chr-ID Chr8; po s 26516764 to 26517776)
ggccgcctctacgagttcgcctcttccacctccaggtagtacatgtactccactccactgcgctcctacagttcaattccatttgtattttttctctatctcctcaaatctgtatatatccaggtacatagtacaatgtatctcgcggattctagagctgagtttgctgtgcatcactctgagctctagctggctataataataataataactctcgttattaattttctggtggcctgatgttaattaattagtactacaaatatgttgcgtacgtatggatttgatttggaactagctgtaatagatcgctgtgcagtgttcctgtacttctgctgctcagcttaatttatagaagtagcttgctttcttcgtgtgctaagactgaatgctgagactactaattttatgtcacatttcttcaccattagtttggggatttatcagagaaatacctgcaagtgttctctcataactcctagcttagctagttcttcagcttcattcatagagatgattgctcaggttaattgcaactgcgctagctgtgataatctaccaatatggtacatgcatatacatatgttttttcgccctatagtttacttatgggttcagtgtgccaatttcgttggttttagtttaattgtatgcataaaatatacccatacattttaatctgcaaaataaggccttcttaatctacctcttgtttttacccatgttgtacccaaaaatagcgtcacatatatgtagcctttttggcactgagcatccaaaaatttatttggttagtataggctaactaactgatgtctcgggagaaacaaaaccttttgattgctgcattgaaaaataacattttttaaaaatatatttacaatgcagtaaccaagaaccttttttttttcatttgtatgcctgtacaagttactgcttttgagtttaatttactgatttcgaattttcttcatgcagcattgatacaatttttggtcggtattgggaccttc

SEQ ID NO: 10890 - DNA, 897 bp, Oryza sativa
  Intron number 1 from transcript LOC_Os08g41280.1 (locus LO C_Os08g41280) derived from phytozome v7.0 (chr-ID Chr8; po s 26070382 to 26071278 reverse strand)
ccggcggcggcggcagcaacctcaggaagaagaatgtgagcactcttcaatcttgatttctagtatcattttgtttgcctttcttgaattcctaatcaaatttgagtgcacaaatcaaattgtagttagaaaaggggggcgatttcagctcgaattccaccagggaacttaactccaaaagctaaaatcctggggatttttttttttagcaaaagctctcatattgttgttttcttttattgctttatgaattagcaacagtagtggttactgaagtctgaagcggtactggtatgagtcaatttaatttgaagtatatgcttatgaggtggtagagcgttgaaaagaaagaaaaaaacaacacattttttaatgcttaagagtcaatctttggttaaaataatctttcctgcttctgttgccatgtgaaatgctcaaatgtttatacatatgttcgactgttatatcctggttggtttgagatgatttcaactgtgttaaaatctgtaggaataagatgacgtttgctgactgattatgtgtgacaaaatgccttctttgcttccgtactacacactcaaatttctatgctttcagattgcaattttcttgcctgtattggtttcttcctgctttggtggacttcagcacgatttgtctttcctgttgatggctacatcgaaatgctcatttcacacaatgcaaattcagtagagagtagggagccgtggtgttattgatgttctagtgaagggatcgatctttggttgcaaaccaaacaagctttttcttcttctgttgattcacattcacaaattgcttgaccatattgataatgatattatgatgtattactaattggttcaaacttttttctaattttatatgtgcagaccc

SEQ ID NO: 10891 - DNA, 618 bp, Oryza sativa
  Intron number 2 from transcript LOC_Os11g10520.2 (locus LO C_Os11g10520) derived from phytozome v7.0 (chr-ID Chr11; p os 5754390 to 5755007 reverse strand)
gtgttccctcggatcttcggccacgaagctggagggtaagaactactacaaaccaagaacaccctcagcaagaaccattaatcttcagtggcacaaacaattaatacctccgtcccaaaatacttgtcgctttgagtttttgtttgtaacttttgatcgtttgtcttattaaaaaagtatggaattattatttattttgtttgtaacttgctttattatcaaaaagtactttaagtatgatttattcgcttttatatttgcactaattttttaaataagacgaatggtcaaatattgcaagagaaaagtcaaaacgaccactaatttgggacggaggtagtatcatcttggcaaaatagtttgcaattcatcgacgtgtaattctgtacaatgaaattcaggcttaaatagttgagtgatttttacaatcttaaaggaagtaccagaagtaccatattttccaatgtaaaatttggtacatcttatttcttatactaggaggtaccgaatttgtactaaaaattttggtacctcgaagtactgaaaaatttctctaaataattttgtttgtacgtgtgcataggattgtggagagtgtgggcgagggggtgacggagc

SEQ ID NO: 10892 - DNA, 839 bp, Oryza sativa
  Intron number 1 from transcript LOC_Os09g14680.1 (locus LO C_Os09g14680) derived from phytozome v7.0 (chr-ID Chr9; po s 8714543 to 8715381 reverse strand)
tctactctctcgcaggcgatctactgcacaagcaggttgctatgatgtgtgatcgatctcttctctgtggatgttttgttcctcggagaattttttgaattttattaggggtttcatgatttagtagatctatatctggtcatagttattaatttgaaatcgcattattttcggtacgtgataagcactggatgatgggacgaggatagaagaagctgcaaagacttggggggtgaaatgttgggggaattttagccatagtttgcgacttgcgagagcaggttcatgactaggtggttgttgtaaacatcaaatatagggggtttttgctatgaatcgttatggtttgtgtatgattagttgctcaggcagtgtttttcaacatataagaatgctcttccaggcttcgtacttctctaactaaccgccgtttaagttactgtgtaattcatagcctaattataagataataccataggcactatttttcttggtgattgttaggtatttgcttttaaattgttagttgcaacatttatctgcatgtttttttccatcatacaattgaacaagcataggggagtaagtcatgtaattgagcgggaaatctacctgctttaactatggtttgttatctgggcactgggtaccacatgtatttgcgacgcccaaaagaagtagacatcaaatttaccctgcttaatagataattgtagttcatttactatgtagacggtcatagttgatatttcttttagtttttttcttatttcttacttctgattattgtattgcttatttcagagtatttatccttcaaagatactgaaacttaactt

SEQ ID NO: 10893 - DNA, 797 bp, Oryza sativa
  Intron number 1 from transcript LOC_Os10g03830.1 (locus LO C_Os10g03830) derived from phytozome v7.0 (chr-ID Chr10; p os 1737771 to 1738567 reverse strand)
cccaaggccaacgccgtcgtctctcgctgctcccggtaatggcctccctacacacgcaattgcctagattctactgaaaattgggatttcttgggttgggtttctagggatgggaaatgctctggggaagcattttctttctgatatactactaggttactgcgttggatgtgacaattcttcgaaattctgcaattaagtggctgttcggtggctttatcagcaaccaatattactttgcatatgtttgaagatcgattattagagtatgtagtgctcaggatgtgctctagggcctatgagttcgtgttggatctgaaatgggtttggtttatgatgtccaaagtccaaacgtcaactgctgtgtgcaatgtagttcgttgcgtccattgtacttgttccgagggaattttaatatagaatcaaaaccatagctgtttaatatgtccctaaggtgggttttctttaagggatgttggtaaatgaataacttgtgtgagctaatatagtttatgtcctttcagaatgacctgcaattcttttattagcttgattggaaacatgttgatgagcatcctatgcttcatggaaccaatatgatgttgtttgcatttgctactgttctgttaagccaattggcatagttgtgtaatattagtttttccaaatcgctatgtcatgtaaaatcaattcccttttcatgcacaaacttatgtaataccagttttgctttcattaggtgctgaacatttgccttttgtgttaattacatttcagggtacttggtacttccacgg

SEQ ID NO: 10894 - DNA, 830 bp, Oryza sativa
  Intron number 2 from transcript LOC_Os12g32434.1 (locus LO C_Os12g32434) derived from phytozome v7.0 (chr-ID Chr12; p os 19535492 to 19536321 reverse strand)
ctcgtggtgtcgctggactccatcaccaagatcgggtagctagctgcgctatctgtagctgcacaactctgacaagatcgagcatgtttctctctgtctcgcctggtactaaattaagcacaaatctcctcttagattaagcacaaatcttgtgaactgaaagagtatgagtactcattgaactgaatcaaatccttctgatttgaaagttagttttgggtttaatttttttcttctcatcatgcatatgtagttgtaatcaaggtttgaatcctctagtatatatccacatactatatatatgtcaggaatattattttatatgaaaaatgtcattctgaatttattgcggaaaagtcgtaatataaggaagaaatatcaaatgcgtgatagtgatatatatatcatcatcaccaaaaatgtatcagttcgctttcaaaggtacaagtaatatcccatccagtaacaacttggatgttcttgaaaatatcttagagagcctagcatggacgtccatagaatcaggggcggatctaacgtgtgtgcaggggagacttccacaagacccatggatacccccagagcacccccttcgattttttcaccataaatgataaactaaaggtccctaaatagttggagattgaagccgcccccccccccaaccaattttttgttcctgaatccgcccctgcatagaatgatcaacaaactatgaagaaaatctctgaagcagaaaacggctgtgcaaatcatatccagacagcgaaataataaacaaatcatgtgatctaataattatctttgtttatgccttgtagtctacctag

SEQ ID NO: 10895 - DNA, 464 bp, Oryza sativa
  Intron number 1 from transcript LOC_Os11g43740.1 (locus LO C_Os11g43740) derived from phytozome v7.0 (chr-ID Chr11; p os 25942957 to 25943420)
aacgacaagcccacgatttgcgttggcgatcacaggtgccaaattcattttcctcttgtttgattagttattagtttattgttacagaattctgtcagtgtcatcgatatgaaatgcattgctttctgaatatcatacacttctgcactgaacagtctgaactttctgtttggaattgaagattttgatcaccatgcatgtaatgcatatgattttttttttccttttgcattttttttctattctcaatctaattcatgctgcttctgaacgaacccaattccacaaattattctctgttctttatgctccttctctgtagtattttcaatgctttgcatatttgtccatatgtcaggaaagtttccagatagaaatgaaagctcttagaacatccagaatcccagaggttaatcagattttcatatttactcaatgttttttcaatcgcagcagcatagagg

SEQ ID NO: 10896 - DNA, 909 bp, Oryza sativa
  Intron number 1 from transcript LOC_Os12g32160.1 (locus LO C_Os12g32160) derived from phytozome v7.0 (chr-ID Chr12; p os 19378249 to 19379157 reverse strand)
tcatttgcgacagaggggaccacttcgagcagagcgtgagcatgctccgtgagtacatggcgtagcgcatctggactcggacaatgtagtaccatcaaaatattttaattacttcgctttttatcgcttaatttgcatttatcttaattagactttgaaatgtatcagctgatatatgtcgatggaaatggaataataaaaatcgttccttgaaggctttgttcagaagagtgatgtatagtgtttgttattttttcccttgttagagatttgcaatattccctctgggttgataataaaaggacaaagctattgttatccttttaaaaactttcactataaataacatctaaaatatttgtcgtagaaatatggagaatatgtgtataaattagtttaaaaaaatatttcgataaaatcatatatttattgatatttctatatatattgaaataaaaatattgatcaaaattattttttagaccatgtccttgtattaatgtttgttttttgcttacttgttgaaggtatgtcgatttgtaattatcttaacttcgaaattgattggacaacttcggtggaaaaataacaatcctttattgaacaattatacagaaaagtgcttcatacactttaaataaagatatgtatatacataaacaggagatatagtttctaattatctaaacaaaacatataaataggagatacacttttccaattatctttaaaaacataaatgcaagatacacattttcattatctaaacaaaaaacacaaatatgtgtgatacacatttcctcgtggtccccaagccatggaagtggcgattgggaccagacatcaaattgaataaacataaaatcctataaagctcggcgatcaacatcttggaggagctcctccgca

SEQ ID NO: 10897 - DNA, 927 bp, Oryza sativa
  Intron number 1 from transcript LOC_Os10g04620.2 (locus LO C_Os10g04620) derived from phytozome v7.0 (chr-ID Chr10; p os 2200914 to 2201840)
acgtgcagctcagcatcgaccactgcctcttcaaggtcccccctccgctttccctcccattttctttccttttctttttttcacttctttacacacccccttttggaaattagagtcgatataagatgcagtttttcggttccttatgctgcggcaacaacaattgaatggatgattgacagtgtgatgctaagagtttatcgtttctgtgtcgaaacatgcgcatcgccatgcctgaagatcttgatggatgagggttatggaggtttcagtgtttgctgtagtcaggatggatggtgatgatgctcgtgcgctagattttgacctggaaaacaattactagacattttctaggcacaacctgttcgaagaggacctagagctttaattagaatggtccaaacttggggtctgttgtgcccacacaaagccttgtgattggtccaggtgtggagatggatatttgccaacagacattttgagtattaattgcaatggcttttgtagttgattaggacgtcgatcagtaccgagatttgtgtgttgtacaaggcgtaaatacatttccgactgattaaggtttgcactgttcaaaagttggaaagtggatctattgtcaacccaagcaggttagggcctataatagtgacagatcattattaaggtgtttgattttaacagcagcatttatgaggtaccaaactattgcatacatggaatgatatttagagaggaaaaaacatatgcacagatagttccaccatttaagtaccaccaaaatttcaagtcttagtttgctatgccatgatgcttttatttgatctaaaaaactttagttgttctgatatgcgatggatcatttttcttacttgcatttgtttctatgatgcagggacagtatagcgatattggaacaaaggaggtgct

SEQ ID NO: 10898 - DNA, 916 bp, Oryza sativa
  Intron number 1 from transcript LOC_Os09g14130.1 (locus LO C_Os09g14130) derived from phytozome v7.0 (chr-ID Chr9; po s 8371227 to 8372142)
acgactttggacccgggagctccaaccccgccagagtacgtcctccgacgagattggaatcatcgtcatcaataattcgatctctcgagatcgaccaagcttcgagacgtcatcaccgtggaggatatcagttcaacgttgtcatccgtgaggccttgcttcggatcgactacttttgaaccgacacaccaccatcgaaaatccgacgaactaccgtcctcggacgtcctcaccctcgtcgtcctcggcaacttgagactagtcggcaaaaatcgccacctcgtgcaggagtcggtgccggagctactagtccaatcctattcggtgtctgtcattgcatacagccgcattgctgtgcatgccgtgtatggcatttgcactttctctgtttccgaggacaacacaaggacaaatcaggagcgtttaattactattattcttgggaatcattgctagatgaaaaagcaaacccggggacatatacaaggcaagtgtgaacactggtaattagtagattgattttgtaaattaattactaatttcgtagatacatccggcatgtatctacaaaggtacacaatattttatatgcaatttatcgtatctacattatcagatctataatttattatgtttacctaaagcatgttttttatccaatatctattatgcgagtgcttccgatgtcaagccaactacggtctaacgctgggggctcgttttattttcttatgtataaatcatgcttgtgtaaggtttacataatccctgatatttaatctgctcgttatatcctgataatactagaagatccatgcagttttttgactacatactcgattctctgctatatgtcttgccttctagaaaatatttttcaggaacaattgagcactcgagtaggttgtggtcgagt

SEQ ID NO: 10899 - DNA, 921 bp, Oryza sativa
  Intron number 2 from transcript LOC_Os09g37000.1 (locus LO C_Os09g37000) derived from phytozome v7.0 (chr-ID Chr9; po s 21340330 to 21341250 reverse strand)
aagccttcgcccgcctttcctccctcctgcccaaggtaatttctacactgaatcggaggaattcggtgggtgaacttagttgctacttactagatgggtgatggggaataaatgactggcgatgcttgcatcttaggattatgaaactgagaaaaaaaagggggggggggggattttcgggatgcttggctgcttatttcatcgctgatgtgatggcacagtagagttctgtatattagagctgtttactgtttagaagatagccgtttgactcgaaaaatatagcaacattgatcttttgaatttggaggcagatgaaaataatttagatgtcacatgtgatgtttttgtttcatcggcttggcttgttaaacacatggtagatcattcagaattttttatctctttggaagaaaggggaactcagaatcagtcttctaaaagtcggcgctaggtagcaggtagcctctgtgattaggcgttagatggtggctgaacttgcttggtgggtattttgttgctattttagtgttgtatagtctaattttcatgtgtgcttgccaatttcttggatttgactagctggtctgatccaggcagggcctaggcaccaattaggcgctaggtgccaccagctagcgcctagcgccttcttgaatgctctgaagagatcattgttatgaagaaactgtagttgtatttgtgatccagtgatttgtttaaatcattttgttgcgctactacttccactgttgaagagataggtttcttgtgctctgatgcttgatagcctccggttcggtctttaggagctgtagtttgtttcacttctaccgtatatatcttaatttttttgaaactgatgtctctatttttttttatatattcttaacattcatataatgctgattttttaggaag

SEQ ID NO: 10900 - DNA, 773 bp, Oryza sativa
  Intron number 2 from transcript LOC_Os09g36220.1 (locus LO C_Os09g36220) derived from phytozome v7.0 (chr-ID Chr9; po s 20888234 to 20889006 reverse strand)
catctgcgcgctgctccgcaagtgcgggtatcgaggtgagcgtctgtgccgcacagtttgtttttgatccggttaaattggttgactgcttttgttcattgttttttgctcgaattgttgtcacgagtggctaatctcactagtgaagttgcaaagttgcggatgtttctgcgctgtaaaactgttactacgtggcagctgattttactggattagacctcaagtggggagatttgggatgtgacgatttgtgatctgttttttttttcagaagatatgttaatcaatatgctgattttggtctgtagttgtaattccttgctatctgtctctttttctttattttgccagagctgcttcagtagacgaaatttggtgtagtgcagcctattcgtcaggaatacctaagttgaggcattaccgaatatcatttttttttcgaaaaaaatatagctgtattttaacgatccatttcgtatcttgtgttaaattgaaataactacacatgtatatttgtttttttcctgaagcaaaatgtttacctgtatatttgatccttttttgggacagagttagagctgaaaaatgcagtttcctcttttaaaacaaaaaaaaagcaaatttattttaaagtacagttatttaggcacgttccttcttttttgatctcttggtttgttcgcgtattctctgggatcttggttaaattatactattgtgtttttcgtcgatcttatgcaacatatttggtcttgcagttgccgcagcctctg

SEQ ID NO: 10901 - DNA, 1059 bp, Oryza sativa
  Intron number 2 from transcript LOC_Os11g32480.1 (locus LO C_Os11g32480) derived from phytozome v7.0 (chr-ID Chr11; p os 18707050 to 18708108)
ccaacatccgcgccctgctccaagtcctcgacctcgtaagatatctttggctctttgcctgtctcccctcttatttcgtcatgtacaactattcatccgagtaaacctgttgccttgctgtaacagtagataaatcagctagttgaaactgttcccaatgaacccattgtatatggtctcagttatattttactgtttatttttccctggccttgggtcaatttgtaatttataagtatttgtttgggggtttagcctccattctctaaggctgattcgtagttgtgtgcttttgtaaagagctatggttgaacacctttaagagaatgtaaagcatcttgatgagtactgctcggtagattcagaagggccatgaggttttttgggaactagaaattattggttctgattgttgatgctgaagagttctgactatccacgtgggttagttttcttgttcaacaaagtcaggaaatagtttcagcccatcagaagtttgcattctagccatcctctgagtatcctctgagtagttgcaatgaatacatgggaatttgattgggcaattcagcaattgtggatcctagatccaagataaacatccagactgtacattcatggataaagagagtataaatccaggcagtggcttttgtgactgaaaaattcatagcataaagtggtataactgtaagtcatttgaccagacaaatttggtaacctatgagtctggttttcctttgaaccatttatctgcctcagagccttcaaattgtttttttttgggttgaccagaaatgtcttcttaaacaaacaagaataccaatcacattttagaatgtttagaatgtctatgcatcatctctcatgcttaacaacgttttatataacatgcttcatactgctcataacttcttggaaggcaagtgccatgatccattggacagccagtgcatcaaagtatccatttattcttgtgttgaacttgtagattggctctaagctctaatttatggcttttcaggaaaacccagatttgtggaagtggcttactagtca

SEQ ID NO: 10902 - DNA, 998 bp, Oryza sativa
  Intron number 2 from transcript LOC_Os11g33360.1 (locus LO C_Os11g33360) derived from phytozome v7.0 (chr-ID Chr11; p os 19276670 to 19277667)
gattccggacttattttcgaaaacgaaatctgtcggtcagaatttttttggaattttgcggaaacggaataaaaaatgataagggcagtttctgtcagaactcggaatcggtcgaaaactttccagaaattttctcggaatttccagaaattttctcggaattatcagaaattttgtgactgaaataccctagatttttttaagcactaagtagtgaatatcatggtgtttggctgttattttttttaaaaaatatttgttatgtaaatctaaaattacataagaatatttcttttcatgcattgggatttatcgacaacattactcttttaaacatagatagtttattcaattggatttatcagtttgagggggttttttattccgataaattttcagtaccgtatttgcgctggttcgttttcgctccgttttcggtttcgataatattcgattccgttttcatatccggggtttccaattccgaaaaaaaatatgaaatcgaaaacgataaagatggcttccgtccgtttccgtaccgttttcactcctatatatgaagcaattaaagaaagggttagcagggtgggaaaaaatacatttattatagtttgttgttattagatacaatgaacactcaattaaaaatagaaaatgccttactttaatttcaatttattttttagaattattttcaaaacaaactaatatgcctgcccgcgcgaatacgcgggctatcttcctagtttaagtaattattaattattttcctatcatttgattcatcgttaaatatacttttatgtatacatttaattttacatatttcacaaaagtttgtgaataagacgaacgatcaaacatgtttaaaaaaaatcaacggtgtcaaatatttagcgacggagggagtatttgattatattcaactagaaaggtaaatcaatctcgtttatgtactgtcagtatattgcacctgtcaacgaccacctaggacttca

SEQ ID NO: 10903 - DNA, 997 bp, Oryza sativa
  Intron number 1 from transcript LOC_Os10g10244.1 (locus LO C_Os10g10244) derived from phytozome v7.0 (chr-ID Chr10; p os 5649492 to 5650488)
aggccatcggatttgcctgggagctcctcacccaggtatcggatcctactctctctctcatagatcccctgtttgttctcgtgcggatgctaatgggctgtgcgaatctgattcgattctatttggaatcatgagtttggttgggttggcatgtaactgtatcgagcagcagatttagaggttctccagtgaggagaattggcatatgcgctgacctggggtttagcggtgttgccctgggtttttgggatggcatgacagaaattaattaagcagttctgttgtctgtgtttgttgtgaaatgaaagattgtattatttgtgagtgattggaatttaggaagtgtaccaatttggcatgtcctgtgatgaaagtttggattgtttgatggcatcattacataaactttgatgcatttgcacgtataacttcaatttgggcagtagcaccggttcttgttgtgtttcatagatcaagtttcttggggtcagcttctcctgggaagcttccatctgaaaaacagaactgttactttgtaaatttgtggaatgtatatgcctgattttgcaagtctgatggaatctgcctgtgccctgtaaagcttacctgtctactgatgttttggattcgtaaatcttcttgtagtgttgttacttcatgattacgcaatggtctaatgacctacgatttgaacttgaaaatgcaaattcaaaggattgaggaaggtacattgagtgataaggtttggttatgctgtttggttgttgaccgtgcatataaaattgtgtagtagtctaaggtactacctaggcagtaaaaatccatttgttgggagtcttgtactggtctgagtactgcatgtcgtatcatttttaatgatataaggctttggactaagaacactctgaaagtaatcatatatctatgtaaataaatataagcggccttcttactggttgctaaatgcaggtgtacaaattgcctaccgatagaattt

SEQ ID NO: 10904 - DNA, 991 bp, Oryza sativa
  Intron number 4 from transcript LOC_Os09g32220.1 (locus LO C_Os09g32220) derived from phytozome v7.0 (chr-ID Chr9; po s 19235902 to 19236892)
ggtgaacttcttcttttcgggttttgttgcaggtatgcactttatagtgtatgctactgtggtacctgttcttctgatatgccgattccatgtttatatatttatttaatgctgcttcaaaatcatcagtgttaagtattaactagtataaaaatacatcaccattcaagccttggcaaactgatatgatgtgtactacgttgttctcatgtgagatctgtctttttttatttgaggcacaagtgcattgaaatggttgtcatgtaatgcactggtggatcccctgcctggtggccccaggcagccgcccgggttcgtcatgattgcgcagtgaaattttagtgttaacttagagatttaaaataatattttcatagcagacacttagttgagatgtacttgcccaggctctagaattgctattgggcattgaagcttcagtcatgctacttatgttaagaaaagtatatccaggactgcctggaaaaaagtagatatcatatttccacgtcgatgtttaacctgtttactcatcaaggattaattctccatggaaattatgaagtatattttttttcagttaatcagattgccttgcatgaaataaccttatgacagtatgatcattttagcctggatatatactgaagttatcccatctcctatagctgcatttggaaaattttagtttaaaatattgaggtacatcatccttataaccatgatcttccctgagacgagaagtttgacaacaactaaaattctacaagagtgaaatgtgttatccatgattttgaattttcagatatgattgaatggttgatgggtttggtatactgtttactgataatatagccatacgtgtcatccacttattttgtttttgtaatcatatgtacaattcaatggcatgtacttgtgtccctggactcacatatttcctgctctcttttcagctaagattccctttccattgactccgcgattcagg

SEQ ID NO: 10905 - DNA, 983 bp, Oryza sativa
  Intron number 1 from transcript LOC_Os10g36410.1 (locus LO C_Os10g36410) derived from phytozome v7.0 (chr-ID Chr10; p os 19395776 to 19396758 reverse strand)
caaaccgtcgggaccggagttaccgcaccctcgtaaccatggcaaactgtacgagaccgtataaaatttattaaaattacaacttatttttaaaatttatttgaatttaaggaggttatcgcggttttccttttaccgcacctcgcgttaagtgcgataactatgataaccgcgcggttaccggcggttggggaaaccctgcccaccactccttatattttttttattaaaaaatgtatgtcaaagagtacacatataagctaaaatgtacttcattcgtccaaaaaaaaagcattcctaacattccaaggcaaatttagtgaggagtaaaaatgaccaaaatgcccccctcatttttgggaaaaaaatatggtgataggtaggtaaaaatggtattaaagggataaaattttctgttttatgtgctggggtaggtaagatgatggaagttggttttctgtgagcaaaatttaaactcttctttttttacggaggaagtatatgtagagactaagagatatgatacatataaataattaaaaaatgattcaaaaagctactgttgcaatgcgggcattatactagctagtacttcctaccccaagaagattcaacttaggtgttaatgacactacatgggataataaatctggatagatgtcctcctaacttgtccaaattcactgtactacctagtggcccatccaattcgaatttatacagttttgttgtagctaggtagtgtttcatttcacttttactctctttgttaaaaaaactcaatctagtacttgatgttgacgtatcatagtattacgagtctgaatatgtatatacccaaattcttaatatagaatgtgtcaatatccggtactagattgattttatatgagacggatggagtgtgacggatggagtactttgattttttcagggagactaaaaagcaaacgtccgacatggtgtatcactaggtctacagg

SEQ ID NO: 10906 - DNA, 1026 bp, Oryza sativa
  Intron number 1 from transcript LOC_Os11g32300.1 (locus LO C_Os11g32300) derived from phytozome v7.0 (chr-ID Chr11; p os 18620125 to 18621150 reverse strand)
tgggtttgggcgtatcaggagcgacgggaggggacgtatcaacgaagtatccgatttaatttattttttcgaaaatcgaagtaaataacgatacgtacgggatacgtatcggagcgtatccgatacggatacgtggcttttcagccgtatctgggtaacatagatccaaacatctgctaaaagcatttgtctagcgtagatggtgccaagtttgtcgtagcaatgccataccaggacggatccaagacagggagactcatctcctttttttcttcggccctcttcaatgatgatccagcagggagttcctaagctggatccacccttaatatcataattcacacatggaagttcctttgttttggctaccttccctaggtattctttccacagaaaatgcgttcttttggtttggctaattcctcaatttatataagcatacttttcaaactgctaaacggtgttttccatatgaaaacttacatagaaattgctttaaaaattcaaataaatgtatttttgatgtttttaataattaatactcaattgattatatactaaaagtttatatgttgttgcgtgcggctaatcatccgtttcaaaatgaactttagaataggtcctttaagtcgcccccaactttgggggctatttttaatacaaagatgaagtacactactaaaaagggttttttttcatgtggctaaatcatattttcataggcggagcccccaagtgtttgtgaaaaaaggaatttttgcaggcaggtagcacaacaacttgcaaaaagtattttcgcgggcgggtgttatgtcgtccgcgagcaaaaacaaaaatcgcaaaaaaaaaagctttttgaaaccctagttcaaatccaccctagtcgttgtcagatccgcgagggaggtggtaaccactgttggatccatgaggcagagggttgttgccatcgttgtcgatgcaatctgccgccgttgtcgtcgtcattgagacctcatctcacccgaggttgacggtggcggatcc

SEQ ID NO: 10907 - DNA, 739 bp, Oryza sativa
  Intron number 2 from transcript LOC_Os10g42630.3 (locus LO C_Os10g42630) derived from phytozome v7.0 (chr-ID Chr10; p os 22916781 to 22917519 reverse strand)
gtgttatcccaaacccggtatgtcatttatttccttcactgcctcattatgacccattgccattgcctcttgcagtaaggcaccatgtatattgcaactcttgttttcattcggtgctatactcttgggtgaaaaaacaaaaaacaaaggcaacatacataattaggctccgtttgacattttggtagattatggtcatcttgcttggtgcaacttcttttagacatttcagcgttcggcaaatttcttttctctcgatctttgttgcagatgataactattatgttccgaaaatttggaatagttgtgagaaacataacagttgatggcatatttttctaaccttaagtttatataattaaaaggaactgtaccgattataaatttccatttccacagcaacttcaaagtaagttataatgatgctaactgtcattggtcagtgaggcttacaacaaactctaacctgtgtacagattctgtcttgtgacgaaaactcttcatgttgaattcttctgtcagtaaactttatgctgcttagtcccttactcccttgctattattgtcttccaaaccataaacatatgtgcatatcaggtcggaatctgatttgggattttgagtgtttgagcgtgcacagttgatagcccttctcatgttgagcattttgttttgctaattgtttcttacattttgttctgtaggtactgcaagtcaatagactggctgccaatcttca

SEQ ID NO: 10908 - DNA, 1051 bp, Oryza sativa
  Intron number 1 from transcript LOC_Os11g14950.1 (locus LO C_Os11g14950) derived from phytozome v7.0 (chr-ID Chr11; p os 8416064 to 8417114 reverse strand)
ggcgtcgcgccggttccgccaagccccaggggctcgtaagatccgtacctgctcgaaaattatttttgttggtccggtttgatttgggtttctgggcgttaaggactacggaaatgggagctcccctccattttgatggaactctcgtcgtatccgggttgacctgatagtgtatagatagaactgatcctatcttttatttctccccgtctcgtgtcgccgtatcggatcgattatggtgttaggggtgtggaattcggggatttagcattccgttgtgaaatctgaaatggttcgttctgagcagtcatttctgtagcgcctgagcataattgaccagaattacaatcatttttcaaatcaagcattcattattgggtgtttgtgacatgcttgtttgcatttgttgcccacaaagcctgtaaagtgacttacgtcggagtccagaatattagctgctgaatggcaattctcgtaagatgatttagttgcacagaacatttgttatttgtttggtccatgtcaatgaaaattgtataacagtatctttcagttatgcaaccccttttttcttctgaagactagttgtgttaacaaagggaccaactttcaagatgtgtataatatgctttttctgttaaggttgatttagacaactaagaagctttccatatttatgtatgtatatgatgaattgatgaccatgtaggcctttgaaccagagtctagcacaactcctctttaacatttctatgatgatttcttcaacatcaaacggcaacaatagtttctcaagcaaccttttaatatacctctttgcatatgtatacctaaagagatcaccaattgttatacatttctattgaagattgcaatcaacacagttttgtcgtcctttcatgttttttaggacttccttttaagttataaataatagcatctgccatatagaaatgttaaagatgcctgtattagttccattttgatctatatttttttctatgtttatcttgtaggattataaagcgtcatacactatcagtttttgttg

SEQ ID NO: 10909 - DNA, 955 bp, Oryza sativa
  Intron number 1 from transcript LOC_Os10g37740.1 (locus LO C_Os10g37740) derived from phytozome v7.0 (chr-ID Chr10; p os 20128565 to 20129519 reverse strand)
gcatcgcctccggccgctcgtccgtctccgatccggtgagtgaagcgagcgagcgagcgggctcgatctccgggcgccgccattcggtttcccgcagccgcatttgtgtggaaggaaaccgaatcgtggattcgttgcgttggtttttggtttggtgttgttgttgttattgggtctttgcatttggggggggggggggggaagtgggcattgcattgggtgaagggtgtcgcgctaccaggtggcatggcaaagcgctttagttttttctttctttttttctttagcattattgcgctttaataaaggttaaaggcgacagcttgtttgcttctgcccgactatttattttgtctagtttggttcaagaggatagcgtttttgtctgcagagctgtagcaatgtggaacatttattccctggtgttcatgcttcatgggctcatgaggagatttgatgctgcattggcgatggctggacggtggtatagctgtccgacattactagaaaaagagaatctgccaataataggtttattggattgggaagttatcaaggaaatgcttttcaatgtgtaacttttcatgatgggtctgctttggtcatgtcccttaatcgtagtcttgctttgttgagcgttgaacagcttttcagaaggatgtgattgatgacgtagttgatgtctcataatactgagaacaaaacattgctcaccaatcacaataaaaaaattgggcactgggcagtgtatattgtagaatgaattggtggaagagtttgatgcacaatgttagctaataggtatagtatgtgacttctagcggatgaatatgaattctgtgcttgagaataaggaaagtaggattagtttctcctccctattatgagcttgagttgataacctatattgttcttgttagggtggtgattctggcaccaaaagaccaaaattcga

SEQ ID NO: 10910 - DNA, 717 bp, Oryza sativa
  Intron number 2 from transcript LOC_Os09g32010.1 (locus LO C_Os09g32010) derived from phytozome v7.0 (chr-ID Chr9; po s 19104502 to 19105218)
tcgtcctgcaatctccagcatcttcagtcacagaggtttgcgcttctctcagagtatattagtccataaaaaaactaattttcttctcgagcttgtgcaattcagtgtcaatttcaattcgtaagttatctcctgcattgagtaagcaggaatgagtaatttacaagttctgaattggtatttggggaaaaaactgatgaaagagcactgaaaagggagctgtgtctagaatccaatccgtaattaagtgtgctattcagtctgtcccatcattcatacgcacatagggagtaattttgctgaactttagttcggcatctaattaatttggtacattactcagcaaccgtccctcttcagtccacattgaatacctcttgaccacatacatgtagttcttgtacggctccactgtacattagtgttcagagttcactagaacaccatttgaccacatggtatacaaacacaaaaaatagttttgaacaaaattaagcataaggatatagttataaaatgatttttttatatatatttgtgaatttgcgcaagaatgtactatccatgtaatgtccgctatacctatcttctcgtactgttttttttttgggacttgtattttttgatgaaggcttgaattgcttagttaactttcaatttgttgtgtaatttgattgaatgaattttctttttttcattttagtatccggaagatac

SEQ ID NO: 10911 - DNA, 921 bp, Oryza sativa
  Intron number 1 from transcript LOC_Os09g32320.1 (locus LO C_Os09g32320) derived from phytozome v7.0 (chr-ID Chr9; po s 19294549 to 19295469 reverse strand)
accacttcacccccgtcggcgccggccaggaggaggttcgtgcttcttgattccttccctttcccgtggagatctctctcgtctttagctaattgctcttccaggttcttggtctctgcgtgaggaattctttctttcgctgttgatttagctcactctctttgtccgggtttctttggttcggagagtagttcagatgaagggatttagtagctgttcgtgttgatttggctcgccggtggaatgcaggagtgtgattatgatttgggtttctttgtttttgttttaattcttggataattgcaagcgatctgtggatctagtggtgaaggggatcttgaacgtcttgtgaccttgactttcattaggggttaactggggtttacattaattattacctactagtcgatcagcacgttgtctgcagtcaaaaaagaatccgaagctcgataaccgtgaagaatagcactaaattatatgccttcagccttcctaaagaaaggctagttggtgggggacacatcatcagtaaagagagcatcaattgcaaagatgaaaccaaaggaggaaatacagtacatcgtttttaatctctttggatagtgatagttatcattatgaacttgatatgacagagagagctcagtctctccaggaagcaaatcatgtgcgattgtgtcatgagcttacttgttctgattcttgtatgcaaatcattgatgtgccagatttttggaatcttttactacagtgttcattttgtccaatgctcaactggtatgagtcaattgacactgtcccaagcttccagtgatgaacgattcttttgaactgactaaatttaaactgggcattatatgactgaccccaatttgaaaaccaacagttgggcttggaggcaacaggcatagaatcaaacga

SEQ ID NO: 10912 - DNA, 876 bp, Oryza sativa
  Intron number 3 from transcript LOC_Os12g40590.1 (locus LO C_Os12g40590) derived from phytozome v7.0 (chr-ID Chr12; p os 25083382 to 25084257)
ctggatacgcagaaacacacggcttaacagagaaggtaatacagtacacttactttttcgctgggccagcgacaaatcgtgaccaaatatatatgcattaagatttaagctaggatggaattatatataaagctatagttcaacaacataattgttaaggtcacacatccacaccgattctacgtaacagactatgatcgttgctctacataatagactgtacaatggccatgaacactctaatattagtacatatatacacatatatatgcaagttgataaatctcctcgttctgtgttgataaatctttaatttgtggttactgttaagggtgtaagtgggtcagtcgatgaacccacttaggctgagttcgtgtcttcacttttctaactgatcacctctcttattttctatgcgcacgtttttcagatcgctaaattgtgtgtttttttataaaattttctatacaaaagttttttttttaaaaaattcatattaatctatttttcaaaaatctaatatttaattaattattcgctaatgagttaccctgttttgcgtgtgtgagaggttagttcgcaacctcaatcaacgaacccaaccttttagatcaaataagtgaacaacttaatttctatatataattagtagtaccatttaatacaatccacacttttggaagagaaattacattcaagagcaagcctagaaacagtactaaactgttattctcatgtcaatgttgggtagttaagctagtacgtacgtacgtggcgttgtatccatatgttgcatgcatgtatatatatatgtacatgatgcaaatcgatgtgtgttttccctctatatatggcagagacgaaggagcaggataa

SEQ ID NO: 10913 - DNA, 969 bp, Oryza sativa
  Intron number 2 from transcript 13114.m00094 (locus 13114. t00006) derived from phytozome v7.0 (chr-ID ChrSy; pos 450 471 to 451439 reverse strand)
ctcggttactcacaaggtatttgtggaattgcctcgtaaattttctgcatgttagtgctctatttttttcggcataagtatgcatggtcaaattataattatcagttagttgttatatgttaaatagtagagaaattttaccatccttgaggaagggaggtaccaaataagagccgtagattaaccagaatcgaatggctgagaggaatcggtacctcgcggtatcgccccaacgtccaccaggtactccgcatggatgagttcattgaggggcaaaattgtattttcgcgtagtcagcggcgttgcctgagcagcccatccccttcctcttcgcacctcacctcgccaggatctggctaagggcggtggcaagaacgactaggatcctcgaatttgctagcgggtaggcaacaagagcgacgaggagatggccaaagtgacaagctgagcatgcaaggattggctcgacttccctccgcttggtccgctcccaccgctgctggttcagtatcgagctaatcccagccgccctcgatctctggctgatctcttccgtggggacaccttgaattgttctttgttgctattgttcgttttccgccggtccttcttgctgctatgatttgtgttgtggggtttgttggatcaaacataaatggctgtatgctaccctataagctgaattagcagttcgatattgatgaactaaaaacaaggtaaaaattttggatgtgatgtaaataatatcgtttcctttcacccgcctcctagttcctccctcttggcctcttttcagatcaaagcaccaaactcaaattgtttgccgtcatgtgagttccccttgcaaggcatcctacaccttttgatcaatctaatttcactacggcatctgtttcttctttttgttttcccgtcttgtctgtttcgcgagaggaggtaatcgtcgggcttgtgcagatcgagaacag

SEQ ID NO: 10914 - DNA, 669 bp, Oryza sativa
  Intron number 1 from transcript LOC_Os12g30590.1 (locus LO C_Os12g30590) derived from phytozome v7.0 (chr-ID Chr12; p os 18341254 to 18341922)
gcaagtgctttgctttttcttggagtgtttctcaggtaattggaggttatattcatcattttaccagttgagcctgtaatccgtaaaaccaacactgttattgtgtttgtttgtttttgtttttgtttttgtttttttttttgcggggggctgttattgtgtgttaccatatgttttactgaacaaatgtttgcttctaacatcaaatggctacaattctgtcagcatctatgggttcaggttaattataagctgccatctatccctattggtgatctgtattatgtactgtctttcgccctctaaaagtgttttcttgaaacaatttgctgatgttgcgattgagactctatgcaactacaagttgttcctgtttttttctggatctggctgagtttgaatattgaattgcgtggaatgtgtttcattgaaatgtaattcagcaaaactttcaagagcattatgttattacttagaacacatatataaaatttttattcaccaattatttttcgtttacaaatacgccgtttcgcttattccccgaataagtgaatcgatggggctggtagtctctgtggtttgcactccatatgtctccgtgacatttttctcttccttttgcttttgtgaagacataataaaaaattttcttgctcttgcaggaat

SEQ ID NO: 10915 - DNA, 655 bp, Oryza sativa
  Intron number 4 from transcript LOC_Os12g03270.1 (locus LO C_Os12g03270) derived from phytozome v7.0 (chr-ID Chr12; p os 1266195 to 1266849)
aacaggcagttctacttgatctcagtccactacaggtataatcagtgctggcacatgcagatctcctatttccatttaaaataccatatgattgatgggttaagtttcccatcaaaagcatgaattcttatgagtatcagatgtgacatgttaatttcatgtaaatattttgagatatttcaaaccttttactgaagtatgaaggaaaatatcttttcttcctcagtagtttaagcatttgaatgagttgtttcaagcatactctcgacatctttgatgctcaattcatctttcatttattttttatccttttttacaataataaaagttcttgtttgcttttgtgattattcatggacaaaaatgttggtatatccatgaacaatatcatggtaacatccatgaaacttgttatttcttccacaacactcatttagtagttgaattgcatgctttaaaaattcaaatgaattcttgacttggtttattaattccaacccttctgttctacaggagcaatgatggcatctttatgttattcttgactgtttcaagtttttacatttaggaacttttttacatgatactacggttttgacagttccatgtttactttataggaagagagactgaggttcttgagacaaagattaaa

SEQ ID NO: 10916 - DNA, 963 bp, Oryza sativa
  Intron number 1 from transcript LOC_Os09g32400.1 (locus LO C_Os09g32400) derived from phytozome v7.0 (chr-ID Chr9; po s 19349964 to 19350926 reverse strand)
agatcgtcgccgtcgtcgcaaggcccaagcccgtagtaagccctccctcccctcctcgatcggcctctcttttttttaaagggtattttttattggcctctacatccaactggatatatacggcaattgaaatagggaacttagctctgcaaataacccaatctctgaaattcgctcctatagagatttgaactcagaaccttagggtactacttaagtactcaggtcactgtaaccactaggctacatgccctttcgtccggtgaggtcttgtgcgagcgacaagctagctaggctcgtttgcatctatgttgagattgatctatatttatttgaccgtaacgtcttccccatagcagagtgaatagcaagcatcctttctagctccattcttttttttcttttctgtttgatttgatttgagcagggtattgtagtgctccttcctcttccaatgtggatttgttttgtttactatatatgaaaaaaaaagtagcttaagagaagataaatgatgcagtgatcaaacaatggatggcagattaagatgcaaattctaccttgactttctaattaagaattaccctgttcttttttattaagatataaattatatctcgattttcattagaacgttttttttaaactgccaaatgatatgtttcattctaaaaccttttatatagaagttgttttaaaatatcaaataaatccaaattttaagattgtaataataactaaaacttaactaatcatatgctgctaatgacttatcctgcggtgaaaaatcttcatcttcgtataagtcaaacggcaactaagacgcatttacgtacccatttatgtttagagaaacaaaactccccttaggaaacgttgcatgcaaaaaaaaaaaaatcttcactttgttgttttcttctgttagtgtctgtattattcattattatacattatttgttgcag

SEQ ID NO: 10917 - DNA, 994 bp, Oryza sativa
  Intron number 5 from transcript LOC_Os10g24094.2 (locus LO C_Os10g24094) derived from phytozome v7.0 (chr-ID Chr10; p os 12269794 to 12270787 reverse strand)
tactattgaattctcttactactcacccatccgaggtactctttctggttgtcccaaatcaagtttagattgcctgcagagataatatggcaccagatattatccattctagggttaatgctgaattctgcatcctggtttttgttttgtgccactctgttgcatgtgaacatgttcgtctgaaaatggggtttggaaggatgaaccatcaacatatccgctacatttattcttcggtgaatagctaatatttcttctatcagtgttagccacggaaaatcagatagggcagcgaattcaaaatgtagaaccctgtcctgctaaataaagtagtgctttatttttactacaggtgcattacttctgtatttattctctttttattttcatcttagcaaataagatactgatgatatgacttgattatgtggatctaatcattcattttcaaataatggataaacttgcatgtatagtgtatctatagatatgtatgtatggctaaaacaaaaatctaaattggactgtagaatgaacagaagaaaagccaacaaagaagaactcgcttgtaagatgtactgaagcaagagatgaaaataaatgttgtgattgttgtcatagtgaatgatgattaatattctcaactgtacttcaaatttttaaggaagtcaaagtttgattttttttttttggggaaaattctgatgatgacaataacttgcatgtttacagtaccattttctgtatgctatttccaggtgattgtttggaagtggcatgcacaggagagattaataaactgccagaagaggagatgacatatatctgattgatagaattgtctttagtgtaccataattatacttcgtctttagaatgttgctccgcctatgtgggccgttcgtccccatagggtcatgccaattgccaaaattgatgttgggcgttcgttttaggctcatgttgttagtgtaaatgtggtacactgatagag

SEQ ID NO: 10918 - DNA, 975 bp, Oryza sativa
  Intron number 1 from transcript LOC_Os10g24094.2 (locus LO C_Os10g24094) derived from phytozome v7.0 (chr-ID Chr10; p os 12272861 to 12273835 reverse strand)
ataggtgagctttctgtgtacctgtgtttcatgtggttagctctcaaccaaagtggagttcattttttgttcttctatactgtaataagaagtgacttgtcttattttaatttggttttgggtaatttaatcttgagaacaaaatgcgttgcaataggactcgagagattcatatggttcagaagtatacatatgattgtattatttttgccattttatataaaatgttctctatatctctgaattaatcaaacccatgtttttaagactttctcaaacccatgtgatttctgaatacacttgttgaactgaatgtatgaaataggtaactgcccatctattcctctgaaattatactgaaatatgaattaaataatcatgcatgccatgtcccaaacaaaggactcttcccctgaattgcggtcttaaaagtattgtatcacagcaatacatggaacccttttacaattagaggacttcgatgagtggaagttatttacttttaaaatacttaaaagtatgtctaatcattcatacgttcttattgaatgcaattaagtttgtgaatcatttagattatttttcttgactatgcaaatataaactttatagaggattatcacctttactctgccctatttcaaacctaggaaattgcatgcgtttctgcaataagtgaattgcttaatgtgtgtttattttcattagtgaataacattataagggtgcagaatttatatttctgtgcaaacacatgcattttcggtaaaacatttatttgatagtctgaaattacatcttatataagtaaaactttgagctgaaacgtatctttctaatcaccaggtttcaagtcaagaaaaagtaattcttccacagttttatgactattatcctatttgttactgttgggccattgataatcttccttcatgtgcagcttcggcgattccggtaatttttgcgttttgtata

SEQ ID NO: 10919 - DNA, 890 bp, Oryza sativa
  Intron number 2 from transcript LOC_Os08g42960.1 (locus LO C_Os08g42960) derived from phytozome v7.0 (chr-ID Chr8; po s 27154876 to 27155765)
cgcgttccatattgcggcgaagcaaggccatctaggtcagttctttcttcttcttcttcttttttgtttgttctttttttttgttcattttctgaacctgatttctgttattagtgatgactgacttcgatctcagcctgccagtgccaagtcaatgagctgatgattagaggtttatggcattaggattttgcattgacttaatctaatttgcatgtgtcattgtgtagggctttgaaaaatcctatgctgaacttgtctgatttgacttatggaaatatacaagtgcttttgcttttgttcatttcttttcttcacaacgtgcattgctaacatgaatcgttgtggttaccttcttctctcttttttttacataaatgtctgagactagtgcatatctcacatctggtttgatttagacctcatgtccagcaaggaagcaaataccttctttttaggtgataggcaagctgagtttttcattatggatttatggtcttgtttagtgagggttgacaaattctgtacccaaagaagctttcacgatgtgtctacattgaatggtttatttaagaatatatacaatgaaaaaaatggtagtattcctttcgcgcgatggtggattttgtgcaaccattattagttttatgaccttatgatctcattctgttttctacttgtgaaagactgaaattcatgtcattttagtcatggagttatatctagtagccagcaaaccacagctatagtcatgatcacaatgatttgtacaagatatggtttagttaagtattttgctaacgaagaaaaaagaaatcctggctcatacgtttcttttgtttcttggtttttcagaagttctgaaggagctgttgcaggcttttcctgct

SEQ ID NO: 10920 - DNA, 1014 bp, Oryza sativa
  Intron number 1 from transcript LOC_Os08g43580.1 (locus LO C_Os08g43580) derived from phytozome v7.0 (chr-ID Chr8; po s 27564806 to 27565819 reverse strand)
ccggatccgccctctccttcgccacccccgtcaaggtcagatccccccacccgccaccttgttctgccgtacatcgatccatcgattcatcgatccgtgtgcctgactggtttctgggtgctgggggttctttttttttttttgagctttcggcttgatctcgggcctgtttctttggccgatctgtgggtttagcttcgtgccctttggtggagcgattcagatgggagaacggcgaaaagttttctttctttttttttttacccttttcgctttcgggtgggtggcacaagtgcttttgtgtgcgtttactgatccattttgtatagcagatccgagcagatctgccttttgtgtaggttgaaaaggctgcaatatacttgtatccgtatgaaatttccgccttgttaggctacgagtagatttccgcatagtgatgatgaattcgttagtcgttactgggatttactgattctacttggatggtaacaaaactattggtcctttgggttctccataaaaaagttggttctagtattgatatgttgtactaccacctaataaagaacgggcgtatcttgttttcccttggcacgaaaagggatttttgtttcgccccgtcaccatccggcttactagcctggatttttgtcatacggcttcgcaaaattcttatgttcatggtatatagggaaattgtaataaaatctcttacagaaagtaaagaaaaaaaaactctgatgagtttgcaactatgcattggagattatttctcatcgaaatcatctttactcatttcaacaccccatactggctactgagacaaattcaagacatacagctaatgtgatactagaacagtagaattatgacaataacactgttttctatgctatgttcttttcccctgtggatagtatgctattcctttttctgcattacttctgttgtctaaataaacttgttccatgaattgcaggcagtcaagactaattcgatatctttcaccagcgc

SEQ ID NO: 10921 - DNA, 775 bp, Oryza sativa
  Intron number 1 from transcript LOC_Os10g32900.1 (locus LO C_Os10g32900) derived from phytozome v7.0 (chr-ID Chr10; p os 17150554 to 17151328)
ctcgacgacgtcgacgacgagcctttcgccgtaaatctcctgaaagcaaattaggctcaattctgcagttatttgcaagcttcagtcagtttcagcatggttgttttcagcagtttctgctgttgttattctgcatgcatatggtctgataatttattttgcattctgcttgcccatgcatattaggattccatagcaatggcaattggcaaatgctaatgctctgatcagattttgctagagcaataattgttaggtggctatcatactaaagcggaaaggggcaccagatcctgcgaaaatctttctgctttttggacctcttgcagtacagatgggaatcgatgcctcgacttgatagtttctgcttcctaatctccacgagctttatgacattgcgcattggaatttttgattagttgcctgatcctaacagtaacattccccccagcatacggcatacggacctatacctctactgttcttgacatcttcagagatttcagatttcagatagaacagtataatttgcaaatacaacagtatggcatttgattccttgcaaaaaaagagattataaaagaatcatagaaatgggtttaaatagcctaatacaaatctgtaaatcaccgttttgtcaattcaggattttggcgatgaatgtttgcattgcacaggcctgtagaagaatacagtttttttttctgaagaaagaaatggttacgagttggtggtttgatggtttttgtctgaattttgtttttgtttttgcagg

SEQ ID NO: 10922 - DNA, 998 bp, Oryza sativa
  Intron number 1 from transcript LOC_Os10g35840.1 (locus LO C_Os10g35840) derived from phytozome v7.0 (chr-ID Chr10; p os 19089527 to 19090524 reverse strand)
cgccgcgctcgagcagttcaagatctccgccgaccgtgagtatcctcctcgcgtccctagcccctccttttcttcccgcttcgagctcgccggcgttgatgcgacagctgtgaaaatctttgcgtttttcttcgtgttttggtgctttgattactgctagttcatatttgagcatgtcaattagtcaataggtaggttgtgtatggagaagaaaaggaaaagatttgggatgtcgcattgctcttttctagatttgctttgatttgtatgaactatttctgcaggttttctgctaagcgaattttgtttactacctatacgtttaaccggctaagtaatttgagagagaaaagaagaggcaatttgtgagctatcttggcattagagcgaattagcattggagatgacgaacttacacgctaacccaaaggaattattattttttgctgttctccagtgaattgcagggagaaagcacatgccaacttgtttttttgtgggttagttgtagacctgtagtagtaatacacgaaatggctttttttattatggcaaagagcttttcatagtaagtaaccgaataatagtagttcaacaaactggttactattactgcaagatgccaaattttcaaatacataaagatgaaaagaacacgtcgtagttgtattttgttttattattagctattggccaagtatgttgcatggaaaaaggttccactctatcttgttttggtcaattgtttgggaatttgaggttgtaaccctatgtaattagtaattactgcaaaaagtaggtattccagatttgcaaccattacactcataatgtaaacacaggatacacccaaaagaaaaaaaagtatccatgtgcaactattgattgaaaacgttttgtgatgcgccatcgatttttagtttcatccttttagtacaattttttacatgtttacttcttgcagtatttgacaattttttctttcactatcagggtac

SEQ ID NO: 10923 - DNA, 600 bp, Oryza sativa
  Intron number 2 from transcript LOC_Os10g25674.2 (locus LO C_Os10g25674) derived from phytozome v7.0 (chr-ID Chr10; p os 13220149 to 13220748 reverse strand)
agtcttttcggcctcggaagcaagtatgatcgatcaaccttgtctctggttctctggattctgattagcttaatctgttcttgcgttgttcttggccatgtcctgtttcttgttctgcatcggtttcagttcctaccaatattgtttttttttttgcatgtcatgttttcttgtttgttttgttgagatggtttgcatgtttgttatgtggcgatttgattaagatgagagtgctcttcttttttgtttttgaattcgtgatcaccttgatttacaaaagcagggtggaataaacaaacggttctgatcggaagaacaatcaggcttgcatgttctgcccgctattatttgctagttttttttttaaaaaaaaaggtgttcgtgcttcgactgaattcattgtggcaatcaattctggattggtctacggccattgcattttacagactttttcttcctttcttcaacggccttagcaaatgcttaatttgccttcgtatctgatcttttttttcaacttctagtttttctgaaataaatttcttattattatattttgactgggaagcaggaaccagaagacattcaggccaaagaaga

SEQ ID NO: 10924 - DNA, 510 bp, Oryza sativa
  Intron number 1 from transcript LOC_Os12g31850.1 (locus LO C_Os12g31850) derived from phytozome v7.0 (chr-ID Chr12; p os 19136023 to 19136532 reverse strand)
ccaaaaggtactctgctctacttgcttgatgttcttcttccccttccttgtgtgtttatgtgtttaattgggagtttggatctcttctcatcctcagcagaatctgatctttgaagaattggggatttagggttccaagaactgggagtctttcatgctgataagtgataaggatagcttatccacaatttgggatcttccctatggctgttggaatgaatttgatttcctgatttcttttccttccttttttttcttgtgtttcttgtaatgatattattgcttgctgtaacaagcaagaatgaagagatggagatttgaggacagtattaaatgcaaaacactttctgattttacaagattttgtggataacaactgcaagatcttgaaacttcttgatgattcaatccaaatgagtagcagctcaaccctcttacatgatgaaaaaatgtgttttattttattttttgtcaggtttttgaaggcccccttgtgaattccctgttgtc

SEQ ID NO: 10925 - DNA, 932 bp, Oryza sativa
  Intron number 1 from transcript LOC_Os12g41400.1 (locus LO C_Os12g41400) derived from phytozome v7.0 (chr-ID Chr12; p os 25614043 to 25614974)
caccgctgatcggccaacccgaggaaccttcgacggtgagcctcgtgtactctcgtattactcactcttcctgttttccatggcaaatttttgttgcttttatttggatgcacgcgtgttactgaatgatgatgatgaatgcgaggttggttgttcagaaattaagctgcagtagctgtagtcatcattagttcattagaccattaccccccgcataattgactatttgaatagaaatcgccctgtaaacctctgaaaaatgttgatggaaagttgttttttgcacttgaagttgtacacttactgtgttcgctggagcgtgttcccaaccagagcagttgcgcacggaaaacggaacagtccattagcgcatgattaattaagtattagcttttttttttcaaaaatagatcaatatgatttttttaagcaactttcgtatagaaactttttttttttttcaaaaagcgcactgtttagcagtttgaaaagcgtgcgcgtggaaaacgagggagatgagttgggaaacctggggtaaaaacacagccaaagttgtttgtggaaatcctgataaaaaatgtaaaattagcatgtctaacttataggtatcctgataatgacacaaacagcacgggagatatcataagcttatcaggctcaattgtcctacttctttgttcctgtttattactactccctgccagcttccatgatcaaaatatcctggcttaaaacaaactaggctgtatagcctctacacaggagtacattgcttaatagtaatgattgcatgtgctgccaaaagtaattcaaatttggtgtatagtttcatgggtggagatagcatgttttctgtttacctgcatttggtatttacacagtgaacaagacagttggtgaccttgctgtttaacatttttgcagtttcaaac

SEQ ID NO: 10926 - DNA, 998 bp, Oryza sativa
  Intron number 3 from transcript LOC_Os12g38870.1 (locus LO C_Os12g38870) derived from phytozome v7.0 (chr-ID Chr12; p os 23862099 to 23863096 reverse strand)
cctgattcctgcactggtttacatctgaacatttcgtaagtacaataaaatctttgtactggtcttctaaatatagggattgttccatgtgcttcagaatttatttggatgatgtgaattatggaattgttttatctgtatgtgcaacctgaggatttggctgaagtgcttaacttacttagatgccatttgagtcacctttcattagtataaggaagagaactagcgactataactgatatttgcatatatataggatggagaaaactgattctgtgaggttcttcatttgaattgtgagattactgttctacattttaataagaagctattaatattggattagttgagacttgcgagtttgcagaacatgacaattatggtcctgagtaaaattcagattagaacataacgtgaattgtaccttttacgttccacattgattgtcttgcaccaattgatgatgatattttacttattcggttcctatgttgactctttgtagaaaactgttaaaatacgatcatttaatgacttctagctaatgaaacttcagaaacggcattattatagtaatgtcgtttatagctttagggcgctttgtgtagtaatttcagttaaatattcggtttggccatttcagctttcgttcatatagacgcttttttcagattgagctccaaagcataactactgcataagttgatctttttgtacaatatggtcatgatctctccacaaaatcgctactgtgtggtgcaagcctacttagcactacacgttgaaaggttacgctgtttggtttgattgggacttggttgggcgatgtctagtttcatcgactgtaatgatccagtatgtatatcaaatcatacataccaagctaccctgcaagtagaaccctgcttgtgtgatttttattttttttatgtccttgtaagtgtggtagatgtgaatgatctctcagtgacccagaatgttgtttatatgtgccaggg

SEQ ID NO: 10927 - DNA, 429 bp, Oryza sativa
  Intron number 2 from transcript LOC_Os12g38870.1 (locus LO C_Os12g38870) derived from phytozome v7.0 (chr-ID Chr12; p os 23863158 to 23863586 reverse strand)
aagaagaattcctcatccaccatcgcttcacaatcgtaagtagtagtaataggagatatctctgtttggttttcagaatttgtttctgggttcatctggataatgttttcaattcttgcatctgggagcaaaagggatgtgcattcttgagatgtgtgttttgttctgtgatttttgattcaatctaccgtgttttcttgcatcttctttcatgcatttggttggtgagattttgattttttttagtccccagcaaatccgcgaacccctcggaacttccaatcttttttcttccctgttctgaatctggttatccacattggtttccagaatttccaagaaatcctcttttgttttccatgtgggaataatttccgtatttgctaattttcaggtctcttccaggttgtggcgacctcttttttggag

SEQ ID NO: 10928 - DNA, 808 bp, Oryza sativa
  Intron number 1 from transcript LOC_Os10g25544.1 (locus LO C_Os10g25544) derived from phytozome v7.0 (chr-ID Chr10; p os 13143678 to 13144485)
ctggcccaggaggaaagacagggagcaaagaggtattagccttaaacactgcaaggaaactctgttcgttcctaatgaagctatttctaccactctagtctctagcctatttcttcaccaaccccattatctcaatcaatcaaaaccattctccatttaaattatttacctactttctcttctcaaccaatcacaacttcactctaatcttttttacccactttttaatacccatacccagtttcaaaagtacttatattatattatattatattttagatctagtatgaagagaataactagtcttagcccaagcatccaatgatatctaataaaatattcaccttggtgatccaactgttgaaagcatgaaagaaacaaagtgggaaaccgagaaaaagaaaagagaaaggaggacggcataaatagcattttatcactactacaaaatcgatttgcgcaggcggttgagctgcttgcacgcattcaggtgtctgcgaaaatcacatttttctatgcggccaacgcaaccacatgtgaaaatctcatttttcgcatgtggtcacctataccgaccacatggaaaaataatttcggcaaaacaaaaattccaaaacgaaaaattggtcgaaaccttaactccccaaggcgtcgtcgtcgttgttgacggttgttttagaccgatttcgaccgtcaatataactggaataaaggagaactagctatacttgcaatgcatatttgttttagaataatctatctctacttgtacttggattttatttgtttgcagggattgccaacataa

SEQ ID NO: 10929 - DNA, 779 bp, Oryza sativa; identical to SEQ ID NO: 10785
  Intron number 1 from transcript LOC_Os10g34820.1 (locus LO C_Os10g34820) derived from phytozome v7.0 (chr-ID Chr10; p os 18519870 to 18520648)

SEQ ID NO: 10930 - DNA, 177 bp, Oryza sativa; identical to SEQ ID NO: 10699
  Intron number 2 from transcript LOC_Os12g06330.2 (locus LO C_Os12g06330) derived from phytozome v7.0 (chr-ID Chr12; p os 3024038 to 3024214)

SEQ ID NO: 10931 - DNA, 773 bp, Oryza sativa
  Intron number 2 from transcript LOC_Os09g24220.1 (locus LO C_Os09g24220) derived from phytozome v7.0 (chr-ID Chr9; po s 14378063 to 14378835)
cagcggcaagcagaaaagtttaaattccttggggagtgagtaccttttgattgctagtttgtgtcatttgtttgcgatgtaaatagaacactttttagatcttggttgtatatgttttttttttcccaaaacagtcataagttatggttagattggcgaaatctgtacaatagcattaaattagtttgacgaaggcttgaatttattgcaccatacttttcttgaatctttactaagtatctattcctgtcttccacaaattaagctcagtcttatacagtcctttgtcttacaaatacctcactatgtcacacatgtttttctgaagctatatgtaccagtatttccatgctcttccagaaactaattgcaactctgaaagttaataccgtggtagtggctggttgcagcaaactagaaccttaacttgctttaaaagattttcttttttccttttaggagagtattggagtacttccttgtcatgatcaactgatgcaaagtatgttgtttatctaacaatgtatgcactgtagtcttgtcatgctctgattgcctggaggacctcctcatatttgaatatgccattgaagtgtgcatattttccaagtttagtatgttatgccccatatttctcttttttgtcatgctgcatagatagaatatcgcacacccatcttatgtggaaataatggacttattggtggcataaacttcatttgatcaatttttcttactttatgtaattgttttcaactttagagggcgtaagg

SEQ ID NO: 10932 - DNA, 738 bp, Oryza sativa
  Intron number 1 from transcript LOC_Os09g25620.3 (locus LO C_Os09g25620) derived from phytozome v7.0 (chr-ID Chr9; po s 15386629 to 15387366 reverse strand)
tgtgcgcccttgttgattgctcttgtttctgccaggtttccttgttaggctctagttttgctcgttgtttactgtaaattcccatgtatattaagtttgtgcagtgcgctgtcagcttggcaaatgggcttttcatttcctgatcgaaaaaaaaaacaaacctgtgattaacaaggggaaattaccttcactgtgcctattggcatcattccaagttattcatgctttagttcctagccattaacttaagatagaaataagatcctgccagttcactagttttcttgtcagtttgatatatactttgatcttgtcttttctggttgttttccttaattttgtctgtgttgttctagtgcttaattagttgcctctcagttcttcacattctatgtttttgagtaaaactctgtccatatggccgttctgttatgtatctcagcaatctgcttatatttttttttttgcatccccacacaattctatttgacgttgtaaaaaagaagagagataactagataagcgcaactgatgctctatacttagtttcacggttcttggtttaatgcctaaaaattgtgcactatcagtacttcaattatgttatctagtagtgttttgtctcctctgaataatgcctgccattcttatgctgctctactgctgagaaaactacactatttgaattactgattgctaattatgtttcgattaacagcataaaggaacattttgttg

SEQ ID NO: 10933 - DNA, 490 bp, Oryza sativa
  Intron number 1 from transcript LOC_Os10g21360.1 (locus LO C_Os10g21360) derived from phytozome v7.0 (chr-ID Chr10; p os 10861252 to 10861741)
acgactccaactcggtgttctacaacaaggcccaggtcccgcctcttcgcacattttcccctttgtttgtggctgtgtgggtttggtgttgttagggctggagtgggcggagtgggcacacttgtttgtttcaatgctttcagagactggagctgttgtgtgacacaatacgcatttcgcagtaataatattgccaagatgaagactttgacttgaacttcgtctttggtctaggcacaaatctatcaaagaagatgggtactgcagctttattttgcatatattatctgccctattagacccttggatgctgtaattgtcttcgcacgtttcctctgtctagtcaataaatcagataatagttggtatgaatggtttggatttctttcgaagacggctttaaacaaatgtttccattgttgcacttatgtggttttctgaactaaaattgtcaggttaacaacagggatctttccattgctgtattgag

SEQ ID NO: 10934 - DNA, 478 bp, Oryza sativa
  Intron number 1 from transcript LOC_Os10g05720.1 (locus LO C_Os10g05720) derived from phytozome v7.0 (chr-ID Chr10; p os 2884805 to 2885282)
gaggtgagcaggcttcacttgattggccacactgatcacctgggtaagaactgacaataacacgccggctcctctggattgcgacttccagtggggcccaggtgtcggtgtcagctgggtaagttggtgtcatctggtatgggaaactttgatgttttgtacatgtggtggtgctcttgtcaacattatatagataaggagagaataggacaaacatgacgcttgaatagcagaagagaagttctatccagcaatatcaaaagtacagctgtcattttcaaaaaatgtaaaacaaaaataaaacgaaaaacccactatactagtgccaataaaagaagaaacaaaagagaactacattattgtcaatgccatttgttgatgttattattacttttgtttataagaataacaattgtacttataaggcctacgatttattacaggatccaaggtctaaaacaagaactgattgacttgg

SEQ ID NO: 10935 - DNA, 867 bp, Oryza sativa
  Intron number 1 from transcript LOC_Os08g42410.2 (locus LO C_Os08g42410) derived from phytozome v7.0 (chr-ID Chr8; po s 26775665 to 26776531)
ccgcggcgaggacctactccgccgccgccaaggaggtgagccgcttcgatgaacccttgcttctacctccgctcctgtatccttgggcccgttgcagcggcgatgccatcggaaagcgagccgcgagcgtcgactctcgttgttgtttttttttcttcttcttttcctgtggaattggttggtactagcttccggagatgcttgcatctgttcgttgcaggagcgtattgtcatgcggattaactgatttaggcgcgttgattgtgaattcgtgtcattgtgtgataccacctagctttggtttctagcggggttcgtttctgggggaatattcggtctgtcacgagaatcagtttgtttttcccatgaggatgctgtctctatgcgccccaaacttcatgttcatgcgtgattttcagctcgataggttcaatgcctatgcgtggttgggtgagctgctgttttcatcacatttagttgcagctttgtggtgctgaaaactgttacatttgcacgtaagtacattagcgtccctgctcctgttgaaaatgaaggtggcttatcaatttgatgtccgttctgttgaaaatgaaggtagcttatcaatttgatgtccggccttgggttcagtctgttaagattatatagtttcacgcagcatacacacacacaaaaaaaaagagaaactgttttatagcatttgacttttctttgggggatggagactttttttcctgctcctgaaagtctaaacatagtttaaaatatacacgtgattcttgaatacatagacatgacgttctcttgagtacagttctccgttctacataccgtgagatttgacttgcaacttttcttgctcatcag

SEQ ID NO: 10936 - DNA, 430 bp, Oryza sativa
  Intron number 1 from transcript LOC_Os11g35930.1 (locus LO C_Os11g35930) derived from phytozome v7.0 (chr-ID Chr11; p os 20636905 to 20637334)
cttggtcgacctaaaagccaagtttgcaaacatctgtaagtgcatgcgaaattactaccattttgtatcttttcccgatcgatgaacttaattaacaaccataaatatataggtagaagctagcagcctcatcttttggcttatacttattcttataagccaaaatttgaatttccaatcttatatttggagttaattttgagatttttcatcataatttattcttcagcctttgccgttagatcgctaagaacatgcatataaaagttttatttacaaattattttccgtttacaaatataccgtttcgcttattccatcaataaacgaaacgatggagacgattttcatggtgcccaagcaattatatagcaatggttattgcattattgcaaatctaggcgagaagacatcgacggagaagcggcac

SEQ ID NO: 10937 - DNA, 623 bp, Oryza sativa
  Intron number 3 from transcript LOC_Os10g39550.1 (locus LO C_Os10g39550) derived from phytozome v7.0 (chr-ID Chr10; p os 21065542 to 21066164 reverse strand)
caaggtactcctacagtccagtgtattaattaacaagtctaatcttgtgtttcatgtaatggacctgcagttagacatacgtaggactgtatcctagatagacattattgtactgtgagataatccatctatttaaaatataataacttagtactagattagatgtgttatattactacgaatctggacaggtggatgtgtctaatcaaacactggattactatattcttatacggagggagtaactatgtaccctattaatgcaagcattatcaaagaaaaaactcatatattcctttctactgatgatgctaataatcataagctcataattatgcacacttcttccatgcacaatacatggaggtagtacaacattatttcaaagaacaataagtatgtttcagatagttgtgcttgcctaattgtttggcacactgtttaacaaccatgcatatgtatgtatattctgtgtcctacagaaaaaagcttccaaatagcaaaggaatgctacaaaagtttgtggtagtacttactcctattcttcatgcatgcacactttcacctaggagtactatgaatgaaaatgttttttgataatcttgtgagcaggcattcagcag

SEQ ID NO: 10938 - DNA, 815 bp, Oryza sativa
  Intron number 2 from transcript LOC_Os09g27220.1 (locus LO C_Os09g27220) derived from phytozome v7.0 (chr-ID Chr9; po s 16552890 to 16553704)
cagggcggcaacgacctcaaacgcatccggttcaggtgtgttcttgagcatgctcgagctaaattctgcatttccagtgcataactcggttctttgatcagtgaaagactgaaaattctacttatttgcattagtccttagcatatatgattgaaagtttagtttgcgctcgtatgaatgattgaattctggtcgtgctaaatataaattagatcaaagtatattgaattgagatagtaactttgcggtgtaaatgggggcgaaatgtcatgcttaggagctttgttctgaacctgcttctttagtcaagaagcaaactggacaaaagcgagtagttttgacttttgatagccagttaaaatcaaacaagcccctatggatgaggcagtaatttctcccaagcccctatggatgaggtagtaaattttcattgatcattgcctcggggcactggcaatttatggagaacagcacaatagattgttaaatcttcatacttcaactagccatgttttagttttttttttccgattgctctgtcaacattgctattccttctttaccttttgcaataatttttcgtggtctagtttactactggtcacactttgtggcattctatttgtattatttgttttatctattgaaaaggaaaatttcattaagaggtagcttatactgattgccgtaagtcaattttaaacactggatggaggggtgtgagttttaaaattcttgtacaccccaatttcttacttaactggaatcctatttttactcgagggtggataaaaagcacacccgtaccattggat

SEQ ID NO: 10939 - DNA, 833 bp, Oryza sativa
  Intron number 1 from transcript LOC_Os12g04450.1 (locus LO C_Os12g04450) derived from phytozome v7.0 (chr-ID Chr12; p os 1895521 to 1896353)
gcttcaggtcagccgtctttgtccctactgtctcttcgccatgcctgcggctgaggaggaggaacataacaatgatgatgaagaagaagaagacgaagcaatgatgtgcatccgtttcttgttcccagagtagattagttcaatgttcggtattcagcaaggaagcacttttttcccgcttcgttatgtgtaacaatgaaactagaagaaagtgcagttgctcatacactggggttatgatatcttgtggagaatctttcatgaaggcaacttcttaagttaaattatcagatgagtttaaacaaaattataatattaatcgctcgtgagaccaacttcattgtaatttaagccaaaatttctagtcaagtggaagaatttcagcgccaaccttctgaattgaaggccaacatttcgagttgaaaacttgtattgttttgagttgatgggaaaacattgcatgtagaggtggccaactgcagatagcggcagggtcgacacaggcacgcagcaccggaacataagaaacgaattcgaggcagaatcccaatcagaccgagaaacaataatgatgtcccagttgatcgagagtgattcggattccgatctgcctcttacaaaagggaacgattctagcagcttagttagcaatagttcaatacactctgttggttttgccccacagccacatccacttcaaaactcaaagcaacaatggctgatgaacagatcagagacctgaacttgtcggagacccatacgttgctgctcatcaacctttacttatcacacgtacaggggccgagctacgttccacacggtgttgaatcagc

SEQ ID NO: 10940 - DNA, 640 bp, Oryza sativa
  Intron number 2 from transcript LOC_Os11g12740.1 (locus LO C_Os11g12740) derived from phytozome v7.0 (chr-ID Chr11; p os 7192963 to 7193602 reverse strand)
ctcatcttcggcttcgtcgagctctccgtaagaaattgattcatccatccttcatcgtcgatctcttctctttgatatcgcactacgataaaattgacattctttacacctagatgcaactttttgggtccttttttagactgcatttcttggctccttgcaagcaagaacagctgaacaggatcggatcttgtttgtttgtttgtttaatcatgtagggatgttgtttctaggtaggattatatataaaattaaccagataagacacgcgaaagattcagcgactgttcatcgtgccgcgaaaatgatgaggttttgaggaggaggcagcaagttcagcgtaaaggtgagagagagagtggaagaaaatcatggctgcctccatccaatgcggccatgctagctagtgcgccgcccaaaacgccactcgactccacaatatcatttcttggcttttgattttaattttcgagcaggttcattgcatcccatcccatgaccatatccatggcgataattaaccattactgattaatgcgccgccaactttagttagtttagctaataatttttgttgtttttttatttctaatttttcttggcaggggttcatactgctggccgtgcaggcgcacctgcc

SEQ ID NO: 10941 - DNA, 877 bp, Oryza sativa
  Intron number 1 from transcript LOC_Os12g40640.1 (locus LO C_Os12g40640) derived from phytozome v7.0 (chr-ID Chr12; p os 25119511 to 25120387 reverse strand)
aggtgagttcaactcaagctcgttctagttcgaagtgggaaggtggctatgaatggcaagatagctaagcgttgaggcgataactgacaatgatcggtagcgaatacacgttgaaaaaaaacgatgttcctgctatgttgtttttctttttgagatgtttgagattatatgaaagcagttgatgagtaattagccggtgaaaatcttaaaagctatgatttcgatccagcttctaactactagctagtttgttttcaaaattttataactactgtcagagggtgaactcctcaagcgaaggactgtgggacccctttccggttcggaccagggacgcgggtgaaggattgagagtcgatggagagagaggcgtagggggtcaggcccctatatctatgaaataatacgcatatgcacatataattaattgtcctagctctatatccttgaaataatacgcatatgcatatagcttctatataattaacttaatttgtccgtttgaatattaaagtttatgtacaaccagaagcagcagtatatatgcaaaccaatcaccatatataattagttagctccgatgagctagtatacgtatatcgaaataaagcaatagaaaatcatgaattaaaaagcaccaaaattatgtatcctctgtgggaagaaagacaggatgcaaattatttacgtcgtctccgtaagttcatgtataaccctacatgaaatgatgcgcgagccaggccataatcgactgatcgtttttacctttttgtttatcaatacaacttaaagatttatcgtctctgcttgctattcttctaaacaaactcctagataggtccatttttctgaattaatagcttgagacaaggtaatt

SEQ ID NO: 10942 - DNA, 630 bp, Oryza sativa
  Intron number 1 from transcript LOC_Os10g02220.2 (locus LO C_Os10g02220) derived from phytozome v7.0 (chr-ID Chr10; p os 774464 to 775093 reverse strand)
caagttgcaagcaaatctttcttcttttgtggtattagttctacacctgaacttttttatggatgcaaaaaaagatatcagcatcgaaggaagcagtcttgttctttatgagtagggagctcatttcccccaggttaaattgtgggatggatcaaataattcagggctaatttttgttctgaacttgatttcgtagttttttgtgtattcgcattcaagattgaataggataagaaataggggtatctttgattctaaatatcgtagtcaaagattctagctgctggcaaatatatatggatggaagaaaaactataatatatgatttcttccttccctgcaaagtagttaatttgaccccccaaaaaagttgaacttatctttgttatcattaaatttttaagttccaagctgacagaatatggtgtttgcttgcaagaaattagtcgttcacaatatatgcagtcaatagtgttacatatcttctaatatcgaaattgcgtgatggcgttattctaagacgaaaatcggatatgagaaatctatcagaaaagaagtgtgagtcatgatacaatttgctccatataatcttcttgactttcttacattttcctatattatcttgcccag

SEQ ID NO: 10943 - DNA, 377 bp, Oryza sativa
  Intron number 2 from transcript LOC_Os11g36070.1 (locus LO C_Os11g36070) derived from phytozome v7.0 (chr-ID Chr11; p os 20736317 to 20736693)
aaggtttgggggcttgatttggtttcttttcttcttctctggatcgagtaggttagcttgttgatgtaattaatgttgtgatttttgtgtactttagttttaccttatctgtgctgcacgtgagctgttatggttgcagttgagaaaatattctctcatgtgatgtcgtttagattctattgtttcatcgtctatgtgtgaatatcctactggttcctgaatgattgctactatttcagttgattgttttgaaagatctatttgagttgatcataatcaggctgcttgtgtgatctctctgttgttggtttttcttatgatttggttttgtatcatttttaggcaatattgacctgattgctgaagcaaggtctaaa

SEQ ID NO: 10944 - DNA, 655 bp, Oryza sativa
  Intron number 2 from transcript LOC_Os09g39540.2 (locus LO C_Os09g39540) derived from phytozome v7.0 (chr-ID Chr9; po s 22701558 to 22702212 reverse strand)
agatcaccccctccgtcctctccgagcgcctcagggtaattcattgataaatttagattaccaccaacaatactgtgccatgctggttgcctagctcacattctcaatttcttctttgtttatgcgcgccaattcagattttcactatattttcacagtcatgtagcctagcccacttgatagaattcaggaagataaggaccttgtggttaattttaggctcctgtgctaaatttgtgggttatgatattgatattccatccatgagttaaatgcagaatcaccactgtttggggtattcggtgtcatggttggcatttttgtgtggttgagtgatgccaatgagcaaaggagtaatgatttgttaggcctctgtgcatgtttgtttggtttccatgcgccaaactatatagttgatttgtgaatttttattagtacctgaaactactgttattagtatggcaagtttgatcttgctcttttccccttgcatgtgcaacatatagcatattctcttttggcaatgtaactcttaacgtcatcattgttgttttagccttctgtgtaatttatacctagatgttgtacagctaggtaattttaatcatcttgctcagtatgggtaacaagattttatatatttacctgcagatta

SEQ ID NO: 10945 - DNA, 910 bp, Oryza sativa
  Intron number 3 from transcript LOC_Os09g20880.2 (locus LO C_Os09g20880) derived from phytozome v7.0 (chr-ID Chr9; po s 12566213 to 12567122 reverse strand)
gacaggtgagttcattcatttttcagcaaaattcagttcagagtttcaggttgagaacttcagaattgttgataaatgataagtatattttcgatttgagcgcataagacattactactagctttgtcatgtactggcatttgcatccgtaattttcagacaattattggcaccaccagcctcatcaacggttggaatcggaagagaatttcctgtctcggttgcacgtatttggccccaatattgaatcctgtaggtgacacattaactgagctagaatttgattagtccttcagacagccaggatcagtacggtggtgacatttcgccttggcatcaaactcaagaaaaggaagtgccaaccaccagtcaaatatgatcaaaccaccgatcaatccccaagaacaatcttgaaacacaagctctgaactacagggcccctttgagatttatgtaagaattttataggatttaaatcctataagaaatttttctgtttgactattttgattcaaaggattgaagctttccaaattctatgaaattcctgtggagtgacactttgcatgtggatttttcaatgagcaagggctctaaccttttggaaaattttcaatgagtctatctctctcatccgattcctatgtatttcttgcggtctaatcaaacgatcattcctatgttttttctgtgttttgcaattctctgttttacactttcatttttatcaaaatcctatgttttttctattcctccgtttttttaaccctgcgatttagaggggccctcactgaattagtacaagtaattcagcggtttcagaactttgagttacattgcttaagagattgtttacagcctagtaaaaatgttgtttgtgatgattctgaagattgttgccatcaagaag

SEQ ID NO: 10946 - DNA, 861 bp, Oryza sativa
  Intron number 1 from transcript LOC_Os11g02150.2 (locus LO C_Os11g02150) derived from phytozome v7.0 (chr-ID Chr11; p os 591585 to 592445)
ctgcggagctgctcaaggtcaaggcaacgattttggtacgccctaatcaaacaccttcccttcctcccttacctatgctcctcctgcatgcagattggaacgaacatgtcaaacattctcaagggaaaatgggacaatttttttattgtgcatagtaaagtatcattgtaaaatttatatatattggcagctgcagtgaatattattttatttggttgaagttcaacttgacaataacctgttactgatcctcttagcctggttattcattgcctgcaaaatgcatcctttatttttgttcaagctttgccatgcactctttacaaagtcccatgtttatctcatacattggtacacaatcgatgatatttttttccatagagagagaaaatgaggatagcctaatctcattgttggcatttctgatttctctcgtatgttaaacctgggcttgttattactcatttgtttatgctagttatggtatgttttgaacagtgttacttctttatatttctgcaacaccgattactgcttatgggtgcatacttcttcatgaaaaggattatgggtacatacaacaaggctagacatgcaatgtcgcataatgtgacagtattagctagttccagcttcacagaaatgagaatgtgcttcccaattattagcaatagtttactcttactttttaaatatgtaatagatattttttttgctgacgactttcatgatattttatttaggcaaaattagttatgtagcactgaaaattcacaatcttatttcgttctatttatttgtttgtttattattcattccttctcagttgtccttgatctaaaaacaactgagatcggggaa

SEQ ID NO: 10947 - DNA, 819 bp, Oryza sativa
  Intron number 2 from transcript LOC_Os12g41760.1 (locus LO C_Os12g41760) derived from phytozome v7.0 (chr-ID Chr12; p os 25840158 to 25840976 reverse strand)
gtgtgagctaaagtttattattatggatctgatgtttgcttactgctttgcatccgtcaatttcctactctgcctattatattatacaatattagacagtagagcgagagactcaaaccaactctgaatctaaagaaaaacaatagagagctggttgtgtcaataatatgaaaaatcttttcttgctacatagaactacctttggtttttgggtaccactgtacatctagtataaaaggagctctgagatatttatgattttagtgtactaacatcagtaactaaaagaggtgatgatgaatttctacgcttaaggcccttcgctctgaatatgagagcttttattttagggagattaaatactctccctaaacagtaaaccctcaaacctagtttaaatctctaatctttctttggtctaaaatgattaatctctcaaaaattactgctgtgaggtaagtcttttccttttccatgtccaaatcaatctaggctatgttctgctattgttcaatctccactgctaagtaacctatgttatgctctcaaagtggattgatattctaacactgactagctagtatcatcgaaagttgtattacaaattctcacttttagttatgctgtgatttaaaagacaaacactagtttagtcctgaggctacatcagcaaaccatatatatcttcagttcaaattcgtatatcccatatagctctgtgccttggctaaggtcaactgacatcagtgtggcaccacttcttcctgttgctgtaacattctcttcttcagtttctgcagcaaccggtgcaaactaaag

SEQ ID NO: 10948 - DNA, 661 bp, Oryza sativa
  Intron number 2 from transcript LOC_Os10g35520.1 (locus LO C_Os10g35520) derived from phytozome v7.0 (chr-ID Chr10; p os 18927795 to 18928455)
tcctcgccatcctcgacgccctcgccgtgcccaaggtgacgatgaagtttgatttttcacagatttttatcctcttttcgtagcttcagattaagaaaaaaaacttcagattttcagttttgagtgcgtggccttttgctatagctcgtaaaatgtaaggtataattcataattggttgaacaaaggttcgagatttcgattttttttgtagtttttttttaatcctggataatttgtaagtagaacgcataaactttcagtgtcgtgatccgtaaggtagaaatttggagaggataatttgtctgctattattttcgtcagttgatactactatcagttccaccgaattgatttgaagctggtaaaaaacccacgttggtagcaccaacaaccaagagtgtattgaaggtcagaaaattcagtgcaacatattaaggtgccatttttctattcattctaatataatcggcaatgcttttgccgcctacctttaaagaaagtgccatttttctgtctaaaagataaggatatcaatttctccctaataaagaaatcagctccttataaatttgaaaataaataatgcctatttggtttcttcttgataatttatatgtttctttgggttaggcattccttgttggaaaggattttggggca

SEQ ID NO: 10949 - DNA, 774 bp, Oryza sativa
  Intron number 2 from transcript LOC_Os11g34210.1 (locus LO C_Os11g34210) derived from phytozome v7.0 (chr-ID Chr11; p os 19566693 to 19567466 reverse strand)
agctgcttcactctgaatccgggagttactctcaggttttccttgctgtccctgtcttgaataatatctatggaatctgtactctgttaagttgtcatgctattctgatgtgctgcataacatgactctgaaccacagaaacaattttggcatttacaacaatgtaatactccctccaggttgataatacttgtcgttttggacaagggcacggtctccaaaaaacaactttgaccattatttttcattataatatgtgtaaaattgttagcaaatatatgatcttattaaagtactttttaagactaatctatacatgtagtcaccatatttgaaagacaaatattttaaaaatgattcataatcaaagattctaaagtttgacttcacccttgtccaaaacgacaagtattatcagcccggagggagtagtagattttctaaaacaacccatccataaatgaaagatgggaaaccagggaagcaacttcctcaggagaagaattgtctcaaacctctgtctaggagtcaaaatatctactgatacaagggatttgatttcttataaatgtgagacaagaatgaacatattgataattgtgaagtctttcgcctgtcttcacacaaaactcaagaaaatgaagcacatttgtcctgaaaacagtaatgtaatagtttacagaagcagttattacacatataaactgattgatcagcgttttctattctgtttatctaggttgacttaaatagggctggcgttcctttacttga

SEQ ID NO: 10950 - DNA, 682 bp, Oryza sativa
  Intron number 3 from transcript LOC_Os12g31810.1 (locus LO C_Os12g31810) derived from phytozome v7.0 (chr-ID Chr12; p os 19112416 to 19113097 reverse strand)
aactcgctgactccaagcctggttagttattttgcatacgttgcgtgcttatttttagcaatgagtatctggacttactgatttttcttttcaagtcagctaattctataaaaaagattcatatatcccttagcgtgtcatgttatctaccggttgtcaatcacttctatcaggaacatactcttgattgtctttctgttgtcacagaacttagaatcaagataaccatgactataatgtttctgtacaaaaccatgactataaatgtttctgtacactgctgacttctgagatattcgtagataatctgtacttactactgcagatgttggtagtggtggtggtggttctgccagtgtcatgtgggcctatgatgtcagtgtccactatataaatcaaatacaatgtggataatttataccaattgtttatcgctagagcaactgtgtagctcgacttacatgtatacaattgtaccaaatatgatatgatgattagagagtggtaataattttattttgctttttgggctttactgtaatccccttgcaatgcacgggtattttgctagtcataatcaagaaaaacatgaatataaatttttctgtacactgctgattgctaaagagtcatttattttgttccaggtgactctagtggtttaggttttatagatattgac

SEQ ID NO: 10951 - DNA, 978 bp, Oryza sativa
  Intron number 1 from transcript LOC_Os12g31810.1 (locus LO C_Os12g31810) derived from phytozome v7.0 (chr-ID Chr12; p os 19113791 to 19114768 reverse strand)
ctccgtgtcccgggtgcccgcgccgcgcagagggggtgggtgactccgattgtttccgggaattttgggtgggttggcatttggggccgggtggggtggggggttcttgatttggtcttgcatttgggggttcttggtacgcattggtgattttcgcggcgctcgtggggggttcttggcttcttgccccgtcgtctgtgtggtagatctgcttgatctgtgcgcgtctgaggatgggggatgtgcgtagattggtccatgttggtaacgtttgcgaggatttcagctttagggctaaggttgggtggcatcctttttgaaaaaaaaagtgagtttttagttgagtatctgatggtagcttgacttggagggtttcttggcacaatctggtgcataaggttaattttgcatctgttcaacgccatgaaagaaaacaaaagtgttaggaaatctaacctgaatatgaagatggcattttgcaaggcagttttagaagggacttttgtttaaagaacgccataaaatctatagaaagcgctgccttttttgcacataacgaaatggacaaataaatctggtttcagatttgaattatagatcataactgtaaacatttgtgccaactgactgctaattccgatctgtatgccctgggattatctattatttctctcaattatgctacgaagggactgaataattttggtttaacttgtgcacttgtgagtaaatatgatcttgttagatttgcaaataagatctgatactgttttatgtctgcattgcatctacttgttcgatttctttttcacactgatacttaatgcttaatacaccgtctcattcagctccataaagttatttgccttggttgatatcttcattgctcactgtgcaatttctttctttcttttttttgcgtcaaaactgcacaatttcttatgtcattttttttccttttaacacattcaggctcac

SEQ ID NO: 10952 - DNA, 711 bp, Oryza sativa
  Intron number 1 from transcript LOC_Os10g22560.2 (locus LO C_Os10g22560) derived from phytozome v7.0 (chr-ID Chr10; p os 11623045 to 11623755 reverse strand)
tccctctccaatcgtccatcgctcactctcctcaggtctcatctctctctctctctctctccacctggtacttttgctggaatcgatggcttacatatgtttttagaggattttagggatagatataagcatgcttgttgcaggccaaatctttcttcatttttggaattaatactgcacctgaactttttttggataaaaaagaaagtgtatcagctttgaatgaagcctactagttctttatgagtagtgtgtggtcattttcccctggttaaattgtgggatggatgtttgcttcaaagaaataaaagaaattgtgggatggacctgatggttcaaggctaattttgttttgacacttcatttcttaggtttttggtgtgtttgtgttcaagattgaataggacaagacataggggttagctctcaatttaaatgcccaagttaaaaagattgtaataattgtcaaaaaaatttgcatggaatgcttccttctctagaaagtaggaagtctgacggtctgaccccccaaaaaaaggtcagtttgtcctcttctgtttttatgataattactttcctaatttcccagctgacagaagggtgttgcttgcaagaaatagttgtttacagaattatgtagtcaatagagttcatatataacttccagtaccaaaattgcgtgattgtgctaatcaaaatgcagaattggat

SEQ ID NO: 10953 - DNA, 587 bp, Oryza sativa
  Intron number 2 from transcript LOC_Os10g07270.1 (locus LO C_Os10g07270) derived from phytozome v7.0 (chr-ID Chr10; p os 3838678 to 3839264 reverse strand)
agtatgcaatgttatatgtctgtttaactgccttcatgtcagaaagtttgttgtacccataaaaccacgggtttgtctctttactttttgtcatgagagaaaatggttgcctgattaaaatttgatcatataactacagttccattttgcgacatttttttagttcttattttctttaggcgctcttgttcatttggccaagcttgggctgccagggctttgatatgccacattgtagattgcatgtgctccacttaggtgcaaaccaaaaaagcctggtttgtagtcctgtttgctcagtctgttggcaattagttgttgccctattcaatttttctgtttcctgttgatatttgtttaaaacaatgatgtgctaactggtaaatgcatactgtacgcgttttcactcatgaggtcaggttgctcttcaatggattatgccagaatactagtgtaaccataacttatccctaatgtccatggcctaatgtacttgaatacattcttcttcaattgggatcatcaactcatggacacatgaatacttttcaggtacaaaggtggaccagaactctcaagaagagtaa

SEQ ID NO: 10954 - DNA, 507 bp, Oryza sativa
  Intron number 1 from transcript LOC_Os12g43880.1 (locus LO C_Os12g43880) derived from phytozome v7.0 (chr-ID Chr12; p os 27210273 to 27210779)
ctgctgcttctccaaggcgagcttcgtgatcaaaggtccttattctctcatcagctctgctctgcttggttttggttttggttcattcagtttgattcatttgatggatagattggcaaggagtatgagtatcttcttgtttccctttttgcggcgatttgctgctcttgttcgctttcagttcgtctctcatctttatgcgtttcttggctcccggtgaaggaatcacgattcaggaatctcggactccgtgattttcaccagagaaattcttttttttttaacccactcatcaccgtgtaatttttttaatttcttctctgcttcgatttcaccgaagggcagaaaccgctcttccttggacgtaaccgcttctcggatccacacatacattaattttttttgcatttttgtttaggataggattggagccaataatattgtttactagtaggatttttcatttttcaataagatgtcttgttcttggatgttgccatggacagc

SEQ ID NO: 10955 - DNA, 441 bp, Oryza sativa
  Intron number 2 from transcript LOC_Os12g43880.1 (locus LO C_Os12g43880) derived from phytozome v7.0 (chr-ID Chr12; p os 27211330 to 27211770)
cctccgtcttctaccgccgccaggtgcccagccaggtactacaaactcaaatctcatatcaaatttgattagtttccgtttcaaatgcgagatgatttttttcatttctcaattaaattaaaagattggggggaatttggagagcgttgagtcgggttcgtgtccagatgaatgttcagcttccgtggcatcttggcaagtgcagtgcgccacgaatgcaagggtgaaaatgacatggtgtaaaagtctccctccttaataatcccaaaaaaaaataagaatattcaatcacacttgtacaggctacatacaattagctagaaacaaatttcatctcgttttctcatccatcgtcagcatctctgaaacaataattccagaagcaaacctgaagagtgtatgaaatggattggaaattgaaatgggtgtgcaggtggcgca

SEQ ID NO: 10956 - DNA, 747 bp, Oryza sativa
  Intron number 1 from transcript LOC_Os11g06350.1 (locus LO C_Os11g06350) derived from phytozome v7.0 (chr-ID Chr11; p os 3040318 to 3041064 reverse strand)
acttggacaagctcgctgtactttatactgcccatgtatgtagtactatatattatccttctctgatatatatcgatcgatccagatgcactgggatgggatggtttaaatatattcctgataaagctttggccttgcatgatgcactgggatggtttaaattcctgataaagttttggccttgcatgattgaatgttcaaaaccccaatccctagctagttgcatggctgatatgtatcttgtgttgttttcccctgcctcaagaacacgcgcgcgcgttgttggtttgttgttattattgctcctgtttgattgatttatagcgggttcaaactaggagtgcagagtagtacggttatatataatcagcgggcccatacggaaagaaaataggtagagaaatggggagggagaaatagatcattcttttttcgctcttagatcatttcgcaacataatatgatgctagcccgtgtaatacacacaccttgtttgaagtgagagtaacattaattatattgtgtttttatttgatatggacttctggactacattctttttcttacatgattgtttgattatatttttacacatgtcatgccatttttttcttgtgagacctctatccaaatctgatgtagtacgacttgttgtttactttccactgatttcttctctggattacctattttattcttcgtgtgtgtttagttcacgccaaaatttgaagtttagttcaaattgga

SEQ ID NO: 10957 - DNA, 1025 bp, Oryza sativa
  Intron number 2 from transcript LOC_Os09g08254.1 (locus LO C_Os09g08254) derived from phytozome v7.0 (chr-ID Chr9; po s 4273246 to 4274270)
cgacacggcggaggcagtggcgagctgcaacggcggtgagcggcggcatcacgagcatcattaggagcagcggggacggaatgaacggcgcagcgaggggagagagaggggtagaagatggggaagagagagaggtagaagatgagcgcattttcgtctaatacatgtaaaatacgtatctcagtggcaccactaagatttcaaacaagtagcagtggcatcgttatagtaatggtatatttcaaaactgctaaaattttaatggcatggatctaattaacccttatatttgcggtgttcctaccttccagttcatttttaatctcaacgatgagaacactgtcaaaaatggaatgtctctggtggtaggatgatgagctaatatttttctcaaaagttgctaattcgatttagtgaccaaaattgcatcagttcgaattttcatctgactataaaataagttcttttttaatttatagctaatttcagttgtttctctatttacaatattagtttcagctctatttgatccattaaaatttattgattataattttcctctgaattaaattatttatagctaaatgaaaaaaaaggatttagttatataatttttatgatatttatttttttatcatttatgcccaattatgatatgtggtttagaattttaatttatttgaataaatgttatttacaacctgttgcaacgcacgggtattttttctagtagtagagtataaaactaaaaatagtttgaaaatattatttaagcaatgatgacgaagaaattttgtggagaatcgtacagttaaagcatgacatgtgttattcggttgatattacgtctttataagtttctcaaatacaacccacaatgcatgcccacatattcgtgaaggtttcgtttctaaggtaatggcagagcaggcgatcgatataatctcgtagtcttaggtcccacggacctagaatttttattaagaactgtctttctctatgtttctctgtagagattttgcgca

SEQ ID NO: 10958 - DNA, 843 bp, Oryza sativa
  Intron number 2 from transcript LOC_Os09g34100.1 (locus LO C_Os09g34100) derived from phytozome v7.0 (chr-ID Chr9; po s 20125282 to 20126124 reverse strand)
tgaccagcgtctcgtcgtcgctgcaaattgagctcgtgagtatcctgagatattttattatgttgttattctccctgtcagtgaattgttattgcaacttgattgggcttgtggattgtgagtatcatcctgagagttgatattattgttattgcaatcaattaattgttatgatacttcgtgctgcacatgtttgctcatcagttgaaaagaaaatctgattgctgcataagcataaaagatatttggagggcaggattcgattcaacagacaacactaattttttccacagcgactaatcaaacctagatgtgaagaatttgttgcaactggatggtgttgctggtggcattggttttgggataaaaactttggggcgttctcaataagaaagtggccatgctcacataaagaagcttccctaattgttcttccacctttttgttgttgctttgttctgttttttttttctttctgctctcgattcttctgcatgaatgtgatatatgttcaacacattaaattgtatcattttctgtgacctatcaagcatactttagtcgtctatatgattttgcactcttttttactttattcctgaacacttgttcatagtttcttccagacatactggttcttaagcgtagcatcccaactcaaaacactggatcagatctaactttattttggatagacagaccctctctatcaccaaccctccttatgctttccttgcttcgcataaaagggttattggggatagctacattggaattatctatagtatttgttgccaacaatgtttatgcttcttgtgtaggtaccctgccttcaagataact

SEQ ID NO: 10959 - DNA, 1018 bp, Oryza sativa
  Intron number 2 from transcript LOC_Os10g21560.2 (locus LO C_Os10g21560) derived from phytozome v7.0 (chr-ID Chr10; p os 10966977 to 10967994 reverse strand)
aacatttctctcattgatccacgtaactcaggtttgcatccaatctatacacaggataattaatggtattttccaacaagattatggcatatgtggaatttgtggtctgactttcataattcagtcattatggaccctgaaggcttctttgttttgtcctttttgatttgttatatacttactttacagcattgtattgtatggttgagcagtattgcaacattttaattctcaatagacaactaaagaaaatgaattctgcatagaattgataactatttagggttgaaaggcataaacaatattttatgcaatgccagaaagaaatattttgagctctgatgaaagtgccatgttaagtgcaggaacacatacttctgccccattgattatggcacaaattgccagcatgaagtgctcataaactatagcaggatgttatatgagaaatagtttggcacttcacattaaattgagcattttgtttttcatttttcttagcttgtgcaccaattgcttgcctgcttttgctggaaaagtatgaagtacactctttgatgattaaattctgttcactgtgttgcttggctagaacttactctgccatccttactagattctccaattatgcaaaatcattgtttccaagtgaaaattaagttttcgaagatgtcagaattcagtatatgcaattaattatcaacttttgtttttagttggagtcactatacaagcagatcatgtgcttagattttggggcttcagttcactttccacactaaaatgtgcacctaagttgttgatatgtgtctctgcactcttcagtatcccacatcataacacatagtacataaatctactggaatcatatattaataacattcttgcatgttttaaattggtaactggtgcctggtttcaataaagatttgattgcaaattttctgaggtatcagaactaaagtttactcttttttgcatagcacaagtccacagttcactgtgaccagcggtgcta

SEQ ID NO: 10960 - DNA, 586 bp, Oryza sativa
  Intron number 1 from transcript LOC_Os12g29650.1 (locus LO C_Os12g29650) derived from phytozome v7.0 (chr-ID Chr12; p os 17675443 to 17676028 reverse strand)
acaagctcgtcgccgtcgagagcggcatacaacaggtaacagcgactaattaattaagctagtattaattaattatcctagtaccagtgaaagtaaactagttgacctttgatcacgttgctaattaagcttggtaaacaaattgatcgttcattagaaaaagactagaactatatattggagtagtttgttaattaagtagaagatccagaaagctacaaagacctcaaagggtagtcacattcttctttatgaattgcttgcaagctttcctttttattttatgcttttactttcgggcttcggccatgcatatccatcatgcatgcatgtaccaaccaaaagtaaaagccgggtgattgatccaactgttaggttatacgcaatgatacaaatggagtacatccgatctcattatctcatatataatcacaatgaatttggtaattagcaataaaatgaagttgttaaacatttgataattgatactactaggttattatattactagctgatacctgttcttgaaatgcctgcacgcatgcaagcagaacgaggactacatcaacaggttagtgcataactt

SEQ ID NO: 10961 - DNA, 1022 bp, Oryza sativa
  Intron number 1 from transcript LOC_Os11g37510.1 (locus LO C_Os11g37510) derived from phytozome v7.0 (chr-ID Chr11; p os 21673935 to 21674956)
tcggcggcggccgcgccgcgccgcttccccccaaggtttctactcggggctcctcctcccccccccccctcccttacatctcgttctcctccctcgcctcggttcccgtcgcccgtccggtcgtcggtgcggcggcgggtgtgatatagcgcgtccgaatacgacgcctcctccggctgcttcgtttctcgtcggtcgctgtgttcggggtagggtttaggggctaggagggatttaggagatactgctcccttgtggccgctgtgccaattacttggttgttttcatgacgagaatttgtggttgggtttgatgccgtggagtgcggaatgattgggagtgtaagaaatggggggcactggatcgcggtggggttttggagcaggtttgcacgaccacttagatccaagttatgtgcagtttgagcttgggtgatttggtcaggagacatatcatgaactagtattgcaggattctaggctaggctagctaacatgttaaagtcttgaagaactgttacaatctatcttccatagtgtagaaaatgttccagctacacatgaactagtatgaataattccccattgtagaaaaaggtttaagtggcaataaaagactgtgtaagactgttccagaggttgcgcataatccaactagtagaacaagagtggagaatggatattggttgttttcacatttggattgagatattttcatctgcactcgtattctgtcctgtgtgaatttcgattcagttgggacttattccagttgccttccacctacattcttggcttgtcaaaattctaatcattcaaatttgtgttatgctttgtgctgttgatggccaaattttggtgtctccttagtccatggttttgaatgctatttgggttgaaaactcggctttttgtgtttttttgctcaaataatgctccttaggtatgtatcatggaagtttgatcctgcattgtaattcaggcacttgttttatttgcagaacttgcctgctgtctgtttga

SEQ ID NO: 10962 - DNA, 949 bp, Oryza sativa
  Intron number 2 from transcript LOC_Os11g04680.1 (locus LO C_Os11g04680) derived from phytozome v7.0 (chr-ID Chr11; p os 1991781 to 1992729)
gcttcaggtcagccgtctttgtccctactgtcgcttcgccatgcctgcggctgaggaggaggaacataacaatgatgaagaagaagacgaagcaatgatatgcatccgtttcttgttccctgagtagattagtttaatgttcggtattcagcaaggaagcacttttttcccgctttgttatgtttaacgatgaaactagaagaaagtgtagttgctcatacactggggttatgatatcttttgattatatagagagtattcaccgtgcatctttcatgaaggcaacttcttaagttaaattatcggaattttttaaacaaaattataatattaatcgctcgtgagaccaacttcgttgtagtttaagccattcttcagattggagttaaaaatttcttgtcaagtggaagaatttcagcgccgagaccttctgaatcgaaggccaacatttcgagttgaaacttatattgttctgaatcgaaggccaacatttcgagttgaaacttatattgttttgagttaatgggaaaacgttgcatgtagaggtggccactgcagatagcggcagggtcgacacaggcacgcagcaccggaacataagaaacgaattcgaggcagaatcccaatcagatcgaagaaacaatagtgatgtcccagttaatcgagagtgattcggattccgatctgcctcttacaaaaagaaacgattctagcagcttaatcagcaatagctcaatactctgttggttttgccccatagccaccgtacgtctccgatctacgttcgcggccaatccagtcacatatccacttcaaaactcaaagcaacaatggccgatgaacagatcagagacctgaacttgtcggagacccatacgttgctgctcatcaacctttatttgtcacacgtacaggggccgagctacgttccacacggtgttgaatcagc

SEQ ID NO: 10963 - DNA, 682 bp, Oryza sativa
  Intron number 1 from transcript LOC_Os09g36330.1 (locus LO C_Os09g36330) derived from phytozome v7.0 (chr-ID Chr9; po s 20969500 to 20970181)
agaggcggtggcagcggaaggaggacaagacggcggtggggataaggaggcgacaacaaggatgagacaccactatggaggtggagatagacccgtcgtcccggtcacttctactcgctgcccccctcccaaaaaaaaaagcaaaaatgcaaatggtgtgtttttcataaaaaaaaatacatatgattttttaaaaaaagaatttaaatattgatcacaaaatcattcacctaggccgagtttagttccaaaatttttctttaaacttctaacttttccatcacatcaaaactttcctacacggctacacacataaacttccaactcttccgtcacatcgttccaatttcaaccaaactttcaatttttacgtgaactaaacacacccctattcagctataaaaacaaatagaacaatccatttgtgtactataatagtacaccactggaacaagaaagagggctattattgacccagttgtagagggatcacattgctcagctctaaaccatactattccaaagaacttctgcaagacacccactttgaaaaaaaaaaacacctaaacaaacaaattgccccttggaaggacaggactagttagtgctgtgtgttgacctgtgtaaacaaaatcagattttgtgtaccggctttctagtgaactgcgtacaaacggtgcag

SEQ ID NO: 10964 - DNA, 917 bp, Oryza sativa
  Intron number 1 from transcript LOC_Os10g41030.2 (locus LO C_Os10g41030) derived from phytozome v7.0 (chr-ID Chr10; p os 21963528 to 21964444 reverse strand)
tggagggtggtagaggcgcgggcgacctccactcggtaacacgtcttcctcgctctctcccccctcccctcgcttccgcttttgctctctcgctgtgcgcccgtcatgcgttgcttgcttcagtggcgctgcgcttagaccggcgcgagttagggttttgcgtggggcttaaagtcgggccgctgtgtgcatggatggtttttttttgaaggtttagttggagactcgcggttggggctggaattagggttttgagctttcggagtagtatcatgctgcggcgcgccgtcagttatactaagtcaggaagttagcatgatagcctagttcattcccgtaggtttgaattgcggctttggttgtacagtgggcttgcggagcatagagtatgccttttgacttgtgccgacctggttgtataagctctgtttatgttcactaaccacagggcgctggtggtcaaactgggacatccttgatcctttttacctgaccaatagatggcattttagttggtactggatgccccatcatggtgaatcatctcatgttgaattagcatttagcacattctaagtggttactttgtgagctttaggcaagcaagtcccacacgatcatcatggtttaaatctctgccttccagcgttacttgctatagcctataatgcaatcttcatcagtaggcactctgtgttggtcgcctagagttgggaaaaatgcagtgcctggagcatttagttatccgtctgatgaatttatctttggtgttatttatatgtatggactgtggcatacgcagttcacaaatgcttagcttggtcgaaagtctccttagtccactttaattattgatgttttcttgttgttggcagttttgtctctactgaattactacaccttgcaggcaaacaccc

SEQ ID NO: 10965 - DNA, 1066 bp, Oryza sativa
  Intron number 2 from transcript LOC_Os12g06890.1 (locus LO C_Os12g06890) derived from phytozome v7.0 (chr-ID Chr12; p os 3346760 to 3347825)
tgcatttggcgccacatcgtccacctttggcagcggtttgtacttctggcattcattttctttccacattatcattttcttcaacttagaactaagcactgttcacttttatcggacatccactggttgcacatattttctcagcatttcattcgtagcatagtaaaactgtctgtaaagctgtcctggctctattcaatatacagtacttcctccgtttcatattataagactttcatgtgggcaatgctagaaagtcttataatatgaaacggagggagtagtttctagcttgatgggcatttccttttctgttacgtgcgattattgaatcctgtttctataaattgattctcccacgattgtttatgcagaaaaaatgcaatgctagaaaatatgttcttatttgatttgattttttactgccgctgctggttgcctatgtttgctgaaaagtctagaatagagttggtatatactgtcgagtgcaacctccaattgtgtatctaggacaatagtttgaagctgaatttgcaatctatattgactattttcagttttttttggttgtttgaagttcgtgatagatgacatgacagtgtttctttgaatcaaaactagcgagaaaaaaaagtgagaatcctgagagtactagttcatttgccttaaattgtcacataccatccactccctttttgtgaaagcataaaatagcactagacttgatatgtgtgtgcctgctgcatcatagttaagaatggtaaacttgcttaatgaaagtacaaaggctgacatgagtatcttgtaggttctctcttagtagtaagctccactgagtatttcgattaaccatggttatataccagaacattgaatcatggcgtgttatgatttctacatttgttatacagatgctcaattgaattttcctgaatagtgggctagtggcagcccacaatgttgttgttttaattgctcttcagagctatcattttgtatgacatgtgacacaacaatccgcaaatttgcaggatcatcattatttggacaaaagccaagctttggt

SEQ ID NO: 10966 - DNA, 1006 bp, Oryza sativa
  Intron number 2 from transcript LOC_Os09g04384.1 (locus LO C_Os09g04384) derived from phytozome v7.0 (chr-ID Chr9; po s 2319980 to 2320985)
cagcgatttcgcaaattagggaaatttgtcgcaaggtagtgctcctccactgcaaaggaaatttctctttagtccctagaagtataagattcaaatagaatttgattcgatagctgctcgtgcaatttttgtggtgcttgaatataggctgaaaccgtattttcaaatatggtattaaaccatcaggaatcaggttagttgtcctaaataaagtttgtagtcatcgttgatatctttctaacggcactggtttcactcaattccgataaacggtttgggagaaacaaaaaaaacagtacttctgaccgggtccggaaatcaggacagcgattcgtttttcttaatctgggatttacagaggcataatctgattttcctcccaacatgaaagttgtagagaattttgtctagatgtccaaagttatattatttgctagattccgttagacggtttgcgagttacgcataaaatagtaagggaactgctataggttatttaatacaaatcggtaaaaaagtctatatgttcgaggttatcgattttagtaaatatcccttataactgcctgtcgtggatatccgtatttttaggggagactctgccgaaatttctaataattttgggacttaatttttgactgtattttggtgtggcattctaggtatgtggttacctggggtgttacagttggtatctaagcgggcagtaggtccatggtaagtgactgggtaatgtaaatataaatcaacataaaattttgaacgagagttcctaaccaattaaaaaaaatttctcttaggatagaaaatagtaagagtataacttgggttagatacaaacatctaaaacttgacacactggtgcacaataggatggggtgcatgggtcattcctagcatttatgttttttctacatatatatgtgtatgattgtgtttctttgcatgctattgtctaacctattgttaaactaatgacgtgtaaatgcttgtgtttgatatagct

SEQ ID NO: 10967 - DNA, 920 bp, Oryza sativa
  Intron number 1 from transcript LOC_Os10g33460.1 (locus LO C_Os10g33460) derived from phytozome v7.0 (chr-ID Chr10; p os 17551285 to 17552204 reverse strand)
tcgccaccgccgccgagtccaccgtccccgacgaggtgagcgcatgcgtcgtcatcgatcagtgttgacgacgcatatggtattgatttgattgagatgatttcgtcgcgactgatcagcgctgtcagagacgataatcaactcatcaacctgatgactcaatttttgtttctccatgtgttcattttaaaacttttgaaagcttcaatatatgtccacttattattttgttaaaaaatactttttgccagtgtcgagttgattagtgtttttagaactagggcgccaagcacccccattttcattactaaaaatgaaaataaactacagcaagtcttgaaaaaaaaaagagagatagctatcgatagaaagaccaggtccctagccgataaccacaaaagaaacatccaacctgcccattacagactaacaggaaactaacacagctcgacccaagccctgataagctgtagcaatctaacagaaattccatctgtcttcaccctagctactccaattcttcgagttgattagttggcatttgatcagtcagttaactgaaacattagatgcagtgcatttttatcatgatctaatcttcgtagacgtagttttctcgtgctaattatgatagctacactaaccaactaaccaactttgcccccttctttcgaaaaaagaaacttcggacaataggcccgaaattattattattattattattattattattttttgcacatttcagtcccaactattcaagtcaactctcgaacaattgtcttttaataactactgaaaaatctctgattcttctaactatttcagataactttgatatacaacaagttgtgtttaacttaacatttttttttctctttgtctctaatctcttgcaagaaaaggttgctgagctgacc

SEQ ID NO: 10968 - DNA, 932 bp, Oryza sativa
  Intron number 1 from transcript LOC_Os11g41560.1 (locus LO C_Os11g41560) derived from phytozome v7.0 (chr-ID Chr11; p os 24467334 to 24468265)
cacattgtcgaggcgcttttgttacaaggtgagcatcatcacattccctgcgaatttgattcacatagcatgtttttggttaacttgatgcctcaggtagatagtcaaattttctgttcatgagtttcagtagctttccaatagctagcgaatgtaaattcaaaactgtacatactacaagtttggtgtgttgctcgggccattgtcgtcctcttctcgggttaggttcacttgagttaggaaatcgaggttcagtttcctccggtccgagaattatgtgggcgatggttgctggctgttgtctatggcatcaccatggcaatggacttgaaggtaggcagtatgcagtaaacgtaaaaaagttgttagggccaccactaaagatgaggagatcagactgcagtgtgatggtgaattcgccagagatgataggagatagactgatagagtggtcgctctgcacctgcagcaatgcgaatgaggtattagggtgccatcgaattgcatgggctgagtgagaggcatgaggggcgcaatgagagggattgtctatttgggtttcagtttggttgtgttttttttggatgatcaagcctagatgagggacgcacattgagatggattttggagaaatgcaacaagaaactccaaatagatggctatagacaagcctttggtttaatgtttttctagggatctgacgcccatatcattatattgtttgcatgttaagaagtagatttacatacaattaatatggaccacatagttgagaaaatatcatggtattttcttgagaaaatatcatgtgaaccaatttattaaattaattgttgtcatcgcaagcagacattgcatcaatttggttgtacgatatcatattaattatttatatccggcaaatttactgtttttcaggtattcactggcaa

SEQ ID NO: 10969 - DNA, 461 bp, Oryza sativa
  Intron number 2 from transcript LOC_Os10g22380.1 (locus LO C_Os10g22380) derived from phytozome v7.0 (chr-ID Chr10; p os 11513079 to 11513539 reverse strand)
cttcagttctgggtaagtggctgctcttctctgtatgtgtttttttttcttcttgtaggattgcataaggttctaggcatttgtttagctatctggagttgattagctataagtggagatgctactaatggcaaaaataaagatgttgttttctttttagcaaaatatgatgtttgaaacgttgtgcatcattactgaatgcaatttattgctgacttgtgttttccaagtggctattattatgatcattgttttgattatatttttcacttggctgtgctgtacttgttttttcacatagaagtacatgaccaattttagtttccaaattatcactttacttttacttgtcctttattttatcttttgggtttactcaccatctggaactgatagtttctcatgggaatctttgtttctacacagagaatcactccgtggtatcaaccctattctcgagt

SEQ ID NO: 10970 - DNA, 965 bp, Oryza sativa
  Intron number 2 from transcript LOC_Os11g43895.1 (locus LO C_Os11g43895) derived from phytozome v7.0 (chr-ID Chr11; p os 26034714 to 26035678 reverse strand)
agtgtggaggactgctgcttccctgtctccatcaggtgtgtgcacgatttgtgtttgttaaaatgcttatgtcaaaaagctgtgggtataaaatgatatgctgcagattatcttttcctgttataggttgatcaataatggtttccctaattcaactttcatattgctgaatcttttggtctacattgatagctgatccattgggggtgattatacaaatgatttccgttggtaatgatttttccctaccttgcagacagaggaataccggacagttgtttttctttcttttcttctgttagggtgggttcatttcagacatacccaatttgttaggttgaccacgtccccattttgatccgcgacgtcacagacaattctcttgtaatgtatatgtgcattgtttgtcagaaacctgtcgaacgggaggcaccatcatacttgctagatctttcctcttagagcatggacaggggactattatctgcataatctagaccacacaatagaatattttaagcagatttttttcataagtgcgaaccactgcctatgttactatactatagttcctttcgagaatttgcacaaagtctatagaaaatcataatataagtgcgaccacggacttcctgaaagttagaaaaatcttctcaagcatatagtttgatgttcatttcataaaaatatcttgatatgattatataagtgaacaggatcaaattagtttgaatgtacaagctgatatgaaatgaccatcatccctctatctcccacccatttttttcttgaattttcttgcgttaaccatagcttctcttctggatttggaatttttttctccgccgcctctccgacgactgcctgccgccgccgcctcaaccgacatcgccgatccggtctcccgtcgttgtccctcggccgctgaagtctcctcggactgtctcaaccggcatcaccgccgt

SEQ ID NO: 10971 - DNA, 564 bp, Oryza sativa
  Intron number 1 from transcript LOC_Os11g26890.2 (locus LO C_Os11g26890) derived from phytozome v7.0 (chr-ID Chr11; p os 14985473 to 14986036 reverse strand)
aggtgtagcaaacgacctcctgcgctgcaattcttcccactcttgtttttggaagttaggagctttggttacgacgtacctgtactgcctaaatgagaggttttacttctcaagtaggctgtttcaaactggattcgagctctttacttaaactgagatgtgtgaaaggagataaatttctaatgtctgtttctattaagttttagtgtttccttgttactgctcaatagtagtcttagtttttatagctttagagtgtatgtttatgtgaagtaaaacttatactttagtttctcttttttttttatttgtcagttgtcgtctttcttctatcagtatcctatccactgcaccgtcaaaattgttttccagacaagatatttcaaaaattcactagtccacagccacaacatgcatctttgattcttaccgaatttagtctgatttattcatgccctctgcattagtttaatctagttgttgcatcattgatttgtgcgtgtgtttcgcctagaatattgtcataacaattgctgccctatcaactttgcaacacagggaagt

SEQ ID NO: 10972 - DNA, 578 bp, Oryza sativa
  Intron number 1 from transcript LOC_Os12g25490.1 (locus LO C_Os12g25490) derived from phytozome v7.0 (chr-ID Chr12; p os 14748212 to 14748789 reverse strand)
ctgtcttcctcaaggtacatagactggtctggctcgaaattctctcaagtatattttggtttttttgtctaaaaatatcgaaccacatgtttaactggactttagccaactttttttctatgtagttgctatctatgtatatttctatctcttctatctacggagttaatcagtcatttaatttgttgtaaattattttatcactaattgacacatatatgaaggggtgtgtcatctagatccctaaactctcaaaatacatatccgcaattaattccatatatccctacactgaaattctctaaatttatcttacaaaactatgtttcccttgtgggtgcaaattaaggttgatgactagtccaatagtaatcagcaatttgtaattgatatcgactctaaattttattttaagacattacagtttggtcccactaatgtttatggctaaaaatattccctatttcaccatttatcaaaattggaatattcttaaagtgtcctatcaatagaagtatacatgtacatacagattttattgatacatatatatgtgtttcctctatatttagtggatt

SEQ ID NO: 10973 - DNA, 743 bp, Oryza sativa
  Intron number 5 from transcript LOC_Os08g42310.1 (locus LO C_Os08g42310) derived from phytozome v7.0 (chr-ID Chr8; po s 26708553 to 26709295)
aaggaaacctgtcaagtttctccgggagggacgaggtagtgtgtaatctggaatcccattctgatttgaaattgcttgccacctttggaagaatgattttttttgtacaattttgtgtttctttaattatcagttctcgtttgcttgctagcaactattatttggagagcttgtcaatgaaatgttaaataggtataaattgcagtacattacttatagggcacacatgcttgtagctattagtgatagcatattatggggcacagatagatgtaatgcactatttgtatatctgtgtaatggataatcctattcttaatttcaaacttggttgatcattgatagaacaagttaacaactaatttaatcaaaaagtccaggctgggtctactaatttttataatcaaccaatataaggccataatcttaatgtagttcaatagttaatttacaatttgttcatttcagtcttattttgcacgcctcttgtgcattctttgttactactttatttgaagggtgctcgtgctcttttgtaatacattaaactggttgaaatcccaatctcttcccaatcataggtaccgcccatgttctcagagaaatgcattcatgcaatcaacttttgtttgtttatgtgcagcaaatttacataaacaacatttcattgttagtttctattgtttgtaaagagtattctttctgcagaggttttgaagcagtagaagtaaggcctgttccag

SEQ ID NO: 10974 - DNA, 569 bp, Oryza sativa
  Intron number 2 from transcript LOC_Os11g41140.1 (locus LO C_Os11g41140) derived from phytozome v7.0 (chr-ID Chr11; p os 24182738 to 24183306)
cggtatgtcttgtcctagtatcttgattctttccattttttctgtatgttgttctgctcaccgtgagcttattaactgttcttacttaaaattattaagctgcaagtagataacatgttagccatctctttgaagacacaccaaatgatatgtcttccacaacatatttcgagaaaaaaaccacaacatatttcgagaaaaaaacaatgagcatatacaatcatgtatgggtgaatagttgagaagttatctaggttatactgaagctcatcagttttccttattcaagttctaaacaagactgattgtggtgtgctcaggaaaagcgaaatacccaatgtgaattatctgccagtatagatataattgtctcgagtgtcaatccgttgtcataagttttcaagtgataaacaagagaagggtgttcaattgaactaaaaatgctctgatttttattggacagcttacttctttttaaattgagctaacacaggttggaaatcattgacattttgatttcttttctttttccagtacactgttttattccgagctgggacagtgcacgc

SEQ ID NO: 10975 - DNA, 735 bp, Oryza sativa
  Intron number 1 from transcript LOC_Os11g14520.1 (locus LO C_Os11g14520) derived from phytozome v7.0 (chr-ID Chr11; p os 8153263 to 8153997 reverse strand)
ggggaaaacagcatcgtgccaacaggtatgggtgttgttcaaacctggttttgacttttgacaaaccattgaaaacagttctgctagttcatcaattcggtcatgtcaccgtgtctcatgtgtaccttcagtgatgggttttaatgagttgagttcagtcaacccacattggacaaccctatcaactggctctgaaccccgctccctgaaatcgtgatatcctattagatcctacattacaattgtagtttaagtagtaatagcttccagattaattttactctaatcctagattttcatcaaatcaagtgctaaatgttgatattttttagttaaatcttgtactactatatattttccttttgtcttgtcaagaaagcttagatcacatgtcagtggattttattatacgatagataataaacatgtagaaatgatacatgctatgatgtgatatactgtacaattttctttgcagtttcgggctttttacatgtgtggaaaatgcagtgctctctacatgtgaagagtggaatctggttggagttttacttcttgtaaggcattgcacaaagacatcattcaatatcttcacaatcagcaccaaaaagatatctcatcaagtatgtagccacaatgccccaaaaaattagtcaccagctactggtcctatagctatatttattgtttcagccagtacatcagcactgaaagtctgaaacaccaggagtagag

SEQ ID NO: 10976 - DNA, 1050 bp, Oryza sativa
  Intron number 1 from transcript LOC_Os09g27070.1 (locus LO C_Os09g27070) derived from phytozome v7.0 (chr-ID Chr9; po s 16470219 to 16471268)
cgcctctcgtccggtgctcccaagaccctggcaaggtagagcggcttcttttcgtttcgtttactcggtttttaatcgaacggtgctgcgcgggttcgctttggatttggctagattgggaagaatgctctcgctagctgtattatcgaattttctgtgtgaactacaggaaagcgaaatgtgggtcgttcgtcacacatagggtcatgccagttgccaaaattgatgctgggcgttcgttttaggctcatgttgttagtgtaaatgtggcacaccgatagagatgcggaaaagggttattctgtagaaatgggagtatgggttggtcctgttggacagggttagtatctaattttctttatatcaggaatgattctggcagtatatcaatgtaggcatcattcagttattctgcttttgaaagaggaaccacctgtcagaaaaaaaaggaactggtgcataacaagggaaaaaaaagtagccgccaagaaaatttgcaagcaaagttaggtttagacgtaaaaccacagtaatggtctctggttgactttactaaaaaagatgagtggtcttgttgtaagaacgttaactgagaattttctatataatgcttgaagcaagcacacacgtgttggctgcttactgatatctgaagatgatcattctggcatttgtgtggtgaagctaaaagaggatttatgttgcggtgagattagaggaaatgttgattgctgaaattagttgcagttttgttatgtgcagagaacagcttgtttataccttcggaatatggaagtgcattttcattttacaaacttatctagccaatgtaacactggtgcaatgggcttattattattctttttttgcaaatctaaatacataattatttaaggaaaaaaactattgggcatgaactcttagtgtaaaaaagaaacactggttaaaaaacaacttttgaggttgagtaaatgtgattgaaataaaaattaacttggctgcatttccttgttagattgaagtgtttaatactgaaggaaccgagcagtc

SEQ ID NO: 10977 - DNA, 550 bp, Oryza sativa
  Intron number 3 from transcript LOC_Os11g06880.1 (locus LO C_Os11g06880) derived from phytozome v7.0 (chr-ID Chr11; p os 3371563 to 3372112)
gtgttggtgctccattgccttgctcatacattaaggtacattaaaaaatatgttttattattttggtagggtgtattgtatcctcatttccatagtaaagttattgttgccatgcatgttatcactgtgatataaattgtatcctcatttccatatattcatatgtacgaaagatttccgctaagtgcaaaaagatattgtttttcttcgtattagagatcacagataaacttttgtgttcaaatttttgacatgaggcgtggaattgcggatagctttacttgaccactagccttacagccagtccagtgacattgtggatagctagtttacacaaagctatgcatgtaatcttttgcacgcttcactcaaaaaagaacatctattttgaaatttagtgtattatgcccatccagtttattttggttttctccttcatgttgagattcagaagattaatatcttatccctcagatcttattctttcctaacgtaatatgaattgtatatgatagttgatagattgggctgaaggtggatatttaactaa

SEQ ID NO: 10978 - DNA, 885 bp, Oryza sativa
  Intron number 1 from transcript LOC_Os10g33900.1 (locus LO C_Os10g33900) derived from phytozome v7.0 (chr-ID Chr10; p os 17929920 to 17930804)
acgccgccattgagctcggcaacgagctggtaattaaactctaactctgtccatgcatgctactcctacacatgcttcttcttcttcttcttcttcttctcctctgtccatggtcactgtcagtctgtcactataaccgtatcagttcatcggtctgcaaatataatgcaaaagttgcagactttttttgccaaacaatcccctctgctactaccactgctcattgagcaagcaagctatagcgaatttcgtttctgaactttctgcacacgccgacttcttccaccaagctgatggatcgtcttcttattcctcctcctgcctccccgtcgccgtcccatctgttcatgcgcggcggccgaccgaaattttccatggtccatagccgagccgggtcctactgcattcacggcgccataattcgcggccatagctcatatcagctcagctcagcatcgctgctgttgcgtcatccatgtcgcctcgcattaaagacgatcaatcaccatttcgccatgagctgctacatgctgctgctgcagcaggttgggtaattaatccaagaaaaatagtaacttggaccgcatcttgccggcttattagttactaccccagttgatcaatcattaattcatactagtccccttttgagtgcacacgacccacctgttcgactcacgtacgactgaatttaatcgacgtttgtaaacggctctaaaatacattaaaagcatgttttcttttgattaatctatggctgcatgtctcccgtagttgtacgtgagttataactggaactgaaatttaaccgtgcggttagttggttaatctgtgtgtgttatgcatgcaggtggcgaggagcatagacctggtgtacggcggcgg

SEQ ID NO: 10979 - DNA, 696 bp, Oryza sativa
  Intron number 1 from transcript LOC_Os11g47130.1 (locus LO C_Os11g47130) derived from phytozome v7.0 (chr-ID Chr11; p os 27817031 to 27817726)
ccgcttccccatctccctcctcgccgtcgccgcaggtaccctcccctttctcgttgtagctgtgctggtggcgtttccatgccaagtgctaccgtgttcgatttctgcggaagcttgtggatatttttgcttctgctggggaatttgagcagtggtagcctggattgtaatttactaatttgtggaactccatgcaaaaatgaaagctattttggacaaatcacttatgcatgtttgatgtttgtctgtctattttaaattgccacacgcagcacccaaaatccaactcatgattcgataaactgcagttagcaagtgcgggagactatttatgtgcatgtaaaaacataattttgggaaatggttggtgctctgtccatggagacgaatatattgatgttcttgtttcattttgagatattgtacagaaaaatggaaatgttataccagtatttaggcctggtttagttcccaactttttcttcaaacttccaacttttccatcacatcaaaactttcatacacacacaaacttccaacttttccgtcacatcgttccaatttcaatcaaacttccaattttagcgtgaacaaaacacaccaattttagttgtgagtatatgtgttctttttgagcaatcaatgctcaggcaggcagcccacctgacctttataattgaattgtgcttatagctg

SEQ ID NO: 10980 - DNA, 686 bp, Oryza sativa
  Intron number 2 from transcript LOC_Os09g34280.3 (locus LO C_Os09g34280) derived from phytozome v7.0 (chr-ID Chr9; po s 20237356 to 20238041)
tgcgttccatattgcggcgaagcagggccatctgggttagttcttttcttcatcactagtgattcatttatctttatgcccccaaaaatgatggtttgtttatttgatccttataagtcatgccaagtcaatgagttcctgctgataggttcatgtcaattgaaattattaagcatatgggtattatatgagctgaactatgcatattggtttgattgtgctcacagttgtctatgtcgaactacttgtcttggattgacttatccaaatccatatagttgcacaaggatatttcccaattatttcctgaagggcatgcattactattgcaactgcactcttaatttgtagcaatttttcttggctgatttggtctaaattattactacatgtttatttttcttagtgtaaccaaaattgcgaatgcattgacagttctagtctgtgatgtgttgcaataatcacagatttgccaatccgaaaggatgcagtggctaactggctgctaatcctctaacacagatttagtgataacaaagtgcttgatcttccaaaaatatgtctttatccctgagttagaaataagacaatgcttatattttactcagctagcacaatgttttgtttagattgatttgtcaaagcatctctggctcatggagaaattccatttattggctttgcag

SEQ ID NO: 10981 - DNA, 935 bp, Oryza sativa
  Intron number 2 from transcript LOC_Os12g39420.11 (locus L OC_Os12g39420) derived from phytozome v7.0 (chr-ID Chr12; pos 24213930 to 24214864)
tctcgcctactgcgtccactccaacccttcctggggtaaggaaaccccaaccccttcattcctcctcttttttatctttccttgtgtgtttttgtgttggttggtgaatggattggatatgatgaatattccctttcatccctaaaaatttgggagatttgatttttaggagtatctgctggttggggtttttttgactcaagatattttttgcctttggagtgggggagcttctgtgttgtgttgtttttgtatgattcttgaattggggggtgtccagagatatttgatgtgtgttttgatttgaagatttttttttagcataactcctgtttcactcccctgctaatatttgaagagattatggtgtctactggtgcacactattgatgttttccagagagttgtagctactattattttttatagactagtaaaaggaattggtggtggtgatgatttgctttacaccccactacttcatcagatctttagtgaatggatctatgtagacatagctattgtttgtactactacatgcttatgtatgtagatgttgaattctttgtagtacatacgtatatgcagttgctggttgacctagtgtgaatattttaattgtgaaggtaagtataactgtatttgtgtaaccatggaacttttgacatgttcatttgagatcccctgcaatatagaggcaaacacactagttctgtcaaaagaatcttagaagagtagtaggatgttcaggcaaaaacgctatgaagtgctatcttgatttttttaaattatcaaatgtacttctggaaattaaattactcatgtcgattgcagaaatgattaagacatataaagcttgtgctcactaaattactattgttgatattaccttcagttcaggtggccgcacttgcattcctccactatcttgtgat

SEQ ID NO: 10982 - DNA, 692 bp, Oryza sativa
  Intron number 1 from transcript LOC_Os11g09030.1 (locus LO C_Os11g09030) derived from phytozome v7.0 (chr-ID Chr11; p os 4801496 to 4802187 reverse strand)
cgctcgtgcgccgactcctgaaactcactgtaagcaaaccgtcctaattatactgaattttttttcgcatttttcaagatcgtggccacatttattttgggatgagactcccctgactcttgtgggtgtttcctttgggtgtgtttagttcacgctaaaattggaagtttggttgaaattgaaacgatgtgatggaaaagttaaaagtttacatgtgtaggaaagttttgatgtgatgaaaaaattagaagtttgaagaaaaagtttggattttaacaagggctttattttgataggagtgattttcaggatttacaggaggtaccatattttttttccgtgaaattttaccatccttaaaaagtacccatgttttttagtgtaaaatttggtacctctatatactaagtagcttgatgtataaaaaaatttagtatgaaatttaggtacctcgaggtatttttttaaggaccataaaatttctctattttttaatataaaatttgatacctcttaatatctctgatggtaagacataccaaatttgcaccaaaaattttggtatctctcgatatgtctcaagtattgttgaatttgtgttttgatagataatcatcagatcaaattttgttgttgaatgatgatgatactctttcttgttgcagtgttaattagagttattcaagacgcaa

SEQ ID NO: 10983 - DNA, 613 bp, Oryza sativa
  Intron number 2 from transcript LOC_Os12g05780.2 (locus LO C_Os12g05780) derived from phytozome v7.0 (chr-ID Chr12; p os 2664459 to 2665071 reverse strand)
gattcagtttcggtatgttttttgctaccttaagatatatattttgtgatgttttattccaggctactccgtgttctgggatgacaaacttgcagtattatgttgttttagtatagaacgaataaatgctactagatcttatgtaattgtggattctagatgtttgttccttggggcatgcaattaaacaattgactgacaggcatctttaaactttgagtaattttttatcaaattccaatcatttgaattctagataatccatatgccaaagaagttcgccggatttgtttttgttgtgatctaaaacaaattaaaagtgaacctataaggtatccggtggacctgaaaaccacgctgttctagctgctatgagaattatgatcataatttcttgtcacaagctgccactctgcttgatgaacattaaaagggccttaatggaacagtggaagcacactatattatccagtttcttgttgtgtccaacaagatttatgggctgctcctcaacatacacatacttcatttgtatgataatggatgccatgtaactgactgtgttttgtattttgcagccacaacattaactggtcttcattttgtgacaacc

SEQ ID NO: 10984 - DNA, 887 bp, Oryza sativa
  Intron number 1 from transcript LOC_Os11g40510.1 (locus LO C_Os11g40510) derived from phytozome v7.0 (chr-ID Chr11; p os 23708170 to 23709056 reverse strand)
accacccgcacccgggcctcctcgcggcgccgcaggtggcccaatctctctccctctctctctccttccgtttcgatcagcggtcagggtttggtggatttttactgtgcggtcgagggtttcgtttttggggatttcggtagcacgattcggtaaatttcatgttgtagtgtttgaggccagtgggattgattactattgagagtgaggatttgactgtttcgcggttgggattttgtcagatactctagtttttttcttttgattttgtagtagtctctctgacttgtcgcatgtattggggaaaattatttttttcccgtagggtttgtggggatagggtttattgttcaatttgtcgtctttgggaacctgttttggttgaaatttcagatctttatgtattattagacccaacaagtacctatagtacacgaattatagttctctgtgcttgtgtttaagctttcatatttattaactttgaatttgtcagattgtactgcgaactagtataaatgagttccgttgaaggtcagtggaaactagtctggtgattgctagatcagtcgctattaaaggatgtggtttaccgtttacgtttaggctgcatctgatctttaacaaggtgtacttctttggggcaagtggtaaatggggaacatacttgaacacaccataattatgctcgaattccttttataacctggatgttatttgcatacattattgcagttacagtgacttgtatgcttttgctcctttatttcttcttctatctccttgaattattttcattataaaatatttaagtgcaccattttttttgacactaatattattttctggcagatagagcccattgttagtggcaacctgcctcctgg

SEQ ID NO: 10985 - DNA, 829 bp, Oryza sativa
  Intron number 2 from transcript LOC_Os12g03030.1 (locus LO C_Os12g03030) derived from phytozome v7.0 (chr-ID Chr12; p os 1130152 to 1130980)
aacaaaactccccttgaacttggggtaccgtacttaacaaaatttaatttgcttttcatctaatttgcttttctaaaacgatagatatagtagacgtttatgactttaatcaaatatttaagttggcccctggttttgagattggtgcaactacttgagaacaacatcaatacagacaagaaaaaaatattggaccatgtgacgaagtagtctcttgtatccagggttcccaatttcaattaaatctgatttagatctcgcgaaatccgaactttttgaccaggtcgtaaacacaaaccacttgatttttcgatcaattttttaaaaagtttaaagtgaattttattttgttgataaaatttatccagatttcattggtttctatcagtttttttacggattacatgaaatccgatgatgtcgctcgtgagcagatttgatttattaggattatgaacctgcttatatcctttacccataagttagaatacttccaccgttcagttttataagactagatctggatttcaaagagcttttcatatactactataatattagtttcatgcttatcatgaatatatattatcagaaattaatggtcaaatttagtcttaaagtcatttgtagagttagaatatgccttgtaagagcgaacggagggagtatcactcgagttgaaaccattttcctaccgtaacgttgtaaaaatatgtttcctccttgaacaaattaaaatagaaaaattgaaacaaatattactcacaaaaaaaccttttaacttgccaatcgaacatgtaggcaactgctggactcagacttattggag

SEQ ID NO: 10986 - DNA, 936 bp, Oryza sativa
  Intron number 5 from transcript LOC_Os12g16280.1 (locus LO C_Os12g16280) derived from phytozome v7.0 (chr-ID Chr12; p os 9305412 to 9306347 reverse strand)
aacttggacttgctacgcattgtcccatcagtggtgtaagatccttttgattgcactatagatttttcatttttggtggtttaacgcagtaggctgacactccttttaactaacctattgattatttattcttggcttggacaatatggggatattgtgtgtccggataagagtaggcattatttgtaggtaggacatacaagaagtaaatatatttataatttctactctgtgaaggtattattaagtgttttagcatgtcataggcagaagttgctggaatggtagataatcatgccctcttttaaacatagcatcggaattagagtagaatcaagatgctttcctttcctttctatttcagtgtagtaccattattctgaagaaagacacacaagactatcatggaatagataatcctatatttataaggcgtgtaattcttaattcttttaatcaagccgagtgctattttgctgtggctcatgaatctttgcgttatttgtaaagctgtggtttatatattcctttgggagcttgattctcttcgaaattgactcaatcacctgtcattggtggattacctgtcttcatgcacctttttgccatacatgcaaatatgtagtgtgtaggcctcagggataaaaatgtatttaacaatatggtgtatatgcaagcttaggcaaaatttttagctatgaacttactcctttagccttcacctaaaaattgcttactattatttccctggggttgttctcaattttctcaacattactcatattctagacgtgttagttacaacaaataatgtgattgctcagcaggaagttcaagaatatctgaatatttgttggaaaatggtttcttcaatccttagaatactcttgcactgtttcaggctttggttcgcataataaactgagaaaatattat

SEQ ID NO: 10987 - DNA, 676 bp, Oryza sativa
  Intron number 2 from transcript LOC_Os09g36690.1 (locus LO C_Os09g36690) derived from phytozome v7.0 (chr-ID Chr9; po s 21162107 to 21162782)
ctgttgcaggtagagggcagctagaggtgacggtgaggcatctacttcttggccattgcttacttctataaaatgcttgatacagtaaaatttttctttgtgccaatatggatgacaaaggtagatcctcatttcatcaggatgtctgggtgaaatatttccaaacccgatatcttttgacgttatgaaacccattttgcctttagatgcgctgcaggttattatctggtaatcgatttcaacataaatattaaagttgctcttgatcatgagaaaatagatatattaaggatcaacataaatattaaagttgctcttgatcatgagataaggaacaaattattttcattcgtcctttctgatgattagtttgagcttggaaggatattgttcagctagaatgctgcgtgttacccaagtagaaattgagatatgcagatagttgtaattaaagaacatttttttatcttatataataagcataccacgcccagatgataaaggctcatttagttaatatcgtcatgctcaactctccagtgtattatgaagccaaagaataaatataaaggccatactgatttggcctctttaacatggacttcaagttatgcaattcatgaccggattttcttttgtaattttaattagaagcaacccagcgcttccgactgag

SEQ ID NO: 10988 - DNA, 590 bp, Oryza sativa
  Intron number 1 from transcript LOC_Os12g06340.2 (locus LO C_Os12g06340) derived from phytozome v7.0 (chr-ID Chr12; p os 3032882 to 3033471 reverse strand)
cagtacttagcacgtgttccagctcaatccttgaggtaattaacaaagctaatcagcaatcccaatggagtattgtgtgactttgtgtttgcttatgtgttatacacatgcatgtgcactctttggttgttaaatcagctgatgaagatggatggatcaccttttgttttgtttctcttcttaattttttatgtgctagctagagatgcttctcctacatctctatctttctctttctctttttttttcctctcatgcatgacttgagttcttgcatggttccctctcctacatatagcatatatacatctctctcacaaaaagggaaaaggtgtgcatacatggctccaattttagcccactcttgacactctcctcaattcactaataatatactacatatattatttcctaatttccatggttcaattgtagcagctagatctctcttgtttgattctgaaatataattaattagttttgttatgatttggtggttgattgatcttgcttattgatgagcttcttggttaatttcttggcttcttgtcacaggcaaattcacagctttgtcataggaatcatacact

SEQ ID NO: 10989 - DNA, 664 bp, Oryza sativa
  Intron number 2 from transcript LOC_Os10g09870.3 (locus LO C_Os10g09870) derived from phytozome v7.0 (chr-ID Chr10; p os 5362501 to 5363164 reverse strand)
ggcgatttcctctccagggtcctactgtaagtccccccaatctgacgaaatctcccggtgtttcttcacgatttttgtgggtttgaccgtggggatggattcaagaaccgatttcttttttttttcatcttttgtgtttatatttttcgccttttttggaatgcgtgtgcgtcgatttgtctggcatcttcttcctttggaatagcatcgacaccactcaaacactgtgaaaatctgtacatctgtggtcgtccgttctttggaggaggatagtcattgttgttttgagtgtttaaggtcaatggttattccgctgaagattaatggtacactaaaactgtgtagtgaatctgtgatagtattaaaagatactcttacgatgttactgaaaggaatctgttgtttgcccatggttttaagtttcctgcgatttgcgcttgcgattgctcctgtcttgattcagttcagttgttcaaacacggccctaaaatctgtgcctatctttttttatgcaccaaaagaaaaagtggaatctatatcgttgcatcttcataacattcggattatgaggacattggtttctttggttggaactgcataatgtagaaaaaacgatgtactctggttctgatgggatgattatgatgcaggttggcctttggtt

SEQ ID NO: 10990 - DNA, 1011 bp, Oryza sativa
  Intron number 1 from transcript LOC_Os12g20310.1 (locus LO C_Os12g20310) derived from phytozome v7.0 (chr-ID Chr12; p os 11860308 to 11861318)
agctccaggaggagctccgctccatagagcgccaggttaggtcttacacactgttccctgtctcttttgcgcctctctctctctctctcttggaattagggttttgtataggagaccatggatttgttgcatatatgttcagatggcaagggcttgccattgctcaacatgcgaatgagtggtgcgaatttacattgctgcggatggttgtaaaattggagttgtggatacctgtagtagcctgaatttattgttcaatctttcttaatgccttgggaatgatagaaatatgaacctatttggaaccaatatgctggaccagtgaccactgattgtcatttcacagagaggatcagttgtgacgaacaatttggatagaattaggaggaagggaagaaagtatcaatttgatattcttgtcgaatatgaccattctatttcttgtatgttgttctttgtgcctgagaacactttgttattctaaggtaaaaaagaaaatcagttagctacaacctgaaaattccatctgttcttctatcctcgagttaaaatgtggagtttctactgtgtcttagtcagaaattattcgcagcaagtatcaaatgagctacttctattcatagtatttcaaagttacactatgtggtccaaattccaatatatgtttgtgatggtgaatcttggtgtgtcatccaaaatcattaaataagaggagcgtttggtttagtagaaaccataatcctaaaaagggaggaaagtgctattgctctcatatcaagtattttaatggcactgatatgtgtgttttttttagaaagaacaaaacagtcgctctttaataccaggaacaacacatgatctataatgtcaaccatctttgcttgactttaaggggaagttttgtatatgatattaaacactcataatttaacaaaatatctattcatgcttttaacagaattgttcttatacaacctgcaaatgatgtttatgtccatatgttgcaggttt

SEQ ID NO: 10991 - DNA, 440 bp, Oryza sativa
  Intron number 1 from transcript LOC_Os12g10750.1 (locus LO C_Os12g10750) derived from phytozome v7.0 (chr-ID Chr12; p os 5775073 to 5775512 reverse strand)
ccagaaatccagcaataccaagttcaagatcagaggtaccatttctattttctccttgtgtccattaatctttggttcctttgagtttttgatctgtttcatccaaaatcttcactgcagcagctgtcttgctccctctttttcatcttgcatgccattttcagagattgattaatctgttgtttatgtcaacctgacctttcttgaaattcttagcaaaaggcctcaataatcaaatatgtctgtatgttatagccggccattctacaaatctctctgaaattcatcaactttttttgtcacagatatattccttgcaagaaaacttccaaatcagactggtgagagccaagaaattactcctcatcagaagatacatcatcttcagaaatccatcacagaaaatctcccaacaacaaactgtccggacaacacatttc

SEQ ID NO: 10992 - DNA, 993 bp, Oryza sativa
  Intron number 2 from transcript LOC_Os09g39500.1 (locus LO C_Os09g39500) derived from phytozome v7.0 (chr-ID Chr9; po s 22692673 to 22693665)
atctgccgcaagtacgctccttctaatttccttctccttgaatgctcgacttttgattatgcatactcctttatatgttcctatagtttattatgcttatgatatgatgcttgccttgtgagggttggatctgtggtttgtaactctatgacgcgtggcattgggttccccatgggtccagagattgacaacccacctatactttgtctgctgcctagcctatttcggtagttgattttcactggtgggacatgttaaatcattcgttgtcataccacatggaactgcgtagaagattggcaggaatgatgaatcaattagatgtgcgaagtctccttgtgagcttaacttttgaggcatacattctgtctgacctgccaatcagctcatctatgtttcaaagcaagttgcttttttttgtcatttgtttgtgagctttaccatatgttttgggaagataaaaacactacttttcgacttgaaatttcaagtgagctaacctatcgaggcacatttttcattttaaccatcttctaggatgtattattttattcaattaatataccctgtgttatcttattgctaggtatgagtgactcactgactcttagtttgtgaagttctatcatcaagtattttgttgctgtgtccagcagtgccatgtagtatgtatgtggaaattagcagattggctgggatgatgaatcaattagatgtgtgaactcaccttatgatctaaaacttttgaggcataattactttctgacctgccaatctagtaacattcaaaacattttttcactgtgtttggctctgatgcttggactggcatgccttgccagaaagttagtgtcatttgctaatgttatgccagtagtaccatcatgtattataggcacagtagtgctgcatctgttttcctgatattgctcccttttagggtagactgagttcagcatgtgaatacatttcgactgttttcttgcaggtgct

SEQ ID NO: 10993 - DNA, 1052 bp, Oryza sativa
  Intron number 1 from transcript LOC_Os09g07154.1 (locus LO C_Os09g07154) derived from phytozome v7.0 (chr-ID Chr9; po s 3494195 to 3495246 reverse strand)
ccgttgctccaccgcacggtaaatacttgcgctcttagcaccctctactgacctagaaacatttggccccctcgatttgaggtgtgtgtgccgctgctagcctgccgacgggccgccattgcgccaccgttgagctcaccgtggacggcactagttccaaactaacctaggccatattattgcatgaattagttcactagagaccctagatggtgaatttaggctcggttaggtttaattcgtcctctcccgcgccatggccgagctcgccgtgagctccgtgccacccgtccgtcgcgtcatgccccttgtagccgccgcgcctcgttgctgccggcggtgggtctccggtggtgcgccgccgcttccctcaccacggccgagccgtcccggctcgggctggtcgcattagccgtgcgcccgcgccgctgccctgcgcgtcgggaggaggaagacgaccgagggagagaaagaaaggaagagagagagagaagctgtgggccccacatagagattagtgcacagtaatcacctattaatccaatgcaaattaatctattacacgtgggattggatgattagaaaaatcaaagaaaaattgattatgaagttactgtcaatggcatgcgggacccaccgggattaaagggctggtttggacccaggtcaaatagggccggtcccacttgtcaatgactctctgcattttctatgggaaaataaaaacaaaggaaaaagaaatggggtgaccctacatgtcagccactgtaatcatgcccctctcggctgcacagtgccatttcacaactgtttgaattaattcaaatttgaatctttaaacaagcatagctcactcattttagctcggatttaaatgaaacttgaacctaaattcatctaaaatcaagatatagctgatggaatcacttttgctatttatttttgtactgttgaattttggtgatttaatttgaattctaattgaattcaaatcgaatctttcgcacgtacatatagattccgagggagtggttgagttgactgcaaaacaa

SEQ ID NO: 10994 - DNA, 462 bp, Oryza sativa
  Intron number 1 from transcript LOC_Os12g42400.2 (locus LO C_Os12g42400) derived from phytozome v7.0 (chr-ID Chr12; p os 26316905 to 26317366 reverse strand)
gtgggttattgaagttcttggtttcagttgggaaggtgaaaagaggatttctggattcttgggaaggtttgatcttgcatttattcacccaaggttgtttgttcatgtggtttggggggtctttttctttttgttactaataatttacccaagtgtgagactttgtggctcttttgatgcatatgtttgtatggtgattggccatgggttctttggtaaagttggttcttggtctgcttcatctgccttgttactatcttccttttgctaatcttgttctgcttagattgtcttttctcttggggcatcctttgcattttggctaatcttgtcatctccttttgaagtttcacctctcttcctgcatctcactacctgatttggtgcttagtctaatccaattcctttttggttcttgtgattgcagtgggtgattaggtgcttaacataatcccaatccta

SEQ ID NO: 10995 - DNA, 406 bp, Oryza sativa
  Intron number 1 from transcript LOC_Os11g11720.1 (locus LO C_Os11g11720) derived from phytozome v7.0 (chr-ID Chr11; p os 6512346 to 6512751)
agggcgccgcctccaccgtcgacttcaagaatcacgtaaatcctctcacaaatccacctcaaattcatcagatctactctctccgtttgtaaatatttgacgccgttaacttttttaaatatgtttaatcgttcatcttatttaaaaaatttaagtaattattaattcttttcttatcatttgattcattgttagatatacttttatgtatacatatagttttatatatttcacaaaagtttttgaataaaacgaacggtaaaacatatgctaaaaaatcaacagcgtcaaatatttagagacggatggagtagctaattcatcaacttttgtttgatttaatatttgatgtgtggccattgatgatgcagccggtggaagcaaggaaggagatcaacgcgtgggt

SEQ ID NO: 10996 - DNA, 532 bp, Oryza sativa
  Intron number 1 from transcript LOC_Os09g28040.1 (locus LO C_Os09g28040) derived from phytozome v7.0 (chr-ID Chr9; po s 17018135 to 17018666 reverse strand)
ctcggcccgatttgtttcgtgctgtcgttttgaaggtatttatgattaactgattggcttgtgtagaaatcattagctgattttcaagattactttcttattttctagtctatggtgttattcatcaatgcacgtgggaactaggaaggattttcaagtcattttgtcattatatatgtttgccccaaatcaaaattgttctaaattttagaacattacaattggtttaaattgctgcagattggcatcacaaatagttcacatagtccacacatcacgaactcttcttttatgttgtttctttgtcattaaaagatgtgacagatgaaatcagttaatgaagcattttaagtaacagattatccatagggaactttgtgttatcaaattcttcatcaagtttgggattgctgtattagttatcctttccctgtaatcttcagtttgtactattaccactgatcttgttatttataccaatggcccatcatgattcatgacttacattttgtcccccaggtccctttcttgg

SEQ ID NO: 10997 - DNA, 1003 bp, Oryza sativa
  Intron number 1 from transcript LOC_Os09g30150.1 (locus LO C_Os09g30150) derived from phytozome v7.0 (chr-ID Chr9; po s 18338944 to 18339946)
gcctcttcttggccctagcacaggtacttccttccactgcaacccccatctcccttcccggattgggggtgtcattttcctcaggtgtgggggatgtaggaaatgttcgttcttgatctgtttcttgctttgctttaatgtgtgccacccacatcactttctagatccaatcttttttttatataaatctaccgccgccgccgctgccgcattcaatggcgacttggtggcagagctcccatgcctgtgggatgtggaggtgaggaaacaccacatgtgtctgtgtgtgtgtgctcatacgactcctgcttcttcttcttctcctttttgtgggggaggaggggtgtcatggtgtgctgcttcttgtgagcttgcagctgtgctgtgctgttccaggttgcatgctgcaatgtatagtaggagtaggaggaggagcagcagtgtgtgtgctgtgctgtgctgtgctgtggctgcctcctcctttagccgaggagaggggattatcttaaagattccagcttttgttattaatctcctcttcttctggcccactgctccccccctcccctccccaccaccccctatttctgtgggaaatgccgggggcctcgtgatttcatcttcttcttcctcctagcaagcactctcttgttcttgttcttcttcccctttttggagagtggcgatgtggcggggctggatctgtcgaatccgtaggtgtttctttgatcctgaatcgcggaaagttttttttttccctttctgtttttttttgggttctctctttgttcgaaaggttcaggtgggtttctgctcgatttgaccggctggttcatcggtgccgctttgtttttatctcttctttttttttggttggattcttgatcccctcgagttgtttgtttgtgtgaatgaaatcggagtgactgtggaacaaaccctagttgttatgttggtaacatggtaatgctaatggggaaatttttctctccttttttttcag

SEQ ID NO: 10998 - DNA, 297 bp, Oryza sativa
  Intron number 1 from transcript LOC_Os12g38010.1 (locus LO C_Os12g38010) derived from phytozome v7.0 (chr-ID Chr12; p os 23319223 to 23319519 reverse strand)
cagcggtggctgcgggtacgttcaatcttcagctactgattctgaatatgttttgctatgtatttatcaagctaaactggcataagctttcagaattcagagatacacccaattagttcaggtgattttgatgtattttccatgataaaagcatatactcttccatctcctgtgttgcctcctcccattggtttggagtaatattcagatgaagctacccacaagatgagaagagatttttcatttctggttaccgaatcatctcatgttctactttttgtttcttggttcagaaag

SEQ ID NO: 10999 - DNA, 1010 bp, Oryza sativa
  Intron number 3 from transcript LOC_Os11g12800.1 (locus LO C_Os11g12800) derived from phytozome v7.0 (chr-ID Chr11; p os 7248610 to 7249619 reverse strand)
gcgcgctctttgtgcttcacgataggtaattgattggactgctgcttgggtcattggagcattagatgcatttgtgcttggttgttgaatgcagctcttgattgtcgcatccgcgcgtgccgcttaattttaatggaactagaggttgaagtaatgatgctaatggtggtgagtcgacatatttccgttgtgtcctgggttgataaggggacaaggtctgcctgatttattactcattttggagatgtacatcagttttaatggaactagtgactgaagttatagtactaatggagtaatggtatgtgttgtcatagttctgttatgtaggattgagcattgtatcccttttatgcaagtggatcgcacacaggctatctaattgattgattgaggtccttgtgctacttgaaacaatatttcttgggaaaattaggcatttttattttgtccgcattgtagctatcttccatatttcggtgctcataattatagataggtggtgcatgtatggatatgttgacatttctgtgaccaaagtggtggactatgatgtataaattatatttattgataattctatgtgcctcgtactgcataatgtgcagttgcatttctttcataattcactccttgccacataatgcatggcattagcatctattttcattgttcttattctcattaccttgtatcttacaaactatcaagtggctagagctcactttctatgtttggctgttagcatttcagttatagaaagcttgaatctcctattctttaataaataaaagttttttttttcgaatttatatagttgggaatgattagaggcacccacaagaagcagccagtaaattgtcgcagaaataaactgtatcactttaagacagttgcaagagatgttttaaagagagaagcagccattttactacatgctaatatttttcttttgaacaatatgtcctgttacctaattcaaaattgacacaggcagggatctgcaaaga

SEQ ID NO: 11000 - DNA, 1033 bp, Oryza sativa
  Intron number 3 from transcript LOC_Os11g31740.1 (locus LO C_Os11g31740) derived from phytozome v7.0 (chr-ID Chr11; p os 18142962 to 18143994)
caatctaatttggtgatactgaatataggtaataaactagtttaacaggtagtaagtacccatagctataaatgcaatatttgaggtgctttgtcatatttatattcacattcatatgttgtccgaaattctgaaagaaagcattgttgactacatttggataaaatgctatcaagttatgggggactgaaattttggctgcctggctgctccaatcgagcactggatactactttattgtgtttaaattttcaggcgttctgtctcctagtcccccccccccctctctccctctccctctcccctatgcaactccatgctctaaccaaatttctccttcaaaatcattgcactgctacacttctttctcatttctgcaagccacacccagtgagccgatgaggcattcgaacattaaatcaaacctttgataatcacttgctcgttagcttaagatatggttggcgattcacttcaatttcaggaaatgatagtttacactagcggcaaatgctaattctaatgaaattatcaatgttaattatgatctggttgatagtcatagtgctacatttaaaattaaccgatatgtatctatgtaaatatgtatgtagtatgttccgatagagaccaaatgataggcatgcaaacgaatttttttgtctgttgtcaaaccgtcataatgtactatataccatgtaaagccttggaatgtacgcatattgttactacactatttttatgtgatcattggcgcttaacaacttcacctcctcatgaccaaatcccaactctaccactagcatagtaatccagtaaggagtgattgcttgggtatgtttggaccgtttgctttgaagagcaaagaaaccaatgaactttcctttcctgctcagctaacttgtccgctgaagcatatatttttcttttgggcttaaatgctgatatgtttgtagagtatgttcacgttccaatatatgttgtcttgaccagctaattttgaagtttgcaggtttttctacatcttctgaaa

SEQ ID NO: 11001 - DNA, 658 bp, Oryza sativa
  Intron number 4 from transcript LOC_Os08g44520.2 (locus LO C_Os08g44520) derived from phytozome v7.0 (chr-ID Chr8; po s 27998009 to 27998666 reverse strand)
ctttattactcttgcgccttgtcagtcacttggtgagtctaccgtactgtctcattgttgctccagttttacattatgctttcgcttgtttgctgtctatgaatgttctttgcattgccctggaaagctgaagttcactctgtaggagttaatcaacaatttctcagattgcaacctaaaaactttactatcaaatcactgcaagtttttttttaatattagatttggaataattacaagaaaaacttgggactagcttttgaagagcctgttgtagagtgactttgagtctagtgcaatcactaggagcgtgattcttggagacttctggtggatttctgggactcctgttcttctgtattgtgatgttggtacattggactgcattgttgttaatgtgtaatgcaattgtgaaggacttctgctagcaccatcactgttttttcttcctaattgccaaccctggaagattttgcccctcaggatgtcactgcttacatctgtttttgacattgtatttcgcactctggattgcttttacaaatatgttcttttcgaaatttccacattgaaagtcaggtacattttcatgctattaaggttatatggttttcctattccaggaaagcatacaatttttgggagagtatcaaaagga

SEQ ID NO: 11002 - DNA, 204 bp, Oryza sativa
  Intron number 3 from transcript LOC_Os12g35560.1 (locus LO C_Os12g35560) derived from phytozome v7.0 (chr-ID Chr12; p os 21587189 to 21587392)
caggtatattagtcggtcattatacttaatatgtttttttcttgtgatggattcttggtataaactttaaaatagactcaaaattccttatttgcttattaatagaggttaattgtgcaagttcctaactttactctcgagcgttgagaatgatatgcatctcaacaatagtatcttcctttggttgaaggttctggatttcaa

SEQ ID NO: 11003 - DNA, 849 bp, Oryza sativa
  Intron number 2 from transcript LOC_Os12g09000.2 (locus LO C_Os12g09000) derived from phytozome v7.0 (chr-ID Chr12; p os 4706367 to 4707215)
tggtgagcccctttttgccttctttttttttttcttcctatctgcctttccaagttccacgaatctttacagttattatatcttagctggttttggttcttgctacatagcttagtgcacaaaatgctctgtgatttccatatgtgtgtgatgggttgatattgtgatatcggtgacgccccctgttccagacaccatttttgtgcagaattaccagcccctgttgaaatctggtgtgccacacaaaaatcgaatctaaaaactaaaaacttggttgatagccctcaagcaaccagttattacttggttaatgggcgtaaaaattctatatttaaaatgcgaattttgagttggacttgacagcctgctggtagagcggttatgggcagtacctgctggtttttgaaaccttggatggcatgcattttagactagcaagatcacttcagaagaaccctgattgcagcgttgtttatctgtctggaaaagtcttcagaatagctgtgtgatcatttctgtcttaatgaatttggtggtgtttggacttcggaacactgtcaactgcaaacaactagcggattttatatttacaaatggcagattacatttttaaatttcagaatgtacagattccaaggttgcaagatgtgaacctttctttgaactgctcaaagtttcgaatatgtgtttttattttcttaccaagaaatattgctgattttgcaaatgtttctaaaattcaagacatgaatgttgaattaggattttgggatataattttcatgcgatgggattataacttatacagtgtacattgttaccttttgaattgattaggtcaagacagga

SEQ ID NO: 11004 - DNA, 731 bp, Oryza sativa
  Intron number 7 from transcript LOC_Os12g09000.2 (locus LO C_Os12g09000) derived from phytozome v7.0 (chr-ID Chr12; p os 4708387 to 4709117)
ctgttcaggttagtcttccagtccttttccctgactttaccttcatatagtgaagaaactgtgtcaaatggtatgtcatgtctgaccgtgtgatcttatcaagcaaattatttagttccacctcccttttgtggcatcactaggaatgtctttgccacaatggtaacatgaaattggttgaaacagttctgataattttattattgtaccttaatactattttgttacaaagctgcaaactaagaaagggtttagcgactctttagtagtaaggtttcgatcatttaagggaaatctgtgttatttaaaagtagcacttgactggtagtaactagaattgtatccactgagatgttggagtgcacatttactgtatgcaacatcttggttacaaaccagccagtgatatattgaaaatgtgtgttttggcttattttctgtcagaactcgttctcttgcaagaacagtggtttgtgcgaaaaaatgtgtatacctgcaaatcccatcatattatcagaacaaagcctgcataagtcatcctgagactttgagtcttaccaaataccaatctaagtttgctaatcagttccggtggacatcggtttcctgaaaatttgtgttatatgtatcttttcatatcctctattcacaacagtaggctcactttgttgtttattgcacatgtgaactatccaggtggctaagaattttgtagaatctgctcttcatca

SEQ ID NO: 11005 - DNA, 550 bp, Oryza sativa
  Intron number 1 from transcript LOC_Os09g31470.1 (locus LO C_Os09g31470) derived from phytozome v7.0 (chr-ID Chr9; po s 18965635 to 18966184 reverse strand)
gaagcacgtgccctctttcggaattggagatatcggtatatcactatatctctaaacctataatactattccattttttgctaaattttttgttattttgttatgttcaagaagaggagatgaagttttagaggaaactcatttggtttttcattttgttattgtttgtttagaggataaaaagttactgtcaggagtacttaactctgcacttgctcaggttttgctggctgtttttactagatctgagatgatttactgtatgcagattattggttaagtggttaggaaaccttttcttttgtttctagcatggaagggaacccttctttagtgcaaaatttgaataggaaagtttggttttattttttcagtaatttttgtgccacttcgtggttactctttagctgttacattactgaactatgatttttatgactggtgttttggaatgtgtctttttcacttcttttcgaggtcagtaaatgtgtttgatcattattggttgaattgcaatttgcagggtcagcaggagctggattcacacctc

SEQ ID NO: 11006 - DNA, 719 bp, Oryza sativa
  Intron number 1 from transcript LOC_Os10g02220.4 (locus LO C_Os10g02220) derived from phytozome v7.0 (chr-ID Chr10; p os 774464 to 775182 reverse strand)
gctcagagtttatttagttcttctgcacttttttggtaggattctatctgtttcagagcattttttaggtatttatatatatctctatgcaagttgcaagcaaatctttcttcttttgtggtattagttctacacctgaacttttttatggatgcaaaaaaagatatcagcatcgaaggaagcagtcttgttctttatgagtagggagctcatttcccccaggttaaattgtgggatggatcaaataattcagggctaatttttgttctgaacttgatttcgtagttttttgtgtattcgcattcaagattgaataggataagaaataggggtatctttgattctaaatatcgtagtcaaagattctagctgctggcaaatatatatggatggaagaaaaactataatatatgatttcttccttccctgcaaagtagttaatttgaccccccaaaaaagttgaacttatctttgttatcattaaatttttaagttccaagctgacagaatatggtgtttgcttgcaagaaattagtcgttcacaatatatgcagtcaatagtgttacatatcttctaatatcgaaattgcgtgatggcgttattctaagacgaaaatcggatatgagaaatctatcagaaaagaagtgtgagtcatgatacaatttgctccatataatcttcttgactttcttacattttcctatattatcttgcccag

SEQ ID NO: 11007 - DNA, 751 bp, Oryza sativa
  Intron number 2 from transcript LOC_Os12g36920.1 (locus LO C_Os12g36920) derived from phytozome v7.0 (chr-ID Chr12; p os 22602683 to 22603433)
cggtcgtggagagcatctctcagattggccgtgtgagcaaatggataaacggatcaatgattttgcccccctgcaaaaaattatacagtcgttttgttctctgcaaaagtgcaaatctttatctttcttcctccaatgattttagcccctttccttttgcatatacttgtttgatttgatagtcgtaaaggtagcatattccatcttcagtactgattcccaatctagtatcactccgtttctaattatttgacgccgttgacttttttaaacatatttgaccgttcatcttattcaaaaaaattgtgtaattattaatttttttcctatcatttgattcattgttaaatatacttatatatatatatatatatagtattatatatttcacaaaagtttttgaataagacgaacggtcaaacatgtgctaaaaagttaacggtgtcaaatatttagaaacggagggagtaataattaacatgttgttctgaaagtcgggcaggtgcatatctgtttgtgatgtatatgaaactcattttatcttactgatttaactgacagtcataagtttgttttggtatggtatttggttcagcaaaaatggcataaactcattgtactttgatagtttgatattgggtatttcttttcttcctacagcctacaatgtttcttcttcctgtttccttcttgtttcatggctgtggctaaatttacgttcttgtgctttcataggttcagaggcttcaca

SEQ ID NO: 11008 - DNA, 700 bp, Oryza sativa
  Intron number 3 from transcript LOC_Os09g32700.1 (locus LO C_Os09g32700) derived from phytozome v7.0 (chr-ID Chr9; po s 19507773 to 19508472)
cctattaaggtactgttgccttttccggtcacttgaatgtcatccatccagacctagaaacgtgctctagtttcatctcatcatggtttgtgttttattttgatcacaaagttcatcttcactagtgctatatttgaattactgcattgaccgtccattgtcaattcataaatgatcattttttgtggtttcttgatataaatttagtaacatatatggtatgaagcttttgtattttgtcatgcgtgatgtatctatgacgtgctattcatgtactacgtagtcatagatctgtttgtcatcctggtatatccactcaaagtggcttctatgttaattatatgaatgcgattcaagcttagcaccgaagttccagttggttgccatctcatcaaattgcatacccaatcatatgatttcttttatattttatcattgactccatctattttgacttactctttttgttcaccaacttcccctaaagaatactgagaagtaacgaaaataccatacaagtcataaggtaggtaaagaaatgcgcaagaggtcacattacatgcaataaaattgagaacgacgtatggttcatgacttttgggttatttgcgtgtacttcgattgttgttcctacctttgatgtattgcttttcaatttggtgcagcaacaaaccaccatcaagggaagaactagaaaccg

SEQ ID NO: 11009 - DNA, 1037 bp, Oryza sativa
  Intron number 1 from transcript LOC_Os09g32650.1 (locus LO C_Os09g32650) derived from phytozome v7.0 (chr-ID Chr9; po s 19472164 to 19473200)
ctgcgcgccgccgccgccgccgccgccgtcgtcaggtaccgaccggccgatcgatcccatcccccgcgcctccccctttgcagagctgctgctcggaaatttgttttctcgttgatgctatgcaatttgctgtgcggtttgtgctctgctccttgtgtagacgggtcggggaggggtctggatgggtgggtgggttagcacatcagtgttggggattttagtttttatcatgccgttttagttgatagggggtggattgattattttccgtattggttcgtgtggctttgggcagagtgctcattactcaatgtggttcgtcgtttttccgataagatttttagttaatcgtcgtagctgatcaagagtggaagtttagtgtatgttgattctctgcttatgtcactgggttgcgttatattgttggggatctacttcctcgtgtagttttacatgagcatttctagggaaaaaacccccctaaaattttccttttgttatggtgagccgttggtaggaagtgtatttttcacactttatttcctggaggtggatttcttctttccatcatttgtctgccttggtattatgtggaattgtggatatgctgtagtatccataggatgcatgatccacctagtctttaggtttatggaacacttgagttagtgtgaattttcttctcttcaagctattaagtgtgtaaattaactaattctttctgatctttctccccccccttcgcttcttgaagatgtttgtttggttataaatttatgatcctgttatcctagatcacataatagcttcatatcaatgacttgccctgtcatgagttgtaggtatgtttagcacaagacttcaatcaaatcttattgcataacaatggttcattaaaaacttatttttttatgtgtgcttgatgagttggttagttattcttgtttgtgtagaaacattgtttaagtactggactgagttcaattttattaaacaaaaagccttaaccacttgttttttgttgattgattaggaaa

SEQ ID NO: 11010 - DNA, 674 bp, Oryza sativa
  Intron number 1 from transcript LOC_Os11g32450.1 (locus LO C_Os11g32450) derived from phytozome v7.0 (chr-ID Chr11; p os 18692425 to 18693098)
aggaggagaaggctgccgagaacatctacatcaaggtatgtccaccctgttcgcttcccaaatcttccttccctcgtgattcttgctgttcttgctgcggtagatgggctccagatgcaactagagatgtattggtgtgctgtgtagaggtttatggtgccaagtggtgtgtatgtgtgtgcgtgtgttgcggtgggggtcgattcctcttcgcttcttgctccgtcgcttcagggattttggctgatgggacacgtgaaccgtacggtttttttggtagtattgtgggtgcgcatcattttgttgagcggtatggttcggggaaatggatgtgctcctaattgaaatgaggctgtttttcctatgcgaattgctgagtttgcttcaactttcatctgttcatccatccttgtgctgttgtgcacctgttcaaatcaaatttcttaggatgacatattggtctgtgtactgctataataatagattacaagagcagtgtgcaaataagatcacaatttgatgatatattatatatatactgatgcaaacaattaatcagcaacaatttacaggttttgaagttgcatagagcatttaacaaacaagattgatgaattagatttcataaatacatatgagttttacgtttgggtctgcaatttctgcagagataa

SEQ ID NO: 11011 - DNA, 1044 bp, Oryza sativa
  Intron number 1 from transcript LOC_Os11g36950.1 (locus LO C_Os11g36950) derived from phytozome v7.0 (chr-ID Chr11; p os 21330673 to 21331716)
tgggagcatcgtcaaaaagggtggagaaggcaaaggtgagaacaaaatgttacacttaatttgtggtgtgtctttgccagtctgttgatacattatctattcttgatttgatgatactgtttagtcagggctgttcccacactgtatagtagcatacattaggtggtgataattctattttcctttgtcgtccctttcatggatgaagtatatcatcatctgagatcaaatatttttgttcttatctttgtagctttccactatgaatcgggagtttctagtaactcaatgattcatcttcttgaaatttttatttgagatatgatactcatttttctttgttattgcactctgatggtgtaaatggttttcttaaggcttgcctttatttggtggttagatttagtggaatatatcttgtcaataagctttgaaggcttagaaggtagcactgtagcagggttctaaaattggtagccggtattcaattgtctccacctagttatgatcttatggcctaattggcactgtatgataacactcttcttctcttgttatatggcatagtagttgtaaacctgctttagaatactcatggtatttcttacaattccttccttttgctgttgatgtgctcaataatctaacatatggactgcccttgtcatggactattgagtacatgatcaagtagaggctgtacacctacattgcaataaacagcaaccttgtggacctgttcttttttagagtgattaaaatatgtaattcacgtactttggttacactattttgtgcttctgtgaatttgctggatggttgcaatactccacttctactttttgtgaacaagtcagtgctttgcatctttcttatctacacttcaaaattggaaatattgtaaatactctactcaactgaaaccctggaagttctaatattaaaaggcatctcaaagttgggtacttcatgcttgatttggttctgttttagaggagtacttacttttccttttattttcaggctaatattattattaggaaa

SEQ ID NO: 11012 - DNA, 741 bp, Oryza sativa
  Intron number 1 from transcript LOC_Os10g35560.2 (locus LO C_Os10g35560) derived from phytozome v7.0 (chr-ID Chr10; p os 18945039 to 18945779)
cgcgtgcccgagctctgcaggaacttcaggtgcgtttcgagattagttgtggtttttttgggggtgttttttctttctgggatttaaatatgttgggggaagcttaggtgtgatgaatttaaaccctgatctgtttcagcttattcatcgatttattgaaatggtttttttccccccgaaagaaattttcctctactgtattgcttagaccacttgttttaagctatttgttaagtttgtctctcaaaatatctaatttatccctataatatatccatgacaataatccactcaataatctaaatcaaacgatctgggtttactttttttttcctcttcaaatttgggtggcgtttcaatgattgggatgaacaatctagtgactcaaacttgcagaagcattagcgtgggcatggaattgtgattgctttgaatgattgtatcctgtgcaggcttctactatactagatcaaatacagttataacatgtagtgtcattatttcacataactaagtttagtcaggtcaaactggttactttgttcaccagttagaaaataccgaacgtgataactccatttttaaaatccacattatttttttttgtttaaaactgctttgatcttgtaggatgaggttgccttgtctgctttagcctacactatatcgggaacaactagtaactatcttatctatggttttttttttattgcagtgcagttgcttggtgcgggaagctca

SEQ ID NO: 11013 - DNA, 777 bp, Oryza sativa
  Intron number 2 from transcript LOC_Os11g43200.1 (locus LO C_Os11g43200) derived from phytozome v7.0 (chr-ID Chr11; p os 25586056 to 25586832 reverse strand)
cgccgggaggcgtcaagactgacatctgccaagacgtaagctaaataatcccttcgttacagattataaatcgtcattttgattaagtttatagataaatatagtaatatttacaacaccaaattagttttattaaatttataattaaactagaacaaaatacacgtgcgttgcaacggatgaaggttattttagtattattattattattattgttttacggtttagctagagtgaaaatcatcgtgggaattcacttgtttttttttaagaaaatcatgggctataaataggagtctgactctctagcatgactttttttaaagaaatttcttataagatatcttctgtattttaaaaagcgaacgaacttgcaaaaggactcaaacacagatttgtatttctaaaaacgaacaaacttaaaaaccgactcaaacacaaataacctactggaacaacggcgaaaacatcttcaatttttataatagtagagatatatttatttttggatgaaaatgtaactaatctttttctataaacttaatcaaacttgaaacagcttgactttgaccaaagacaaaactgacttataatgtaaaactgagggagtatataccagctcagtcagttgatctccagctcagttactagtacataattagtgcatgattaatggtagaattagtgtgattaatcacatcattgattttgattgattaatttcggtggatggccggagcaggagacgatagacccggagctgatcaagagcgagat

SEQ ID NO: 11014 - DNA, 607 bp, Oryza sativa
  Intron number 1 from transcript LOC_Os10g26440.1 (locus LO C_Os10g26440) derived from phytozome v7.0 (chr-ID Chr10; p os 13693732 to 13694338 reverse strand)
aggtttgagcgttattttattttcgctaaatgtttttgggtttttggttttccctatcattcacccctctggtaggtttgtttggtcttattcgatcctacatccacgcccacctccactggcacgtgccccaatggcaccttccctgtcgccgctgccctcgccaccacggtacccagcaccaccctgcacacccccgtcgacgcgcaccgactgatatgtggatcatagtgccacccactaacatgtaggtcccactattttgtatcttcttgtttgactaaagtatggaccccacattttattttaattttttagttctcaaattttctacttttatttttttggatcaaactgccatgtaagcgtgccatatcaatgacacgttggattaaggcttaattaaaggagccacgtcagccaaaactggggacaatactgtcgagggacctcgtttgtactggttaggtaagttcggggatgcgttgtatctagttttgcgatccatggacaaatttcgtactccgcgacaaattgaggaaacaaaagtgaacttatttccaattttgcaggttggccttttgcagtttcgtgcaggactgcaggc

SEQ ID NO: 11015 - DNA, 911 bp, Oryza sativa
  Intron number 4 from transcript LOC_Os11g24374.1 (locus LO C_Os11g24374) derived from phytozome v7.0 (chr-ID Chr11; p os 13450057 to 13450967 reverse strand)
gatcgtcccgtttatcgtgcagaagatctcggaaggtgctgcaataatgttaccttggttactctttaaatctcaaaggaatatgctcttgttttcttatgtgtgatctaaatagttatataaaaaaatcattttataccactgaatttattcaacgatttattattgacttcatctccatctatggtatatatatctccaactttactttttctataatatatcattggggctgatacttttcaaaaatgatgcttaaaatgccttaagacttacaagagtgactattgattaagcaacatgaagatatatatacatatatatatatatatatatatatatatatatatatatatatatatatatatatatttacttacatagtcttcttacataatataatatagaagtttttttataactaatatagaagtgatatattatagagaaagacaaattcgatgaccaactgttgaactataataaatttaatggcatagaatagattttctctgaaaaaaaaactattttgacaagttagattaatgtcataaaattttaaatttgattttacaaattagcgaaacaaatatgacgtgagcacacgtatacgtaatccattctttttggtatgagttactgatactgaatttgaactcccacatatttgtggataaatatattactagtagtgtgcctgtgctaatatatcctctaattctttttcaaattctttcacaactatttaaatacaagcaacaacgaggggaaattgcctaggattaaaattccatttccagatttctacaggatctcttttcaagatcgatcagttcgcgcaccaaaaagcttgacaattttgtgctctgttttcagatattgaagctggcgtcagaccgacgtttaatctg

SEQ ID NO: 11016 - DNA, 951 bp, Oryza sativa
  Intron number 2 from transcript LOC_Os10g30910.1 (locus LO C_Os10g30910) derived from phytozome v7.0 (chr-ID Chr10; p os 16050905 to 16051855)
gatttcgcgactgacagagacattgtaagtgaagattctggccttctgagaactatattttctgtctaataataaatacaatattctttttatagattcgttggtttatggatatgctagtattcttataatcagtgagcagtgtgggttttctgagttgacctggtagattgggccgtggttagtacaagaagtatctaaacattaagatattgtgacctgaacatttggtggcagtagtagttcattttgtcagctatccttggttggtatgaatatgctgattgttttgaagctaacttggggtatcattttgagtgtgaatttactaaggcatgatgtttttttttcgagtttcgagcacctccatggatgcaaggacatggtgttttcttctgttatggatgaaaaaaaaattggaaatccccattttttactttaaaaatattttcttttcatgatcttatcatcccatatgaaagtatgtgtgctgtaatgttcatattgattccccagaatctatacataacacaccacacagggattcatgtattcctttttggaaatagtatatcaagatagaggagcaagggttgatgaatatggtcttcatctaaaagtgggcaagcagcttgtttgtttaacctttactttccaaagaaaatttaggtggtacagcagtttagctcggtgccttctatgtgtagtgcagtgaaaagaatatgaaatgctgatcggtgagtagttatgtgtaatagagtgagctgcattattctgttttatgaactctttaacttgacgtagaacagcattttggtattgcatcatctgtttagtttatatctgactatattgtacagaagattgcacagttgacttatgtatagtttgtgcaatatttctttggaaaatacagcagagggagcacttgaaggatctgccaagaagaga

SEQ ID NO: 11017 - DNA, 961 bp, Oryza sativa
  Intron number 1 from transcript LOC_Os12g07810.1 (locus LO C_Os12g07810) derived from phytozome v7.0 (chr-ID Chr12; p os 3946329 to 3947289)
tcgccaagccctacaccgagtcctacgtccacgaggcaaatccaatctctcccttcttcctcttctttcttcctataaaataagataaaataatccacccaagtaatctctgttctgttatgatcgagttggttactggcttactgataccgaattggttaactactctgatctgctgccacatttccgtccttaattttctgtctcgcttagtttgaagcagattacttgagtgaattgttgctgcggattgtctacttattataaagataaattaaatattttaataaataaacataaaagactcaaaataagttgtccaaacaatacagaatatcttttaagaaaatgtttttttagtgcgtagggtaaataatcctgttgtaatggtaaatagtttgaaaagaactaaattggttatagattaaatattttaacaaatgaacatttgaaatttaaaataagttgttcacacaatatacataatattttttgagaaaatgtatttttcaaagcgtagagtaaaagtaatcctgtgatggtggtaaataatttgaaaagtacaaaattgattagctgaatattggtttgtgtttgattcatcgtacttagccttgacaatagcggcacagtatacatcctgagacgtacagtcgaccagtttctacagatatcggccgttgatcagtattagtacgtcgttattgccacttgttagcagttttaattaccatgattaatgatgctgatttagatgttaactgtgcttacataaacgctcacagcgcacaacgtacaactgaggaaaggaactgatcaatttcctgatctgacgattctgaacatcaattgcatatgcatatgctgttgcagtttgccactctgtctgctctgctgatagatgacaaaaataaaataatttgcagattgcgctggtgaagtcgtcctgcaagtttgccct

SEQ ID NO: 11018 - DNA, 967 bp, Oryza sativa
  Intron number 1 from transcript LOC_Os11g04850.1 (locus LO C_Os11g04850) derived from phytozome v7.0 (chr-ID Chr11; p os 2060494 to 2061460 reverse strand)
agcaaggtttgatctcttttggaagcatagtctacggttactagttctttatgaaaactaagtgagttgattactatattttgatggcgtatctcaaaaattgccgcaaccatgcatgtttgactgttcgaaatgtttcaggattcaccaaagtacctagatagactagactataggaggatcatgaatcatgctgttctctgttctgaagacacttgtagggctgaagttctcattggaacttaggaaggaatggactttatatttttccagagtaaacaacactgtttatgctactggatagctgggcttgggggtttacatgaacaattcatggtaattaaaggaattgataatcatcatgtagccaatgctaagcttgaccataccgcatatgtgctgaactcctgcttggctttgttctgcatcaaagaaaattttatttgttcagatttggtttagaaatgtttagcaatgttgtgctagctagcaattcagaaatgttcagaaatatttgtttagattagttctgaaatgttcaaatatgttcggaaatatttgtacagattatttctgaaatgttcagaaatatttggtcagactagttcagattatttcttgaattcgtataagttcggaatgttgctatgtatgtttttcagatgcacatgtacagaactttacaaatgtagtggcctagactagagcactgtattgatcatcttcttttagaggatttatgataaatattgtaagggctaaagggcatgacaattggtagtgcccctgtggggttactttcagtttcagtaagattgacctgtatatctgtacatgtgctagttatacagtaaatcatctgctgtagctagcaattccactataaaacatgtcaaacttggcatattcttaccttgatgcaatacatgtgagttactgatcaagtagtattcaattttgtaggcag

SEQ ID NO: 11019 - DNA, 489 bp, Oryza sativa
  Intron number 3 from transcript 13113.m00234 (locus 13113. t00107) derived from phytozome v7.0 (chr-ID ChrUn; pos 514 952 to 515440 reverse strand)
tgaggtaaatgagtacgattataatgatgaatccatgattatattactgttaacagtatcatcctaccttctggtatcatgtgagttcctaatggctaaggtccattggttactcctaaacatttattttctttttaacacataaactatccaaatttgtgtttatagtgtatagtggtattttgctaatgaatatgcctctggcaacatttgcttgtgggtgtaagtttcttttttgagaggaggggtttgaattcttttccttgaaggccagaaccatgatacgcaactctcttgcgtattcaagaaaaaaagaaccattccagaacaaaatattattgaatcattgttgtaatagttccattccaatgatatgaaccattcagctatcttgcactaatcgaaacgcatacatggacatgtgatgtattcttatttcagaaaatgcgtgcagagtagctgcctcaaattggactggtgaaggctctt

SEQ ID NO: 11020 - DNA, 384 bp, Oryza sativa
  Intron number 1 from transcript LOC_Os10g20080.1 (locus LO C_Os10g20080) derived from phytozome v7.0 (chr-ID Chr10; p os 10008215 to 10008598)
aggagtctagaggacaggtttgtgttgatttcttccctcccttctttcttttgctcaggtgaaaaagaaaaatcccctttatttatactccattaggtttgttttgcttccgttactggcgcactgagacatgagcttttgattctttctagcacctacttttggttcgactggatgacgcaattagccaaacaatagcaatggcagggatgcaagccatgacagccacgcatggaggcaagcctatacatcccaatctcttttatatcatcttatatgtctgttagggtgtacgttagattcaccatgaaagaatgtactagttacaccatgaatcagaaaattaatgtttggcgtttgtttgttaatggctatgcaggttta

SEQ ID NO: 11021 - DNA, 946 bp, Oryza sativa
  Intron number 1 from transcript LOC_Os08g41850.1 (locus LO C_Os08g41850) derived from phytozome v7.0 (chr-ID Chr8; po s 26429071 to 26430016 reverse strand)
cgcaaggcagcaggtcgccggtgcggacgcgcggaggcagcgtcgacgcgcagcgtgcgggcgcagcagcagctagcaacagcccagtgcacgggcgcatggtcgcgtcctggtctgctactgctactctactcaagtgctcacatgctatttctaatcagctaatggcactaataagtgagtattccctatttctctgtagcatttaggtagactctggactctaatctatttatcttttgaatgagaaacagagccttctatttaatagttttttatttactgataaacttgcaagagagaagaaaacaacattgtttaactactttacaaacccaattgatgagagcacaaaccaaccaacaagattcgaatagattttgatcctaatgaaattcttttcagcacgatgaatgacaatggaggatatgttggtggatgcagttacatttgtttctttggtttaagatttgtttccgttgatttgtcactaatttgctactttgcatatatagctggctgctcacttgacttttggctaaggcctaaaagaatgcactttgtgctggcaaagtactccttttttttttcttttctatcatgtgaacatttaatttgacttgtaagaggaaggggaaaagaagggagtaagaggcagtttggtctcagaagaatgcacttttttctttaccctgcctcttacggtttgtggctgcaatggctagcagtgtatctggttcaagaagtcttatcgacgttgttccattcttctgatgaccacactggatctggtcatttgttgcatgatagaggatccatcatggtgtattcatgtagtcattatctccatgctttccttcatgctcagtgaatggagactgaagactgaaaactggttggtgctcttgcaggtgagattgaagatataaaattggtcagggctctg

SEQ ID NO: 11022 - DNA, 896 bp, Oryza sativa
  Intron number 1 from transcript LOC_Os09g01860.1 (locus LO C_Os09g01860) derived from phytozome v7.0 (chr-ID Chr9; po s 591885 to 592780 reverse strand)
ggacgtctaccccggcgtggtcaaggggaagcgaggtatggttgctgccgttgttgccctggtcgatgggcggtgggtggacgtgggcgccgacccctgggtggtcgaggggaagcccttctccttcctcctttttcttccttcctccaccttctagcaaaggaactgatgttcgctttgtggcatgggcgtctgcgcgtgtccaatacaacagtgtagtgcctcgtgggtagggaatgctatgccacggcatcagggtcggtaggccagccgtcctgacgacactaagcttctaggcttagtgtggaataacacgcatcgtgctcaagcaaggttagacggtaggcaatacggcctcgttatgacctctagaccgcatttaacatgtagagtgtggtggtactgacgggtaccggataaactagaggaattcatatcatgtggataaagctgtacaaactctacagagtctaaaactaatcgattagtcgtgctcacggtcatgagcggcatagtgaagtgtcatgagtatagacttatgtttttaaatgtgtgtgtttaacttgagattgaaatgggttaattatgttgagttgtgtgagtgtgatgatgattatatgacttgttgccaaggaagacaacaagagtatgcttatgatgatataatgatatttatgatggacatgcaaaaatgatttgttaactgaatcaccaactccctttacagaagaattgtgaaacaaaacttgctttatgttgaaattgaactacatattgcctttctttgaatatatgccttacatgtagtatgtaggattatcttgtgcttggcaatacattaatttgattaatgtactgatgcttgatatgttgaaatatccatttgtgcaggagtg

SEQ ID NO: 11023 - DNA, 1031 bp, Oryza sativa
  Intron number 1 from transcript LOC_Os10g05950.1 (locus LO C_Os10g05950) derived from phytozome v7.0 (chr-ID Chr10; p os 2999009 to 3000039 reverse strand)
aaggccaaggccgccttcaagggtgcgtgatgattagatcgtgtccccgttctttttcggattattttttatgtacgaattattcgtgccatgtttttaaaattgtaatttcttttgaaaaaattatacatcagcattacttagcattacctaggtaacttattctaaattatttattactcactccatgtctagataagtataattttaactagtcaaacacacacatcttaaggaaaagttataagattattatgtccttttattaatacagggaaaaaacgagaaggggtgagaaaataattaggagggagttttattgggtcaatggttaaaaaagagaaaaatatatataatagtattaaaaagatctagtggaccaatgtaatattatactcttttatggacaaattcttatatcaaaactacactacgttaaggaagaagaaagtacatttataataatatataatatataatatcgaggacagcacatatctcagctggcagggagctgccaggagaagcgtgctggttcgaatccatttgaacgcaggttttctcactattttcttagtattccaaacattttcaaataataatatataatatcaatttgtccctctaatcaatgcatcttctatcattgttctattgttagcttattaaggccctgtttgattatcactattttcttagtattctaaacattttcaaataataatatataatatcaatttgtcccgctaagcaatgcatcttctatcattgttcaattgttagcttattaaggccctgtttgattcagcttaggattatttgtttgttctattgttagtttattaaattcagcttaggattattaaatcaatacagcctacctatcttatttgatttgccattgtttttttttttagaaaaggcaagctgccaatttcattgaatagaggagtaaactgtacattaagtgagatttatatatatatttgcgcgcaggtctccgtgtggcgatcaagtgcaagaacggcgcc

SEQ ID NO: 11024 - DNA, 1031 bp, Oryza sativa
  Intron number 2 from transcript LOC_Os09g20270.1 (locus LO C_Os09g20270) derived from phytozome v7.0 (chr-ID Chr9; po s 12156899 to 12157929)
cctttcagtactagtgtctgttctcgtttgaagaggtacttgcttgagtaaaaggaaagagaccgagcgcaaagaatatatatggattatcaaggaagtttattggggaccaacccaagaccttcccaaagtctactccaacattaccacaccacttttggtctgtaaaaggcaaaagatgaaattgtacacgtttcggattcggattcaggtctccttatagcataagcttcaaatgaagctagactctagtctagaaggaatcttaggtcacatgagtacttgttggaaagtttatggaggcaactttcatatggttttggtctcacatcaaaattcctccttagcagttaggaatctgcaaaacaagtcacatacctcacatagtctgattctgatttgagctttgggccttgtattgtatcgtgcgctaagaccaagggggtggtgccgggtaaccctaggatgtccctaatcatatttattcagtagccgccatagtttagactcgagttttgcttacattatttttgccattacagttgcgtcactggttcggtttgtggaaccctattcgagtgcttagtcattcatctacaaattgagttgcaatctacgttgctcttacttgttttcttccattcgcacacaaggattagccttcggtgaggttaatcaggttgataactagagaaaacgtggtgctgcaattgcagggttcgggtcgtgttgattggaagccagatcgtgtgtgtgtcaagtttccagcaaatcgggagtaatcattacctatccagtatttttaatgtacgatgaaattgacggccattcgctttattgaaaaattatattaaaaataaaaaacaagtcatatttaaagtgcctttaataaaaatacaaattataacaaaaagaaaatcaaaaaatgaattacactttgaactaatctttatcatcaaattaaatttcaagttggaccatctactttcactttaggccgccatattttgttaccaaagcatacattggac

SEQ ID NO: 11025 - DNA, 468 bp, Oryza sativa
  Intron number 2 from transcript LOC_Os12g03810.1 (locus LO C_Os12g03810) derived from phytozome v7.0 (chr-ID Chr12; p os 1555772 to 1556239)
aggtaattaaaaatattctcttccttttgtgttggtatctcagttaatcctatatttgttcagcagaaaatagctaggaagagagaaaggtttttaaagcatgtctagggtccatgccagaacatcaaagtatctataggccccatcgtttggcttttttcctaataagccaaaacggcttattaggaaataaaaatgaatttgtaggtaaaacttttatatatgtgttcttggtaacttaaaagccaatgctaaaaaacaaactacgttgaaaatatttcaaaatcaatctcaaaattaagtttaaaaatttaaattttggctttttctttggctgattaggccatccgatgggagccatcattaatcataattttgtttacagaaattccagatgcaattagtcagaatctttttattaggggacactgctaatcgtcaaatcaatgttctctctgatttcaggtg

SEQ ID NO: 11026 - DNA, 720 bp, Oryza sativa
  Intron number 1 from transcript LOC_Os12g17570.1 (locus LO C_Os12g17570) derived from phytozome v7.0 (chr-ID Chr12; p os 10068415 to 10069134 reverse strand)
ccgccgggatcaggcccgagaccggcaacaacctggtaagggagtagtacgtactgtacagtacggacgtgccaacgttaattcagacatgttgatcatgtagctagtaataattaatgaccacggttcaatattacggaaaccaccaatattttgaggagtaatacaatcggttttggagatgttggaaatttccggacaaaattaattttaaaatttcagcaaaatttgtctgaatttaattaaactaattttgctgaatccaaacttttcaaccgaagagaatgtgctctcggtgtaccgatagacccgaaattcagtctgaattttggccaaaatttaaattttggataaatttgcactatatttttgacaaaaaatgaaatttgagtgaatttaagcaaaatttgaacatattattctgacttgtttcagaaaaaaaattggcaggattttaacagatttgacttgttttaggaaaaaaaagggatattttggcgcaaaaaaaacctacaatgggactagctgatagaaccaaaatttgtttaaattcagccaaaattactcattttcagtttcttcagaaatttcagttctatgggtcaccaaaatatttatgatttccgcgacattaaaccatcttcctcaaagtacatgtggacacgcaccacacgcatgcatgcagggtcggcactacccattctcggagcaggtggagca

SEQ ID NO: 11027 - DNA, 643 bp, Oryza sativa
  Intron number 1 from transcript LOC_Os10g05500.1 (locus LO C_Os10g05500) derived from phytozome v7.0 (chr-ID Chr10; p os 2716284 to 2716926 reverse strand)
cttcttcgtgatctcccatcggcaccgttgcccaggtctgaaaaaaaccaatgggttctttgatattttgttggaaatttcgtgaaattggcaaacttttagttgttttgttaccttgataaagaaatctcttttgctaaaaatttgggaacttttgaatatgtgctatgttataaacttattataactgtgaatctgaaattaagaaccactgtactgtatgtttttgtccattggcagacacaggaaatataccgtccattgtgtttagtgggatagagttaagggacttgaggtagttagctattggattagaattgggtgagccagcaataaaaaaataaatttgttgacaaaagaattagaatgaagtattagatcgaacgaaatatatacatgtgtgatatacctatatatattaattttatttcacaaatttttgggtattcttcctagaaatacccgggaacccctgtgtctgccactgtttttctctttgtttgtgtatatatgtatagctagtatagccccaaatcgagccaaagaaaaaaaaaagtatagtaaccccagattggttgagtttaacttcaatcatgtgatccgggtatctgacaatggcattgttgttgattgcctagctctg

SEQ ID NO: 11028 - DNA, 749 bp, Oryza sativa
  Intron number 2 from transcript LOC_Os11g09850.3 (locus LO C_Os11g09850) derived from phytozome v7.0 (chr-ID Chr11; p os 5273175 to 5273923)
ggccactatccgggttggttgttcctgctcgctcggttggtccttctctctttcttttcatttgattgggttcttttatttggggatttgatgaggattactggattgattagctaaaaaaaactcatgtttagtttctccggtgaacttcttatggaagatattttttctggtagttgatgggtagtgtcctattgtcctataggagataatggttttgtttgggggaaatggtgaggatgtggttttgatgtgtgatttgctgattaatcatatcagtatacaaaacaaaacatatcacctattttcagtacataaataaaacgattcgtggaattctcttcttctgctatttgatcttactctgcatgtgttggttagcaagctggattagaatggcttagtagaagcttatatatatttctgtcaacttgtcatcgttcgcttcattcaggcgtagttcgtttatgaagcagtctattctacttgtgccgtcttcggatcagattttcagaagaaatgggattctaatcccaactggcctttagatcttgtgattgacatgactatggctgtgttcttgggaggggttggaacccctcccctccgcacaaaaaatggagcgatagattaacacgtgattaacatcctcaaaagaagacataaaatcatttctatagattgctcggtttacaactcacattaactgacacgatttttggcaactgaaggtattagctgctacacaa

SEQ ID NO: 11029 - DNA, 1020 bp, Oryza sativa
  Intron number 2 from transcript LOC_Os12g42430.1 (locus LO C_Os12g42430) derived from phytozome v7.0 (chr-ID Chr12; p os 26338628 to 26339647 reverse strand)
aaaaagcacaaacttctgaaagcagtggagtggtaagccgaatgatattcagtatggttgtttgctctgcaatgataacgaattgtttataacttcatatttggtacatgtgagtatgtgacatgtagtattttgtttaagtcatttcatgttttgccctgttgtgagtggaagaatatgatatgcgtcatatgtatgtttgtctttccctgacaaaacatgaggaatctttaagaatgatatgaaaaatagatgttttacctaaactcactggaagacagtcggtgctgttgttgctgactgttgatatgttgttatcatctgacatatcacttaagggttaccgctacactattctcttgttcattatcagaagtgtcacagatatataaatcttgtttgccatgtgtcatgtagctaatgcctaatggtagcacctttttctgttcattgaccttgccaaattatttctgttgctagttgccgccatcaacactgtaatgttttcatccttctcacattcaccatatagtggacaggctgagtttaaaaacattttacaacaaatttatgtacataaatgtgactaaatcgaatttatttcttctgaaatttcttgctttataataaatctcaatataaatcaattcagtctaaactattgccactgaaacagttaggttattttctatatattgcctttttatgtactttgtccaggaatttatataaaataaccactcaaaaatattgtatatgaaatagcagaagatctggtatgagttatatcttgtgtattaaggtgttcagtgctgagtcagtgagtctgatagcatggccagttaagcaaactattgcattgctatattttgatttcttgtactccatatttggctcactattgccacacatttacatattaagcattgttattttttctactgtattcatcattctttaagaccctactttgtgctaattgtagaggagctctactgcgcagttgctacacaagcgaaa

SEQ ID NO: 11030 - DNA, 888 bp, Oryza sativa
  Intron number 3 from transcript LOC_Os11g01340.2 (locus LO C_Os11g01340) derived from phytozome v7.0 (chr-ID Chr11; p os 200812 to 201699 reverse strand)
acggtcatatcgagagggacgagtcctggcacccggtttgtcactccttctgatcacctcctctcttaatttcttctcatctctcgcccatcctacaattgcttgcacttctcaacttaattccactcctagtactatccttaattatgcttgtctcaatccatcgcccgtacaacaattacaacccttttgaaaaagatacaccaattacatttgcttaattcgcggtactactagtactatcatatatatgactttcgcaaatatactccgtattcttcgctagcgtgtccaactggggcgtttggcaggacgggaaaggacaggacagccaaacgaacagtaagtattatgcgacatgctcacctgcaattgcattaataataataatacagatggagaagggcacatgaccactgcagcagaccacaacgatccaccctgcttgttgcaaaatatcagctagcctttgtggtccgtgaatggtaataataccaacaagattgagacagtagatctggctcacgtgcctttgctgctaaattattcaccagggatcccagatgcgattcggatcactttttgattcgtagctcagcgtcagatcgaatatcatattacacatcacgtgatttgattcataacatatatatgctaattaagttgtaggttcatttgaataaggccgcccgggtagcataagcatctgctcagctttattgactgaataacgagaggctgaatgagttttgttttgcttgtcacctgtatataagctggctctcaacatatagatacgtactctatgatctgcttatatttttatatatgtttttgcaatttgtttgagcagatcaccgagaaattgtactggcagctggagacacg

SEQ ID NO: 11031 - DNA, 1021 bp, Oryza sativa
  Intron number 3 from transcript LOC_Os11g19800.1 (locus LO C_Os11g19800) derived from phytozome v7.0 (chr-ID Chr11; p os 11403449 to 11404469)
gcggggctgattttattgggattttcctggtggatgggtgcaggatggagtaagaccgcgggttaaccattttctcactggacgggcgtctgttccaggtcgagtatgccattgaggtcatcaaggcgagttttctgcccttgtgtttttatttattgtatctgagtgagctggtgcttttaatcaaatctagaccggggtgaagctgagatattagattgtgtgataattgggggttcctctcttgggagaggttgagatgtttgattctgtgagaactaggggtttccaagggagaggttctagatttggcggatgagttggctttaaatttcaaatagggtgttgaattttttttaggatggactgaattgttaggtgcatgtactctgattttttggtgccaaaatctcaactgtagttctataaattttggatggtgttcgtcaggagttcttttttcatggttatcgagtgggctacgtctttagtgctattctgtttcatgtttcatttgtgacttgttacatgtaagtggtgctaatgttgctgatcctactgtagtttagttggggtcaactgcgatcatgttcaccacatataattgatgaccccttagatcataatgttggaggtatatgttaggttctacatccttctctttctagataagtattattgcaggtgtctaggtggaaaataaagtttgggaaaaaataatgatcaagagtcctccataacatatatagatatagatccatgaaacattatgatttgtgcaaaattatcaaactactgtgtatcatgatttcattaactctggtagttcagttcattgatgcacattgatacttgatagcttggatatgctgtataatgaacactggatggtgaattgaccaggaaagtgcaaaatcttgtgcttaattttcttcatttttgtaggctatctcaaaaggaaggcaaagcatagaagcacagaacattgttcgagtgagtgcatatctattccttcgttagt

SEQ ID NO: 11032 - DNA, 722 bp, Oryza sativa
  Intron number 1 from transcript LOC_Os12g29940.1 (locus LO C_Os12g29940) derived from phytozome v7.0 (chr-ID Chr12; p os 17863801 to 17864522)
tttaaaatattcaggatataagtatattcaccaaggtatgtacataataggaatcaaaggaatgacaagaaagaaattaggagctaaagtgctaataaccttattagataaaagatgggacacaataaacaaagcatctttaggctatctagaaggagatatgaatgaaaatatgttgataacctatatagctcctgatttaatgatgcctgtaaatgaattcatagataaaatgagttttggtttccaaacaaaaggatacgaagagtttaagggaacaaatttattaataagtatagaatttataggaagattgactaatagaagtgcctccaaatacaaaatcaatgtaattgatgtgatagaaaaaatgcattctaaaggaagagtctatagaatggactgcattcacctgtccccagggacactatgaatggctagtaatgccactaggattaaaaaatgcacctgccctatttcaaagaaaaatgcaaaacatttttagcgataatcaagaatttgtgttagtatatatagatgacttgttaatattttcaaaaacttataaggatcatattgctcacctagaattattttttagaaaggttgagcaaaatggtttaatcctatcaaaaaagaagatggagatatgcaaagaaaaagttaacttccttggacatgaaataggagaaggcaaaattcatttgcaagaacatattgct

SEQ ID NO: 11033 - DNA, 1059 bp, Oryza sativa
  Intron number 1 from transcript LOC_Os10g22820.1 (locus LO C_Os10g22820) derived from phytozome v7.0 (chr-ID Chr10; p os 11789355 to 11790413)
gcgaaagtggcgcgggctaggtggtggcggcgcaggtaggcggcgcatggggtgaccagcaacgttggcgcgacaaggaacacggtggtgtggagctaacaagtcagccaaacactttcaaactcacctcggctcctattggggctagctctcactggagttggagtttagagttcagagttggagtttggagctctaccaaacggggcctaagtataaatataatatacacaagtcaaaataaaaataagaaatatgattgtgcatagtgtgcattattgacaaaaacaatgggacattccctcaaggggaaaagactttcacataattctcctattgggattcaatgtatcatcgtcgatttgacgcagtctaggatgaccaaactattgggataggaacgatacggcaccgagttggacggttcgggtttctatcacattcatgttttttataaatgacatttcatcctctgctacatatgcaattccaaatcaatgcaatagtcatgtgtcaacttctttcttttgatctggtggagagtcgtgcgttttctaaccctttccgcatgttgtactcatgcacaatgaagcatttgatctgtttttgaccagagagggtcttggatacatattttaaaaccgttgaactcatgcaatggctcatttacagaaggtcaattgaccagtgtttgaatcatcaaaaattatttatataagtgcagaagatacttatcaattgtgactgtaaagttagcaaaaggcaactcataccaatgatatgaaattttcattcataatgcatttttttcttcaaaaaattcatagtgcatgttagaaatggtaatagtatcttatatataccacaattagccagggatgtgaagcatcaaaaaagaaactatgctatcaatgtatacatttgtcagttatgggtcatatgttttctgccaagttaattacctgaggtattggagtctaccaaattcaatcgtagtgttttcaacacggacatgttgtcattatagagcttgttctgcgtactttagggatcggtgac

SEQ ID NO: 11034 - DNA, 986 bp, Oryza sativa
  Intron number 3 from transcript LOC_Os10g01390.1 (locus LO C_Os10g01390) derived from phytozome v7.0 (chr-ID Chr10; p os 239336 to 240321 reverse strand)
aaggaggtagcataacgactagtgatgctgcgaagatctaggaagggtgggcaaggaagttatagtataagccctcaaaactttgaggagatcagcatcgaggggactcctaagagctttggtgctgaaatcagcgaaagtagcaatgcggcggtttctgcaccagccactccagccaactaagaactttccaatatctgaatcaagaacaatgagagaaaagttaaaattaagaatatatatatatatatatatatatatatatatatatatatatattctatcaatgtcattttattaatttggagtaaatttgtgtattcaaacatttgtatccaacttatgttttctataactagaacaatgcccgtgcgttgcaacggattctaaataacattcatcgatataaattaaaattctaagccacgtaatacaattggactgaaagaaatatggttaaattaaaatactaaactatatatcacaattggtctgaaggaaatataatcatataataacaacataaaactacaaataactttggcccgaatgataattaaaaaattttaatattttttaatagatcaaatagtgctcaaattaatattgtaaatgaaaaaacaactgaaattagctaaaaaatttttaaaaaaacttatttcagcccatatatgcaaatccgatccatgcattaattatgaacatatacccgttcattgacataaattagaatttttctgttatattcatattcatattgtttaaatattatgtgagcggtccaggagcatggttaggctaggccaggaaggaatagtgccttcgtccatagatggtggaggttggtaacaaagaaaatcagatcaacatggatgcggttggcaatgacgtggtactgatagagggagggtaacggcaagctctggggatgaacacgattggatgtaggggttactttttccttcaacgcgtaggaagaacgaaag

SEQ ID NO: 11035 - DNA, 732 bp, Oryza sativa
  Intron number 1 from transcript LOC_Os10g10360.4 (locus LO C_Os10g10360) derived from phytozome v7.0 (chr-ID Chr10; p os 5713578 to 5714309 reverse strand)
gatgtaatttctgctctctattttaaagattcagtttcttcactctaccaatgatgtgctgtttcgatgtttaagtttcagcaactattttcttggtaggattatgctctaaattttcttgaatctagagggtaataatggttgttaacgacctggtctgaacgagaaaagaagtaatccagcaagattcaactattgatgaagggtgtatagtataatttcgtcaataatactgaaggggatattttctgtgttccttttctgcttgaccatatctgtattccgtaagctttttctcttactttgtaccaccactcttcgccacgctgtttgtctccttcatgattttccatgcccacattcgaagaaaaaaaaaattctgctggaaagttatttatctccattgagcagagcagcaacttctttctaaaattctctccatagatttaactgagattgttatttgactttgccctagggaagatatctattgccctctcattaatggatgtcaataacataaggggatctcatcaagtactattaaacaataaggacagaacaggatgatatttactggctatgcaactttctccatctaaattcatggtggattcattcagctaactaagcatgacagcatcagtagtttcctcagttttgcagaggcttggtgaccttgtcatccaagaagctacctttttaagtgatgttcctcgacaagtatcatcc

SEQ ID NO: 11036 - DNA, 684 bp, Oryza sativa
  Intron number 2 from transcript LOC_Os10g33550.1 (locus LO C_Os10g33550) derived from phytozome v7.0 (chr-ID Chr10; p os 17616717 to 17617400 reverse strand)
ccaagatcctctgccactacgtcttctactccgtacgtacgtctcctcttcctcctcctcctcctcctctcgaccgactcacgaatcagaatcaccatgcagcagcacggcatcacataccccgtgcttttcaaatttcaaccacataaaaatctgacaaatctaaaattctgtaagaaatcgatcaattatcgtcaaaatttagcagagatcgaatttccatacaagtatacaacagtcctacaccgaagcacgcaggtgcaccatgttaacaaacaacagcagggtttttaatttcgaaattggattttttggcaaggggggactggaattactgaaatttcggaaatatcagtaatttcgttttttttgccaaaattatttgaaattttgactattttgaatgaatttgaataaaatttgatcaaattcacaaaaagttgcaaaaaaccaaaaatttcggacgagatttgagcatgctggtggggggtgaaatcaccaaaatttcaaaccctgaacaacagtacaaacaccagccagtcactcgcagcagctgcaccgtagacttcttgttcttggagctacctaggaaccggtttagagaattttttatttataattcgtctgttttcagcatatgcgtattctgcatttgttcaaattcagatactcgtatcagcctaa

SEQ ID NO: 11037 - DNA, 759 bp, Oryza sativa
  Intron number 1 from transcript LOC_Os11g19720.1 (locus LO C_Os11g19720) derived from phytozome v7.0 (chr-ID Chr11; p os 11361942 to 11362700 reverse strand)
tgcggcctcccccgcctcccacctcctctgtactggttcgtcgtctccaaccctctcgagtcgccccctccccctcttccccttcctttttttgcagcccccgatcaaaggcgtcgagccgcggggatagcgctctcacaactgcaggacggacagctgggcgcccccatgtcgggcgtgcatgcgcggccattataggctcgtcgttgggggccatggccgcgtggtccggaagttatctcgcgtgcctcgagccatccgaagccaatcgattccttttctttttctttcttttttttttgttgatttcgttgtatccttcttagattttgtggattttcattgttgctgggttagtgggtttacaaaagggggaaatccctttgagttgaaagctgatgatgcattggtaaatatatgggtataacaagtttctgaacctgatgtgatggatactggtgacgatgagcatgcagtgcccactacttgaggtcttttaaggttttgattgtcgttatcccctagaactgcaagcccttggagttgtgtaccatttaccatgttgattaaggcagcacgattaattacctgtttttttatctgcatggattggctataacagcggacaacttaatctagccctgcttgttttctcctagtagaacggtgaaagaattttttatgactcaacacaaaaatcaacattcaggccataattattgccttctgttttgtttttgaaggaatcctgcaatagaa

SEQ ID NO: 11038 - DNA, 535 bp, Oryza sativa
  Intron number 2 from transcript LOC_Os09g13940.4 (locus LO C_Os09g13940) derived from phytozome v7.0 (chr-ID Chr9; po s 8200881 to 8201415 reverse strand)
gcaagaacacagcaaaatcccttcacgatctccaggtaacccatgcatttctctgtttggtttaatccgattcgtttgaattgaaaccaatattgtccattatctcggtaaataaagtcagtcgtgtgtgcatgttgttgtttctctatttctttctaggacagcatatattatatgtactaatatgtttattaagattgtcttccttgcatgatggaagattgttttttcagttgctagttgcatatctagaggagggcatggtgggtggatatattattcttttaattcaatgagtatatatgactgcataactgtgttaagaatgttgatgcaagtttggactggttacccagctgagctgcttaataaggattgatttgttgatcttgtcatagtcataacgtttcactatttttagatgcaaagatggatacgcttgcttgatcattctttgctctaataatgaccaatgtgccttctttgcttgttggtttcagatttggatttggggtgaaatactttggctttcttc

SEQ ID NO: 11039 - DNA, 714 bp, Oryza sativa
  Intron number 1 from transcript LOC_Os12g04720.2 (locus LO C_Os12g04720) derived from phytozome v7.0 (chr-ID Chr12; p os 2009981 to 2010694 reverse strand)
tcggcggaagacagggaaggaggtcaatctgccgcgtaagttgtgctcttcactcatcacttcgttaattttcttttctcagcttgggtgtttgatcttgtgatggtgttttgctctaattttgcccccaaactgcatttcaatgaagaaccgtagatctgtgtgtagcaactatatttggccattgactttcctcaaaactccattccgcgaccaacaggcacctgccggatgcggcgagctgcggtgcgccttgtagtgttctttgttcaagggctggggttgggacttgggactccgcgagctcaaagagagcaccttatcttctgttttgtttgtataggactaatatataatattgcttttgggataaattgctattgtgttgttagtttatgagataattagttgatatgattttctgttttgtataggactaatggagaatatggagaatgaatttcgtagggtcttcaaacatgtctctccaagtgttgtgttagtggaacaagtcggacggatcgactattactgtattggttcgattattttcagtgataaaaaaaaactttcatactcacccagtcctcaattacttcatctgctgcgaatctgtctgtccgtttctccgatggttttaaacagtcagcatccctcattttaaaacaagatgtacaagaaagtgcaagcggacaatgtgaattatgcatcttg

SEQ ID NO: 11040 - DNA, 838 bp, Oryza sativa
  Intron number 2 from transcript LOC_Os10g29570.1 (locus LO C_Os10g29570) derived from phytozome v7.0 (chr-ID Chr10; p os 15299046 to 15299883)
agagggaggacgcggtgcgggtggtcggggtggaggtgcgcagcaagcccgacgcggcggcgcggccgggaggggtggcggcgtccatcgccgcggcggcgcggctcaaccgtgggcgccagtagaagaaaatggcggcgtctggcaccactgcctctctgcaatacacgccttgtgcttatataaagttatatactgtaatcgtgtaattgggatgctgcacctgcaggcttccagtgactttgtgtttggaattaatcatgcaaaaacacactggcattcaccatattgaaatattaattttgctattggcattcgctaaatcgtgacatgatcgcgtgtgctaattgccactagtcttgatgcgtcatttcatttctctgaggcagcaatagatgttacttatcgcttgactcttgttggcttcccgtacaaccacaacttgctcataaaggcaatggggcggcttgctgctcctcctgccaccaggattcccaaacttggttagtaggaaccccgatgccaaagcaattcaggccatttgatttcttagagatatgcatgacgaccgttttatacttcatttgtaaggaaatctacatgtcgaccattgtagattttatctatatatttgtccggttccttacgtccatatattccccacttctattttggaataagtcatttctcttcggttcaacgatatagattttcttcatggttacatttcaggttggaataagtcatgaatggaaggtcttttccttatactatcattttattgatttcttgtcttgattctttgattgcaggaaagttcactactcaagccgtcgag

SEQ ID NO: 11041 - DNA, 860 bp, Oryza sativa
  Intron number 1 from transcript 13113.m00141 (locus 13113. t00014) derived from phytozome v7.0 (chr-ID ChrUn; pos 268 62 to 27721)
gggagaggcggcgctgcgtgaggctggtgggaggagggattggatgtgtggttgcctctagggtttagtagtttattgggcttattaggcctcctaggcttattgggccaaaattcggttttctcggttaattctgttaaccgagggcaatgaccgaattacccgaataaatttcggtctttcaatggccaagatcgaactactaaccgaatttctcggtctcggttttttcggtctcggtctcggtctttcaatggccaagaccgaactactaaccgtaggacaagccaactagaaacctaagagccctctgaaccccttttcatctgcatatgccttttgcacttggtttggttttgggaaaatttggggtttgttctttgattttttggaaaaatcttaatcgttacatcaattggatttctcgactagggacagtctggggttttagtaaaattttatttggagtttattcgacagtcagtcgggaatttattgggtgatatgcattaggtcgtgtctatgttcgatgggtcaattttatgcgcatcattataactatgcatctattttatgcattaagttattgtttagtctggtttcatgaaaaatggcccatgcacaaaaatcatcatgcttggctagttacttgagtcatttgttgctttgtttaatttggattttagcatgcattggttcctatcccttgtccatcttacatgtcagacctgttcctcgatcgcaagcgccgctccgagcttcagagacaccgcccttagctttatcgtcttcttagtctgtttgcttgctagtttccatgtttaggtttgttgcttgtgggttagtcggcggtcgatatc

SEQ ID NO: 11042 - DNA, 863 bp, Oryza sativa
  Intron number 4 from transcript LOC_Os10g41560.1 (locus LO C_Os10g41560) derived from phytozome v7.0 (chr-ID Chr10; p os 22266112 to 22266974 reverse strand)
actgtaacagaagtggatcctgagatacgaatagagtaagcaagtcacgtcactgttaaaatttagtagcaaatgttagatgtagaatcttgttgctgacgtatctttatatttgagttgtttctgttattaatgcagagttgtgcactaataattagcaccaaaatccgaagttctggatttgcagaacattttatcctgatatagatagatggtttacgttttctacgaacagcactcagatcatgatttaagatgttagtttgaagactggctcagtaacatagtttctctgtgcttgtaaaaatagcacttttgccagtttgatttccttcacatatcaatttgattccacttagaaagaaatcagcatttccatgttatggtgggtggtgtatgacttggttgcagtttcattttctttcgtagaatcctttgtgctgaagaatgggtgtgatatgctactctttgattatggatccagataaatctaggcccgtatatagccttcacccttagaaaaggacaagaaagatgccagctgatcttccttttcttttttgttggccactctacctattctgctctaaacaagcaccactccacatctccactttgtgtgttcattctactcccacctaatgcagtggtagaactgtacaagaatcaataaccataaaacgcttgctaactatttgccttcaggtagtctgctccattgtagtggtcttcttatttagttcatatgataacttcttttagtacacatatgtttgagttaacacagataccacatggtatactgacaaattattttacaaattacaggcttgttgatatatcggagataaggttgaaaatat

SEQ ID NO: 11043 - DNA, 653 bp, Oryza sativa
  Intron number 1 from transcript LOC_Os10g42100.1 (locus LO C_Os10g42100) derived from phytozome v7.0 (chr-ID Chr10; p os 22569654 to 22570306)
tcgcgctcgggagcaacggctccctctccgctcaggtctctctctctctttctccccttgcgcgcttggtgactagcggttgtttttttggcggattcgtcactgtatcgtaccacgttgaggcgattggatcccaagcgctaggattaattcgtcgtttcctcgtgcttagatttgcctgcttgggtgaatgacattgtagagtactggagtagttgctgcatgcttgctactatgtagtaagaggccttttgatccagagctggcacactcaaatggagggaaactgtgggggtgcaagttttcgctaggaaaaaaaatatacatgtcatttccaaccctccgtgtttgggaaattgcggctgttcttccttttattctgatcggtgtaaggctagcctgaatcaccagctaaaaacttcaaaaatgctttgctatgtgcttacttagaaatgtatagatggttgtggaacccaggtgatgccatacagttggttcagtatttcggcgcaagatttacctctccttattcttgaatttttacattttccatcattttaattcagattgtcttccgatacaataaagtggttagctcattcctttctttgcatgcagaacattgctgagaataccgctgacgctacttcgca

SEQ ID NO: 11044 - DNA, 242 bp, Oryza sativa
  Intron number 1 from transcript LOC_Os11g43220.1 (locus LO C_Os11g43220) derived from phytozome v7.0 (chr-ID Chr11; p os 25602632 to 25602873)
gtgactgtcagttctgtatgttctgcaactgatggaattcagaaagtaacagtattttactcacgaatcaaacaaaaataaaagtcaaataaattataaatgtaattactcttctgttgttggttgttaatctgcttggtgacaatatgtagggtttgtttttttctgcacaagatttggtgatctgcacgttgtgataatacgcagacaagaactgaacagaacaagaagaagacgaaggt

SEQ ID NO: 11045 - DNA, 807 bp, Oryza sativa
  Intron number 1 from transcript LOC_Os09g19340.1 (locus LO C_Os09g19340) derived from phytozome v7.0 (chr-ID Chr9; po s 11567921 to 11568727 reverse strand)
gaagaaataaacacttgcatcaacttcaactacaggtcaatgatgaccagtattctatcacttctgacttacaaactatacgtacaagatggaaaacgaaaacattttagcagctaaaagtgcttaatttgtcttgcgctgcttcctttgaacaatcttttcgtcgggctgttccttgagcaatcttgatgctaggcctctgaatttcctacatatgtagaagaaggtcactccgatacttatcagatgtcattctgttgctcatgcatggtgtcatgcatcctatgatgatcaaaggttttagttgaagcatccttctgaatattctagcgggatcattttttttcagtcttgagcaactgaatgcattacaaagcttggaaatgccatggcaatgtccctgaaagtaagcaataacaagaaaaaaattcagaatagttttgatgtttctagtgaaaattcagtgattcaccactcaatgcatgcaaatagggacgtgacatgtttcttattagtgcatgattggaaaaagtatgaattaccccccccccccccgaactatctcggtcgaccgaattacctccctaaacccgaaaactagacattgctcaccccgaactttcaataccggacaaattacaccccctcgactcaatctagagtggttttgtcctacatggcgtacgggtggcaatccagtcagcattttcttttttatatcatacctctctctctctccacctgtcaggttcttcacttcctaatctcacaggtgcgcccggcggcgcacagggcaggtggtgcacg

SEQ ID NO: 11046 - DNA, 992 bp, Oryza sativa
  Intron number 2 from transcript LOC_Os12g04390.1 (locus LO C_Os12g04390) derived from phytozome v7.0 (chr-ID Chr12; p os 1863553 to 1864544)
ccacttatctctgaccagggccaaatccgtcagaggtaacagtttgagcccgtcacaggtagccttgtccggtgtagtgataaaaattgtacagtaaaccactcttttaattgacatattatatatagatgaaccatctttactttaaatcctagctacgtcactgtttttaggcatgggtgctaattaattagccagccgtgtacgtgcatgtgaaatgtcctgtcagcgtgcaccaaattgaagatcaactgagaaagtgagaatcacctactatatgcaatgcaagtatatatatcagagcttccactgtttgctcaaagctagagatggcaggattataaagcagaaaagaggaaaagaacgaggagagatatagtagatgattgcttcaaaatgttgtcctgttttcctatataggaagtcaaataaatatgctggcgaaaccatacactatcaattaatctcccaaacatgattgttcccacatttaattatatatagttggagcgacacgatcgatctgcacaccacgaataataattattttcttgaataaattaatgtttagaacggaactctctccttcatttccaaatgcacgtttgaacatggtttatactctatccgatttttaatatatgacgctattgacttttagacatagatttaaccatttattttattttaaaattttgtgcaaacataaaaaaatataagtcatgctcaaagaaattttgatgataaatcaagtcctaacaaataaatgatatttacatatattttcttaataagacgaatggtcaaaaatatctcaaaaagttacttaagaatatttttaaatattaagttggatacatgaaaatgacagttcatatgaataaatttgtcgtaaaaaatataaacatgatataataacttttggggtttataaaacataataatattatatgtttgtgatttgtgcagcgttaatcaaaggtgacaagtag

SEQ ID NO: 11047 - DNA, 775 bp, Oryza sativa
  Intron number 1 from transcript LOC_Os12g12560.1 (locus LO C_Os12g12560) derived from phytozome v7.0 (chr-ID Chr12; p os 6910393 to 6911167)
tgcccagctacatcccggattttgtcccaggggaggtagtagctttcaatgtcacagagctccattttttttaattaatagtaatatcatgatcttctcatcataagtttgtatgcttttatctatttattattagttatatcatatcattactactgatggtcacaaattattcctctctgtcttttttttccaaattgcgtattgaaaatttgtccagttccctttcctaattttgtcatgtatagaaggaaaacctagtttgttttttttagttattttcctgtgacataaacctaatgtgtaaagtttcaaccacgcgtgatttgtccatgccatctgaacgttgggagctaacaagctgtgccttttcttttcacataactgacacactcttaatgataatatgaatgagattatttagatataagactgaaaaacatcgcaatgttttcactctgacaaaaccataaatatatactccctccatcccaaaatgtttgacgctgttgacttttttaaaaatgtttgatcgttcgtcttattcaaaaatttaagtaattattaattcttttactataatttatttattgttaaatatacttttatgtatacatatagttttacacatttcacaaaagtttttgaataagacgaacgctcaaacatgtttaaaaaaaattaactgcgtcaaatatttagggaaggagggagtatataattttgttgtcccctgggataagaacactttcaggttttggaaaattttggcgtg

SEQ ID NO: 11048 - DNA, 1043 bp, Oryza sativa
  Intron number 1 from transcript LOC_Os12g37640.1 (locus LO C_Os12g37640) derived from phytozome v7.0 (chr-ID Chr12; p os 23072684 to 23073726)
tgcggctcctgcgaaggagcctgcgagggggcgaggtactcactccacccctcccaatcgaattctacttcctctcaacttttttttgttgttgctgggggatttcgtctgggctgctcccccagtttatatcgatttttcttttacttgttcttgctgtgatttaggttttttttttccattctagggttttggagtggcgcctcctttacgcgacgatttattttttgtgcgagcttttcttgactatttatgcgtgtgtttgtgtgtgttttgtgcgagcttttcttgactcagtgcggttgatgctttttttttttttaaaaaaagaaaaactttggcgcgagcttctcttgaccctgtgcgggtggttgaggaagcatcagcttaaagatgcagtctcggagctcagttcgttcgatttcatccttgatcttcttttcttcgctatggccttctgtccgaattggattgggagtagctcacctagtgctggagtctgggtaggtgatgtaatttcagtttgttagtgtgggtttgtagtactctttatttcaatggaattgttcaaaatgttatgcttgctattgcattctcgattattagctagtaagatagatgcctagatgtacatgtagcttgattggtgttgacttcttttcagacttttgatgattggtaagtaggagtaatggtattgtcctagagatgataaatattgaggtgcttgctttaggcttcagttgagtgagttgttggtgcgagatccactgtaccatgtcaaattgtcaaaaatgcttcgagatttggtaattggtgaactttagatggattgcatgtctcatccaccccttgtcagtaagtagtggcattggcagctgaattaaaaagacaacaaaatactttgatttgatatcattgattagttcgtaggcatgaacaaaataattatgtttttttgtacaacgttcaaatgtgttttatgctttgtcggaattttgaacgcaggcagcacctcggttcttatccgcttctcaaaattt

SEQ ID NO: 11049 - DNA, 531 bp, Oryza sativa
  Intron number 1 from transcript LOC_Os11g18382.1 (locus LO C_Os11g18382) derived from phytozome v7.0 (chr-ID Chr11; p os 10374088 to 10374618 reverse strand)
gcgcgcttcggtgacagggaaaggtttggtcccggcaaagatagtatttgtcaggacgcaacatatgcccttcaccgataggtctcatcggtgacgagttcaaaatatattcatatggaaaatgtctataagagtatatgtctgttggtgtttattttggcccgttaaagatgatgatagtgtgaccgttcgcaagaccccgacacaggataggccttccgtcacagatataagcagttctgtactagtgaatcttcaattagatgaaatagattatttagattttacaagtcaaaagggcccagcctagcccagcccagcctagcccaggaagacagaagtacgtatgggagcacatgttgtgcatggaaatatttagtttgctgggctggtataagataagagaaaatctactgtacggtatcccgtagacacgggataagtggataacgttttactctcatccaatcccaccctttttttctctctcttccagatcattcgttatcctcctcttccgcctctccttct

SEQ ID NO: 11050 - DNA, 984 bp, Oryza sativa
  Intron number 2 from transcript LOC_Os09g01650.1 (locus LO C_Os09g01650) derived from phytozome v7.0 (chr-ID Chr9; po s 466188 to 467171)
atcactccgcgcccgcccgcctccggattacccaggtaccaaaatcaccttacttcttaatctctaaagaaaagctgaaatcgaatatgaactgtgtcttgtgattgtattcaatggacgcacttcggcgctttgctactacttccttcctaattttaatgcatccaacaccatcttcagctggctctcgacaataaaataaatacagatttgtgtaacatatcaggatgttttcttacagctttttctgacacatattcttatgcatctgcttcattaaaatttaatgcctatatttttcatggtctacaagtgttgtctacaggtgaaaaaaccaataaaaagagagaacgactacatctttctcgaaaacgttactagtattttaagataacagcgtatacatttttgtgaatattacaatgagttttaagggcacctcaactctgtagaaccctctaaaagtatacttcttttgatgccattacctctataggtacttaaggagtatcgtgaccctcaaattggtcccataaactctatgttttattccttagaacaaactctaaaattggagccatttccattttctccccctaacacccactttcccaattgttctaaatcagcttcaaaatcccccctttctctctcgccttatgacacactttggaacaacattggagttgcttgagcaaagtggaacacactacaagatcgctagtgttccttcgaaaaatttacaaaaactattttgtaattatgtttccccattgattgacacaagcctgatcatgcattgcattgtagaggttcctccctttctgttttatggatatataatagtggtattctgtttctatttgaattttgaaaactagtaaaatcccaacaaaacaactattcacaattatcttacgatatgatttcgatatttcatattttacaggctgtgctgggcagttgtgatcaaggttggactac

SEQ ID NO: 11051 - DNA, 979 bp, Oryza sativa
  Intron number 1 from transcript LOC_Os09g27930.1 (locus LO C_Os09g27930) derived from phytozome v7.0 (chr-ID Chr9; po s 16972851 to 16973829)
cgacaacgtcaaggccaagatccaggacaaggaaggtatgcgcattggtcgccatttctccatccgttcaactgttgttcttcttgttgttgccatgttattgctgattgctccgttgatccgtacgttcacacaccgtgcaggtgcatatatcgcgtttaggcaacatatagtgctagaaatcatgtcctttgccctggtagcgtgtaaactgtaaggttttctcattttgtttcgtgcagtgcccaagtatatatatcgcacgtgagtagtaagtgatagatcgatctgttcatgtagcggtgtgtttgttactgagaaaattaagcaatattatatagcattctggttagtcgtcttcgttgcgtgttccctgttgccttatttagggcaggtttagttcccaaacaaaatttttcacgctgctacatcgaatgtttggacacatgcatgcagtattacatgtaaaaaaatcaattacacagttcgccaggaaattgcaagatgaatcttttaagtctaactgcgccatgatttgacaatgtggtgctacagtaaacatttactaatgacagattaattaggcttaataaattcgtctcgcagtttcctggcggaatctgtaatttgatttattattatactacgtttaatactttaaatgtgtgtctgtatatccgatgtgatatgcaggggcaaaaaaattttttttgccaactaatcaggcccttagtcgctactatttatttgaaacggtgcagatcagcagatcggtcttgtaacggaagaaaccaatgcttttctgcacatctaaactgtatctggagagttttttgtacttttgacagttctagtttctaggattataattgtattacgcttcgatttcatgatcgcattttgtctaaatttaaaattctcataacaccaaatctgcctgttaggtatcccgccggaccagcagcgtctcatcttcgcg

SEQ ID NO: 11052 - DNA, 1036 bp, Oryza sativa
  Intron number 1 from transcript LOC_Os12g01960.1 (locus LO C_Os12g01960) derived from phytozome v7.0 (chr-ID Chr12; p os 568830 to 569865 reverse strand)
ccggtgagctcttccggttggagcgaggaagaagaagaatcaggggtatttttgtctaagatggtattttagcaaagatgtcctggttgaggatggtattctagcgaagcctgattaagggatggtatttcagcgaatccaaacttatgcgatggtagatatgcaattttctcgttagcaagtggtggactgcttatatacctggtcactgggcctcgattacatgggccaaaatgactaaaaagtctagaattaatccctatgtacaataaacgcgggtcaccgcggggggcggggacggggagtggagcaccgtccccgccatccctgacggtgatgatatttggaccattagattccccatggatggtagatatcaaccatccccatcccctaatatgtgaattcaccatggggaatcggtgatcggatccccattgccatctctactagcgcccccccctcttctacacgtggtttccttttttgccaccgcattattttcctattttagtaaattatacacctaaagtttatacacctcaagtttatacatctaaagtttagaaaccaaaagtttatatatccgattcaaatttgaatttgaatttaaatattttttatatataatatttctatacatctaaagtttatagacctaaagtttatatgcccaaagtttataagtcaaaagtttacatacccgattcaaatttgaatttgaattatatccgattcaaatttaaatttgaattcaaatatttttttatatatagtatttctatacactaaagtttatacacctaaagtttataagtcaaaagtttacatacccgattaaaatttgaatttgaattcaaatattagtttatagacgtaaaatttgtaagtcaaaagtttacatacccgtttcaaatttgaatttaaattcaaattttttatatatagtatttctatacataatttttttcaactttgtgttttttttgttaaatttatagtgtagtaggaagggaagaaggagaggaggaaggaa

SEQ ID NO: 11053 - DNA, 661 bp, Oryza sativa
  Intron number 1 from transcript LOC_Os08g44050.2 (locus LO C_Os08g44050) derived from phytozome v7.0 (chr-ID Chr8; po s 27736040 to 27736700 reverse strand)
ctcgtttttggcttttcgaatttattataaccccggttcgtgtttgctagctctctatatatttctatctccatcgccttaattagagttttctcctcttccttttttcaacaaggagcctagcttgttttctttaacttgtttgttcggttctcgatctccatctcagatcgatgacatgtgatttattttttttggttttttctcctgcatgtgttgctgttcttcttctacctcggtctccatgccttatctcatgttattgaccagtctccttttttcaagctagctagtttctagctgccttgcttgtgagtatgtgcaacgtacgattgcatgtttttttttttggaactttggattaattagcttgtgaattaattcctctcttattaattccttgattaaattcccctctcgttttcgtttccttccccctttttgatttaatttgttgctttgttattagagaggatctgatcgatcagctgcaggtcagtcagtttgtctgtcctatggctgcacacagtacagatccatccaccatcttccatgctagctagcttcatccacgcatgtaattacctcttggatctctgcttaattttgtcttgattaattttcaggtcgtgcaaatcgaagaggattggaagtcagctgg

SEQ ID NO: 11054 - DNA, 858 bp, Oryza sativa
  Intron number 1 from transcript LOC_Os09g10740.1 (locus LO C_Os09g10740) derived from phytozome v7.0 (chr-ID Chr9; po s 5863231 to 5864088)
ttttaccgctggtgcaactgtcctgggtttcagaggtaaacatattcaacttagttgaatttctatacctgacttgaattgaaaaaagttcaaagtcagctgtccaaacatccttatcgaaattgttttatgttgtttgattgaatgtttctacagccaaatctaacatgaacaaatgccttccatgttatccttgtaaactgtattgatcttccctatctagtagtatgccacatttatatgaactgatattggtgcatgttatgctgtttctactgtgctagtttctgattacgtattccttataatttaattgacactatcacaactggagcacacatatttcgtgtgccccagcagtagaaataagcacacagccaaaactatagcttagaggaatttatttgtacacccagttatttagtaatcagctcagaacctttatgtatcatgctgaattatatctgtggttgttttgcacatgcccaaaacctaagattaaacacagcaagagaagcgcaatgtcaaaatgcatgatagaaatgttgtgaggtcagaactcagaagttacccatatgatgtaaattaaacccaacaaaatttcatcatgaatcattaaagcaattttcctgttaataccgatgtagttaccgggccttaagcgtcatagaacatcatcatctctttcttttacctgttactattcctttattatgattctaatttatggtcattggatcatttttgttcgtgaatgactatcttgtgcaatgaattggatatattattgccaaattaacaattatcaaccttgtgtgcacagcgaggagtctcccaacagctgtcctctcaggctgt

SEQ ID NO: 11055 - DNA, 797 bp, Oryza sativa
  Intron number 3 from transcript LOC_Os10g36470.2 (locus LO C_Os10g36470) derived from phytozome v7.0 (chr-ID Chr10; p os 19441554 to 19442350)
cagctgaagcttctgcgggagggcgctgctttctggtcagtcacagctcacaagctctcatttcacttacttcagctttgtagtacagcacaatcagtagtgacggttcacatgttcttgatacttaggaggagtataactgtataagtagcagacaaagaattattggatatcagcagttttgtttgagttctggcggaaccttctgaatagattggcaagtgtggggggtaatcttattaataaagccttccagtcattttaccatttactgtatctagggatgcaagcgggcgaacctgcttataggtaaaattattgggtaacctgcggatataaataagacctttaaatgaacttatggatcaacccactcgcatctttaaatgcggcaagtcggaccacgacgcgaaaacccgtggtttaccacttatttgacatataaatatgttcgcgagttggcccgcttgcatccctagctgtatcatgcagttctggcattatgtaaatttgggaatttttgtgtcctatgaagttgatcctggtccagtaaacttttttacttttgtttcataatcgttaaatggacttcattactggggaatggtaatggaggtagtgtattgacactgaagaaaatgcatcttgtcataattgattgacacatctttggagttgggagcatactagctttcattatgaatgcaacattacgaacttcagcattatgaacgaaaatatttgatgctttcgtattcatcaattgcttacagcacacaggattgcttcaaggaagc

SEQ ID NO: 11056 - DNA, 647 bp, Oryza sativa
  Intron number 1 from transcript LOC_Os08g42560.1 (locus LO C_Os08g42560) derived from phytozome v7.0 (chr-ID Chr8; po s 26898107 to 26898753)
ccgtcaaggccaacgtgctcgccttctggaggcaggtcaggccgcgagcggagccatctcacaaatattacctgttgttgttcacgcttgttcagttcattcgttggggattaaatgtatccgaagtttgtttagattaattagatagtactccgtagcaccaatctagtttgaaatatttcgttgtgataaaatcataaaaatgtaacttatgccagtgaatgtgtactaacttattcacttaatctcacaaacatgacttgttgttcatgcttgttcagttcattcgttgagggttaaatgtgtctgctcttacagctcaattgacgtgttcaggtttgtttagattaactagagagtactccgtagcactgatctagtccgatatatttcgttctgataaaaatgcaacttatgccagtgaatgtgcactaccaataggagattgtgacctgaaagtagaattatttagttaaccatgtgacactgtgttcttgattgctttgttttgcaagaatagcttttatatgtttgaaattgcttgtgtatttgataactttttattttgattttacttatgttgggtactaagattttagtcaccaaattcattcttttcttttcagcacttcgttttggaggagaac

SEQ ID NO: 11057 - DNA, 1036 bp, Oryza sativa
  Intron number 1 from transcript LOC_Os12g23200.2 (locus LO C_Os12g23200) derived from phytozome v7.0 (chr-ID Chr12; p os 13112899 to 13113934)
cccgcttcacagtcaaggccatccagtctgagaaggtcagtagagctagctagactgctaaagagcattgagagatttcccatttcgcttcatcaaagctagtgtaaaacttgcatgtttctcaagaacaagctctgttaattaaaatcagatggtagatttcagacataatcgtttttcattttgttgtatttttattgctctgttcactagtttatttcctcaattagcaatataatattgaattgttgtaatccctctgtagattagacgcatcgtagtactatgaaatgtgaaaaatttcaaagatgaagggagtaataagtttgcctgcatagtacatccttaaactttttgccatcgttatttcgatcacaaatcccctttttgggagagagggttggattattagcatgacgattttagaagatatagttacacaaatttagccaaaattggatgcattaatttatagttaactttgtataagttctagctatatgataagtgtaaaccataagtccataatatatgcaagaaacaagagcatacgttttctagagcttaattaaatagctttatttgtgtgagcgtgactatatcggcgtctgtaggccggatacatcttgacgcagaagccgaattgaaatatagtattatctaaaagaaatatatatggtggtgtgtatttacacgtgtctacttctatggaacgataaatgaaacatttactctcttcgtctcatattacctgtcgttttagataatttagcatagattaaggtttgaggaaaaaaaatataatactcctaattaaatattgtatagttggatgtaggaggatggttaagggtagaaaagatagaaatttgaattagaagtgattgatgggacaagtaataattctttatgataaccattttgagacagagggagtatgaatcctaaagaataaattgggacagagggagtatctgatatgtgtgattcttgtggcgttgtacacagccaacgtaccaggtggtgcagcccatca

SEQ ID NO: 11058 - DNA, 695 bp, Oryza sativa
  Intron number 5 from transcript LOC_Os10g34710.1 (locus LO C_Os10g34710) derived from phytozome v7.0 (chr-ID Chr10; p os 18461534 to 18462228)
aagttaaccagtctatcatcataaggttggtattcttttttccaagttggaagcatttaatggaattcttagtgcaaggaagtcttgcaccatagttgatgtaccatattaatatgttaagccacacaagtatgcattttcatagtaataggtttcattttctgttacttttgctgcatgtaagtagaattaatagtgccccaactaccagccaacatacttgctgaactagttttctcattgacagatggattcctgtattgttcatttatcaagatcagaacataagggttttactgagatgattaaacgatcccactgttctttggctttctagagttagaaatttaatggttgcctaagatatacaattggcgagtcaacattcaaatattatgcacattttccattatgttacccttgtttttttctcttttctttcctgtaacaccaaaacttttacctttttgtatgtctatcaaatcctgtgaaaaatccgatgacaacataatgccatctggtagaaatattttactttgattacaagttaacagttagcttgttttttgaggtcatttttttaattgatgtcatttttaattataccatggtatatattgattatatgaatgaaggatgtcttctttttaatatatatagtggtgagagtggagcaggaaagacagaaactgcaa

SEQ ID NO: 11059 - DNA, 446 bp, Oryza sativa
  Intron number 1 from transcript LOC_Os12g27830.1 (locus LO C_Os12g27830) derived from phytozome v7.0 (chr-ID Chr12; p os 16395825 to 16396270)
tcctcatcaccggcgcctcctccggcatcggcgaggtgaggcgactgacggccacgggctctgctctgtgtatcagctttttgcaggctgactgtttttctttgaattaattgctctgatttttgtgtgtttggtcatgttttgccattgtgttcgtgtgcctgctttgtagtatcgcatctttgttctattatttttttccaaaactatgataactgtctgacagtttcagagtaaaatagtttgagcatgttgttactttgaagatcccaaattaggcgcgttgcgtacaatttgtaaaagttcgaaggatatatagtaccaccatatgtttgtgcatagttcaactttaggttgttgtaattctctgtttatttctgtatgccgagatgaagatttatttgcgtatgtcacgtgatgatttttgcagcaattagcatacaact

SEQ ID NO: 11060 - DNA, 887 bp, Oryza sativa
  Intron number 2 from transcript LOC_Os11g39300.1 (locus LO C_Os11g39300) derived from phytozome v7.0 (chr-ID Chr11; p os 22933645 to 22934531)
ctttccaaacaggctccttggataagtctgctaaggtgatattttgttgatgctgctagcataatcatgtcttcaattgtttgtacttcatactacaaatatgattatttactgtcatgcacatttctatctggctagctatgggatacaagaactcttgacactgatcaagacatgtgtcactgagcgacctatgtcacaatacctaattcctaaatacatttcctcaagttcttttatagatgcaatgtttttacaagattacatggtcatgccttaaattacttcgttttatgttatgctaactgcatatgttcccaacatgttattgttgggatcgaaatgcctatggtctctgtttctttattttgctctgaagtaaacctcctgattagttgaatatggatattacttatgcttttttttgatgattttggttggcacaagttttttctcacttttgagtcattttccttctatgattagttttactataagacgagagcaacaaatgattcattcacatgcttctttttttttttgaggaaaattcacatgcttcttatctgcaattagtacttttacatgcatacatgcatacataacaatgaatatacaccaggaagtgcaaaagcacctatgtacctgtccagcacatcttttcaccctggatttgccctaattccatataatttgtttgagtgctgttggctgtcatggatgtgtagttgtactaacacgaaaaaaatgtctaattggccacatctgaattgttcacctgagatgttactgtaacgagtagtcagctcatcttgttcccattcctattctaactactaatcacaagaattcttcgttgtgttaggtggttattggaggtggtcaag

SEQ ID NO: 11061 - DNA, 989 bp, Oryza sativa
  Intron number 3 from transcript LOC_Os11g30240.1 (locus LO C_Os11g30240) derived from phytozome v7.0 (chr-ID Chr11; p os 17113746 to 17114734)
gtctagtgagattgaagttcaaatcgtttaggtcataggacacgagcaatccaattttcaaagttggcatggtattccaatcagttgaggtattgagaaaagcaataactgaatatagtctgaaacaaagagtggagatcaagatgccaagaaatgataggacaaggatcagggcacattgtgcagagggatgtccttggaatctatatgcttcatttgatagaaggacaaaaactttcatggtgaagacctatgttggagagcatgaatgccaaaaggaatggattcttatgttggagagcatgaatgccaaaaggaatggattcttaaaagatgcacttgaaagtggcttgcagagatatatgttgatacattcagaacagatgagaagatgactcttggcagctttgcaaggacagtatagagagagtggaacttgacaccttctaggagcaaactttctagagctagaaggttggcattgagggctatatatggtgatgaggttgagcagtacaaccaactatgggattatggttcagagttaaggaggtccaatcctgggagtaccttttatttgaatttgaatgatggttgtttcaacactctgtacatgtcccttgatgcatgtaaaaggggttttcttagtgggtgtagaccactgatttgcttggatggatgtcatatcaagactaaatttggtggccaactattaactgctgttggaattgatcctaatgactgcatatatccaattgcaatggctgtggtggaggtggagtcattgtcttcatggaggtggtttcttgagatcttggcattgacaatacatatccatggactgtaatgacagacatgcagaaggtataagtgcaagttgtattcttttgaattgttcaatttaacatgtaaattcttatgacaactgttaattctgctattttacttgtgtagggccttatactagcagtccaacaggttttccctga

SEQ ID NO: 11062 - DNA, 1002 bp, Oryza sativa
  Intron number 2 from transcript LOC_Os09g02040.1 (locus LO C_Os09g02040) derived from phytozome v7.0 (chr-ID Chr9; po s 740892 to 741893 reverse strand)
ctcggttgattcctggacgaggatttaacacacatgtaagcgtttggaattttggatagaaattccgggcgtgacattatgcctattggggttaataatatggagatagtactcattccaaaggtggatcaaccactggaactacgtgatttcatgccaataagtctctgtaatgttatttacaaagttgtgtcaaaatgtctagtgaataggttgcgaccttgcttgggggaactcgtctcagagtgccagagtgcctttgtttcgggtcgaatgatcacagataatgctttgatagcttttgaatgtttccacctcatccagaggaacaatagtccagccaaagcagcttgtgcctataaacttgatttgtctaaggcttatgatcgagtcgattggagtttttttgagcaatccatgtataagttgggttttgctcaccgttgggttagatagataatggagtatataaccacggtgagatattcagttaaatttaatgggaccctcatgtctacatttgctccatctcgtgatcttcggcaaggagacccgttgtctcccttcctctttttgttcatagctgatggactatctttactgttacaagaaaaagtcgctcaaggtgcactatctccaattcagatctgcaagcgagcaccggatgtttctcatcttttcatcgccgataataccctactgttcttcaaggctgataaccaacaagctggagttgttaaggagatccttgctagctatgcatcagcaatagggcaactcatcaatccggctaaatgttctatcttgtttggtgaagccactcctacagacacccgtgatactatcaaaaataccctgcaaattttcaattctggctttgacgatagatatctgggtttccctactcctaaagggagaatgagcaaagggaagttccaaagccttcaggaaggaatctagaagagagttgataaaatctgttatccaagccattccagtgtg

SEQ ID NO: 11063 - DNA, 752 bp, Oryza sativa
  Intron number 2 from transcript LOC_Os12g42876.1 (locus LO C_Os12g42876) derived from phytozome v7.0 (chr-ID Chr12; p os 26613603 to 26614354)
aatacaaggaggctaaggcggtaagatactaggattacatcttacgtctctgtctggttcatgattgttttctctgcctgactacataggcgttgctaacacattcttattgtcattaatgtcttagttcgtaaagttacttattagtttagcgtgttgctttctgctattatagtgcatttgcttaataattttgtcctagaaaagaaattctgatgtacattaaatggcatgcttaccatgattttttttgaagattgtcactccttcagattgatggcctgtaaatcacatgccctccaagtgacagtttgtttaagttcagtgttaatactcgtgtccaagcaaatttttggccccttgtttagtattttgaaactagcaatttcagatttgcaaagactaaaattcactttacatttatgaaataatgtttttttagcactatatgttgtttccatctttctcaaaagatgtccatgttgtttgtggcgaaattgtctgattttacctatgcttaattggtgagtttacctgaaacatgctttggttgaatttactatcttgttccagtttgtgaatagtaacatttctatttttaagcatcaaattctgaattaagtagtattccttctggattgaaaatcatagtgttttcttaaaaattaagatgtaatctggtcgtttgtatgtctcatgtaattgttcttcatgcagctcggcgttgacaccgtgccagtacttgttggacc

SEQ ID NO: 11064 - DNA, 532 bp, Oryza sativa
  Intron number 1 from transcript LOC_Os12g31850.3 (locus LO C_Os12g31850) derived from phytozome v7.0 (chr-ID Chr12; p os 19136001 to 19136532 reverse strand)
ccaaaaggtactctgctctacttgcttgatgttcttcttccccttccttgtgtgtttatgtgtttaattgggagtttggatctcttctcatcctcagcagaatctgatctttgaagaattggggatttagggttccaagaactgggagtctttcatgctgataagtgataaggatagcttatccacaatttgggatcttccctatggctgttggaatgaatttgatttcctgatttcttttccttccttttttttcttgtgtttcttgtaatgatattattgcttgctgtaacaagcaagaatgaagagatggagatttgaggacagtattaaatgcaaaacactttctgattttacaagattttgtggataacaactgcaagatcttgaaacttcttgatgattcaatccaaatgagtagcagctcaaccctcttacatgatgaaaaaatgtgttttattttattttttgtcaggtttttgaaggcccccttgtgaattccctgttgtccatcagacaaggaggcctcaag

SEQ ID NO: 11065 - DNA, 766 bp, Oryza sativa
  Intron number 1 from transcript LOC_Os12g41140.1 (locus LO C_Os12g41140) derived from phytozome v7.0 (chr-ID Chr12; p os 25459024 to 25459789 reverse strand)
tcgcaatcggtgcgtgcgcgtttcgtcccttcgttcttgcctcatcctctctctctctctctctctctctcttccttaattaaaaaaaatagagagattaattcggtcttttttaattgagcttgtccctgagtgagtgagtaactgagtacatcctaatagcaaccggattatggactttaattattttattctttttttaggtgagaggttggtgagattattctgtagtatgtttctctgctttttcattctgtttctctctctctctagccaaacaatacatgaacttcaatccagtgcagtaaaaaacttgtatctcccaacttttaggtgtgattctctcaactgcatgtttttggtttgatttctcatgggtattacctcgtcgattagtagtacctgctttgctttaatgttctctgacttcctgtacttcttggactgaagtgaggacaagaacaagaggccaaatatgagatttctttccccccacacacccccatcataatcaacgaaaaaacacacacaaaatactagccatctttatttggttctgtaacatgaatccaagctaattaatgatcacaattcacaccaacatttcctactctttaaaacttccttgcatgttcaatgattattgtgaaattgtgctgttctgcttggaacagtagctcactttgcagatagacactgagaatttactcgtttcttgtttcatggagcagcaggaggtgtcgccgctgacctccggccgcctctc

SEQ ID NO: 11066 - DNA, 675 bp, Oryza sativa
  Intron number 1 from transcript LOC_Os09g30180.3 (locus LO C_Os09g30180) derived from phytozome v7.0 (chr-ID Chr9; po s 18363670 to 18364344)
cgttcgtaagtggcaaagtttcgcaaaatttcgccttctctggagtgggtgttacttcggcattggtttctgttggttccttggcgacaggatgagatgtggttagggttcttcgtgtggttactgtggattccgggagaattttctgtcttggagtgggggagaattttgtgtgaattttaggttgataaatgaatagtgatggctttccttgagttgaggggtgtttgatcttgaattttcttgattgatcccacctgaattagattcagaagtaggagcatgcttatcctggaaattggctaacagaggagtgacactatgacagggaagaaagcgaaggaatgcaggagtggatgatattgtcagagtagaaaaaaaaagtttttcccccctcttttatgggcaaagatatgttagtaccatgaagcttttgggcagtcataaggaggagaaaggggtaatcttgatatggtggtgattagtttcttcagttccattgttcctctgtgatagttcattatctaaaaaacctctgtgatagttaaaattgacttgaattatattgcttaaatgtattaaatgcatggtttatacgttcctcgattaggtttgttctgaaattttgtgaaattattgctttcaggaagatctggtagatcctaggagcaaacc

SEQ ID NO: 11067 - DNA, 801 bp, Oryza sativa
  Intron number 1 from transcript LOC_Os11g43620.2 (locus LO C_Os11g43620) derived from phytozome v7.0 (chr-ID Chr11; p os 25841544 to 25842344)
ggagcacggcgagctagctgctctaccttggagcggtaataccctctaatctctccctctctcgctctcgatatttcgtcgcgtgatttggtgtcggctgttccggtagtttctggttcgcgtggtagatcgctgtaggctgaaatgtaataaggggcataataattcagctcaatattgtgataaatagttgaagaaatcgacaaactcgccgctttacatcaggattggctgagctttgactagaattggagcttgagaaattagctaatatatagggcttttttttttttttgcggggagctaatatatagggctttaacatagtcaaacaaagtcagcagtgtgtttttatactgcatggtatacttaatccggaagaaatttggcttgatacggacattgcatactgtgcttgattatttagtcctttttttttccttctgattttcttgatggtgaattggtgattattcaattgtattcagttccaagtggtgcctccgcgtatttagtatctttacgccatgttgttgatgtcttgtttaattgagcccaatgttgttgatagcttgatattgtgccatccaatgaaataatgaaaataggaatattgtgctgtgcatgctattcctgtgttccatgctggcaaactgccatgcgcatacaatgtacacattgaatttgcttgtaacagatggaatttcgttctttttatacatctttcctgttctgctcttaatggatggattgtttcttaatgcagactgttccagttaacccaaaacctttcttgaacaa

SEQ ID NO: 11068 - DNA, 1018 bp, Oryza sativa
  Intron number 1 from transcript LOC_Os10g37770.1 (locus LO C_Os10g37770) derived from phytozome v7.0 (chr-ID Chr10; p os 20141136 to 20142153 reverse strand)
cgcccgtgcgcgccgccgtcgacgtcggggccgtgagtgccgcctcgcccgcgccctcgccctcgacgttgtcaacgcatggtcctttcggattacgaaaaactttagggggttttgcacaaaaagatcttaataccgaaaaggactcgttggaatttaggtgatctaaaagaggagtgatttggatattatctttggcctgatgcgtatattcggatttctgacatcagcttatgctttagtgggcggcctaatcaagaaatggtcgctggcaaggacaaaccaatgtgcaccatagagtgatgtggtcaatcaaaaccgttgacttagatattttccggtgaaataaaaacagttgagtaggtatgctaaaaaacagatgagtaggttggtttattaatttgcatcagcaattcagcatgccagcaaacatgtcattttctaatttgtacagaaatgtgaatatcaacctcttcatttggtttattcataagcatatttgtaaacaaaaagtaatttataaataaagctttatatatgtatgtatatatatatatatatgtatgtgtatatatatatatgtatgtgtatatatatatatatatgtatgtgtatatatatatatatatgtatatatatatatatatatatatatatatatatatatatatatatatattcttttagatctaaaacaaacgttgaaaaataaacttcgatgaaaaaaaatctcaaaatcagttttcaatttaaaattaaaaatttaaattttagctgatcagtataaatataagcaaaaagataagaccatatacttgtggtttgtttgtcaacagagttttcaatatatattctgtctgtttttttcttttttgaacttggttgaaatatttccgtccatgtcagtgaacccagttaccgacggttattgaaaaccctcgttgtcacttgccgtcgtctatgtttgactttgtcactaaaatctgacacttctgtcaatggcgaaacgtgcaccagc

SEQ ID NO: 11069 - DNA, 1015 bp, Oryza sativa
  Intron number 1 from transcript LOC_Os11g08460.1 (locus LO C_Os11g08460) derived from phytozome v7.0 (chr-ID Chr11; p os 4463989 to 4465003 reverse strand)
ccagtccgcactcaacccaaccaataccatctttggtgagaaatagtagctgttttctactcaatcaatccaaaaaaaaacaaatctaaaatatgatgtgatacattataacacggtactacacatctaatactggattgactttttattcaacggttggagcagcttgtttccttcctcacttttggtgtcttctgctttcgtcacaaggagtgtcaatacaattcaagtaacaaccaatagtctcaatataatcaaagtggcaacgaatagtatgtgtgtcagtcaaatcaaaatttggtcattaatttatcctgattttctgaggtattcatgtagacattttttttctctcttatgagtgtatagatatattcttagactagattattagatgtgaagtggatttgtctactacaccacataaaaaaaataccgatcataccattgaaaccattccaagaactagcaggaacgagtatagcaagcaagtataatatattatatttgtacggttgcagggtatacaagcctcttaaaatttctctttctgccttttcacatttctgggggttttcttttttacctttgtttttactcgtctataggtctaccttttcattatacgagactctttagttcccaatacgactatttagtttccctatgcacttctagtaattaaacacttctgccatataaacctgtcgttcttcaaagcatgtttcgcaagtcattgaattgttgcaagcaccaaagcaaaacttgacaattaattagagcaaattaagataatgtagccttcaaatttcagggaaaagaaaagaatctggtggattagattcgtagctgcaagatcaatatttttacagaaatggtataggagtctcataaaaaaattatcgcaactagctaggctatttatatttcacccgattgcttgttaccgtatgattcaaagttaattattactactgcagaagtgaagcgactgattggccgccgattcagcgat

SEQ ID NO: 11070 - DNA, 165 bp, Oryza sativa
  Intron number 3 from transcript 13113.m00150 (locus 13113. t00023) derived from phytozome v7.0 (chr-ID ChrUn; pos 234 014 to 234178 reverse strand)
aaggtacaaaaacttaggtacatatggatttgagttcatctcaggatttttttttttcaacattttctcttctccgaatcgaattgaccaaacttattaatgtttttaaggcctgaccattttaatgcagcatttgcagggagtctagtttcctttgacaaggtg

SEQ ID NO: 11071 - DNA, 625 bp, Oryza sativa
  Intron number 1 from transcript LOC_Os11g37940.1 (locus LO C_Os11g37940) derived from phytozome v7.0 (chr-ID Chr11; p os 22032439 to 22033063)
ttcgacttcgtgctggctgctcaagaaaccgagaggtaagcatctcgcatatccctacaaccttaatttgccaatgaattccgaaatcttctttgtcttttcgtgtaatttgagttctgaattttgatgtcccccttctctctcgggtcgtattttttgttatgaggagagtctctcaagccatggcaaggcctcctttcaaacgcatgaatttcacatgaattttgaagagttcctctcaagagggatttacggagttcagataaaaccatttcagttagcgtactatccagactattcatgtggtatggaaggatgcctaaaaacttggaagttctatgaacttatttggtaggattccaactatcgatgaagttgaagctgaatcaaatactactcaattcttatttctttttgctaataatagagcaggtagatgatgccaaagcttaggggttctacatatatgaaaacatgtattgatttgctacggagatagaaattttacagatcatcagtttcattcacgagcagaagaaactcagattacctaaattcctcttttttcttaaaaaaaactcactaattttttttcagagcaaaggctaagtattgtggatcaagc

SEQ ID NO: 11072 - DNA, 544 bp, Oryza sativa
  Intron number 2 from transcript LOC_Os11g37940.1 (locus LO C_Os11g37940) derived from phytozome v7.0 (chr-ID Chr11; p os 22033305 to 22033848)
ccaccggcagggactcctgcggcaagtgtcttcgggtaatacctactccctccgttccaaaatataaacatttctaactaataactgtgcatatagatttatagacaaaagttattatatttgggatggatgtagtaatatatatcgaggaatcatcttcttgttgcaaaagtttgttcaacctttttcttctctgattaaatatagaagaagcacgtatataaatatcattacacatatactctcttcgtctaaaaagaaaaagataacttctaaggtgaatgggttattgcttatccaaattcatcctcagaatttgacttctttagatgggggtgtatatcgtagttatgcactttcaacggatggagcacaatgataaatccattaaccgccctaaaatttgtatcaaagacatacccatgtgaacataatcttttaccttttaatggatcgacagagttacgcacctataactccacattgatagctaccgatggatatcgcaggtgacgaatagggtgacgggagcccagaccacggc

SEQ ID NO: 11073 - DNA, 511 bp, Oryza sativa
  Intron number 1 from transcript LOC_Os09g29670.1 (locus LO C_Os09g29670) derived from phytozome v7.0 (chr-ID Chr9; po s 18044104 to 18044614)
ctgcggcaagtccactcttcttgactccttagcaggtaacatttgagaaagtggattttgatcctttatttgcatgtcacttaaatagttatgaaaaaaaattaaaaagatatattaacatgtgatatcttactccacaaacatgcaagtcaaatttaacttctacatctcgcaacgaaaaagcaaatttaactgtgaatatacgttagttgtagtttaatttattttttctttgcgagatgtagaatttgaatttgaacttctatgtttgtggcgtgatatatcacatgttaatacatcttatcaatttttttcatgactatttaagtgacatgtaaataacaagagaatatccctcgagggattaaaatagtttcccttacatatgatgcatgccactcttctgatcacctcggcttgcgtgtgttccgagacaccgaatatcaccgatcgaattgcatgaattctgggtacaggaaggttaggctccagcgtgagccagaagggagac

SEQ ID NO: 11074 - DNA, 1001 bp, Oryza sativa
  Intron number 1 from transcript LOC_Os11g41860.1 (locus LO C_Os11g41860) derived from phytozome v7.0 (chr-ID Chr11; p os 24705893 to 24706893)
agctgctcgagtatattggagacaggtaagtattttttttaattttatagaagcctatataactatataagtacattactcacttcgtcccaaaatattacaaccttatacttgatgtgatataatgttgctatattttgggacggatggagtataatgtatcggtagcatatactgttaaaaaaaagaacactatatgctaatacataataattttacagttttaaattataaaccatttaagtgggaagataaattaatttatatcccgaatcactcgtactagccgtatataggagtaatatactagcaccgtgaagtgtttttttctttaaaaaaaaagttttggcctctgcgcgcgctagggtttgcaatttcagttgccaccgaaaatttggtggttgccggaaatttaaaattttcgtgatttttgggtttttcggattaagattatttaaaatttttaacatattttgactgaatatgaataaattttgaccaaatttacacatttgaaaaaacccgaaaatttcggggagatttgtgttagtcggtggaggccgaaatttcaaagcatgagcctgcgccaatcgatcagcttataattgaaccactcacaacaggcgagatatatatcgatgctaataaaaaaatgcttttaatccaatatacttatatagttcatccccactaagtgtagttaatgctatttatctcttctctcatgaagccacgtcaccccaattatttctagccattggatgatagatctatggttcaaattgtctctttttttcttctctcataacaccaagtaattttaatcatttttaggcctcaaaattcataagtatcaatttttttagttttaatattcatacttcatcttatttgtatatattatacaacttaatttcccgcagcggtattcatctaatttacaaacttgcaactttgcaagtacaggtcgccttctctgaaggttatttccgtttggtgct

SEQ ID NO: 11075 - DNA, 966 bp, Oryza sativa
  Intron number 1 from transcript LOC_Os10g26390.1 (locus LO C_Os10g26390) derived from phytozome v7.0 (chr-ID Chr10; p os 13637546 to 13638511)
tcgccgacgaggccaccaccggcgacgtcagggtggtgagctctcctattttaaactcaaatttgattaaaatttggaaacgcttaatcgatgtttgaatctgcactaggattgattcatgacctttaagttagatgctatgcttaagatttccatatttcttggaaaccctatttccaaattccaacaatgctggattgaaattggaaaccttgctggttgaaatatgtttgaatttttgccaaatccaagatattggctcaacatcatgacgccagggtgttggaaaataaattgaaaaaagaacagtcctgcataatccatacaaaatagaacctgaaatgaagaggtagctagttcactgttttactgaaggagcatatgtttcaaattcgcaacaaacaactctgcaatggcaccatatacactattaagatattaggattccatatacactattaggattgttacgattccatactttcccggtttccaccataccaaaggcataagagttactgcaatatcttgatacacctcccaaggataggcaagaaataattgatgtagtagtttgtaagacagatacagctgttatctgtctatcatttgcagggcccatcctaacatttttgctggaccttttcttgtcatttctgggctatgcaggctgctaatttgttgggctgaattcgcactatacataggtatccatatgcacatgtcctgtagccccaaccatgctgttcccattgcccagatgccagttttactacggtgatagcataaggaattactggattaagattagctgcagttcctactagagctctgcatgatctcatccatccatttatccaacgataggctctgatccactatatttcacctttggctaaagtaaatcgacattgttttccttgatgaacagttccttagaaaacctgagcccttcagttcacatca

SEQ ID NO: 11076 - DNA, 793 bp, Oryza sativa
  Intron number 2 from transcript LOC_Os08g41790.1 (locus LO C_Os08g41790) derived from phytozome v7.0 (chr-ID Chr8; po s 26387492 to 26388284)
agctgcacgaccaccgcgtcgtgctcgtcaaccaggtgtggtgtgcctcgttgcatcgtcaggatgcatatcatgtctgcttggttggttgctatatgcatatgcttgcctagtagtgagatttcgtgtttcgagcgttttgttcaatcagccaatccgttgttgcagtgatcagtgtatggtttgttgttagtacaaaataacttacggagtggaacatattgtgatgcggtaggtccaaaaatgacatgatttgaacagtcaaggtcgaggatgagtatggtactccactttcttgtatgtgcagtttgtatgcatcctaatgcctaaacatgtagggcctttcgtgcagtattatattttttcttctctgtaccattcatagcttgtttcttttctttaaggcaagcaggcagaattgctatttgtgcaagttgtcaaaaggggaaatgcgttgtgaaaagaacttctttcggagcagcttgaacaaaatgtgcatttgattaaatcattgcctgcgtattggcaagctagaagcatgaaattgctttcatattcgcatctgtattcagttgtgtgtcttgtatggttggctgtggtttcttgctcagttgggtgaatgctgatctgggtacttgcaagttgctgtcatttgaataagagcttcatcaaaagagcaaagactagttgttgactatgtctgatagatcatttctgcaattattctatatacttcagctaaagtttcaattttgcaggattcattctaccgtggtttaactgaggaagaatc

SEQ ID NO: 11077 - DNA, 892 bp, Oryza sativa
  Intron number 1 from transcript LOC_Os09g39670.1 (locus LO C_Os09g39670) derived from phytozome v7.0 (chr-ID Chr9; po s 22762815 to 22763706)
ttcgccgccaagggcctccccctcaatatcctcatgtactagtactcctctttcaatgccaagtacaaattccctcatttttcagttaggaccagcagtatcctacctacctgcactgcattcactactcactgctgctttcactaaattcagctactagtactatactacctcagttgcaccttgtttttttggacaatgcaacatcatactctacacattcaatcctgcatctctaccccacgctaagacatactccaattccaggagtgggtggaagccattttcatggaattatgattcagctctcagagggactacaacttcctttttgctttctcaagtaggagtagtactagttgcatgctggatacatatgactagcctactgctatattacttctactacggccgcatggacctatttttactgtaaacaacactttcttctatcatgttagctacgatttccatgtttttattgtaaacaatcttactagctgaaggtcacaacaagctcttcctatgcttttctttactcttttctagcgcaaaaatcagggagggcatgttaaatgtatggtttcttgttttaaccatgaaatggtataactccaggaacaatggcatgacttgtgcatgtgtttgtgttttattacatttggtgctcaaaatttttctgcagccactggatatcttcatttatatcttgctgccgttaattatactactatgatagtacagctccttcctatgaataccctaaaaatcacatttagtactaccgacaagtgtctgtgtttcatgcttgtttggttgcgtagttattagaatgcttcttttatagctcatcacacttcctgattggttggtggttttgtttgcagcaaca

SEQ ID NO: 11078 - DNA, 817 bp, Oryza sativa
  Intron number 1 from transcript LOC_Os12g07280.1 (locus LO C_Os12g07280) derived from phytozome v7.0 (chr-ID Chr12; p os 3579426 to 3580242)
agctgggagtgattccccctgcttgatttgattgggtatgtgatctctgatcagcaacttgtaagcttcttctgttttggcttgatgctggattggaaccatcttgctggtgattttgttttggcttcttcttgtacagttgacagtttcgttctaggttattatggtttggaactttggatggatataagtttcccctgttttctgcgatcttgggaggatagagagggtgttcttggatctaaggcttttccttattgttcttgtagaaatttcttcagggtttacggttaactagttaagtttaggtgaattgttaggttattctgaactaagaaggagacttttggttcttaagatatcttgttcctgcagcctgcagtagttgcaaaattttttctttgttcttaggaaaaaaaaaggatgttggtttctcctgtcttgtgttagtaataaattagtgattctgaaaatgatcaaagctggtagtatcttttaattcgtagcatattcgttcagagaagaaccttgatcaagtaatttatgggaaaaaaaatcgatttaaacttcattttagcattgctgactgtgtcagtgaaaaggatggagcagattgcaaatcttgcatcacttgataatctagtagattactactactaattagttcccagtttcttgacttttcaaccaactcaaaaataacatcaaatagtttcttgggggaaaaaaaacaagaacaatctttgaactggctaacgatcttgattcctcttcctctgcagatttcagaggcgccatctcttttcctaataaagat

SEQ ID NO: 11079 - DNA, 497 bp, Oryza sativa
  Intron number 2 from transcript LOC_Os12g09120.1 (locus LO C_Os12g09120) derived from phytozome v7.0 (chr-ID Chr12; p os 4772298 to 4772794 reverse strand)
cgaagggtaaataaaatactttcttgttttaaaccatgcaactgttttgcagcattagaagagcattccccttgagatgagaccatggagtttttggactttgtattatgggttgtggtgaaggcgatatcataagaagtatattagaatataatactctgcaatagacagacctggcaaaccacgttttaacttaacatttttcttctagttactcaatctacatctctattatctggaccaactggtcatttggtgcgatcttcttttgtttcatatagccagcggcatttggttttcatatgttctgtttattttattactaattaagtagttgatgctttttaaaaacagcaatggtgcaaagcgagcttaattattattttaaccaatttcttttgagttatgatccatcattgctacctgtttatatctttcattaatcactaccatgtttcataggaacgcgaagagagacggagaaagttaaagaggga

SEQ ID NO: 11080 - DNA, 823 bp, Oryza sativa
  Intron number 1 from transcript LOC_Os11g20360.1 (locus LO C_Os11g20360) derived from phytozome v7.0 (chr-ID Chr11; p os 11769735 to 11770557)
gtggtgagttcgctgcctctcgcgcttctctgagcctgtattgattttagaaatttcttgtatttcgttctaactctagatggcattgatgctctgcttgcttggttcttgttatcttcttgtactctgtgtatgtgtgtgtgtgagagagatatttgaactgaagattctgcagtttcagattttctttggcctgtttctctctctcccccgagcggtagccattctctctttcttgttcttctgccaatttccagctgtttccagtagctggaaacttcgaattgcttaaagttcagttgtttgcttgctatgacttcgtttccccttcaagtttcactgcatttcctttccagtttttccttcaaagctcggatttgtttcttgcctcttcagcattcttttttccggcctcgattttgtataaagccgtttgtttgtgtcaaaatgttcaccaatatgcctttctcatgagcctcatctgttcggtttactgtacatatgctcttaatggtctgtcaatagtctgtccagaatgtcattttctatgtcgggaccgtacagatttttaaggctgcagcttccatattttttaatttgaacaaatgacaactactgccttgttttttctgttcaatctggagtaaaacttgttcgcgatgttcttgcatccggtctccaaattgtttttttttttttggtttttggaaataagtatgattcagtcccgtggcattcacatcttgcttctccttagtttcttcattgatttgggctgtaaatttaatctttttcctttgcaggaagctgtaatttgagagcg

SEQ ID NO: 11081 - DNA, 397 bp, Oryza sativa
  Intron number 1 from transcript LOC_Os12g07050.2 (locus LO C_Os12g07050) derived from phytozome v7.0 (chr-ID Chr12; p os 3452351 to 3452747 reverse strand)
atctacgacgacctccgccgcaaggaccccgacctgtccgtcctactgctcttttcccttcttgattctgtgttctttccgggggctcttggtggtggcactggagaaggcaggatctcctttttagagtcgatttcgaatttatgagttatttgtggtgatttggttggtgttggcggaaatctgggatggtcatgatgggaacagatagctgttgtcttgcaatttgggggttttgttctaaatgtattgctccttagggcttagataactcttcacaatatttgattttgcgatatgcgatccttgttgatttgcggaaatggcagaaaagtttcttattaatgcattattatgtggtgtgccattcaggtacaagaggaacggcctgctgcca

SEQ ID NO: 11082 - DNA, 303 bp, Oryza sativa
  Intron number 2 from transcript LOC_Os12g03040.1 (locus LO C_Os12g03040) derived from phytozome v7.0 (chr-ID Chr12; p os 1138966 to 1139268)
agggtgagattcatttaattacttaattttagttcattattaatttgtttttctcttcgtcgtacgtcttctttgaaagctacgtcgttgtttgaattggcatattgaaggaagcaaacgtgcatgttgctcttagttaactcactctacaaagtcaaatttgttgatgttgattgagcttgtgttttattctttattttaaaaataaataaagcaagtttgcacacttctaattattgtttactgcatttgtgatattgttcatcagctggacgactgggtgctgtgcagaatccacaagaa

SEQ ID NO: 11083 - DNA, 642 bp, Oryza sativa
  Intron number 1 from transcript LOC_Os11g34570.1 (locus LO C_Os11g34570) derived from phytozome v7.0 (chr-ID Chr11; p os 19773928 to 19774569)
tcccggtacctggtacgaacgatcgagtcttttacaattcatatatatatacttcatctgtttcaaattacatttttctttctatgtcttctttaaatcatatattctaatctttagccatcaattagtgatatacggtgttatagtttaacatcgtaagatttatattttattttacaatatattatttacatgttgttaaactacatggattttttaaaattagcggtcaaagatagacatgttaaacttcgaacgaatctataatttgaaataagggtgtagtaaaattggtaaacaaaatagcctcataaatttattattgaatatcttgaattcttgatcatgatcttcgcaagaataccttgctaatgttgaagtataaagggtgccataacatgtctttgagagaagttagcgtaaatatagcagcaatttagtttcttcattttgatttgggttactatctgatatcaaagaatggcggaaacggtgcccggcccgtgatttcatttatataggtaggaaatacccctaccgtggtttacaaggtgataatattatacatcaaactctgaacatattctatcttatcttatctgctatctagattacattgtaactactaagccttatcactaa

SEQ ID NO: 11084 - DNA, 573 bp, Oryza sativa
  Intron number 1 from transcript LOC_Os12g06640.2 (locus LO C_Os12g06640) derived from phytozome v7.0 (chr-ID Chr12; p os 3221232 to 3221804 reverse strand)
ggcggcgatcgagcagagcaggggagggaatcctggtgagcatccacatcctctttctgattcatctctatctcccatcccaccgggacgtggaatttgcttgcgttcgttaacttctcttctagatctggaagaagctcttctccttaatttgagagccttaaacctcttttaatacaagtagtaacagtttgtttgttctcccaaaagttttttttttttttttggggggggggggggttcaactgaaccccatgtcccaagttggatccggccctgttgattccttttctgtggaatacatggatatttttttttcctaattttcactttgaataaatctttgaagcatggtactcattatatcagcagttttagttattacatctcattaatttttgatattattatagatttctcaatcatgtattttgctttaggtgttcaacaattctcctgaattgctttcgcaggtgatgtaacaaaagtggtcaccagtgcctgcgcaaaatctcgtctgtttgtatatggtattaataagcagcttcagtgcctggctgatccttggggtga

SEQ ID NO: 11085 - DNA, 682 bp, Oryza sativa
  Intron number 2 from transcript LOC_Os11g25874.1 (locus LO C_Os11g25874) derived from phytozome v7.0 (chr-ID Chr11; p os 14285005 to 14285686)
agttttgtgtgttttcgtttgcagaggtacttgcttggccgaaggaaaagagaccaagtataacgaatgcatggatgatcaaagaagttgattagggacaaaaccaagaccttctccaagtctacttctacctcaccatgtcacttttggtccatagaagacaagagatcaagttttacatgttttggattcggattcgggcctcctgacagcatcaacttcaaacggatctagccactgatctagaaggaatttcggggcccatgagtacttgttggaaagattatggagtctaattttagatggttttggttccacgtcaaatttcctatcgagctgccgggaatctgcaaaacaaaccacgtatgtcatctagtccgaatctgatttgagttttgggccttataattgtgtcgtgggcttagcctaagggggtgtgcaccctagggcaaccctaggacgtccctaatcatatttatttggtagccgtcatcgtttagactcgggttttgcttagattaatttgtcaagaacagtttcgtcgctagattagtttgtggaaccccaaattcgagtgcttaatcattcatatgcaattgtgttgcaatctatcttgttcttgcttgtgttctttgattcaaatgcagggattagccttctcggtgaggttaacctggtttcg

SEQ ID NO: 11086 - DNA, 969 bp, Oryza sativa
  Intron number 1 from transcript LOC_Os12g07020.1 (locus LO C_Os12g07020) derived from phytozome v7.0 (chr-ID Chr12; p os 3431309 to 3432277)
gcgccgcagccgccgcggactcggtacgcgcgtgctgtctcggtctctctcctctctctctctctctctctctctctctctctctctctctctctctctcgcccatacatgattacatgatgcatccattccctcctgtaactgtaaacctagatgcccttttctgttctggcttcatttctgaatttctgtatcgcctgcgttaacttctggatttggggatgctgcttgtagtcgtagactcgtagtgcaccagtgctgtaggctgtgtgtcgaactactgatacgaaatatgtaatacgcataaaaaaaatgcaatcgcatctgaatcacatcttcggttgctagtagtgatgggtgattgggaaccatgtcatcataaatttccagttgtaggggatgggattgcaacatgcgcacctgtgtttgatgatatgtatcagaaaggagtcaaagtccgaataacatgcagaatcgttgtctggttcgatccctgaaacatcagtcccaaatgaacacggtttcgactttcaagatggtgtgggggtatatttacaagccattggggtctgttggtctggatgagtgaaaaattctggcttcacctgatgtgtcataaagaatggctagcacatacagattacaggcaagcacctgagatgcagaattggtgtgaaacctacattacaaattatgttggtcctttgaaactgtgttcagtttatccaaatatgatgtactttagatctgtactcctattactttatagcgaacatggtctgtttattcttgatgtctgcttctacatagtacatgggctccttgttggatttcccttgttgcccttcaagcctcttacacatcatttcttggtattgttgtttaaccactgtttatttgcttatgtttcttcattgatgtggaatgtttaaaacattcaccagctggggagactcgacgtgttccagg

SEQ ID NO: 11087 - DNA, 1017 bp, Oryza sativa
  Intron number 1 from transcript LOC_Os08g32930.2 (locus LO C_Os08g32930) derived from phytozome v7.0 (chr-ID Chr8; po s 20421284 to 20422300)
tacgtacccggtaattatttgtctgccctcctcttaattacgccactactccctccatttcatactgttagcttcaactttttttaacttatttaaatttagttaagtttataaaaaatatagtaatatttttaagttaagtttataagaaatatagtaatattcctatcccaaaacaaacataatatctaaaaatatctaatgttatatatataatcaaactaatttaatgttatagatgttactaatttcttctattaacttaagacaaatctaaagaaatttagctaagaaaaaaagtccaaacgacttataatattgaatgaagagaagttaaaatgatttataatatgaaacggagagagagtattaacaatttaatttttttagtcgcaatgtttgaaacagaatcatataatttacttgctttgcgtcagttttgcataaccatttcgaaccaccagccagttttggcaatttgacatgaaacagttttattgagttttcttgtcaaaactaaaggaacagtttgcctcaaatatgctaatcacattagtcatctgtcatcctgaaaaaaaataatttcaaatttaatccacacaataagaaaaaaaacaaattactacaccctaagtagtactagtactattcatagtcatagccagatttgttatttttcttcaacttgttacgtatttacatgttggtgtagtgatacaccacacaattatctgtattattattattattgtaatttttcataaccatttaaaacacatgtgaagaataactgtacatccacttaggtgacaaaaatgagttttcctgtttataaaaaggagagacacgtttaacctcgaaaatgaagatgagagagacgtaagctgggccagcgtttgatgttttgggcctcttgggtttggatttgtgccattgtgtgggcttacttacatgtggtgtgggtttgggtttgtcggtccaggcttcggagagggatcgccggagaagaaggcagca

SEQ ID NO: 11088 - DNA, 938 bp, Oryza sativa
  Intron number 2 from transcript LOC_Os12g41962.3 (locus LO C_Os12g41962) derived from phytozome v7.0 (chr-ID Chr12; p os 25988854 to 25989791)
tgggctcttggagatttgagctgatttcaaacaatgtaggtaaaggttgtagggttcatacggtttatggcttggtccgttagaaatagagcataccaagccaccaacgctctacccgctaacccagagttgtgttgggcacattaatcttctagactttggggtcaatgtcaaagtttgtgagtagaactttagattatttacaaaatgttgcttggatctgctagaaagtagatcacacaaaggttctgtctgctaaccaagagatgtttttggatgcatgctccacgtccttatgtctctccagttttactgtatcaatcttgggctatgttactgcttcattcatgttcaacaaagaaatagagagttagagatccatctcccaactttgttactactctgttattactttgatactatgtggaacaagagaattatgttgtcagtatagaaatgtacacaatcttcagttttccagtatcgtaaaaattgtgaaagaaaaccagttttaaaactcatagagccacttaagtttcctcgttgtgatactttgacagttcgacagtaagtactaagaagttcaagaaaactaagatatatgttccataatatgagaatatttattgtaagtgtcttccaggattggtggagtttagcttatcaatctgtttattaatatttacgcagtattgcagtcatggcattatgtggttgaatatatagatggataatagatgatctaatttgaaatgtgataaattgttttcaataaatgggtctgcttttgggaaatgaaaatcaattttgttttggtagatattctgtttccgggaacagggatcgattaagccacagtgtaagttcatactgtgacctattgactttgcttttgtacgctagttgtaaaattttgttcaattgaatttcaggtgaat

SEQ ID NO: 11089 - DNA, 978 bp, Oryza sativa
  Intron number 3 from transcript LOC_Os11g13500.1 (locus LO C_Os11g13500) derived from phytozome v7.0 (chr-ID Chr11; p os 7394262 to 7395239 reverse strand)
caagtccgagcagccaagcacttatcgcaagagtccgtgtcttaaaactttcccaaaccgtgcatttgtgttgtgagtttgcaactgtctgcctatctgtatatactactacttgaatgcactgaaaacttcctcctgtatttttttttgttatttactctacaactggtgggatatcttatatgtcatgttgaaatgtaaccttttaaagcaaaattgcatttggtcgaaatgatgctagatggtatgttatttggattacagtgtgaatcaaattaggaggttgaagctaagtggttttgttcaagttaaagtttttctataaaataatctaccaaaaagatatatatttgatttgcagatatgcattgaaaattacacatttgcttggcggttatactgttagtccttatgaattgtttagttatttaagatgaaagggaaaatcattttatatcacaaaatttttttcatggattggcaacatcaaacagagcctgtggtttgctgtagcagtagcatactagaaaagtgtgtggtgttgatgtagtgcccgcatggtttagcttgacattaaaatgatgtgcagtccagatttgaggaacattgttgacaatttgctatcacctatcactgtctgtgttgaccacaataatttcagatgtaccatcccgtcttctaactagatagacgcatgaaagtttgttgcatcaattccagcacttcaattttttgtgaaataccattagaacataaccactttgctgtgatatgaaaaataaatattttatttcttggaaggttgtatgatcatgtattcttatactatattgttcattgattttcttttccatttgatttgattgactaatatctctaaattttagctacccttatggtagcctaaggaaaattgtatgtttgacagacctgttttctgttgtttgatccctccaggaaaaccagctgccattcaat

SEQ ID NO: 11090 - DNA, 692 bp, Oryza sativa
  Intron number 1 from transcript LOC_Os09g12660.1 (locus LO C_Os09g12660) derived from phytozome v7.0 (chr-ID Chr9; po s 7247814 to 7248505 reverse strand)
gctcgcagacgtgcctcgatccggacgccagcacggtacgccgcgatctcgccgccggtgcccaaaaaaattctactcttccagcgctcgcttttttctttgcgttcacgagggagaaaagttcggatccttttgggttgggaaaatcgaagggtcgttcttgggattcgatgtgttgcggttattttactcgacacatttggatgagcgaaatgtgtttgatatgtttcttgtggggattcctgcgagtgcgaagtgtttgtttttttagagtgttttggtgtcgatttctcggtgattctatcagctgttgcgttcagtactctctgtgattcaagaaacggtggaaagatgatggtgacagtatctctagtttagttgttggatgaaatattgacatatctttaacggtggaaaggtgattgttagtgagaaccccataataattaattagtggaggatctatcgtggtccatggcttgaatttaataattggctccagatctgttgtagtacttttgagtttataatttattagattctgtggtagaactagaagtacagaacttggaactcaagagcatttcatctgttatctatatatagtctgatgatgatttgtattattatttttacatccaatttttaatcctgcagagtgttcttgggatcatccttggaggtggtgctgg

SEQ ID NO: 11091 - DNA, 981 bp, Oryza sativa
  Intron number 1 from transcript LOC_Os11g36580.1 (locus LO C_Os11g36580) derived from phytozome v7.0 (chr-ID Chr11; p os 21126383 to 21127363 reverse strand)
gcgccggcacggccgaccggcgctcgggcaaggcggtaggggcggctggagggtggccggcaccgaggaaagagaaggaggaggcggggagaggtggtgcagccacggggagggcgcgggagggggctaaaacgagagaacggagcgagggggttccgttttatagcggagggaagcgagccgagcacgggaggagcggggaacgacggcggaaaaggcgcccggcggccatggaagacggccatgaatggcgcagccgttccggtcaaaatagtgcacgattaaaggggagattattgggaaaagggagaggaaggaaaggggattaattctccccaattaattttggaatccaacgcttaaatcgcgcggattcgagggaggaacgaactagggttttcacgggagagagaggaggccgtgcgggaggaggaagacgaccggcgcgtgggccccacgcggtcagcgcgcgcagtcagcgcacgcgcggcgcgcgtgcacgcggctggctcggctcgacctggcttgggccgggctgctgggccgaggcaggccgggaggaaggaggaggagggagtgggctgccgggaggaaagagagaaaaacaaagggaggggagagggacttggactgcgggccgagggggagagagggagactttgggccagacttggcccaaagggaggagggggattatttttagctttttctttttaataaactttgttaattgttgttgttgtttaataaatattttcggtgctctgaaaattcaagtaaaatttgagggctccttttagaccaaggagaatttaacaaaaattctccggaccacattcgaatctttctggcacgtattttagtgtttgtcaatttctttttgaattttaattaattctattattccttttagggaatgatttttatttcgggatgaatttatcaggacgtgacagcccaccagccattgggctggacgcc

SEQ ID NO: 11092 - DNA, 867 bp, Oryza sativa
  Intron number 1 from transcript LOC_Os10g21470.1 (locus LO C_Os10g21470) derived from phytozome v7.0 (chr-ID Chr10; p os 10924685 to 10925551 reverse strand)
gtacacggtgctcatcgagcatctcgcgaacgtaggtgaggtgttcgaccaaatgcctaccatgttgtttgttacctctacgttctgtactgcactctcgttgtgagctgttgatctgttgttcgatgaaatgcctgaatggtatggaagatccaatggttggtttgctcgatgaacatagcttggtgttggtcggttgcttagtttttgcactctaatttcttcaacggattgctaaatggcatgcaattagaatatgccatccattagagtacagtgggaatctcagcttgtgtagacatgttagtgcttaaattaagcacaattaaagttcaccatctattggctagtaagattaatctattgcattcattggccttcagaatatcccttttataacaaactgtcttgtaagcatacccaatatctatctctttttagatgtactcaatatctatctgaagttcttcattcattgagtcatttgtgctcaacttcctgtgaagaaaagattgaacaattgttagcattctggaatactctgtacataggtaggcaaatccagtctaggctgcaaaagtttcttagcttactgaagtgcagtaaacaatctcaaaatccttgtcaccattgtatgaactccactctacagctgctgcaacttaacacgagtactggccgatgtaagaggtgctagttgggcaagcaaggtggctgcctaggcaggataaattggcttggcagttatgatacatcacatatttgattaatgttttcacttctaatttgcactgcattaagttataatatttgtaccatcatatcctaacacaaatctaatttacttcagggaaatttgaagctact

SEQ ID NO: 11093 - DNA, 847 bp, Oryza sativa
  Intron number 1 from transcript LOC_Os11g43860.1 (locus LO C_Os11g43860) derived from phytozome v7.0 (chr-ID Chr11; p os 26019856 to 26020702 reverse strand)
ccgatccgccgccgccatctgctccctccaccccggtaatctgccactcctcactacttggttttgttcattcatcttggcttccaagtttcaacatccaactctcttggggaaggggggaaaaatccctcctttgtttcctctctccaagaagtttgggagggatcccctttgatcttaaacaaatgcccaagttcgtcgcattcaacctttccggatctctgtaggggtattgataaaaaaaaagataagagatttttagggagtggcaaaaaggagtgttttttttaaaaaaaattttggtcaacttattaggattagtgttgtttaacacatccatcgatgaggtggcatctagcaattttgtggttactcgatccagtgcttcagttgttcgaatcagttccttgtgatatcctcgtttttttttattgctctcatttgctgttgtaattcaggattttttatcacctgatatatatatctaaatttattcccctgttaccaatttttctctccatgaatcgttcggcaacgagatcattggaataatttagtttttcttcacgaggtcttttacctttgcactgtttgctagccttccagactactcctgtttggtttggtggtgaagtggtgaacaccttttcatcaaaaagccaaaaaagttcttttaagcttgacaatttattagttgctgaactaggtaggttgatattgtactgtagtagccattattttctcctgttcataagctaacattttcttgatgttagtatttctgatggaaactggcatttgtgttgtaacaggaactgggaatactgcagttctcgtcttatactag

SEQ ID NO: 11094 - DNA, 462 bp, Oryza sativa
  Intron number 2 from transcript LOC_Os10g35220.2 (locus LO C_Os10g35220) derived from phytozome v7.0 (chr-ID Chr10; p os 18744965 to 18745426)
aattggtgcaggtaacttcaaaaaacttatttgttatcttttgttccaacttgttttgtatccgtagtttcattcataccaatgtccttgagtaatggtatcagttaacttggtttgtgttcattcgttactcgtgaaaaacaaatcactcagtatggcatatatcaatccttgtactactatctgagtttcttgtcaatatgccctgttaagctcttgaatgaactaagtaatggaactttttgatctggcatggagtttttacctctcttaactttttatcaatatgcctttttttcttaatgatatgtaatttcatgttgcaaaattgcaatgtaataccatgatgtgcatcaatggaagtatgattgctttgtcaatttgttgtttttggaaatcactgtcacttgggcttatgttatttcagatatctggatcttcttcccttgtaagaaaagctct

SEQ ID NO: 11095 - DNA, 738 bp, Oryza sativa
  Intron number 2 from transcript LOC_Os11g06750.1 (locus LO C_Os11g06750) derived from phytozome v7.0 (chr-ID Chr11; p os 3290371 to 3291108)
cccgaggaagcgctcctcccgccaccgcggcaagggtatgctcactcacctactctctctctctctctcttttgcttgtgcggtgctgtatttgtagagcttgcgccttgtatggtagagtagaaacttgttggatcctcttggtagaaaataggatgtagtcgtggacgagatgctgttgctgtatggatctataggcctagttctgtgtgcctggctagattgttgtgcgccccagtgttcttagcaaaatggactttgattctggtgctctgtatatatgacctgaaagcctatgctctatttgtccccataatttctttttgttagtgtaatggtccacataatttctttttgttagtgtaatgggggaaaatagtaaaaatgaggtaataattctatgttgatctgatcaatccatgtgcttccatcattgattgttgaattcctactaagagcatacccctgcggtgatgcatttccccatatatctgcatatctgacatgagtgtactctgcctatttttcaaaatgctgaaatttattgtttttcttgccaataatatccaagtttgggaattctttctagcagtctctaaggcttagcttcaacttttagttttttcttgttccagtcgtcttctcggtgccattttgcactgccagttgtttatgtgtgattacactaccaatctgatattttgttctctgttattgcagtgaagtcattccccaagg

SEQ ID NO: 11096 - DNA, 782 bp, Oryza sativa
  Intron number 1 from transcript LOC_Os11g44940.2 (locus LO C_Os11g44940) derived from phytozome v7.0 (chr-ID Chr11; p os 26729153 to 26729934 reverse strand)
accactgaggtaaatcttttttaccatttttctgctttctttatgttacgatttttgcttttcacctaactctacttgcattgcatgaaatttaagcttgataagtaaatgtccatgtaatgtaatgtaatgtagatttttttttgaaggcgataaagtataggtggatcaattcatgttgattaaaaagtccgactgaagtgcgacagtgaggcctaaggaataaatgactttttgttgcattttattttcaggaatgaacatatgtagtaacctggtagtggtttccataggtagcacgcactagcaccggctaaataacatgcaactatgcaagtgcttgacacaggggcacttgctcttatcttagtttccaatcagcttagcaatatagctttgggaattgggaaagtaagtaaacctttatagttctaacatagaaaagtttctggcttaatgtagtcaaacaccatgtttttggtcttacggttgcatagtcttgaatcatttgtgtgagccggcagtttgcagggtgttactgcagaacagtaagagatatacctttattcttcaattgaatttgagtttggattgctcctaccttgtgagccatcattcagtgctcaacattcgtcttctgttatgctcttgacaagttgcagcgaatgatgattgctgaaaacaaacatcctgtagccccaacattgcttcacttcagggtgctcttttgtagtacctatcaatatacagttttgagttttgacttaggcttctttctacag

SEQ ID NO: 11097 - DNA, 965 bp, Oryza sativa
  Intron number 2 from transcript LOC_Os12g13130.2 (locus LO C_Os12g13130) derived from phytozome v7.0 (chr-ID Chr12; p os 7304453 to 7305417)
cctgccttttagctgttgcggcggcatcacaccaggtatatatctatcttgtgctggattggatcggtagtcttcttgcttgctgaattagagatccgtacgttcagttcctgttatttcagggtgcagaagaggtgttttttcttttgtatgtagaattaagctttaggttactttgatttgataagtataaatgaaatgattcaacattctgagcttgggctcaacttgtgagcattacgtgagacggtgtcattcattccattaagagaattaattggcgttgggtccgcatcagctagtctatctgcagatttgttctttgtcttgcttcatgcctaaagggaacattgcaagcttgcctatgttgatatgatttgcttacctgacttgttttccttgtataatttgctttgtgatgtccgtcgtggtttcttgcaacgattgattgtgagatggaaattcgccgtggtaatttattatagtagtatttttatgcaaaacaaaaaggagagctgttgcatgtaaacgtttctctggtgtccctgctactagttatttcagtaaaatgttgatactaatggtgtgcatgttgagtaggcatgttttttatgtgaagttaagttcttatggtaggtgtgcagcgtactgccatcaattatttgatataccatcctatgttcaatcatcacttcctttgagttgttgcatatacttgcaatggctacattctattagaaagcagcacactgttatttgtattagctgataagcaaatgacatttcaggatatgaatatgcatgcttctcatgataaacacgaaataagtaaatctttactttgttacagtgcaaattacaatttgctgctatatctactagaaaattctctttgattttaagatgaacacctaattcccttattctagctaatctgaatattccttttgtgctataggaatttc

SEQ ID NO: 11098 - DNA, 722 bp, Oryza sativa
  Intron number 1 from transcript LOC_Os12g31380.1 (locus LO C_Os12g31380) derived from phytozome v7.0 (chr-ID Chr12; p os 18852713 to 18853434 reverse strand)
agatcgagctcaagaaggcatccgacaagctcaaggtacccccacctactaaccgattatagaatgttaacagcgttcatacaagggtgcacggattcgtggattagttaccggctccgcaattttgcccaccttgagagaaatagttgtccagttaacgagttaagacagtacaatgaattcaattcctttttgtcagcatttcagaacttcagttgtgccagtgttttacaccttcacttaatcacagctgtaatcaagaatttgcttgaagaaatgaatctttattctccactgtttgttatggagcttaaggaatttcatttctaccttttgttagtaaaactaccattagtcccacataatatttggtctacgaaggctaaatgtttgatggctaatctcattcacgaatgcaatggtggtcacgctgtgtctactttgtatttatgcgatatgttagttacaatgatttaatctcagtaagagcttatgtaatttaattgttaaatcaaccactataatttcatttttgagctgtgggcattttagatcattttcttctagcacccccttgttagttttgaatttttgctgatctcatatgaatgccaaatgattgttatttacttctagttgctccacatttctttatggcatcctttgtgttgttctgactaaagagttaacacctaaaaaattttctatgtttcagtcttggg

SEQ ID NO: 11099 - DNA, 436 bp, Oryza sativa
  Intron number 1 from transcript LOC_Os10g41260.1 (locus LO C_Os10g41260) derived from phytozome v7.0 (chr-ID Chr10; p os 22104339 to 22104774 reverse strand)
gcgccgccgccgcaaggtgcaggagaggaagaaaggtgagcaaccaccctttttgtctgttcttgtatctactgttcattacttgttccatcacctgattcctttttttttactctgaaacttccaactcactgttaattcttgacgcaatttgatgatccgtgaaagcaaaaaaaaaacaaaaaaaatatctttgattgagcaaccaacaaaattggttgaaaatcccctcttccaaaagagagagaaaaatgattaaccttttgtgtgtcagtcaattggtcaacaacacatcgataacaatccacaagcaggttctcagacctgaaaaactttttactagttaggagtaattaattattccctgtttgttgcttcctgtgaagatcatgtgacacttaattgcctttgattgattaatctgtgaaggggtacc

SEQ ID NO: 11100 - DNA, 995 bp, Oryza sativa
  Intron number 2 from transcript LOC_Os09g31220.5 (locus LO C_Os09g31220) derived from phytozome v7.0 (chr-ID Chr9; po s 18779040 to 18780034 reverse strand)
ggagccattgtttaattactttacgagcagttcaggtactttactagcaattcaagtgacaaatttggttcactaatctagttctagcagtacaaacaatttcagcttttcctagttttagagttttgattctggcatgaattgtatggggaatatgattaattcctgcacactttaggatgaaggtctggtctcatttcacttgagcagttcttgcacttcttttctttcaattgcgggaatgttcagatcattttttgcttaaagtacctgattcgttcttagtttgtgtgtttgttggcctaaatctttcttccaattgcacagctctggaactcttgctgaacagaatagcatgaatgattctagtgtagggaagttcttatttttattttttgttggatcatggaattcagcactaattatagactaacagtgttcttgagttttcaggcatatctctgataggctagtgttatatggttattatggggctcatgagttttgaattttggtcacgattttcaggactgcaaaatatgcagtgagatgtgtaaactctgagatatgtcatatttttacagcatgtgtacagtattcgtcgtagttttctgaaattagtactgcatgtcctgtgagatgtgtaaactctgagatatgtgatatttttacagcatgtgtacagtattcgtcgtatttttctgaaattagtactgcatgtcctgattctgaattttcggatagatgaaaactcaaaaagctcgatcgaatagcagttttctaaatttttgttgttcaaaggagcacatcaattgaattctttttttctgaacttctgactagatatgttcgctgttgaacatacccttttttctctgtatatttttgacagaacagacatcttcagactaagactaaggtctaaattttactgaaatgattaacttctaatttttgcaggcatcagcatctacagtgtgcactcttgcaggtgg

SEQ ID NO: 11101 - DNA, 781 bp, Oryza sativa
  Intron number 2 from transcript LOC_Os11g17630.1 (locus LO C_Os11g17630) derived from phytozome v7.0 (chr-ID Chr11; p os 9826499 to 9827279)
gccaccagaactctctccaccacgctgtggacaaggtaagcattgctagatctcgttctttcaaccattacaattcaaatgcaaatttgcgaaaatagtggttgtgaaacactgagcaaaccaactaaaggaactccccccaatggcttagacttgaaaaacttgggcaggatggatgggttaggtcaaacgaaatggtctttgtatagtgtaaagaacaagagatgatattgattcttttgtttattgagcttgcaatttagttgagatcttgttggcataagaaactgatgttcgatgaccaggtaatgcttcactatcgagttctgctccatcattggggattttcacacttttgttccccacctcgatgccatatccttcctaaactatataatgctatcttcagatcaattgcacataacttctgattaagtgctgctctatttttcttaatgcattaaattctcgagtcagagcgattttagtgatcaatacaaccagctctttggctgccaggtcggcaacttcccattccattatctgggcattccgatccattataggaagttaagaaatgcggaatggaaagaagtggtcgagagatttgagaagaaattgagtagctggaaaggaaaacttcttttgttgggaggacaacttactttgattaactcagtacttagcagtctcccaatgtatatgatgtcattccttgcaattcctagtggggtacttaaaaaacttgattaccttcgatctaggttttattggcaagggg

SEQ ID NO: 11102 - DNA, 767 bp, Oryza sativa
  Intron number 1 from transcript LOC_Os09g10840.1 (locus LO C_Os09g10840) derived from phytozome v7.0 (chr-ID Chr9; po s 5917408 to 5918174)
atcgcctcttcctccatgtaagacaagatgtttgtttgtttgttgctgaattatgctactagccatgaagctaattcagagtgttcctcgtttaatttgcaccttcttcagagccctgctggtgttttatccatcttcagttggtttcttgtttctttagaataggaatttgaaaattccaagctgatttatggttttcttcttacccttttggtttcttgacatgcatctttgctgattttctctgctacttcaaagagattgaatcattcttctgctattggggtttaattttccattgattcttcttctgccgtagaggttttctcatcatgtatcttgcatctcgcgtcaagtttgaatttttaattaattgttttccaaaattcaaccatggacatatggggataattagagaaagacacgcacaagccccatcagggatcaccatataagatagtttattggttagttagggatcatggaaattgtttagccatgggctaagataaggagagaagctagacaacaaatcaccaaatactaggatatatttcttttctttgtatctttcaacaagcaacaagtagctagatcagagatggtttttaatggtcttcacataccgactcttctatctgctccattaaacaaaaagttgtactcctcctacttgctttctaatgtgtatgcaatatacctactgattcttgcttgtttcaccttctaatttcctttctaggagcaaggaatcgagcaactacgac

SEQ ID NO: 11103 - DNA, 978 bp, Oryza sativa
  Intron number 2 from transcript LOC_Os09g10840.1 (locus LO C_Os09g10840) derived from phytozome v7.0 (chr-ID Chr9; po s 5918224 to 5919201)
atcaacaatccatccaagaacaacgacgtacgttaccgcgaaaaacctgatacttacccagcttctttttcctcccaaaatacactgatgatgatgtgtatatatgtgttagtaattcccttttcctttttccatttcgtacaccataatgttttgtcccctgccttttcctaggatatacgtgcgtgtgtgtacatatatatgtatggatgtatctctgattctttttcttctgattcatgtgtttttcttgtgttaatttttgttctctttttcttcggatttggtatttctttccggtgtgaggagtgtgacatgtaacagactctctgacgatgaccctctctctctctgcaaagaacttgatcttaaagaagctataaatattccttctttccatttctcccccattcctttccatttccaagcttctcatgtactctactgaatcatagccccagaagcatcccttccaactgttgttataccaccagtactacctgttgtgtcctttctctcaccgtgcatatatgccagacatggagtgagaaacatatctagagagagagattttgtaaacatgtactccctccatttcgaaatatttgacaccattaactttttagcatatgtttgaccgttcgtcttatttaaaaacttttgtgaaatatgtaaaattatatatttaacaatgaatcaaatgataggaaaaaattaataattacttaaattttttgaataagacgaacgatcaaacatgtgctaaaaagtcaacggcgtcaaacattttgaaacggagggagtaattaataagcagttttactgaagcaagagtagcttagcctgaactactttccagaagcttcctaaaagtactgaaccaaatagcctttctgaatgcttacatatgcacattagttgcttgctaattgcatggtttaatttgcagaaactctgaacatcttcccttcccagccg

SEQ ID NO: 11104 - DNA, 789 bp, Oryza sativa
  Intron number 3 from transcript LOC_Os10g40610.1 (locus LO C_Os10g40610) derived from phytozome v7.0 (chr-ID Chr10; p os 21703492 to 21704280 reverse strand)
ttgataccttccagaatacctggttgcattcagaggttcaaagctttcttaattaactcctgctcaatcactgttccccgaaatcatgggaaagtgaaatcatccttagaggggatatcccctcgtttcgtgcatgtcacctaaatagtcaattaaaaacataaaaaaaaattggcaacctagattaatatgaaatatatcactccacaaacatgcaagtttaaatttaacttctacaaattataacaaaaataacaaatatagttgtgaacatgcgataactattttcagtttaatttgttatttttgttgcaacttactccctccgtttcaaaatgtttaacaccgctgactttttagtacgtgtttgatcattcgtcttattcaaaaaatttaagtaattatttattcttttcatattatttgattcattgttaaatatactttcatgtacacatatagttttacatatttcacaatttttttgaataagacgaacggtcaaacatgtgttaaaaagtcaacggtgtcaaacattttgaaacggagggagtataaaagttgaatttggtcttacatgtttgtggagtgatatatttcgtattaatctatgttgtcaattttttttcaaattttttgataactatctagataacatgcaaataacgaggggatgtccctcgagggatgaaaatccacatcccgaaatcctgctcaaaggcatcatgtactgaatcaatgtgctaattgtggatcatatatacaataatcaggtggattgcatccaag

SEQ ID NO: 11105 - DNA, 412 bp, Oryza sativa
  Intron number 3 from transcript LOC_Os08g40930.1 (locus LO C_Os08g40930) derived from phytozome v7.0 (chr-ID Chr8; po s 25896548 to 25896959 reverse strand)
atccctcttccgtacagtacggtatgccaacgaatcagtttccttttttttttaactcccacttgtttccatttatcctcttttgatctgatacccgactacccgaggcagtcattatccgattatctggttgctgaatgtacaactaagatttgcatctttttttctaatattgtaattttgataataataataataatatttgtttgcaagtggaaaagaacatgatttttttttttccgaaggaattccatttattcgttgctgctatgaagtggaattgcatttatgtgccttgtaaaaaaatgaattgcattaatttgttgttgttactgtctatgatattaaatctcacagtaaaatgtttgcatttgcagtttgattggcaaggtgacctacctctgagatatcc

SEQ ID NO: 11106 - DNA, 447 bp, Oryza sativa
  Intron number 3 from transcript LOC_Os09g32130.1 (locus LO C_Os09g32130) derived from phytozome v7.0 (chr-ID Chr9; po s 19180600 to 19181046)
caagacaaacagcttgatcacgcggcttaaattcggtattcattttcttcgtatttgatcagcagtttaagtcatatgtagaattgcatctccaaaaaaaatagagacataacattaataacctcaagtaagaagctggcctttttccaaggtttgatcactcattttgagtattgatgaatcactgatggaatatttaccctgtttggatgggaggatttccgtagctcaacagtgctatagtatcaagttgatacatcatgtagttggcaaaatcaaataaaagaaatggtataaacttacagtcccttttcttagttagaaggtggatatgttttggagcttgggtgcaagtagttctcagtttagtttgttctatgcctagaaattataacctcaggctatcttatttattgactactattcaatgcagggaccatacttatc

SEQ ID NO: 11107 - DNA, 1008 bp, Oryza sativa
  Intron number 2 from transcript LOC_Os10g34200.1 (locus LO C_Os10g34200) derived from phytozome v7.0 (chr-ID Chr10; p os 18174021 to 18175028 reverse strand)
ttactgtggaagatcttttgagcatagctgaagaggtaaactatattatattttatcagtgttccaatttttactttcttttttgcccccaggtgctgctatttagcttgcttatattgtgtgaatattaaatcattgattcaactccagttaaagtcatgttaattttaaactacctaaattgtttgcacttgacatttagtatacccttctttctagcttaatttgccatgtcaaatgtggaagatcaaggttttattgttgtgcttatgtgcatggaacaactacagtgaagatccgatttgtaaaagaagtggataaatatatgagccttatggttctatcgttgtgtattgctttaatagttgtaatttgactagaggaggtgatatgttgttaggcttgcatcttgtcaaatttgtggatgtaagttttgaagacagaaaacgtgaaactatagataaacctatcttcttcaacatagtctagagtttggagccatggctaagaataatatggtatttctaactctgctgcagccaaaatgttattcttagaatcatcttttcttgttttttaatgacagcttctatatgggattttagaccatttatatgttttttttttgggtgcaattgaatgttgtgttgaatagtcccgcctattcttgtagctcttgtttggtttagacccaaattttgccctaccatattttggtagttgtgccattaccaaatttgatagtagtagtagtatagaatttgtactagtgtgggcaaaaattggtagcaaatcaaacatctttgtgatactattgtagttgccaaaaattttggagggtgaaaattggcttcaatccaaacaagcccatattttccatttactgattattttatttttttttgttgcaaacagcagtaatgtgtaacctttatggaaggtttttttttgttttaaaaacaagctggggttctgtgaagatatgctgatatatttgcattttgcagt

SEQ ID NO: 11108 - DNA, 862 bp, Oryza sativa
  Intron number 1 from transcript LOC_Os09g34970.1 (locus LO C_Os09g34970) derived from phytozome v7.0 (chr-ID Chr9; po s 20373469 to 20374330 reverse strand)
ccctcgtccgcggcttcaacaacctctacgccgtaatatcacgcccaatccctccccctcccctcccccccgaattcgtcgatagacctgtagtttccacgaatttgagggaattgtggtgtgtgctatgatggaggtctgaaggaggagaggagattgagcaagtagaaaattacttggttttgtaacgaagcataggcgattcacactaactatttccataattggggctcgtttctgtgtgtgcgcgcgcgctgctacgtgtgttatgtagactttgttttgtgatgtggggttgtatgcttttgaacctttccgaatggaggtgtttcttgtgcttaatacctatttatttcctctagtattatgcctcttcggggatgctaattgaaggtaccgggcttgcagatgtttggctcatgtgtaatagatagagaataaggcgtctggtttgtgcaaaaacaatcacccattatctcgcaattatctcttcctatgttccacttgttgtaattgaaagtgatacttatcaaacaagtggatgttgtttagtgattttgtgatggtttattcaattgaccttacttttagtccatgtaaaataaattttcgttaagaacttttcagaaaagatacttaattgtgttttctaattcgtgataaacaagataaaacaggttccagtacagtgtcatgattttcttttgcagactgttggtgcccatatctttaaactgccccccccccccccttttctgtctttgttattgtaccactttgaattgttactctaaatttaggattgtctcaaccacttcattgtcaatacttaacttgcaggaaattgatccaaaggtcgaaa

SEQ ID NO: 11109 - DNA, 991 bp, Oryza sativa
  Intron number 1 from transcript LOC_Os12g39230.1 (locus LO C_Os12g39230) derived from phytozome v7.0 (chr-ID Chr12; p os 24115687 to 24116677 reverse strand)
ggaggcccccggctgctcgccgtggacgtcctcgggtacggctacaccaccgtctcccacggccaagggagttcgtcaggagtatggtctctgcttctatctgaatgtctcatggtttggacgcaaatctctgaagaaaatccaaaaccaaaacttttgaaatttgtatttgcatggtgatgatgcaatgttgcacaatgattgttgagaacacttgaagcaagatagataccttttggatgacgatagagattatactgcatgatcatagtgcactgtataaaatccatctcaatgatgaagatagcagttgataggacaccgacagtttttgttgcttactgaactgtcttatctcccctgaacttttttttccctatccaaagtgatcaacttgtcaatcaaacactccatttgctgaatgccagaaaagggccagtggaatcagcaaccaaatttttgcaagaatgatgaacttctgtataacacaagcatgcatgctccgagttcataggttgagacatgctttatgtcaatcataacccttgaggacagattgtttctctatgaatatattagctcacatgtgccaactcgattactaaactccgcttgaatcagctgtgaaataccaaagtcctccattcgaatcatccatctcataatttgtagagtatatatactggccatttaactccaagtatgctatcatcaagttctgaagctgcaaagttttgcctaacggcccaggcgcccagcaaacaaacctaagattgcatcttcgatagatttacaggctttgagccttatgagcttcttattagatagagctatgggctttgagcccaaaagagcttctgagaactcacgagctagctaagtttgtaactgctaattgacatgttcttgtcaaaaaagtttttaagtggccatgtttagtaacaggactaatctagaatgcatactaatatacttgtaaatattattcagt

SEQ ID NO: 11110 - DNA, 436 bp, Oryza sativa
  Intron number 3 from transcript LOC_Os10g02300.2 (locus LO C_Os10g02300) derived from phytozome v7.0 (chr-ID Chr10; p os 824038 to 824473 reverse strand)
tgagctcaagaaccgcggccacgaccctaaccttggtacgagtatattatattctctctctatcacctctcaaactcaactttacattgtatttcctacttccagtagctcaatcgtacatccatcttattacataagtttaatgatataatcatacatccatttcatataagtcaaaaaaaagtttcttcaacatatagtttttagcttaaaagtgtaagggtgacttatgactttaaaaaaatcaaacagaaaaaaatatctttgtttaggtttagatttttgtgatcacagactgatttataagtctaaacaagagggtctaataagatatatattccgatcttccaatcttaaaaaaattagtaacttgtaactcattaattcactcaatgtgtttaattaatttgtactaattaatgtggggtgatgaagg

SEQ ID NO: 11111 - DNA, 957 bp, Oryza sativa
  Intron number 1 from transcript LOC_Os09g13600.1 (locus LO C_Os09g13600) derived from phytozome v7.0 (chr-ID Chr9; po s 7901764 to 7902720 reverse strand)
ggtcgtcgacaccaccgaggaccgcgcctgccaaggtagtagagcttgcaagaattatttatttgttaacatatacgtgccaaacaattctacccaaaaggcttaatctgtgaaaagaagctgggtaatctactcaatacttgacaattaaggccctgtttgtttcagcttaagattgttgtaatctagattattaaatcagattactctaagctggattataataagctgacataaaataatctacgagttatttgtttctctggattattagaggcatctgagggtagtgggtctttagccactcaataatctggaaaaagctcctctagaggagattattggattatagtaatctggcttatagattataataatctagcataataatctacttgtttgtttcagcttactcctaataatccagattataataatcctaagctgaatcaaacagggcctaatatgctgcactgtttatgttaatctgtaacttggattaatctgatgttacatattctgagtgcctgggtacaataattatcactattcactagtcactagacaatacattgtgaccattcgatggtatgtggaaggtgtaatcgcttttttttttccttataaaagatgtgctggctgtaagtgttgccattttgattaagactctacgttgctatttgcgtatcagttattagtggaacttttactatctaactgctgtactgtctgcatgatactagccacttcaatacaggccatcatatacaactaggaagcacaatttcttgtgtgctactgacaaataaaatacgaaatacgtttcgatgagatttgtttacagcttataagtgatgttctttgttttacaccatttttagtcattgtacaaaaagtaggctgaattttttcttaatgctattcttttcagcacaaaagtccctgttgctgctgtgc

SEQ ID NO: 11112 - DNA, 692 bp, Oryza sativa
  Intron number 1 from transcript LOC_Os10g27250.1 (locus LO C_Os10g27250) derived from phytozome v7.0 (chr-ID Chr10; p os 14302265 to 14302956 reverse strand)
tttaaaatattcaggatataagtatattcaccaaggtatgtacataataggaatcaaaggaatgacaagaaagaaattaggagctaaagtgctaataaccttattagataaaagatgggacacaataaacaaagcatctttaggctatctagaaggagatatgaatgaaaatatgttgataacccatatagcgcctgatttaatgatgcctgtaaatgaattcatagataaaatgagttttggtttccaaacaaaaggatacgaagagtttaagggaacaaatttattaataagtatagaatttataggaagattgactaatagaagtgcctccaaatacaaaatcaatgtaaatgatgtgatagaaaaaatgcattctaaaggaataaaattcatgagccctttaataatagactctgaagaaagagcaggagaaaaatggccaattagtgaatttataaaaaataaaaccttgagtcagcctgaaaacttcataagttaccaagacagcaaagggaatgttagtattagatttacaaattataaaaccagagcttcggatgatttggatgcagaatcatctgacagagatattatagataacagaagacatattatatctgaattgatggaaaaattagaccatgaaagtgaaataaaatattatgaagataaattaagagatatagcag

SEQ ID NO: 11113 - DNA, 508 bp, Oryza sativa
  Intron number 2 from transcript LOC_Os10g27300.1 (locus LO C_Os10g27300) derived from phytozome v7.0 (chr-ID Chr10; p os 14332493 to 14333000)
cgaggggcaagcagcagcagctagcagagcaagcggtgagtcctagcccggtgccggtgttcatactcttcgtctctgtttcagtaatgcatctagatgatgtgatttataagaattgagcttcgcgattcatagttttgatttattcgtagattttcgatggagaagaaaacaatgttgttaaattattatgcaagcaattcaagtagtaccaatcaaactgatgagaacagaatggaatttttgctgattgtgcacaaaataagaataacaataggtaagttttgtcacgaaatgagagatgaaataaggatggtatatttgttggtaaggttataagatcatttcaaaagaattggttagataaatttaattggttagaatatagtgtcaaaaaagactctgcatgttgtttctattgttttctttttaagatataaatacaaacccataaattaacttggttcttttaggtcgaacctaccctctatttctatcctgtatttgc

SEQ ID NO: 11114 - DNA, 583 bp, Oryza sativa
  Intron number 2 from transcript LOC_Os11g32260.2 (locus LO C_Os11g32260) derived from phytozome v7.0 (chr-ID Chr11; p os 18592751 to 18593333)
ttgagcaggtaacatatactccctccgtttcgaaatgtttgacgcagttgactttttagcataagtttaaccgttcgtcttattcaaaaaatttaagtaattattaattcttttcctatcatttgattcattgttaaatatatttttatgtaggcatataattttacatatttcacaaaagtttttgaataagacgaacggtcaaacacgtcttaaaaagtcaacggtgtcaaacattttgaaacggagggagtatttttttggggggtaaatcccgcctttggaagtttgtccttgtcagcaattgaattttgagccgcttggaggagtggaattggaactgcggcgggtaggaagcaatgtagtactatctgtaaccatattggtgtttctacaagcaatttctggctgacaattgtaggagttgaagttatagaagctattctatctacatccaaaatggtcaattctgcaatgtcgggagtccttttttggttggataggaagcaatgtgcaaccacttgtagacacattgactgaaattgaccaatggtttctttggtttttaggcattcttccagag

SEQ ID NO: 11115 - DNA, 351 bp, Oryza sativa
  Intron number 1 from transcript LOC_Os12g29410.1 (locus LO C_Os12g29410) derived from phytozome v7.0 (chr-ID Chr12; p os 17461696 to 17462046 reverse strand)
ggccattttgtttgttcggtttgtcggtctcttcggttagccaggcatgatgaccgaattgatcgtagtatgttcggtcttttgtttttgggttaatttaatggtattcagataaatattattacaatttgattatttataattatgccacttatattttataaaattaaaaccatgtcatcgccgttaagtttttcagcttctctttcatctatacatgggaaccatccatcagatttatcttttttcttcatcctcctcttctattctctttccatttctcttcaccatttcttcgtttcttcttccttcacaggtagaggagaggagtggggcgccggtgctccggtg

SEQ ID NO: 11116 - DNA, 556 bp, Oryza sativa
  Intron number 1 from transcript LOC_Os11g30410.3 (locus LO C_Os11g30410) derived from phytozome v7.0 (chr-ID Chr11; p os 17204535 to 17205090)
cagatccgcgtctggggcgttgacgcccagaagaggtatccccggctccgcctctctctctctctctctctctctctctctctctctctctctctctcttcccctaaaagtcccgggttttctttcgctcttcgcttatgtggaggaaattttgttgagttgatgcttcttctttttcttctcttttaatcgcaggttgtttcttgcagaaaaggaagaaaagaaaatcattcttttgggggatttcatggtttatgttagaacgaatggctgttgtttgtttctttaaaagaaaaacttgagcccgaagtgtttgtatttttgaagtgaagacagagatatccgctgttttcgtatcttgtgtctgctattgaattttcctaaatctttttttttgagcttgtttggtgctttccttgaatttctcgtaactttcacccccaaattattcttccattccatcgtatttgttagcttcggaaccaaaacttttgatgtctttcatctgtttttgactactgaatctgtgctgcttggaacaggctaagtaaagctc

SEQ ID NO: 11117 - DNA, 907 bp, Oryza sativa
  Intron number 2 from transcript LOC_Os11g30410.3 (locus LO C_Os11g30410) derived from phytozome v7.0 (chr-ID Chr11; p os 17205115 to 17206021)
gtactactactgaggtaggtattttaagattttcctctccaattgttgcgttttgtttgtagtttacaccgcgtgggcattcaaagcattgaaacgaagttgcattgagttatggagtaataggggttagtttcatgggccaaattgcccatgtttacctgttgcttttagttcgttattataactcattagttttctgggcatttgattattgctctgttgttcttgtagactttctagtgctatggatgcattgcctgcgagataaaatctcaatgttcttatttactttttaggctggctttttctcttttgtaggacccctgttgtaccatctgttaaagttaattgcttttagttctcaacgtttaggctcaattttctgtagataaattctttcatttatttatgctagcttacgttgttccaatatatgtctatttatccttttcttttacagtcatatcccatgattatctgatcaatgcacttcgctttgttaagaatatgattgctattatactatttactacttccttcgtttcatattataagactttctggcattgcctacattcatatatatgttaatgaatctagacatatatgtgtgcctagattcattaacatctatatgaatatgggcaatgctagaaagtcttataacctgaaacggaggtagtagttaaagtatatgccttagaaactagatttctgtagtcatagagtatcataagcagctgcatcctgactcaattgtatattcatctaggtacttaagtacctcagttcttctggatatattgataaagcttaactcataatcgaaggcagccttatacactaaatgccatttctctcttaccctgtagttctgcaagaatattgttctagcaggagttggcag

SEQ ID NO: 11118 - DNA, 629 bp, Oryza sativa
  Intron number 3 from transcript LOC_Os11g16670.1 (locus LO C_Os11g16670) derived from phytozome v7.0 (chr-ID Chr11; p os 9236388 to 9237016 reverse strand)
gtccacttaacaggtttgcacgtgaaaatagcatgttaattcacccacacacaaaaatagccgcccaacttttaatccaccgtcgccgccccacacccactctcattgcgtgctatctcctctcatataccatcccacaaccactcctcccatatccctctccgccccacacccggcctctccttatgtgcctcctcctcccactcctcctatctcccggcgaccacggcgggtggcctcggctagggcggcgcgaaggcagcggcatcgggttagagcgggggaggcagcggagcgtttatccatcaccggccaccgtggggaggctggatccgtcgccggccaccacggggaggccggatccgtcgccggtcaccgcggggaggcctgatcagtcgccggcgaccatagggacgacaacggtgacggtgtttttgattttgtttttgtttcgattttttattttcccatgcggacggtttaagcacctgcactcgaaaatcgcgattttcacggacacctcgttccagacgggtggaagatctgcacgcaaaaactgattctgaccacacagaaaaatcgttgttgtactagtgtttttctttcctgcctgcgtcgcactggaccgc

SEQ ID NO: 11119 - DNA, 642 bp, Oryza sativa
  Intron number 1 from transcript LOC_Os11g12580.1 (locus LO C_Os11g12580) derived from phytozome v7.0 (chr-ID Chr11; p os 7062857 to 7063498)
cggagattgttagcggttagcatgctggaatgagggtgtttattcccaggatcccattgagctcctcagaagatctctcacttcctttcaagttgaaaaggaagcaattcccaatacaactcagttttgcaatgacaataacaaagcacaaggacagacaatcccaaacgttggggtttaccttcctgagcctgtcttgccgcatggctagctgcacgttgcattgtccaggggagtatcaagggagaccacagtagttctgtccaacccgaggaaagaagtcaatgacacaaaaaacagcactaaaaacatcgtctatacagagttttagtttaatctatgttggtaagcctttcaatcattctttttctgtcttgctgaaactgaataataattgatttattcgagaaaccgacattatattagccccattttagaaaggagaaacatgacacatctcattctgtcgaaatatatatagtgtggtcctactaagtactagactaacaaatttggctgttcatttcactgttgtctatactttattaagttcggctgttcatttcactgctgtttatagtttgatttaatttgtttttcattcaagttacagtcaccgaggtttggattgctgtgttggca

SEQ ID NO: 11120 - DNA, 984 bp, Oryza sativa
  Intron number 2 from transcript LOC_Os10g27230.3 (locus LO C_Os10g27230) derived from phytozome v7.0 (chr-ID Chr10; p os 14289589 to 14290572 reverse strand)
cggtacaggtgagtaactcctcgagactctgaaaatcttagttgaatcagatgagagctgtggattgtgtagttctgcttgcttgattgctaaatgttgcgcactaaacttattgctgaatgttgcgcactaaactttgaccaagcaaggggaattttcgtagctttggtcaggcagatttctatgtgcttatatagttgttaaagtttggggaatgctcatttattggctcaactccttcataaatgaagcatagttggatgtattcagattaaatggtctaataagcttatcgtttgttttgtctgaaaaatggagccttagagattgtaaaatttagatgcggaaacatctatactgctgagttggaaacatagtttgatgcatatgaattgaaccgtttggtacatgtttttcaaattgcattatgacatatcaggaagcacagtttagctaatattaattgctatcatgagtgattcattgaaaagtgccattaattgggtggtttctgatgataaaacaagtgttattagaactatgggacagtagcaagtatttttgatatggggtatgttatgatggcttgagaaatgttgtcgtgcaagaatgttagtagtatccatcttcgatggaataggtatataacacactttatggtgttctgttggatcatcctatagttcctattgaaaggccctgttctatgagttctatgagtttctcctcattgtctgttgagttgttgtagaattggatccattacgctgataataaacatgattttatatgctcaagatgtgcaaatagcactgatgtacacgatgcttatagctagtttctgtgagctgataatgcaaaacactagctctttaggtggcctttgttggtttcaacacttccagttccaatgggatttggttataatgttttgatttactccttgaaggtaccgtatacaaagtgatcgaaaagtcgcaatct

SEQ ID NO: 11121 - DNA, 986 bp, Oryza sativa
  Intron number 2 from transcript LOC_Os11g05120.1 (locus LO C_Os11g05120) derived from phytozome v7.0 (chr-ID Chr11; p os 2241251 to 2242236 reverse strand)
tcttgacgctatcaaaaataccacagctctctgaggtttattgagtttttgctgctccgttagcttttttaaattcattataaaatttgagaccaaagacatttcttatgctatatctcttaatatggtgttagcaacagaaaatgctatagagttaagattgattatcctatgctatatttgatttaatggaattcacttatcttttgagcatataaatactagccctttctttatgtgtgcaagctttatgcagtcattttgcccttgtttatggaagaagcaaaacttactagaggcaccaatattattctacttccctctctgtagtcaacagcaaaatacaatatgatctatagtatgatattacaataggaaatctcaagagtatagcaaatgttttctttaaaacaatcttgatcacatttgatttcattttaattttaatggcactggttcatgtacttagacagccccaaaactagtgagccaaaccaaagtataaactgtattttggtgaagggtacactaacgtgggacagcccaactggatattacataggtacacaatgttgttgtgttcgtgtatagtgtctatgtacttccatccctcttttcatgctccttccattgctgtggttgtcaccatatttttgtactttgagttcagtaagcttcatgttcgcgggcatacttgtactattaaggtttccaatacaacttgaactgaggaatgaccctattatcattttttaatacaatcgtgacttgagttagatgaatgtccaaagagcaactttatatgccttctgcagccaataggtacatggtttagtacaactagtgaatgctcataacgatttccttttcttttatgatcttgactgcccatgatactttgcctgccatttctttgaactgaactatgacttaagttatttcagatacagatgggcatcattgttttccttggtgcaggatacaag

SEQ ID NO: 11122 - DNA, 865 bp, Oryza sativa
  Intron number 4 from transcript LOC_Os11g40540.2 (locus LO C_Os11g40540) derived from phytozome v7.0 (chr-ID Chr11; p os 23722142 to 23723006)
tatcaggtaagaatgctgctattagcttcaaaaactgtttcagtggatgatgtatcattgatagatctgagtaactatatgtacttactcatttttacttgagtaatatctagttataatttataactgacatttgacaccatgacaatactaactgattgataggtctgtgaattaggaatcattggatttagttgtggacagacactgaacatgcattatagtgaccagtcaaattagtcttcaatatgcgaggctgtttgtttgccgtgtatccagctggcccaagacaagtaggagatttaattagttgggacgtttcattattttcttcttaccttcaaaatctatgatataatgtcttatataatgaaaaccttccagattgaaaagtaccaagtatataactaattagtaattaggcatgcttggttgacagggatttctttgggatttaattctatttcaaacttaaatttaatcctgacaatctgaactctaattgccctacctaaataggctcttgataaataacttgagagctaagacaagaaagggaagtaaattctacgctgtttcaggtactaaagcatttctagctaaaaaaactgatcctaaagaagtttgtgagttgtgacaattatggacatgacataagagataaaacaagtgagtgatgaaaaatttatgatcatgatatgtcatgcaaccaaatgctgttttgaaggataaaaataatcaaatgttgataggcaagactaaagttgtgagaatctaatcagtgtttgttgtttatgtataaattttcattgtaaatgtgtcttgacatcagatagatctgcaggagaaatagctcttattgcgg

SEQ ID NO: 11123 - DNA, 548 bp, Oryza sativa
  Intron number 6 from transcript LOC_Os10g30970.1 (locus LO C_Os10g30970) derived from phytozome v7.0 (chr-ID Chr10; p os 16090513 to 16091060 reverse strand)
aagctctggacatctacagaagaacaaggaatctggtatgtataatcatcatgtacctttattttgtttttattattacctagagttacatgcattttgtttttttccttctgtacgaaggcattgggagaactaaatgatatctagaacataggacaaaaagcctatctgatttctataatctttgtcagttttaaactcagtgggaattggaacatatagctaacagaggcaattatctttaccttatcctgtaactgtttacttttcaccgctgataattttgatgccacaaacacatacttttctatctattgtcaacttgaaagactaggctgatccataatatttcctatattattaattagtaatctggagctgttctcatagacaatggaagagaatgggttattgttgtgaacatctttgtgcctgtttgaaattatcatgtatcttttccttctttctcgctaaccttatctcttttcctcctctcctccacacatgaaccagccacggcagtgaaaccaacgggcgaacgcgttgac

SEQ ID NO: 11124 - DNA, 678 bp, Oryza sativa
  Intron number 4 from transcript LOC_Os10g30970.1 (locus LO C_Os10g30970) derived from phytozome v7.0 (chr-ID Chr10; p os 16091368 to 16092045 reverse strand)
caatagctcaagtgaagtccgacgttgttgttaaggtactcttatcttgtactgtattttcagttttgattcataggacactttttggcaatactttggtatgcaagtcgccctgttaaactgaaagctctgaaccatggtttgaagcgtcgattgaactcctaagtcctaatattcgttctcctttatatatggctacaacttattatccattattattttgaaaaataactcgagctatacaatttgtcgatttggacatcataattcataagccattatattttgtgctcctcacttatgcaattttgcattgttctgttagtccaacattctattatgccctttcctttcacattggtctccggaaaggctctaagtcatttgatgaagcatgtgctgctggttttactgaagagagtggaaccttgggagatatttgggagactgtttctggcagtgacctcatgttgctgttgatatcagacactgcataggttaacttaggctctagctgcatgattttagttgccacttgatgttgttacctttaccaatgcttgtttgaattgtgctgaatttcatggttctgttgtttcatggtcctgtttattaaattgaatctccaatgtcacatgtcatctgccgtcacacaatcactccttttatcctttgtag

SEQ ID NO: 11125 - DNA, 632 bp, Oryza sativa
  Intron number 2 from transcript LOC_Os10g34790.1 (locus LO C_Os10g34790) derived from phytozome v7.0 (chr-ID Chr10; p os 18502792 to 18503423 reverse strand)
caggagatcaaaaggtattatataaatacatatataaaatggaaaagtttaaggatttatggcttttggctcagtttgaaacagattattgaggcgattgttgctgtggattatcattttgataaatgaacttaacatataacttaaaataagtagcttaagcaatacagtggaagataaataaatatttatcttggttatggggaaaaataaatattttgataaataaacttaacatataacttaaaataagtagattaagcaatacagtggaaggttttttttttttgagaaaatgtatttttcaaagcgtggagaaaataatccattcaaaaatctggtaaatgatatgaaaataactaagcctaatgatctacgattttccaccctatgtatctatgacatgtgggttctggttctccatgtcacacacataaatggcaagattgcaactactaatggagtagcaaatccctaatatatataaaatgagtacttctatagtgatctctgtggattttaaatagctacttttgtatttccttatcatgaccattttaacagcagtgatcgattcatagtaaatttgcaagaaaatttcaaacttagtgtctccaaatcacgtgatgcag

SEQ ID NO: 11126 - DNA, 781 bp, Oryza sativa
  Intron number 1 from transcript LOC_Os10g25030.1 (locus LO C_Os10g25030) derived from phytozome v7.0 (chr-ID Chr10; p os 12815900 to 12816680 reverse strand)
cgctcgacgtgcgccgcggcgcgccgggatcgacggtaatggcacccctcctctcacttttgctcgtcagatcgtacagatttacctgttctgtcgattggagaacatcagaatcagtcatatgaattagtgaaatggtagtggtaaactggtaatgtctagagcaccatcagaatcagtcatatgaattaagtagtgaatcatatgaattaactaattaagtagtgaaatggtagtggtaaactggtaaaaacaggctggcacaaacagagcagaatagatcaatggcatgtcaaaagacttggacaatttactgaaactgttttacactgaaaaattgctgccgaactatttgtgatttgccctatcaaggtgaacttgcaaacttttagaagccaagatccataatccaactcttcggagcaaattatgacttttcattatattggcaatgctcaaattagttcatttgcttccaatatcgaaatggaaacaattggtctgttctagagtttgtacctcattcgtgattcttcctatcactcacagattttgtttcctctccaaaaacaaaaaaacaaaatcactccaactgaacggacacaattggagtggccaaaatgatcaacagcattcaaattatgaaactaatctcaccacttgaacacctgaattatgctccctagtgctcagtagcttagcgtggtagaatttcttgagttctgcaaggaatgacaaatggagttaaattattaatttttcttgtctacagattgatttc

SEQ ID NO: 11127 - DNA, 617 bp, Oryza sativa
  Intron number 1 from transcript LOC_Os08g45010.1 (locus LO C_Os08g45010) derived from phytozome v7.0 (chr-ID Chr8; po s 28250411 to 28251027 reverse strand)
tcctcgcctcccatccgctctcccgcgatatccacgtaaggatcttgtcccccccctccctccttcttacttactgctccctattagatttgattagaccagatgtacgtgttgtgttgacgagggaggggaatacctagtttctttttctttccccccctttataagatgtaataataagatgcgctttgctgctccgctcagaatctcagatcagatgcccatgtatcatccctcctgcttccaacttgcactcctacatccttgcgctccaatttctaagggatcgatacaataaccatgttgatacacacacacacacacacacacacatatatatatatatatatatatgtatgtatatgtatatatatatacatatacacatatacatatatatgtatatatatacatatacacatatacatatatatatatatacatatatacatatacatatacatatatacataaacaaattaaacgtaatcttactataatcatcttcattcatatttacttcttgcttttattttatttgcacccccaaaaactaactgaaacgtaatctttcgattcgatgttgttgcagatagagtccctctcattaacatttc

SEQ ID NO: 11128 - DNA, 511 bp, Oryza sativa
  Intron number 1 from transcript LOC_Os09g16560.1 (locus LO C_Os09g16560) derived from phytozome v7.0 (chr-ID Chr9; po s 10162325 to 10162835 reverse strand)
gggatcactgtgagaaccaaggaagaggaaaacgggtagggatgacaactgcatgaattttgtcggcatgatatttgatgtcatgtcgttcttttttataatcataggttgtatgcatcctaactatgtagagcgcaagaatgatgtttgagtaattatatcattttgatgtattgttattaaaaacagaaaaactagactacggcattgcgtggatgggatggttaatagaactgagtctccccatcccctttttcttctccactcttgtcttatcctctcttcccactcctctcatccccaccaccaaccagcaccttgctacagtgctccctccatggtttggccccctgtaccttccttcttcacctcctcctccaattcaccccctaaggaccacccctccatcatgaactttccatccctctttgccatgaaaatctgctcgggatgatcgttgtcgggttggcatcaagagcttcgctgactacgccaccccccgtggccgcaa

SEQ ID NO: 11129 - DNA, 668 bp, Oryza sativa
  Intron number 1 from transcript LOC_Os11g04000.1 (locus LO C_Os11g04000) derived from phytozome v7.0 (chr-ID Chr11; p os 1614906 to 1615573)
aatttcaatcaggtattttatattcttgtttaccaacaaaattagcatgttaacatgttgtgtctaaatagaatagacaaaatgatactccatccgtcccaaaatataacaacttttagcattaaaaatttatcctaaaatataacaacttcttcaccaacatttccttctcaaccaattacaacatctctctttaattttacctacttcttatatcctgggatggagggagtaagtatttcttatctaactccacttggtatcttcttatatgatttattcgagtgaacggatacaagtatttttcttattgcatgcattttgtctaaccaagtaaactcatggtatatgtaactctatatctaattggtgtggtaagtagtaacctccctcacttaaactcatgatttcacaaaatatatcgtattttttttaataaaggtggtaccattaaattgaatttgtatttggaatttgttcacacaatcatagctgcttgttacaaacttacaagaaatgatcactttcaaatatacttaaatgtctccatgccttacaaaatttgacaaataaaaattgagaggtatgtgttaaagaaacatttaggaattatttctaattctaacattgagatatttgatttttcttaactttaacagggataaatc

SEQ ID NO: 11130 - DNA, 727 bp, Oryza sativa
  Intron number 1 from transcript LOC_Os12g38440.1 (locus LO C_Os12g38440) derived from phytozome v7.0 (chr-ID Chr12; p os 23562731 to 23563457)
gaaggtgatcggaacctctatctctctctctctctcatcttgtttgttttgtgggcgactgttcttgccttcttggttggggatgatcagacattcagaccatcagatgaatcgatttctttgtagagcagttcttgatttatttatttattttgcgctaggtagtagatcggaggggttcatatgattcttggatcttttggttgatttgatttgatctttgttcttcacatggatgaagcgagttttgtgtgtgtttgagcctttgccctttgcttctctgtctgcggaagaaaatactcgtcttttccccttcacttgttcaattttttctcagttttggtggttagaaagaaaatctttgtttgcaaacttgattttctttttggaatgctcatctgcaacgagttgcggatttttttgttttcttgctgctctctgaagagcaagtgcggatcttgcattctcggtcggatctctgcgtttctttgcaaccatcgattccactgctttgcttcttgtaggtttctttggttcgatggaactcgctttatgcatgttctttcacttctgttcttgtgaatccttcgatgtgactcctgcggtttttttcaactatattattttgttttatgtgctgttgatttcccttccagtttactaattcctactgcattgtttaatctttacaggtgggcttcaggactggtggtgataactggctgtt

SEQ ID NO: 11131 - DNA, 751 bp, Oryza sativa
  Intron number 1 from transcript LOC_Os11g24140.1 (locus LO C_Os11g24140) derived from phytozome v7.0 (chr-ID Chr11; p os 13259720 to 13260470)
gaaaggtcttcgctgctggtgacactcttggtatacacagagacagtctcgctctatatatcttctctctttatactactacctccttccctaaatgtttgacgccgttgatttttttaaatatatttgaccattcgtcttattcaaaaacttttgtgaaatatgtaaaactatatgtatacataaaaatatatttaacaatgaatcaaatggtaggaaaagaattaataattgcttaaattttttgaataagacgaacggtcaaacatattttaaaaagttaacggtgtcaaacatttagggatggagggagtatatataattctcgatgatatatatatcttttccgctctacatagctgatcagcataagtaacgtttttcaagccagttatatcagttaaaacgagtgcaaattaatagtttcttatattatgtcttgttgccaacacatgcgtccatatacatctaagacgctttcttttagttgctataagttatgccagaaggttgcaatggtgaaatcatggttgtatgacttcacacatcagaatttaaattcccatgtccatgaatataaccgcgtgcatatttagttgttacggagatcggaagttacacttccctttctgtaaagaacaaaaatatatcactcatcgtcctgactacactgctgtctgctctctgcacatatatatatatatatatgcatgcagttttcaactacaaaccgggcgcacacaacgtgctg

SEQ ID NO: 11132 - DNA, 747 bp, Oryza sativa
  Intron number 2 from transcript LOC_Os09g37510.1 (locus LO C_Os09g37510) derived from phytozome v7.0 (chr-ID Chr9; po s 21611454 to 21612200 reverse strand)
tccgcgaccgccaggaggacaccgcccggatcagggtaaaggatcgtttcttgtttcggcgttgtcctccaaatgtggttgcgttctgatgttccgattagtctttagggggatttgctttgattggcatgcttgctccatttgggatttgggaggagttgagctagggcttggggaacaggagactttcagagttggagagtttcttggctgcggatttctgcgaatcagaaactatgattatgttccattgctaaactcgtggtaaaaagggcaaggaaggttattttggcgtataatgatgagttcagtcatttcatttggacaaaatgaggaaacaaattaataagttggtatcttcaatgtggaagagattgactgccataaatctgacgtttcctcatttacttagcagttattcaattcagataaggaaacttcttcaatacgctttaattccaaagtaattggatactgttaatagcaggttttcctatgcagtaggatcctacagtaaaactgttctttgacctctgaactgttaatcagttttcacctttcatgtttagctcttcagatttcgaatatagggaacttatggacagataagtacataaggtttctctgtgatatttaccgttgcagattggaatatgtgcatggtatttcttgagtgaaaaaacaacatgcttatgatgctgatcatatttctcatgaagctatttttgggctttttacaggttgagc

SEQ ID NO: 11133 - DNA, 872 bp, Oryza sativa
  Intron number 2 from transcript LOC_Os11g40590.2 (locus LO C_Os11g40590) derived from phytozome v7.0 (chr-ID Chr11; p os 23756905 to 23757776 reverse strand)
tacgaggggccgctgctcgagagggccatccacaggtacggtggatgaacaccatatcttcttcttgggatttcaagaacattaggagagattcttgtttttttttttctccttgtcaggggttaatcttgtttggtgtggttgctagatgaatttctagggcatctagagatggaaaattccgtgaaatttgtgcgcaacttcgatgaaatgctgacttgcaggataggatattaatcatttttttctaggtgatgaaaagaagtcaatcgtgtttgctggggggctcatggatgaatttctagggtatcttgagatggaaaattctggggaacttgtgcccaacttcgatgaactcttttacaggatagaatattaatcaaattgacaattgtaggacagaggaataatcatcaagttgacttttttttttctgttcaccttttagtactgtgggatatattaggagtgttctccatgtcagtctatgagatatttctcctttgcaattgacattgtttaaccaacctatatgccttgggtaaaatgggaacttgggtggtgatgtgaaatggtatggtcaaattgtagatgagaagtggagtaaaatctcttgccagttgccactatgctagtttttggtcttgtctagaaacttaacgcagaagaaagtgactattgcatcaatgtctctatcaggttggaataatggatggagtaactttcttttctgggtatcattatgagatgtttaggcattaagtcattgtcatgttgcagttgcagttatggatgaatctctattcagatctgtgattactgttctgagatttttttaaattctgtttttgctgttattttaggtacaaatc

SEQ ID NO: 11134 - DNA, 502 bp, Oryza sativa
  Intron number 3 from transcript LOC_Os11g06040.2 (locus LO C_Os11g06040) derived from phytozome v7.0 (chr-ID Chr11; p os 2863368 to 2863869 reverse strand)
tatattgtaagttgaggacgagggatcctacctattgaagtaattcgatgaactagctctaggaaaattataggccttcttggtgttgactaaagatactgccacttttgttgtaaaacaattcactggcccaatttttagtggaaaaactagcttcaaataaacaaagttcaatttgcaggattggaaaaggaaagaaaaattggtctatgttgaatcacacacaattttattaatttattttgaagctaaccatgaataagtcttgcaagacttcaactgcaaacctgcaacacttcttttgctttcaaaataactctttctttgcttcctgtttcttttccttcatgcattctcatgttatatgttgacaaccaagatgcattgaaaactttttatgctgtgcagctgttgatttgatatccatactatcttcagttaaaatcaacaatcttgctaacattcctcttcatctttgtttgaaacagatacgagtaaatca

SEQ ID NO: 11135 - DNA, 901 bp, Oryza sativa
  Intron number 1 from transcript LOC_Os09g14670.1 (locus LO C_Os09g14670) derived from phytozome v7.0 (chr-ID Chr9; po s 8695278 to 8696178 reverse strand)
gcctccacggcgacgacctcaaggatctcgtaatttatccaacccttttcttcttcttctttttctttttcttttttctttttttggttgcaatcttggattggagcaatactatgtatgagtgtgagtatgtgaatccagctgagcttttcgttccagggcaacacgtggcattgttttgattgggatttttagttcagtaggttttacttttaagtgtgcagattgggtttggatttgttactactctttaatctttagtggggggtaaatttgtgtatggttaattctgtgctttattaattattagtatgggtttagtgtaaagcttgaatcttggaggtgaattagtgttctctgatttgttcagttgtttgtgtgctgatttagtgttctgggtactgagactgagcataccagtggattctgttcttgattaggccccttcttttttttttcctaaactcgtggttagcttaggggttaataatagctgatctgtaaattgtgtcagtcaaactttacctcatctgtttgggatctcttgttgaatcaattaaaataactgtttttttttttactgacaaggatctatactagtaatgaagcctgcagagtttgaccgtatcaattaattttggttctcagtaaaaacacactgttcaagtatgcatggggttatgggtgtgttgtttctcaggaaacagagttgattgcagagtcttcttcctttatataccttcctgtaaactgaacctgaatccatacaaataattttagcaaatgtacaaataattttgattctttccgtgttcatcttttcattgttgtttattacgatttaattagaagggattgccacctttaaactgaatttgcgtgctacatgataggttcaaga

SEQ ID NO: 11136 - DNA, 597 bp, Oryza sativa
  Intron number 3 from transcript LOC_Os10g39540.2 (locus LO C_Os10g39540) derived from phytozome v7.0 (chr-ID Chr10; p os 21055897 to 21056493)
cacctgtgatccctgcaccgggtgccttctacggggtgagttggtttgcatttgcatcaaagttttggaggcttgctgttcagtattcagcaatatatgtgctcattatggaccaatgatttattccgttgccagtggtaatattgttgccatgatagtttcttggtgtgctcatttggtcgtacacatcatggtgcaaataattgcatattagtgtggttgatgatgatgtactcgtggtgggaatgattgcatcaggcgaatcagctcattatgagcatttataattcctcttaaattttcttattaggttgtgcaaatgtgcaatagcctttgtgacccccaaaaatgttaactaatcagcatataatttcttttcatggaacactaaaatattatcggtaaacggtagactgtcaagcatagtagagtgggcaagatgttgaattttaatatgctaaactatgcattgtatataaaaggagcatgcatgttgttatttgagattttcagttaactatttttcattctgtacgggagttttcacagcagatgtttaataggttcaactttttgggggtaatttacaggtgtttg

SEQ ID NO: 11137 - DNA, 897 bp, Oryza sativa
  Intron number 1 from transcript LOC_Os12g06900.1 (locus LO C_Os12g06900) derived from phytozome v7.0 (chr-ID Chr12; p os 3356695 to 3357591 reverse strand)
cccacaccaaccctcgcaccgaagtcaggctcagggtaataaatacatcgctgcaaaattcgattttgctacatattttatcgataaattttctctaagaaattaatcgatgtaaaatatactacaatcgtagtataataactatattataacttgcatatgtaattacaatataactaaccatttaatttgctttaaaattcctatgagcaagaaatgagaaaatcacaaagccgcacatgtgaggggattcggtcccattacctctacttcatagaaatagtatgttatcaatagatctttaaaagttacatataagatattacaagtatattatatttacacctgacattttttaaaaaaattgacgtcaagtgtataattagtctctacatattgttgtgaaattgctactctagttaatcgttgtgatcgtttgatttacaaccgataagacataaaaaagtgtacgaaacaaatgaaaataatttattggtaaaagtttatccgtattattaacggtttaaaagacaaagtaaaaaaaaagaataaggatgtgttctaaagtcttttgcaactttcacgtttaacatgagcacgcttcccaaactattaaacgatgtttttctcttaaaaaaattgatataagtttttaaaaaattaaataaaccaatttttcgagtttataataatttaatacccacgtaatcatacgcggatagtttgtctcgttttatgtacaaaccaaaagctaaagctaaacgcacattccaactaagcctaagaagaaaaaaaccttaaaattaactccaaaatgaaatttcaaattttataattcggttgtgaccgataaaacaagtaccgattgagagctgaaaatttcgttgttgtagggac

SEQ ID NO: 11138 - DNA, 716 bp, Oryza sativa
  Intron number 1 from transcript LOC_Os12g33230.1 (locus LO C_Os12g33230) derived from phytozome v7.0 (chr-ID Chr12; p os 20071938 to 20072653)
gtagtttcttccgatacggtggttagtcagtgcccttcttgcgtgtgcggttcttggaatttcttgttttctttgtctctcctagcgattgtttgttggagggataattttttgcttcttgtcaatggcggtcgccggatggatcagtggctcgttcgctccgtgtttcttgtaggttcggtggttgcagatgtcttaaggtgcaattcttgttcggttttgttaatgatagttagttcttggtcggagaggcagcaatctgtagatgaataattaggttgccactcaatcgacacaggaaaatgttgcggaagttcatgaccatatatatatgcttcttgatgagtttctctactgtcgatggcggataattctgcagctccttgttaatggaggttgctggatcggtggatatgaccattttatgcttcttgaatgttcaggttgcagatatctaggtttaattcatgttcgatttagttgatactagttagtttttgctcggagaggcagcagtctgtagacaaatagtcaggtctccaccttaattaatatttcagttgacataaaaatattgggaagttcatgaccgtatatatgcttcttgaagaatgtcttgtctatactgtatttcgatcacctttgatatgcatccttctgatccgattaatttcggtccagagcgccagatagcagctaaacctgaagattgccca

SEQ ID NO: 11139 - DNA, 775 bp, Oryza sativa
  Intron number 2 from transcript LOC_Os11g38670.1 (locus LO C_Os11g38670) derived from phytozome v7.0 (chr-ID Chr11; p os 22484228 to 22485002)
gaggagcacctattaatcagcaggtctggttccggatctttccacgaaatttcaaatccaattatgtgtcaattcaagtttagaaaactgcttgctcggtattttaggatggttagaacttgataaacttgcatgataggacaagcaattacttcttccacataggccacgcaggacctttgatttgtggcgtacggtcatggcccatgtgaagggtaaacaatgagatgtataatttaggtctttctatttgctgatattgccattttgcgttcaacatatttgtattagtgaggatgattatttgtgaatcttcatttttttgctagctggtgcctttacacaggttaaaaatgtttaggccctctacagtgtccatcgtaggttttccaatataattcatagttatggttgatagcaacatcccccttgttatggcataattttatccttgtcccatgtttaatctaaaacagttgaatcattgccggaagaattttctgaccaatgtgaagcattcgttgctaggttagccaatccattagttcctagccttgtggttcattcatcacaagttaatccaaacaagaacttaaaacaatatgaaatgacatttttaggacttctggtcaatgttttgtctgcatatgtggatagggtgtgcttggcaatcatcaaactaccttatcttctcaaattgtatgatatcgtaaaccgaatattgaatttgttttttgcagttgagagatcttgagaggggtgttgacattcttgt

SEQ ID NO: 11140 - DNA, 460 bp, Oryza sativa
  Intron number 1 from transcript LOC_Os09g29940.1 (locus LO C_Os09g29940) derived from phytozome v7.0 (chr-ID Chr9; po s 18219068 to 18219527 reverse strand)
atcggaagcggcggtggcggcgctcccgccgaagagtaagtcgatcgtggcgtcgctttcctttacttctttggattttgattttttgagctttgggcttcccttctctgtttggttaggaatatttcagcatttactgcaaatgttttccccttccccttcattatcggggattacaaatgatttcgtttccaatttgggaggttgatttatcagttctgtgtatagcttgctgataatgtttggcgatcaattcagttcatatccatgttgtgatttagtttcagtcgatcagttcatgtcagactaatccggttgatcgattgcaataatcgtttcatatcttccatgcgttctgctaactctaactctgtttgagcctctaccattcaagctattgatggaaatatggacttctatttgatttagtttattcgatgtccaggaatctacaagaaca

SEQ ID NO: 11141 - DNA, 890 bp, Oryza sativa
  Intron number 1 from transcript LOC_Os12g07970.1 (locus LO C_Os12g07970) derived from phytozome v7.0 (chr-ID Chr12; p os 4043614 to 4044503)
cgggcgggcgggcggcaagaaacagggatcttgaggtgattcccctttcccgttcccaggtttgttgggattgttgctattcctgccattattgtggggggtttgctcgtccgcgaaaaaaatctttgtgctgtttctgttctgaatccatgtgcggccgccgtcgggggtttggcgaatcttgaccaaaatttcgcgacttgggttggagtatccgttggtgtgatggtctaatccatatccaatgtggagtttggaggtggatggttggggttttgcccgagatcttgggagttgggtagaaagttgaggtttttagatgcagatctttcttgatctgggagcgtttctggctgagatttttcttctactctctgccccctgatgacttgaatctgtggaactagtgcaacgcggtagcaccgtttgcttgcttggaactgcaggattggttaaaaattgctttgttttaagcttagtttggtactgtttaactgaaaagcttagcgcaagtttgcctttttttaggtacttggatacgcgtagggccgatctacaagtagatattatctgtcgatcggcttgtatagtcatttcttctggaatctaaaatactattgtttgttcaagatctccctcttttctcctggaacgtagagttagtggcagtatgaaatcaaaaccacgtggtttcaaattgcagtttgtattttctttttttttaaaaaaaaatattatgctgttttcgattgttttctgctgttcttaccacaaagtactttactcagtagggtaaaagggcacaatatagagatattcatctcttggtatgtttaactaactgatgtgtgcttcttctttgatcttcattaagcaggttttctgagtta

SEQ ID NO: 11142 - DNA, 726 bp, Oryza sativa
  Intron number 2 from transcript LOC_Os09g25865.1 (locus LO C_Os09g25865) derived from phytozome v7.0 (chr-ID Chr9; po s 15501948 to 15502673)
tacgccattgtgcgactgtcccattctctctcaatgtgagtattactttctttgtgacattgtaatgttttatttctagtgataattgatggcatgaatagtcgcaacctgttcttgagatagtttcagcattgctctctccttgtgatatttgtttgggtctagtaaaattagatatattatgtggccatcaagataataatgagacattgtcctattcaacattgttgatattttaccacagtacattttcttggtcccgactcatgtgatcattcctgacatttacctggtgtgactaacagggatgtagtggtttcagtttttttttttttttggaatagcatacaatgttccatatcaccatatgaactgccctgtcagtcagactgaaatattagacatatcacatgcatgcacatggcttaaagcctgacatttgaatgttctcgcaatttgcaaatggtggaaaggctgttcttgctgtagaactgtacctacataataaatatgattttctgttttttggttttattgaattttctctgtaaattagaagaaatgcatgaatctgggattctgcttcaatcatggcattaggtgctaagcaacaaaggttgcttagtttgttaaacgggtataatcttgtatgatttagtttgctctgttgttcaactatcagtgacttggagtgttctttgtgttgtctgtgccacttcagcagat

SEQ ID NO: 11143 - DNA, 724 bp, Oryza sativa
  Intron number 1 from transcript LOC_Os11g16800.1 (locus LO C_Os11g16800) derived from phytozome v7.0 (chr-ID Chr11; p os 9323019 to 9323742)
gcagcggctcgggttacactttactcccggttggtataaacaaccgggactaaagatctatttttagtcccggttgtttataccaaccggtagtaaaaataattgggatctgttttaaacttgacaacttcttgaaccgggactaaaaatgatctttagtcccggtttaccaaccgggactaaagatcaaaaagtgcccttcaacttttaaaccgggacaaaagatgctttttagtcccggtttttattagaaccgggactattatggaatttggccgaccgaccaaagatactttctccaccagtggtttttgtagtagtgcgggtaccgtatatatttgtgcttgggatttaccctcaaacattgcaacatggtagcaactgacaatgtgacaagcatatagtctgtcataaaacggtttgtactgtgcgtactatagctgcatatataactttcgactcaaaaaattagttgctgattattgatgcagcagcaatatgcatgtgcaaattacagtaccggcctgccggttatcatcaacgtgcattcgttacagctaacaaactatttacctacaatagaagatactataatattagcatatatacataaaaaaaagctttcactgaatatgtgacaagctttcactctaaaacttaaaaatggtttgtactctgcgtatgacacaatgtaatgatgatgtggagtgttacaacatttcac

SEQ ID NO: 11144 - DNA, 843 bp, Oryza sativa
  Intron number 1 from transcript LOC_Os09g15040.1 (locus LO C_Os09g15040) derived from phytozome v7.0 (chr-ID Chr9; po s 9072703 to 9073545)
ttccttgccggtggcagaggatcggtaccaatccagtgagttgtagcttctttcattagagcctgataattaattgttactagctatagccaagttccatatggattcagggatatctctactactagatatacctagggatgaaaacggtcggaaacgatcggaaaacagcctcaaccattttggaaccatatttttctcggaaacgaaatcgaaaacagtaaagtcgaaaacgaaaacgatatcgaaaatatcggaaaaccggaaacggaacaatacggatggaaacaggtcggtacagagcggaaaccggtaacaaatacgaaaatattaaactataaaaacatatatttaactttacatacataaattcaagcttatactatataaattataaattaactccattttagccatgcacaaaaataaaagttagagatttgattgaagagtcaatcaatctgtaagctatgggtcaagtagagatatggcttataaatattgacatatttagaatatggtaattaccatattaataagaaacggtaatttccacaagaatacggtaaatacggaaacgatcggtataacagcaaaaccatttccgttttcatttctatattttttaccatttctatttttatttcggtcgattaccatttccatatggctcggcccgtagaaaatcgaaaacgaacgccggtcggcctggaattaccgttaccgttttcacccctagatataccagtgttgttttcactctcgagctgtagtttaattaccacaagaatttttcttgaacttacagttaaaacccaagttcaattgtccaaaggtacaaaa

SEQ ID NO: 11145 - DNA, 1001 bp, Oryza sativa
  Intron number 1 from transcript LOC_Os10g22869.2 (locus LO C_Os10g22869) derived from phytozome v7.0 (chr-ID Chr10; p os 11813066 to 11814066 reverse strand)
cgtgcaggccgcgcctctcccctggagcagcagaggtactgcgaacttctcctaccccccactgtccccatacttgtttcttcaccaacgcgtcctgaatttggaatagcttcgggtagaattgcgcggcctgattgtacaaacttgggattagaggccaattggggattggattttaattggccgacggtcatgaaacgattaggtgctgtttctggacaggaacggaacggaacgtttttaatttggcaaaatttagtcgttgttcagaaataactcagaaactgcagaaaggatgttgatatgctccggaagcactccagggaattatttgtgcacctaaaatggcaacatgaatgcataattctttttctttttcttttcgggagggagcataattcgtttttttatgaagacacatgaaactgttgaaatagtatggggagacgaatataccgcgtaacttggtggattgtattgagcttcagaggaccggtatatatagagtacaagagataaggaaggggatctgagataaaaaaaatggtattttgacacaagtcaatcctatactaatatccctctcactaccataaactctaacagaaacaccagatgatgaattttgggcgtcaaattcatctatgaggtttgagtgtgacacttttggcttaaactatactgatatgtaatttgttgttcatcatagcaaataattatcgttgcagcaacacttcagacatgcttattctccttattttattttgatatttcacaaattaatattctgaaatttttaatattgatattagagtaattgtctgttacatcagagaaccttccgatctatctttgttgctaattttgtttctgcaacccaagaggctttgttttttacttttttttttcttactttcaaaacagtcatcattgaatttgaggaataacaaaaatgcttacatgctgaatgtcaaactgttgatttggtgtgtcagcttgac

SEQ ID NO: 11146 - DNA, 717 bp, Oryza sativa
  Intron number 1 from transcript LOC_Os11g27480.1 (locus LO C_Os11g27480) derived from phytozome v7.0 (chr-ID Chr11; p os 15349392 to 15350108)
tggagcacgccctccctagggttttggggagaaaggtgagttggttgggccttgggctaaccccttaaccgacccacctagccctcccacgctaattttaagttttcctcttattatttcaagaagaaacacatagaaacatccaaaataagtttctagggcggtctatacttttttgtggtatcacagtgtcaagctcttgattaatgggttgtttctaatcacgcctgggcttcaacatcatccatcatcattctgctttggaattagtgctaggtaaaactagatgtcacatcaaattaacgggctatacatgacaagaaataattcagatctggttgtttttcaccaatccatttttaaattacacatcatttccttataggatcactttgaaaagaatgtgattgagttttccatctttgatcgcacagaaagtcaagctggttaattatgtggaaatgtggaattgatttatttctatgtaaatgcttttgcactttccatttttatgtatataagaaccagctgatggttttttttccacaagcttcgtcgcaacaccgttacaccactggtcatcgtcaaggttcatcgccgaactgttacgccaatggtcgtcagcgaggttcatggcctccgcgttatagatagtatatatgagaagatgttattgcagcaggcaataaataatagttgccatgtatttgcaggata

SEQ ID NO: 11147 - DNA, 779 bp, Oryza sativa
  Intron number 1 from transcript LOC_Os11g31710.1 (locus LO C_Os11g31710) derived from phytozome v7.0 (chr-ID Chr11; p os 18111493 to 18112271 reverse strand)
agagataaaaatagttgtggccgaaaaggtaactacaataataccacagttggcctattaatttatttctggtactactatgttggaatttgctatttatttactagattataaattttgaaattaagtgcatagatagaaatttgtcatcctagaaagtgtactaaaacaatatcatatgtttctaagctctattgagtcgatgtgtatgcaaaatttctttggtagcattcaaaattcaatttgttaaacatcatgtatggaattcaattgaagtttcacaacttttcataacttcaaaaattttgaattctaggtagtcaaatttctttacatagcattgaagtcaatgataattttatttaattttatttttgagtatttcaacttttgtttttgcgtggcagtgtttcagttcttgatcgtatttcaaattccaacttgtaatctaaaacttaactttcttaggtttgaattttatgctccaaaagtttaaaaaaaatgttaaaattacaaaataattaccacatctgctaacagttaaatggcatatgctaaataaagatcttgacatgattctaggatttgaagaaaaatatttagttgtattcaggtgatagaatgaaattacttcttcagcatgtagtttaagttatttaagttcacattatgagcagctatacagttcagtgacttctcaataagtaaatttgattaactttagcgagtttattatatttgttttctaatatacaattttttaatagcgcctactgttg

SEQ ID NO: 11148 - DNA, 876 bp, Oryza sativa
  Intron number 1 from transcript LOC_Os11g26140.1 (locus LO C_Os11g26140) derived from phytozome v7.0 (chr-ID Chr11; p os 14505598 to 14506473)
tggtttttgcaagggtgatcaagattttgttgcaggttcgtcttcaatgtctttatcttgggggtgatcagttcatattcacttgaatacttctctttctgcaaaagaaaaaaaactgtaaacatatttttttttaaaaaaagatatgtacaagcttcaacgtccgaataggcggaatagctgctaaataatgcaatatttctaccttagtgttaaaatgcaaaagtttcgttgttgctaaaagaaaacgagcatgcagttcgtacttacccccttttttttttgactggagcaaacaaattaattgatgaaataatcgcgttgagtttataccctcattatggttatttattttattacatgacgttgtaaacattttgacacatgtttgatcattcattttattaaaaaacattatcattatttattttattgcgacttggtttatcatattataggtactttgcacaaaagttttaaataacctaaatagtgaaacatgtgtaaaaagtcaatagcttcatctattaaaaaccgaaggtattatcatttaaacatgatctctcccttgacaactttgactattattttcaaacaatgtcaaagtgaatagattcgaaggtaagatattactatagttctttcgattagatttaatctaatgataaataataggttatttaaaaattattgttggtcaaagttgtacaattcagagtcaaaaccgacaagtatttcttaatgagtaactatacgagcataacggtagtagaattaacaccaatggtatataacatgtcaaatggatacaccaactaatcatatttcttgacaatcgcagaaggtggatacatcaagataaaacgtaagtccaag

SEQ ID NO: 11149 - DNA, 682 bp, Oryza sativa
  Intron number 1 from transcript LOC_Os09g13260.1 (locus LO C_Os09g13260) derived from phytozome v7.0 (chr-ID Chr9; po s 7651176 to 7651857 reverse strand)
aagttggtacgtatagtacgtagctagctctttcaaattgttgtggaacgaatccatccttccgagttgaattaggtttcgacctgcgcgcgtcgagagaaattaaaatttaagagaatatcaaataagatatagttcaaattgttgtgtatcgatcgatcggtatatcaaataagagattatagttcgttagctagtacgtacgtcgcggatcggaccgcgttgctcgatcactatatatatctgtcgatcattttgctcctacgtcgtactcaaaccaaggcaaaatctagctctccatccatctctctttctgcttgcattgcgtcctctctctctctctctctcgctgcttgcgatttcattcctttcctgcttcaggcagctgcaattaatatcgtcgacaccaggatataaagctccatgtacgtatatccaacaaacatctcagtaaagctgcacgcatgcgcgttcggatcttacattttctgtacgttttttatcttcagggcaaatgctgatggcatttcctttggagcgggtaggggcagtcaaagcacgaggcagcacaatgctagtaattctcattcctaactatatatattatgttgcttagtttctgaattctccgggcaatttattttgtttttcagtccgaagtgctacaggtgggcagtttact

SEQ ID NO: 11150 - DNA, 517 bp, Oryza sativa
  Intron number 4 from transcript LOC_Os11g31420.1 (locus LO C_Os11g31420) derived from phytozome v7.0 (chr-ID Chr11; p os 17873648 to 17874164 reverse strand)
caaaatttttgtgtaagtgtcagtttaaatgttacattcttcttagaggcttgagatcaacaagttcatagactagaaattactgtattgattgaaaataactaaaagttctggaattaatagagaggaaaaaaacatctcaactgttcacataatgaagatatgtctaattatggttgggattctgtagaaacacaaatggatttaggcaaaaagtagtctttgcatagcaggaaaatgcattcatgtttgatttaattagcttgatctatagttttaaccatacaggactatcctgatacatgcaagcatgttacttttcgaattttcttgttgcccattcgacaaaagtagattaatttatatagatcaaaataataacaaacatgtcgagacagtgcagatgcatgggttaagcttgtaagcatgtatgtgttacacagatgcagaattaatatttgggttattgcctttattttatagcattagatgatacttttacctttttcgcagagaa

SEQ ID NO: 11151 - DNA, 989 bp, Oryza sativa
  Intron number 1 from transcript LOC_Os09g25390.1 (locus LO C_Os09g25390) derived from phytozome v7.0 (chr-ID Chr9; po s 15224328 to 15225316 reverse strand)
gccggatcatcaaggtacgattaccgtaacactcacgctcacaagtcattctagattcttttgttttttggtttccttctcctcgatcgtggcctagtggtgttcgcttgcttggctctcatggtttcttcttgcttatgagctaatggattggccgtcaaggatgcccttctctttttcagctagagatcacctactgccactaacagtctggtccatctgtttgtcccgaccgaaatgttctctcaagctgaattgctgatgcagttatgctgcacaagtgcacagtttttaaatataaatccttttgagtccgttgaaatctactgatattctagtggcagttcgaacagtgagcaaaccggaaaagtttggtggtgtttgaatctcctgataataaagatgaaaataaagattaagtgtttcacgtaaaacgaggcggtaataacgtgtgattaattaagttttaattattataaacttgaaaaatagattaatctgacacttcctccatctacttttgatagtcatatttcatcttggcacatagaacaaggataagtaattctacttatcatccatttaaatatactactagtcattcctcgtaaacaagcgattcattaatatttatatttctcgatgcctatgtagccaatcttgtgtggaggaattgagagtcacgcattaaatctgaaaaagttattaagatgataggttgttggattgaaatatgcatatcaaaaataaattttccagatttggaaatatgactatccaaagtagatggagggaacaactttcatatggaaaatttctgtacgaaatgcactgtttagcagtttaaaagcatgccacgagtatccaaaatttcatccaagagttatgtgaatagtttttgtgcgtgatggtcaagtaattaatggtggtgccacgtggttcgccggcgaacaggcggcggagagcttgaaggagtcactgggcgtgca

SEQ ID NO: 11152 - DNA, 531 bp, Oryza sativa
  Intron number 2 from transcript LOC_Os12g10850.1 (locus LO C_Os12g10850) derived from phytozome v7.0 (chr-ID Chr12; p os 5849290 to 5849820)
tcgggtattaccggagggctcgatttctgctcgaggtgagtagcgagttgattgatcacgaattcatggtcgaaacgacggggattgggatgaggttcacttgttcagtgcgttctgtggagcgcccatgaaccgtttgatgttttgtccaaaggagagattttatttggaacccgttttgtgtctgacagaggaggggattattgctactagttcgtgatgtctgctgcattgttttcgctggcaatctcatgtgaagttatcagttcatctggtgaagatttggctagtttgggtggaagaactgacaagaacattagcagaaatgttttttccttgaaagatgaaatgaatgaataagtgcctatgcatctatgtgcatggtgctgagcaactaatagaaatgttgctacggagcaaagcattattctgggcatgcatttttggttcaatttctttatagctcaataatatttaaccttttgttgcaaagtagggagcaaaacaaattgttgaaaaaggcgagttccc

SEQ ID NO: 11153 - DNA, 703 bp, Oryza sativa
  Intron number 3 from transcript LOC_Os11g32369.1 (locus LO C_Os11g32369) derived from phytozome v7.0 (chr-ID Chr11; p os 18657942 to 18658644 reverse strand)
gggctccaagactctcggctcgtcagctgatttaagtaaaccttctctctttttttgatagtaaatgttacacctcaattttatattattaagtctaggaatccatatttcatatgaaatatgcacattttcttacacatcctttgctgatatcttcccaaaaatttatgaaccatctcctagtgagttttatttcgaagttgatgataattaccttgtcttccaggtaatttaatgagaactctagttaacacatactacattgaacttattctacattgcttgcctctatgctggatgccctctttttttgttataatgttgaacaatgggtgaacgactttgttgcagctctagcacaggtacattagactccaaaaatattctcgcttttcttcatgccaatgtacactctcttatgtgcgtttcatgtaaatccattagtctcatatggattgatgcaactgcaaactatttattgaatgtacactggattttccggatgttgtagtgatatgtgtttgtcagaagatgagaatgcatctttgctgttctgtattccatgatacatcgacctttgtgcttttaatactcaaaagttatttctgaatatcaacattttaacttgaagctatcgatctgcttaggaatgaatgattcatcctaattcatgttttttccttcttttctctaggcaaatatt

SEQ ID NO: 11154 - DNA, 929 bp, Oryza sativa
  Intron number 1 from transcript LOC_Os10g26740.1 (locus LO C_Os10g26740) derived from phytozome v7.0 (chr-ID Chr10; p os 13894261 to 13895189 reverse strand)
tctggttgcttgtcttcctcacttcctggtacctctcaaacccatataatagaagcagtgtagcttagagcattgtctcaataattccttgctcaatgtgaccatgacgatttgctagtctgtaaattgtgatgagtagcaatgtgcttctttgtttcttttatatcaccccagcaacacttcggcactagctatatgccccatctcagtaaatacctgacagtaacattgtatgtattgttggtaaaatgcatcaaggacataggaagtttagtgggtaaaaaatggcatatcttgtatactaaaattatggccctgctttgtttcagtgctgcttcttatactttagtatactatcaggtgtagcttaaatttggttctaggagcttctagttctaggtaattattttccagtaactatatatgcaagcacctggtagtttccagatgaaaaccttgcaatgcattcttgatttatagcctgtgaatgcattcagaaatacagcctagttaattttgacctaaagtcgcacagaaagtttgctttatctgaagtgctctagctgggacgcataaaacatgccaaattgttgttatctgaagaaatgaacttagagaagacatttactataaatgcttgtctctatcttgtgttcaggttattagttattcttttctcatttcctgggtgatatgtgctctttattgagtgaagtgactgtagcttctttgaaataaaggtcgagatttttttttcattattttttacaaaataactttactatacacaatacagatatatatatacacggatctaattaattatgatgaaaataacatataatctttgaccctcactgtttgcatagcaaacgatctggtgtctttgaacttgtaggctcttgtggctactccaaagacttcaagag

SEQ ID NO: 11155 - DNA, 976 bp, Oryza sativa
  Intron number 2 from transcript LOC_Os09g19734.1 (locus LO C_Os09g19734) derived from phytozome v7.0 (chr-ID Chr9; po s 11804951 to 11805926)
gcgtcgtaagtgctctcgagttttttttgttgttgacttgttgtatgtaagaggctttcttgatttatttgtgtgatttactgcccctacctgctgttgttaatgtgtgatgtgtgatctttgcgatggattagtttatttatagtccatagttagtggattgtaggaggtatatgaatgccgggagatttgccaggtctcgcttgtgccttggtttgtttcgcttgtttaggaggattagcaatgtacctgttgcttagtgagacgcgggatttgtaagctaaaagattgttcgagagattatctcttggatagtggtaaaatgatttaggagtaatctatatcctaggtaggtcttttttgttattgataatgataggtagggagttgggttaaaacaacagcatgcttggcaactgattggtggtttgattgttttgaaagagggttgaacatgaacttgttggttgcagaacattagtttaattagtcttctttatttaagaaagcaagtctattactgaagcagggaggactcttgtttggtacattatgcaattattatactttgcccttggtatgcttacggtttttaaagaaaactaaaagttatgggagaaatcccttcatgcaagtgcttgtaagtggaatagttgaagtgtgctcctgctaagagaagcattgatgaaagtgaattttgtgcataataaacacaaaactgtcttgtattgttggaataacctaaactactaaaggctgtactaatcaattacatgttcgtaatgatagcttgtaaaggtggtgactggttggggtgtatatttgagggttatcttagtgttgcttttcctgtatgattgtaaattttgatacaatcatgcctgttgtggcagctatgatgttatttgtttagctctttgacttgttattccttgatgcaggcaatcactgctaccagtacaaagaaggctgatct

SEQ ID NO: 11156 - DNA, 864 bp, Oryza sativa
  Intron number 1 from transcript LOC_Os11g15540.1 (locus LO C_Os11g15540) derived from phytozome v7.0 (chr-ID Chr11; p os 8799849 to 8800712)
tacggctgttgctttggaccaccgccaccaacaaggtccgtgggacaaagccacctacggcgtccttcctccatcgagctagcttctcccaccggctggcatcctcctcaccacttgctgctgcccgctattatcctcaccgggtgtcactgagatgggaacagggaaacaagggagagatgtgaagaggtcctaacatgtggggtttatgatgattcaacgctgttgacttgggtcaaattggcacgttggacaaaaccacccactatactgccatgggatcaatattgcatcggttttaacacttgtgggatccattgtatctggtattttgtttgatggacgaaaatccaactcgtgtcaagttaagagacctaaagtaaacttattcctagctcttttgcatggacggccctactttagttgctggtggtcagatacacatccttgtcagtcatgatttccacaaaatctgatccagtcaatgaacaatgttgggccggccttctttatgttcgtttgttttctttgtttcccctttgtcctctctttcataatatgatatgatagagatggcattttcacataagacacattgtttgataatattaaatatatgcattaacaccggagcgaagcttactgatgacttgtatcggcttttctccccataaaattgtgctaagatagatggtccaaaatataatttgctccaaatataagtagtatgcatccatatatatggtaaactggcacgtgtcgatcggcgtcgtatttatcttagtacttctcctctttgtaaatatgcttgacttaatttgaaaacttttacagcacatcagtaagtatatactgctagaacaa

SEQ ID NO: 11157 - DNA, 815 bp, Oryza sativa
  Intron number 3 from transcript LOC_Os09g39400.2 (locus LO C_Os09g39400) derived from phytozome v7.0 (chr-ID Chr9; po s 22654108 to 22654922)
gcctacgttcatcagctcaaaggcagcagcgccaggtgatcatccccttctacttctactctacatttggtttctttctgtacaccatttgtctgatgatgcatatcttgcctgcctgtggtttgtgtatcaaatgttcaattgacatgaagttcctgcggtgcccttttttcatgtgtaaagtagcagcataacaaaccttttgtttcgcaaacaattgtggtacaaaaccgtcttattgtttgcaaccatcatactggtagggataagtggtatcccactgctcgagccaactgttgttaagcgaacaatggtatgcgtgatagataatggctctattggtctatggctatggcatttcaactaaaattatttttgctaatcatggcaaatgatttcaatttttcattttctggtgtcttttcatatatattacaaaaaacaataccggttagattatttactctgtagcctcatgtcccagtatcagggtgtttaccagtttacttgccagcaccttgccatttattttcttctataataaatggaaattgttattgtaatgcttgttgacatgtagagagtgtgtattactattattgaccatgcttattgccccggtattgttgttgatgaatatgttgacgttaaaacctcatctttatttgtcaatgctaccaccttgggaacaggacatgctatatatagtactttataaacactcctatgatcaaaccaagttggcattgtgtttctgattggagttctttttggcatatttcagtgttggtgctcagaaagtgaagttcacttgc

SEQ ID NO: 11158 - DNA, 673 bp, Oryza sativa
  Intron number 1 from transcript LOC_Os12g16540.1 (locus LO C_Os12g16540) derived from phytozome v7.0 (chr-ID Chr12; p os 9474499 to 9475171 reverse strand)
ccagggcaacccttacctcaccggcggctgccaaggtacatgtatactccctccgtttctttagtataagactccgtttctttagtatacgacgctactgacttttaaacacatggttaaccattatcttatttaaaaaatttatgtaaatgtataagatataagtcatgcttaaattattttgaatgataaaacaactcacaacaaaataaattataaacgtaaaattttttaataagacgaatggttaaacgtgtaataaaaaagtcaatggcgtcatttattaaaaaccggaggtagtatgtacttatatacgtattatattatactccctcagataacatcgttaatttttggcatgacgtttcagcattcattcctattcaaaaaatttacataaatattatttattttgttatgagatgctttattattaaataatttttacgtatcatttatactttagcatatttacattaattttttttgataaggtgaatggtgtcgaacattatttcaaaattcgacagcacgtcatatattaaaaaaacaaagataacttatacaatattcatattctatacttagtgcattcctaagctaaattagctatctatataccccattatatcttctgttttctcggtcaacataacattccagatatcgacga

SEQ ID NO: 11159 - DNA, 1009 bp, Oryza sativa
  Intron number 1 from transcript LOC_Os10g32970.1 (locus LO C_Os10g32970) derived from phytozome v7.0 (chr-ID Chr10; p os 17187270 to 17188278)
gcctacaccttcgacaccgtcgaggagttctgggggtacgtgccgatgaagcgccctaagcccttgcccgatccgtttcccggtcttcggatctgatctactttctgtgttttgatcctgtctggtagctcatatgcttgatttagtggctatgccgtgggtatttctggtggtgtagatcgggggttctgattattcccatgcgagcacaatctagaatgattagagggtacttcggttagttttttttttcgctgatatgtttgttgatgctatcgttggctgcagttttcgtcagatctaattactacaatgcatcgatgctgattactttggagctgattttaagtgtaggctgcatcgtggattactgatgtttagggattgtctggatgcttgtttcccgaagtgcaaccctggtcgtttgttgtgtcttataaacaacaattgtcccctcccgcatagtcgtaacaactgattttgaatgttcagatttctctacggctttgtattgctgaaccagctgttgatagactagaatgtttaagatttctcgaaggcctcgtattgctgaaccagctgttgatagagttgtcttatttccatacatgctgcatggagtatattttctagcttcttttatggatgttccgggacttttaatgtggttaaatgtacaagggtagcaattatacaacatatgaacacaactatctttgttgtttatttattattcaagcttgcatgcgacttttttttttgtgtctaaagataagaaaaatagttataccttttgagacttacaactagaatgacattcaatattgtgggcacatggaggcgtaggtattaattactctgttgtattttttctatgttttggcaagttcttactgtaggtattcctgcctattatcggatacttttgaatttgattgtccttttatcctatatgtgcaggcatgatcttcctttcatttaaatccccttatttcttgctgcagcttgt

SEQ ID NO: 11160 - DNA, 1043 bp, Oryza sativa
  Intron number 3 from transcript LOC_Os12g07720.1 (locus LO C_Os12g07720) derived from phytozome v7.0 (chr-ID Chr12; p os 3872861 to 3873903)
accaccgcgcttgccattgcttaccagctctacgggtaactcaattcttgttggcaactgtttacttgaatttttctctttatgagaatcttgttttggttcggttgaaattggcttatcttagtaatcttggaagaggtggtaattctcaatgcaatgggagcattagataggctgcgctgggggtgaatcacttaacttttgagacattagaattgataaccttcattatcttgggtattttgtttattttggcaaatattggtatacatctttgtaggcaggcgttccaaaagtgggtacaattagtttgatgacatggttgatcctagtcctgcatattacaatactaatcggaccactggatcaatgtgtttgaatgatgtatggtgaaatggtagttcaagtttaaaatttggattgttgaaatgttgagatctgttataattttgttcactcatcagccattttcattgtttctgggctaggtaatttattcttgcatctctcacaggccccttttttcttgttgagttgttaccacttcacttgcttgattagaatctcacttgcttgattagaatctattcgatgtgtgtaatggttcatgtcttaccaatgataattggaggcggtcagatgtatggagggaaatctagagaatcaaaattttcatgtggaatagcacatatgaattaagggaaaaaataatactgaaacagtttgttaggaggaaatttgattagattgagtagtagcgaagtttattctctttttttttcaactgataatgagcactatagtgattgagattatctgtctgccaattttgctcttctaatatggtggttacttcctaaattcatttgcaagaaaaaccccattctaatcatgactactaaataatgaaataacattaagaggatatgttttctgcaaatagtgcaaggttgttctcagtaagtttgggactcatgatagttttttcgtactatttggatgatgcagtccagagctctacaagtcaagagttctagaactta

SEQ ID NO: 11161 - DNA, 740 bp, Oryza sativa
  Intron number 1 from transcript LOC_Os11g43830.1 (locus LO C_Os11g43830) derived from phytozome v7.0 (chr-ID Chr11; p os 26005145 to 26005884 reverse strand)
gtgtcgtcttcaaggtcctcccttcaccttctcttcggttccataactcttaaccttttgaataagattctattagtatgtttatttaataaagatactagaataacgtatatagatttgttttacaaagtattataataaaaaagaaaaatatatttatttattatatatattatactctttacatttctggtcaaacttgcacgttgaatatttggctataatttcttttatatactacttcctccgttttacaatataagactttctagcattacccatatttatttagatgttaatgaatctagacatatgtatgcgtttagattcattaacacctatatgtatgtgggcaatgctagaaagtcttacattatgaaacggatggagtataaagtttgtagcaatattgaaatatcaatccaatgatataaaattcaatttacattatactaatcgttagtcaaatatttttgaggttgaagttgaatcttgaaatgggtgcacaacttacattatggaatgaggggggtaataaaaatatatagacaaacatattatattttaacaaccgtgtcattgtccaaaatgaaacatatgaattatggaaccggaaggatcttaattacttcaattatacttggatactctacatatttctttttctttcttttttttgttaataaaaataaaaattctggaaatgaggtggtgtacttatgaatttggacgatggcaga

SEQ ID NO: 11162 - DNA, 739 bp, Oryza sativa
  Intron number 2 from transcript LOC_Os10g35570.1 (locus LO C_Os10g35570) derived from phytozome v7.0 (chr-ID Chr10; p os 18957280 to 18958018)
gctccagcttcgaggccagggacgtcgccattaaggttctcgaaccatcgcatgattaccatcctcttctattatatcgcattagttggaaaacattatttgaaattctggatcgtttaccataaaatattattctggatgttttctggagaacggtattattgcacccagtttgtcattgatgctgttgtttcagtgcatctggttagagtgtgctaggttgatgtttttctcttcttctttttttcagtgttagaatctcacatcaccaagttcttattgttgcagtcatgaactgatgttaaattcgattactcgattgactctctgctgtggaattactggaatagttgcttgttcatctttttttacatttgttgaccaatgtggtgtgttcagtgattagaccaattctattagagcctcattaagaaaaaaatgtaacaaggtgttattaaggcatgcaagaaattatgaggtattataagctaataagtagctttgatgcaaataattataattgaccttgactttatctgtagttcttattggctagttctgtcgatgggttgcatgttgctctatgacaaatttgatactttagacacccctttggtggcatgcatgcaggacttagctgtccttgaagccttcatttcttcatattatgtcataagttttaaccggaagtttatttacattaggcagaaatacaaaccgagagacagaggatacttct

SEQ ID NO: 11163 - DNA, 564 bp, Oryza sativa
  Intron number 2 from transcript LOC_Os11g10710.1 (locus LO C_Os11g10710) derived from phytozome v7.0 (chr-ID Chr11; p os 5875315 to 5875878 reverse strand)
cctcgggggagccttgaaaactatctttctggtaagacattgctctcagtcctagtactcccccaattccataatatttgttgttttggataaggctaagtttaaattatttgaactttgactatgaatgaattttaaaatgtttattttagaagcatggaaactaaatgtataaattaatgttgaaagacactgtaatgaaatcatatatttattgtactttctccgttccatattataagtcactttgactaagtcaaaattttctgagtttgataaagtttatagaataatataacaacatttacaatatcaaattagtttcattaaatctaacattgaatatatattttatagtatgttttatgttatagatattgctatattttttctataaacttgatcaaacttaaaaactttggtttagaaaaaaaaaagtgtttctaagactacgttattatccaaaacgacatgtactatggaactggagggagtacatcttcagcttggaagaaaattagtcatatgcatttgcattctgttgatatatctttacctttgcag

SEQ ID NO: 11164 - DNA, 850 bp, Oryza sativa
  Intron number 1 from transcript LOC_Os11g16340.1 (locus LO C_Os11g16340) derived from phytozome v7.0 (chr-ID Chr11; p os 9012851 to 9013700)
ctggagcagtgcacagagatagaggtatgtatgggttagcaggatgagaggcatccaatcttttgggaaaaaacagacgcccgatctgtagttggctcggaaaaaatatattgatatccatgacttgttacggacaagaaaaaggtgttatatcctattagtaatggctaattggcattgttaataagctaaaaagtgtgtattactttatgatcatggattaaaaaacaaatttctgtattgcacttgcacatatgctgggatggatctttgacatatgcatgaatgtaactagaagagaaaccatgtattgcttgggataaaaagaagcattgatacgcgctttgatcaagcagatgacttctttacataagtaattgctattgggttgttactgtatataaaaaaaagagtgaagtacaccagcgatacataaacttgttcaggtgtgtcatttaggtcccttaactctcaaaatgcatttatgggtccccaaacttatcttgggtgtcatataggtctatccgatgacgtggcatgctacggtggtgcctacgtctcgatgggcccccacatgtcagtcatatatataaaaataaaattaaaaaccatattttctcctctctacctccgcgtcgagctccgccgcctcagctcactggcatgcgccaacaccaccaaccaatgcagtgcggagccacctccgcgtcgaccgcagccgagtccgcttatgtccgcctgcgcgagctcctagcggcgccgccatgagcgacaatcggcaccctccgatggcaccacgcgactccgcagcctccgctcgatagcacgtgtggatagatgcatgcagtgc

SEQ ID NO: 11165 - DNA, 1033 bp, Oryza sativa
  Intron number 3 from transcript LOC_Os10g08830.1 (locus LO C_Os10g08830) derived from phytozome v7.0 (chr-ID Chr10; p os 4795614 to 4796646 reverse strand)
gaggaggaggaggagctgacagctggaatcttgaggtatttttcagtgcctcttttatttacacttttggcaaatggatgatttatgaacttatgactagtgtttgttgtcatgtttgagattgcgtcatgatgggacaatgttgcgtcatataatatagtgcattgagattgtttttttcctttctctgcggccacaccagcgacaccgccacacctcattttttttcctccgccactgattaggagtcatgatagatgaaattaagttaattaataagcattatttgagggcataaatcaatacattacaaatattagaaggttgatagcttgatttgaaaaataaagatttctaagaagtattaatgaaaaaatgtacaagaaggaaagtatgcctgctagaacgtggctagcctagtaaaacctaagcaacttgatattttcactttccacagttattttcatagaattgaaagatgtattaatatgcatacactgatgaggatatcactcctttggataagcagaaggctaggagatggaggtccaattcatatcaagttcgaacccgcctcatcatctaggagcaggccgcactaaaatcgttgctcaggcctcattgggactccattttcgacgttctacatatgtatggaaagctaacgagagcatctttccaatggaactggtttcacgtaaaaatttcttccaaatcaatgagaatcttcaaaacaatagagcgtccagaatctgtccgggtgttgcgtcactgtctttaggcccgagtatcttgtttgagtccattagggacacatccaggggtccttggatgaccctagaacctatttaatcagtatccatcattgaactagggttgggattttgcttagattttttttgctgttatagtttcaccgctagttcggtttgtggaacctcaacttgtgagattcatcttaaattcgcaatatatttagattggatcttctactctcttgcttgtgttctattcgcttgcaggagataggctt

SEQ ID NO: 11166 - DNA, 577 bp, Oryza sativa
  Intron number 2 from transcript LOC_Os11g28490.1 (locus LO C_Os11g28490) derived from phytozome v7.0 (chr-ID Chr11; p os 15943119 to 15943695 reverse strand)
gatcatattgccgagcatgtaagaaaacaaaacgagctaattcaacttccagttcaagctaaccttctgtcgaagtgctagattttatagtaccttagttccacatggcagtaaattttgaacttaaaacattttgttccatgcctttctatggtagctagcttttactcattgatctatttcaacatgatactatatgatactgtcatatattcccattccaatattatatccctttgaaaaattctactattcatatcacaatgtgtagtactatcattgaaaaatttagcaacatataaaatatcaatttagtttcattaaatctgccactgaatatattttgatgatatatttgttttatgttgaaaatactattatatttttatataaacttggttaaacttaaagaagtttgactagaaaaaaaaatcaaacaaacggagagagtagtataaaagaattagctccatagaatacaaagagcagttgatggctaagaataacttcaggggtaaatgaatttaaaacctcctaattttagaacttgtcacaatgtttggtgcagtggcggctg

SEQ ID NO: 11167 - DNA, 706 bp, Oryza sativa
  Intron number 1 from transcript LOC_Os10g29820.1 (locus LO C_Os10g29820) derived from phytozome v7.0 (chr-ID Chr10; p os 15429097 to 15429802 reverse strand)
agttccttaactccttagcagtattgtccgcgattgtaagtacaagtgattttcagtatttgatccagagctgtgctgatattttggaggacataagtttcaacattgttgctcgtcaactggagagagcaattttcctatcaaaaaaccaagaaggccaaatcaacagcgtagaaatcggaatttggtatcagacatactttagttaaagatttccaattatatgttccaatcagtttttgtcgcccgtacttacgagctagctgcatgtgctttttaaacttaattatatattatatatcaacattaagtcctccatcgtacatatatctatatctatactcctctgaaaacaaagttgtggtgaatctgccaccactctcaccaccaactctttacccttttgaagtgaagaaaagacatgtgaggccagggaaccacataccaactacccccacaaccatatctactttttgtaagtagaaaaaaataatattgtatgatcatagaacacatatattaattacaaatatatgtagaatctgagagaaaatgtatacagaaaatcatgataatagcaggttaataatcattttcatcaatcaaaatctcgttgcaatacaatatgctagtatatatgatatgtatttccggtggcgacgacatgcaaggcagcaagaggcaaggagagtgtgggtgcgacggc

SEQ ID NO: 11168 - DNA, 916 bp, Oryza sativa
  Intron number 1 from transcript LOC_Os12g18650.3 (locus LO C_Os12g18650) derived from phytozome v7.0 (chr-ID Chr12; p os 10768698 to 10769613)
gttcttggtccaagaaccaaggggggaattagcgggtgaggatttcttggtttcttgtgggtggtgtgccgatcaattagatgtcaggttggatgattggagccgatcatggcgatgatcgcggtcctgatgatcgtctgttcggattggtgttctctgcttaaagatgatgttctcggttttggtgatcctttcatcagaatcggggcgattagcgtggatccttcgttgtttactcgaattggggtctttctttactggtaggatgttagtgggtgtgatcttttgccgccgatgatgcagttggaatcttgcttgtttgtgtgtgtactggttaactgtggatattgttgataattgttggataggataagaaaggtagacttttgtggggggtggagttgggaggaatatgctttgttttgtgagggggtggaagtggctctttgtcctttaccattttacatgttcctgttctgcatcaatcatttcttggtgcaagcctcacaaccgtctaatggtgttcttgactgggtttgggggcactgttttgagatttcagttgttttcttcctttgtttccttgatttttggaggttgttttgcatctgatttagtgtctgtttgccatccagaagaatatggcatctctatatgtttggtcagggtgatatgctctgtttgattgcattgactttgggaatgctttcaattattgatatgctctgattgtttgtttacaagtgttggatggattctttctcatccacttttctgattcggatgaataatataacatattattgtttaattgtgttaaactaaggtgtgctgatgagcttgttagagaagttacttaacaattaatgattgtagttacatgtcttgattacattaatgcattgcacattacaga

SEQ ID NO: 11169 - DNA, 567 bp, Oryza sativa
  Intron number 4 from transcript LOC_Os12g31820.1 (locus LO C_Os12g31820) derived from phytozome v7.0 (chr-ID Chr12; p os 19120627 to 19121193 reverse strand)
gagaagcggccaccaaggtaagctcctaagtatctaatgattcttaggtgtttcagcctttgggggggctgtagttactactagccagaactagatggtttgctttcttttgttttgtataactttcagtgaaaatacacagatcttctgcatttctcaaaaaataaaatcgctactatgtttccatttttgggatggccatgccataagagaatactaagttgtttttaatccttttctccacacgttttcatgttttattttttttcaaattggatacagaataacagaactacttgataacttcttgtttattctaaataaacaggaatttatatagctcgttgttcaaatattagctgtttctcgtaagaaactgaccctgactttttttataaatttgctacaaactatgatctatctagatatttgtgcgtcaagcagacacaacgttcatgttccttggatgtattgcgttgattgtatctagccttcacatcctactatattttatgcaaatgacattttatcgacagaatatctcctggaattgctgagcttgttaag

SEQ ID NO: 11170 - DNA, 1032 bp, Oryza sativa
  Intron number 3 from transcript LOC_Os10g29530.1 (locus LO C_Os10g29530) derived from phytozome v7.0 (chr-ID Chr10; p os 15267463 to 15268494)
ttctcggtgtcggtgagcgcgcgctcaacctgtgaatctgtgatgagatgccattatttttgtggtagctgtaaatgagaaaataagtagtatgtctggtgtcggtaggagacaccaattggcacgtcgaattctacgtgaagacgatagaatttgagtagactgaccatctaattgtgtacagtggatgtctcctttagctattgctaaatgatattttggattggaatgggtaatctccagtgatgtctttttcatgcaaggttgggatggatattaagatcatgtctataaatgctgttcattttgtggtattatgtaggttagttcataaattcaagccatctgaacgattttagtcttggaaattatatgtccaaattgaatataaaattataaatgtggttaaaatttcacctagaaaatgtttgtgctatatcaaaactcaaaacaacaatactagttgaacgtgataatttactctctttgaagaaaacagtagcattttcactttctaaataatcattctgtctgatgaacagtttatctaactgaaatggaagaaattctactgttcctttgttctagccaagccaatttatcagtactgtcatttatccaaacatcttccataagttctgcaccagacgtggtgttgtttttattattatcaattatgtttttcacggtgataatgatggggttatatgtctatctaaatgtgtatgaagcattctggcttagtttatgacatatttcagctttgtattaatatttgggttcactgggtgttgaacatatgctgtgtagtcatgtttttctaacagtttagtttgaatagaatcaatttcataaaaattaaagttgaaaaagtttgaatagaatcaatttcataaaaattaaagttgaaaaactatcattattgagtacccttgcagttgaagggcttgctttaggtacaaaacacatgattccttacctatattctgttgtgcaggagcaaaattattaggcaatccacctcttcctcgg

SEQ ID NO: 11171 - DNA, 851 bp, Oryza sativa
  Intron number 4 from transcript LOC_Os10g30850.2 (locus LO C_Os10g30850) derived from phytozome v7.0 (chr-ID Chr10; p os 16013588 to 16014438 reverse strand)
cttcgaggattggtaatttgccctcctccttcccctttaatttcccctctccttacattttcgcgcatgcgccaacacaaacatagagatattaggtactatcaattgttcatgttagaatcaaatatagctgttgcgtgctctaggagacaaaatttcgtttacctgaatgtggtgttcaagaaagagagaaaaagattacctttgccatatattggctggttgtgttcctcaggatgtaaagtcagttgtaaatctcctgcacttctgatagagtaccacaatgccctctccacagagtctttaaccatcttcatgcatcaagatgtagtccatccaatcaaacctgcatccagaatgactttatttataactgcagcaaacattctattgaactatgtcctgctcttgagcaggtaataacttattgatgtaaaagaagtaggcaaatagtcacaaaatgaactatatcatagatcggttgcatgatgctcctccaaaatacaaacctctgtatctggtaacaattctcaccttggttgaaggttacacacgcgcacacacagtctttgcatactctcttatgctgttagaaaactatgttgttctcagttcattgtatggttgacttcactttccttatagtcaatcctaagttgagagtgaatcattaaccactccttgtcagcaagcacaacaagatctgcaaccttgtccgtactcttcctacttgccgaggcgttcacttcgtctgatgcatgaatctgatcgaattccgtgggccatttaacgaaatttggcttgtcacatatgcaggaacaccaaatcaaagtcgtgccccttctgccgcg

SEQ ID NO: 11172 - DNA, 489 bp, Oryza sativa; identical to SEQ ID NO: 11019
  Intron number 3 from transcript 13113.m00225 (locus 13113. t00098) derived from phytozome v7.0 (chr-ID ChrUn; pos 493 875 to 494363 reverse strand)

SEQ ID NO: 11173 - DNA, 909 bp, Oryza sativa
  Intron number 1 from transcript LOC_Os11g26850.2 (locus LO C_Os11g26850) derived from phytozome v7.0 (chr-ID Chr11; p os 14957608 to 14958516 reverse strand)
ccatcaacgtcaacgactccgtcaccaagagcaaggtgaagcatcccctccctccctttctaatcccattatatttcagatctgaagctgtttgcgttagcctagcctgctgcttgtactgttcttaccttagtactacttgattttgccgttattatggatttgattatgctactactgtggatctggatctggtttatctgcttcggttgattcagtagatctggtgggctattacgcataaaaaaagtttatgctataggagtggtggttaggtggattatacatgtgtctttaacattttagattcctgatgtttgtggcatgttgaatatggatctgtcatctagatctccttttgtgacacaaactaaaaagacagggttaaaaaggtttagttgattttacctaagcaacactaacaattgggggaaatttgcacctgatgtagtgcgcgaattttgcttttcgtgatcgtttggttgcttgatttagacgggatgcttgtagttcctttatttagtgtctcctgtgttataggagtaggagcgtcgaatttaagtcttaggttactgcggttggatctaaatcttggtctaattgttgcgtagctgtcaaagatgtctagttttgttgttagcttgcatgttttgcggatctgatgacagaatatggaataaaatattggtaccaaactgcttgccatttgttttattttactcgttattgtgcacttgtgtagcttgattgtttaatggcattttactggactccttagtacacccttcatctgtagtgaaatattactgaatgctgggaattacaatctgttatattttgcaatgattttatcatttttgcttgagatatattaactctgtgtttcttctgaacagtttgacaacctgt

SEQ ID NO: 11174 - DNA, 877 bp, Oryza sativa
  Intron number 1 from transcript LOC_Os10g11810.3 (locus LO C_Os10g11810) derived from phytozome v7.0 (chr-ID Chr10; p os 6556505 to 6557381)
ctggcgagcagagcaggggaggggaagggatcttggtgagcatccacatcctcttcctgactcatctctctcccaccgggagtacttctgtctggaatttgcttgcgttaaccctagcttctgttctaggtttggaagaagctcttctcttaatttcagagccttaatcttaatacaagtgacagtttgtttgttccccaaaaagctgaatccgcccctgtccagtggtacgaattcagtttctgtagctgccagaagaagtaaattaaatttcatgttataccatgttctgaaactctcaagaatgttgatggaagttgatggggttctagtgtataaaactggatcagtatttctggttattgattgggtttcacaaactgtggaagtataaattggatattatagagtacaaggagcagagatggggcctaacacatgacacgtgcgttacaaaggagaactggagaagaggtggattccttctcaaattccccgcccacagattcccatctccaacctccatctccgtctcctcagagatccacatagcgactcccgatccagactaagcttgcaaaactcccttgccccagcagcgtcgacagtgtggtgctgaccggcggcttctgatcaaaatagtcagttggattggtcctgtcctgtcctgtcctggtcctgaacctctaatctcttcatttcaaaacgaatagatgactggattcattttcctgcattttaaactactggtttttctttttgttgtttttgacattgttcattgctgatataagtatcaggggtataagattatgatggatttatggcattatgggttcatctgagttgatttttttctatctgcagttagagtggc

SEQ ID NO: 11175 - DNA, 891 bp, Oryza sativa
  Intron number 1 from transcript LOC_Os08g40030.1 (locus LO C_Os08g40030) derived from phytozome v7.0 (chr-ID Chr8; po s 25349683 to 25350573 reverse strand)
acggcgacttcgccgccgctcgccgctccaccaaggtaacacccacctgcattgccattgtcattgccattgcatctttgtctttctgaaaaaaaaaatcagtttcatgtcactgttctgaacttctgaagaagatagctgctgcaactagttcttcagagttcagagtagatattggtgatttggtgcattcaatgtagcatgcatgcatgcgtgcaagaacacataagatgacatatgcatgcacagattgatgctgtggtatgctactactatgctctatgcacttttgtgcattcaatggtgtaaaatactgtaatgtgtgctgcttgctatacattggtacatcctgcagtggtggtagtacagtctcagcagtgtgtgtggagtactagactactagtaggagtagtagtttatttctgctcaaaatctcctttgcactgacacaagatccaagctagtgtgattccctccctcctgtgttttgttcccttcagggtggctgtactttacatatctccaaccattgacatacctcgtctccaatctttcttgtgcagatcgtaaaaaatgtgtcaaatagataaactattcgttgcagcattgcatcaatatacagctagtaatccatgcctcatgctgatgcatgctatgcacatctatagggccaaaagaaaaggaagaagaaacaaagaaagaaatctctgcagaagttcagagctaaatatataaatatatatcttaatatactctatgctatatttctgtccaacaagatcacaatccgtagaaatgaatactattaatttgatcttatgaacacttcatcataaactgaactgacatgtagacattggttgtttttgatactactatcatgcaggagga

SEQ ID NO: 11176 - DNA, 987 bp, Oryza sativa
  Intron number 2 from transcript LOC_Os12g08240.1 (locus LO C_Os12g08240) derived from phytozome v7.0 (chr-ID Chr12; p os 4203961 to 4204947 reverse strand)
taacgctggtaccaggtagatgttaactcgtacagtcgtacctacttagtacctattataatttgggggaggggacaattttaccctttttgctctattaacaaaattatatttttatccttagtacctaagtatatatactaatacttaaataccttttacatagtatctgtgattgagaactgttggatctttaccctttttggaatgcaaacaccgtaaaagttctcatagaatatactaacagactgcctatgttttgatttccatttgtcttaacgtttttagtttcagcagtgcaaggttataattgcttcatggttctcctctctttgtttttagcaaaattaatatgaactgcacatacatcactgtgctcatattccatacagattcaggcgtgatgatatactgttgtgcaggaagaagcttcacaatttcacacaagggatttagttggtagcagctcacacactccctttgagcaaatattgttttcaggtacttatctcatttaacttaataagttgcttgattattgggacttgggagcaactcacacactcccttcgagcaaatattgttttcaggtataatactatcgatgattcttttattctacaagaaatgtgaattatggaccattatactaccttggtaaatatttttgttccagtttgaagctgaaaaacttgtttccggttgttctgattaacgtggttcaaattgattcttagaaaatgaaaagtcttcaataggtcctgttattctgtaacatgtaggttctaattgatgcttagaaaatgaaaagtcttcaataggtcctgttattctgtaacatgtaggttctaattgatgcttagaaaatgtggatttgggattttgttatagcgagcggactgtcatcaatattaacgaaaacctgttgcatattaaaactgcttttatatgctcatggtgtgttcttcaaggttgtacatccttgcg

SEQ ID NO: 11177 - DNA, 952 bp, Oryza sativa
  Intron number 2 from transcript LOC_Os11g20020.1 (locus LO C_Os11g20020) derived from phytozome v7.0 (chr-ID Chr11; p os 11514663 to 11515614)
gcgtgagcggcgaaaaaggatcaactcaagtcctggtacacgaaggttcgcgcatggaacaaatttaggttggcatggcatattcgccaaggtggagtttgttagagtttgtgtcgaatatgtgtacgtagtcggttacagtttaggacttgcagttgtaataggtattaggattagagtaagagtcgaactctatcctaggatctctcataaatagaggggcgtgcctgttgtaatcacatggcgacttagcatagcgagaggaagcggctgccggcggcgaccggccgtgagtcgttgtaactctgatacgctgtatatgctggatcggggaggagcgcccgtaatcagtgccccggagatgtaagcctcggctgaactccattatcaaatatcgtgcctcggtgtcgtcatcattttggatctcctatggcgttttcttccgtgtttagctaccgatgttgatttcggggctggttttataacatgcataatagagtgtaaagtacatattgtaacttagcatttgcataataggagtgtaaagtacatcagtacatatttacctaatagtatgatacattaccaatgtgcagttagtgccattaaacaaggcctttttttttttgctttttacattctagataaatagccgctaaacaattatgtaagaggtgtttagctgagatcaatggtgattattagctgcaagattaatcaaatcatcaaacttaggaaacatatatctgacagcaatttgaaactttccatgttcctagtcaatatataatgtatacacagagtcaagtgcaaaagatgagacttacaattaaggttcttgtattgatcagttgaaaactcaagattatacgtatcaataatcaaaagttggattgtactgcactgatatgaaaggttaagttgcatgagcataaggattaaaatattgcag

SEQ ID NO: 11178 - DNA, 877 bp, Oryza sativa
  Intron number 1 from transcript LOC_Os09g20360.1 (locus LO C_Os09g20360) derived from phytozome v7.0 (chr-ID Chr9; po s 12219253 to 12220129)
gcggcagcggtggaagaggaggcggtgaaggaagaggcggcatcatttataggtcctaacctcgttctcgttcccgttccgtaccgtcaacctcgtcgtcatcctccgctccaagccaccttggccagtccgcaacagcagcttgatgatggcctcctcgagtcctccgcctcccatgcttaccactagatccgtgccgtcccattctgtgccaccccgctccatgccgctgagcggccgtcccgctcgtagtctctgtctctccgagctccacgccggcgcgccggccaaggtaggatggacgccggtcgtaggtcaggggaggagtcctcggtcgccggtagggggaggagtcaggacatcagccggtgaaggaggggagggagccaaagtcgctggctcgttgtcgggagtgagtggaggagaggtcgagaggagataaggggggagagagacgggggagggaggaatttataattttgttttggagtctagggtctttggtataaattttgaacctctacccaaaatgaaaaaagtatgaaaactaaatcaaataagtggtagggactgaaatataaatttaaagccacacctaaaaccacaaattttggacctgtgaccctagcctatgtggcagtctgaggctcctcatttgactgggacacaatgtgaatggctttagtagtttacatcttttgattcttttagttaaaaacttattttatatatagagctctaagaaaacttacaccctctgtgctatgagaaactaacttatgagaattaatctggacaaatgtttatctaaatttatcttaaaaatagttttttttaactattctaggaatcaacgttttttctcggtgcaaaggta

SEQ ID NO: 11179 - DNA, 525 bp, Oryza sativa
  Intron number 2 from transcript LOC_Os12g29560.1 (locus LO C_Os12g29560) derived from phytozome v7.0 (chr-ID Chr12; p os 17613743 to 17614267)
ccgaccctcgacaggcgaatccgcgaggagccctggtacgaaactatcctcgcccgattccctctgacaaaggctccatttccgctcgaatttaagctcagttttagggtgccgcggctctctctagattttgggtagatttgtggatttagctgtttttttttcctcttcttctagcgctaggtggcagtacatttgatttccccttttcagcttatgctctgatctagttttagtcgaaagtagctttcgtggtgcccaacctcgcgagtgattctgcatcggatcaatgatactccagcaaaaagctcattatataatatacatcgcggagagaacatggtctcttttgagaagaattctagctcgtgatttccgtcggagatctgatcacattgtgattcttatttttcgtacctgcaagttgtgctctggcttgtgataagtttatagttccgtgtctgtttttaagagccaggatctctgttttaatggcgttgtttgattgcaggtacataggggcat

SEQ ID NO: 11180 - DNA, 588 bp, Oryza sativa
  Intron number 2 from transcript LOC_Os10g28680.1 (locus LO C_Os10g28680) derived from phytozome v7.0 (chr-ID Chr10; p os 14889896 to 14890483 reverse strand)
tacaggtcactctactcttcatttctctgaactgaatagagtgttcatccgatcaccttcagatttcagtatcattttcaatatcaaagatttgaaaaatctttttaagttttttggagttgattttttttctgaaagaaagataatgagcgaaaagccgaaaagtatgtctcatctataaacctgcttgattagttaatttaaaattaattaaagctttcctgatgctctaagcaatttggagttaatttacaatgaattaaaactttcctgatgctctaagcaatttggcgacggtgatgattcagtgaaaagcctatcatgtctgtacttccatagagtttaatatggacatttatgcacattgataaccacatcgccaactaactaattaaactactgtcaagtatcacctggcacttgcaaaaagatactacaaatattgttaagttcttcacactgtttgatgccatttgatcaagtgatcattatctacagaagaattgataaagtgaccaattctgaatatcagaatgcctgatcttcttcttcttaattcaggggtgagaaggccttctgcagccacga

SEQ ID NO: 11181 - DNA, 890 bp, Oryza sativa
  Intron number 4 from transcript 13113.m00162 (locus 13113. t00035) derived from phytozome v7.0 (chr-ID ChrUn; pos 280 480 to 281369 reverse strand)
gagactctatcatctgaaaaggttgtttccctaatccccttataactatacttatcattaaccgatgtttctgctgcctgatgaaggagtacatcgttagcataaatggaaccatacatacatttcttttcgtcacaatgtcaaaccctttattagcattataggttgccaacttgacatactgctagtcatgcagccctaaagttcaaaaggacagttttgacatactacaacttgataggtagaatgcatgtttgtaatagaatcatttagcccaataaaacttagaatcaatgtgatcaaaggaggggcaaacttgccttcatctgcaaactcctgaacctggtcgtcaacaaactcaccctcttcttcttcgacgtactcttcctctatacaaaatacacgtatacgataaatacaaaaatgcataaaaaccaaaatgcatgaaacttatgcagtgagtgtgtgctggtcttaggtggtctctggtgaaggaatttttattttgtcactttttattcacagagatatgcattttacaattaaaaaggtttaaaaagggctaagttttattaagcaacatttttgtacagaagtgaagaaattactttcacaatgttacagagcatgattttataaagttaacagaagtggtttcacaatttttatagctatattcaatttgttatggatttaacaagttctaggcaacattatggcaaaacaaaaataaaggaaaagtttgtacagaaagtacccagttttatattttttaaaatatatcacagctttatggatctaataaaactggtttcacaatttttgaagttaaaatgaattttctacaaattttagaagttctgctcattctctgttttaaaccaaaatag

SEQ ID NO: 11182 - DNA, 877 bp, Oryza sativa
  Intron number 1 from transcript LOC_Os09g36440.1 (locus LO C_Os09g36440) derived from phytozome v7.0 (chr-ID Chr9; po s 21028941 to 21029817)
gccgacaggtccctcctctttctccaatcttctccccttccgccaccatcacggcttagttttttacgggctcgattcgatcgagacatgaggatgtgcctgcggcttgcccttgatttatctcgtatgttgaaatgaatcacttgatcgtgcggagcccctgccctgatttgggtttgcgggggagcggatttaggagttgaggagtgtgatggggcttttggagtaatggggatctttcttttgcagctatgcctgccatgtttgtaggtttggaacgtgtgattctcgtgtgaagttctagagcggttcatatatccagtagatttactgatgcatctctggttacgcttgggatctatgtgtggggaaggactcttcgttgatagatttctgaatttgggataatgcgataaatatcatcagattgtaaaaagtgtaaaaggaatttcggggcgtataattaactttgtgcaccaccaaatgctcatctcatgtagttgtattagtattatgtaccttgggagcaatgataaatctactacaaaaggtgtgtagcaccagttgcttgaggcatgtgaggtagccatttagcttcctagcaagctagaactagtgaaatgttactttttggcatgaggcatgtgcaattgcaatagcctcttctactagtggatctataggaagggaaacttcgatgaagaaaaacgatgttaggtttatttggtttgattgaaggagatgcagaaacacgatgatttactgctatggcagtttagatatttttcttatcacaggatttctgcaatactctgacatgatatctctaatctcatctccaggttaggtcttgtggctacaatcaaggtaaacattc

SEQ ID NO: 11183 - DNA, 411 bp, Oryza sativa
  Intron number 1 from transcript LOC_Os02g18830.1 (locus LO C_Os02g18830) derived from phytozome v7.0 (chr-ID Chr2; po s 10990795 to 10991205)
agagggcctgcctcgaggtcggcaaagtcggcaaggtatggggcgaagcttcgccaacaaatttattacacctttttcttgcgcttttttttcgaccaatccgtttctggctttggatgtacagtttggatagttggattagttctgttcttatgcttatcttgataaatttgtttgcgctagaagataattcagctgtatactttgttaacgagttagctgtattgtatctgaacatatcattctgtatacctgatgattgaggagcttaatgctacacgaatgatacttttgacaattctttgttagctatattgtatctgaacatatcagtctgtagctctgatgattgaagagcttaagctgcacgaatgatatttttgacgattcttttgactctttgtgtagact

SEQ ID NO: 11184 - DNA, 362 bp, Oryza sativa
  Intron number 3 from transcript LOC_Os01g17330.1 (locus LO C_Os01g17330) derived from phytozome v7.0 (chr-ID Chr1; po s 9967142 to 9967503 reverse strand)
cggcctcctcctgccgcataccaccacagaccaaggtatcaacactactcagtactcaccatggatgcctctgctttactctgcttgtcgtcccggaatattttcttcagtcaaattcagtttcaagtactcagattttaatcaaactgagataaacaagagatctgatttcaccaccaggattcacttgtgaattactccaatttgtaaataatggggacaacgaactgtttttttaaaaaaaaaaattaaaaaacaagaagtcctcttggtggcatatcttctttctgataagaaattgacctgacatgttgttgatgtttccagagctccagcatctgaagaacagcctgcctgatcag

SEQ ID NO: 11185 - DNA, 829 bp, Oryza sativa
  Intron number 2 from transcript LOC_Os03g16470.2 (locus LO C_Os03g16470) derived from phytozome v7.0 (chr-ID Chr3; po s 9079179 to 9080007)
attgctggtacagcacttcgtcttccttttccagtgtgagcacatcttccactgtctaacttagggcttgtttgatttaccagtactcgtacttttttttttttggaaaccaagtttgatagcagtaaaaatgtcaaattgggtctaacttcagaacactctaccattttgtttccattactactgaatatgtggttgcttggaccttggagtattcaaccttgtgacattctacattagggaatgctagaataggaattgattaagtaaatatagcaattagttgcataagatactaaacctctcttttctttaacaagtgtggggaatacatcttcgttggatgttctttagatgaatgagggcacgtgcataaatgaatccattgtaattagtttcattaggttatttgtgcactcacagggttcctctgttactgcagatcgatattcgacatgtgactttgcattggcttgatgccattataaagagtgatagtccttttctccataagttgttcgaattaatatcatttcttatcaatttttcttattatgaattgtgagaagctgtactagaagtgcctcgtaaattctgtatcatgaattcacgattgaattgtcttgtcaacatggtgcatttcaatggtcaacatggtgcatttcaatgcaaataaaacaatagcatgttcttggtcatttgtttttacttttgttggggcatcttctgttctgaaaaatagcaccgttctattattgaggctaatacacagctatcgactttcttgctaaaaggttcaacgagctgtatcaatctggatactgttaaa

SEQ ID NO: 11186 - DNA, 748 bp, Oryza sativa
  Intron number 1 from transcript LOC_Os01g13730.1 (locus LO C_Os01g13730) derived from phytozome v7.0 (chr-ID Chr1; po s 7678242 to 7678989)
acgagttcacgcgggagcgcagccaggacctgcaggtgcgtcgcgtcctcgcttccgcttccccttggctgcttcatgttgctgtttgtaggttttgattggtagcagtgatgacttcgttggtttgctccctcgcgagagcgcgatgtagtctccatgctttagttctatgatatggagctttgttgttgcaatcagctcgtaggttctgaagcaccgagtttgtttgcactcgaggacgaatgagtggtacaaatatatgcctagtcaatttggtgtagctgcgaagtttctaggggctaatttttatccccttttgctgggattgtgttgattttcttgaattcatcggttgacatgtggtatatatcgatgcataagagccactgcagagttccctttttctagtttggttctagctaaggttaacagaagagctttgtttcaaatgtctggacagagtattggttggagagatgtctcattgttgctttgcattctaggttaatatagtagatatctaccgtccattttttagtcaagcgatttacataattatgaagttaggttttgaatccttattttttcctgaaatatacactgagtttttgaatgctatggccaacactaggttcaggtcattgaaagtttgtctggtcacttgcttaggccaatatgattactctggttccagccactgacattttctatctcatttgttgctcccaacagaaagtattccgcaatt

SEQ ID NO: 11187 - DNA, 577 bp, Oryza sativa
  Intron number 3 from transcript LOC_Os02g31290.1 (locus LO C_Os02g31290) derived from phytozome v7.0 (chr-ID Chr2; po s 18765385 to 18765961)
ggttagtgctgagtttgatttaacttatactgggttttgttctacatttgtctattagtatgccttgcggttgcagctttaaattttcacgctgttgggggcatgtacttagtcgtttctttatgcatggatagcaaaactttggggacatctattggctcttttttctgcatgaattacaaaccatctataggagggctttctttgaaaggtttacctggccttgacagccatctagcctgcctaaattgagttaacactaggtgctggccttgccacctgattagtgccttggtgaacattggttttaagtattttcccctctatttatgttagattaatttgcaataaataaataaataaataaataaacatgcatgttcttcttatatatgcaattggttgttgtgttttttcttgttatggttactttctttgttctattgtactactctttgagtctttgataatgtgatggttcataaatatgtgggtttcccatgatattttctcataactaggtgggtttccaatattgacaggaagcaagtctgttgcatcttcaccaattgaaaaa

SEQ ID NO: 11188 - DNA, 903 bp, Oryza sativa
  Intron number 2 from transcript LOC_Os02g06080.1 (locus LO C_Os02g06080) derived from phytozome v7.0 (chr-ID Chr2; po s 3035352 to 3036254 reverse strand)
tccctgtagccggtccgaaaaaacttcctcgagttcgttcacattttaattgaaccaggatgtcacatatgaacttgcagactgacttccttatagaaatgatggtcccagccttgttaatggcagtggaggacggtccgtacgtgcggccctcacggtccatggtgacgatgacgccattaacaaggccgagtttagttccaaaccttttcttcaaacttctaacttttccatcatatcaaaactttcctacacacacaaactttcaatttttccgttacatcgttctaatttcaatcaaatttctaattttgaagtgaactaaacatgccccaagtttgaatgcaaatcgagcaactcagggcattaacgattggcaaggacagtctggacagaattatgaagatgttgccattgttagccaaaatagatggacaagagtagctggtcatacagcacccctattccaaagaacacgccaaaggcaatcgctgcaatgactttttgatgctggattctttttcagagatggctgcgaggaagctgcctctactgaatcatcacaatcattacccaacacagggccacatagctttgggttcccatcaaaactcaaacttgaccttgataatgtgctcatctgaaccttgtagatcattgttggaaatgttaaagtttgagaggaagtggagctccttgttcagtgcctcaggccggtattggacctatgagatggttgctagatagattgagatgcatcatgcatttgatactgtaatggtaaggagtgtgtgatttcaattctgagatcccgtgttcaatctcgaacacgttcacaatgtcttctttaaaaattttaaaaatttagagggatgtctctcccttcaaatattgtttttttag

SEQ ID NO: 11189 - DNA, 832 bp, Oryza sativa
  Intron number 2 from transcript LOC_Os01g56980.1 (locus LO C_Os01g56980) derived from phytozome v7.0 (chr-ID Chr1; po s 32923253 to 32924084 reverse strand)
ttcttgagaggctgcgggcgttcggggagttcgaggtatggttcggaaaaggtcattctggtcttcaggcagattccagcccgtgtttcttttgttaattagtttgacgtttctccttaagagcaaattttgatatcaaatggagaggaaaaatggagtctttttgtaggatgagaagcattcagagattcaattaggattattgatgcccgcgaactgtctgaagaaacatgctagaggtctatgacaacatcaactgaaaaaagcatatgatccttgtgtctctgtttccatatgcaggagtaaactgtgtaactgaacccattagcaccctattttctgactgctgtacaagttaaggcgtggcgattacatattgcccgggttccacggctcaatcaatccttcattatttggccgggtacccggaaaacaagaatatgtaggaggaacaaacaacaaccatgcaaaacgccattcttgtattatttcctacaaaagtctatgtgtggcctgcacaacttcaagtttggtagtcataaaaactagataaatatctataaaatgttatggaagaagaaccttgtaattatactctctcttctgttatcagttgccaaatacagtcagttgtagctatgaatcctgcagaagatacgtatatgccaccatggtgtattggcatagtaaagtgttttgcttctgatcaatacaacatatgagcatctctggctctttagtaaagcaactacattgtgctgaatgttaataactacatgcatgctttatggatgcagattataatttttggtgacaaaatcattcttgaaga

SEQ ID NO: 11190 - DNA, 979 bp, Oryza sativa
  Intron number 2 from transcript LOC_Os02g12794.3 (locus LO C_Os02g12794) derived from phytozome v7.0 (chr-ID Chr2; po s 6717230 to 6718208)
gcgctcgtaagtgtgatctatccatgttacctgttcatgcttatcacgtgttgctacttgtgcgaattggtttgatttgtggggattaatagtgggaaagcttggcctgatgcggtggggggtttggttgttcatttcaaattatagcttgtgcgggttgttgtatagtctgctatgagaaaatctttttttctgcatgatcagggttgatttgatgcgcattgctacccagtgtttcgatctaggaagggtttttgtagggtgttgacaatttaggtgttcaggatttgacttggatcgttgacaatgttcggttatgtctagcatctctgattttcttcatgctggcttgcgagctcgttgatatcaatgatttctggtgttcttttactgttactttctggttcaagtgctggtggttgaagaagatttatggtgttctttactttgttactctctgcttctaatgctagtggatggagtgaattacttaatttgtagtaaggagctatgattttttttctgcactgtcatttttttctgattatctcattggataccaagtgttgcactattgccaaagtaagttcgtattcaatgcaagtaaatgagtgcccagtgtcatgccggcttgttaacattatactcgttatcctgcatagacatgcacagggttgatttcctagaacgcttagagctttttgtttgatgcaaatggattcatttacagtttccaaaatgtgttttatttgctttcagaatatctgatctcacgttgaccttatgtagctcagcacttctgcacataattatataattatttgcattgattatcgctatgcacaacattggaagctaaagttactttgtaatatatgcttcttgatctgtgaattggttcctctgcttgtatcgtttttgtttatcatgcttgtgtctccaaccttatgtacattattcgtctgtgattaggtattgc

SEQ ID NO: 11191 - DNA, 370 bp, Oryza sativa
  Intron number 6 from transcript LOC_Os02g12794.3 (locus LO C_Os02g12794) derived from phytozome v7.0 (chr-ID Chr2; po s 6719337 to 6719706)
cacaaaaacaaatttccgtgaggttgctatcaagggtaagtttcttttgggaatctagtagtcactaaaaggtttccacgtagaaaagtatagtttctttcgggaatctagtagtcactaaaaaggtttccacagagaaaagtttactacattgctgtgagtacactagaaagatatgagtacaaattggcttacaaattataacagctactaaagagtcaatgcaaatttgtttgttgacctgtcaactgttagcaagttatatctctttgattaccattatttgtcatctgctcccaacttctgttgtgtatgaagttctgtgaattgaactcaacatgtcttctcacttattgcaggtttctgggat

SEQ ID NO: 11192 - DNA, 564 bp, Oryza sativa
  Intron number 2 from transcript LOC_Os01g10400.2 (locus LO C_Os01g10400) derived from phytozome v7.0 (chr-ID Chr1; po s 5477830 to 5478393)
gcgtcgtcatagttgaagccgagaagaggtaactaactaactcaatatcgatcaaccaaagcatatttctcgtctgaattttacagttttaatttcttcgtctttgctctcaaacacacacacgatactatcgatcctgacgttcgcatacgagacacgtacggcctaatgtattcgttcatgcttatatttatcagacaaaatttaaattttcaatcttaaatttaaaactgattttaagttttttattaaaatttatttttcaccctctacttttagttgctaaaaatatatatatgaattttatttataaattattttcgtttgcaattatatcgtttgacttattccacgaataagctaaatgatggggtctgtagcatatactacaaccaccataaaaaaacttcatcaaaaatattttaaaattaacagaaaaatagtaagaactttacatacgagattagatagttctcaacaatttttacctgacgccttaattatttgcttgctttgtgcgtgcgtgcagccacttcgaggaggtcgccgccggcgaggagaacg

SEQ ID NO: 11193 - DNA, 549 bp, Oryza sativa
  Intron number 3 from transcript LOC_Os01g13720.4 (locus LO C_Os01g13720) derived from phytozome v7.0 (chr-ID Chr1; po s 7676525 to 7677073 reverse strand)
aataccaactgggaaaggtgaacactaaaatgtccccaccgttattgagatatttgtggatgctatgctatttagtaatttatagttgtagattatcaccaaacctagttccgatttatgaataccacttgtatttttacggagaagatgaagagttatcaggttaaaaattgtccaatggaaacattgaagaaaatgtactgatgattttttttaacttctatgcaatctaaaactctacttagtgaataagcaacactgaatcttttggtgagatgtactgacatttcacccaaagatcagtgttatctgcacacgatgttaaatgaggaaaaacattagttgcatcttgtcctacaggggtaccaacattttttttttgtttttagcttttctttactctacttgcttccattcatggcggaacttatgacttggcatttgattgtgaagtaagctaaaagtaacagcagtagttttagatttcttttgcttcaattcgttgaacaattatgttgacttaatactgttggacaacagctgaaactg

SEQ ID NO: 11194 - DNA, 748 bp, Oryza sativa
  Intron number 1 from transcript LOC_Os01g49350.1 (locus LO C_Os01g49350) derived from phytozome v7.0 (chr-ID Chr1; po s 28372624 to 28373371 reverse strand)
tcgctcttcaaccgctccaccttcggtaccaagttcgcctcctcgccttctccctcctcccagatccaactactatcccctcctctgctgcaatttgtctctcggattgggtccgtgttgctaagatcggcgactttcatgctcgtgcttgtgcttagcaaggagttctagatttaggttccgttccgcaggtatcgacaggtagttttctatggagacagaagaataacataaacttagcttccgtctggatccgagtgagtagagagatagagagcagccgtcttcacctcctcctgtaatgaattgccatcgctgaatgcttctgttcattatttccttaaagggtgtgccaaattcgcgtatattgcatttttttttggatcttaggctattccacagacacacacagtcaatgttttgatgattgctagcttcatttttttttcagaactctgactgtaagtggcaccgtaactggattaaaccagcagaactcaactagtataaataccagtatgcactggcgttatcagatcaaaggaagacgatgagttcattaaaattactgtattagagttagtgagatccagttactagtaattgcttacccacggccacaactactttatgtttcatgtcgttcatacagtgaataattgcattgcctatgcatacatagataaacagtgtggctttattttgtaacctcaattaacagaggtttcgtgcattcttttagcaaaac

SEQ ID NO: 11195 - DNA, 547 bp, Oryza sativa
  Intron number 6 from transcript LOC_Os02g55770.2 (locus LO C_Os02g55770) derived from phytozome v7.0 (chr-ID Chr2; po s 34141722 to 34142268 reverse strand)
aaaggtgcatatggacttttattttagatgttctaactttgttttgtctctacctctcaaattgttactatatatgtactcttcaacctgccgcataggttggcacatgtttataaggtcaaatggaatatatttcttgtgtttttactatcatttggtttagttctttcacacagcaatgttgctatttctattgttgcttcccgccctggaaaaaacacggctcaagccgtgaggtcttcatttgcttctcttgtgaccaattaatctgtaggtttgggtccaaagtatgctttcgcaaccaagtgatgaaaaaaaaaacaatctggttggggatgtcaattggttggttcatacaagtgagttgatttgattatttaatttcctctaaacaatacctctaatatttaatggtcaaggatgccataccatatatactgttggcacttgtataccacgtgcttaggctgccataaaatgatttgccatttctggcaaatgatgtaaatgatgacatagaaaagtaaaaaattgcaggaataaacct

SEQ ID NO: 11196 - DNA, 648 bp, Oryza sativa
  Intron number 2 from transcript LOC_Os01g54670.1 (locus LO C_Os01g54670) derived from phytozome v7.0 (chr-ID Chr1; po s 31454703 to 31455350 reverse strand)
ctgtgcacagcttgtaaaggctcattccattcaaggtacgcactcatttcagacaacatttgagtgtagaggtagcgcatagcttaattagctttcttttccaccatctgctttgtgtgcttgtggctagattcttttggtttctaacgatcaactagtaaattttcactcgtgcaaaaaagtagggtagatacagtttaccacaaaagattctgcagttacgaagaatttatcatggatagatgcaggttctcaaaagaaaaggaaacgtttacttgcaaataatgataatcatttgcacctccaattatgttatccacggatagaggaaatagagcatggtgtgacctgtcggatattcgtgtggcctacaattctacaaagctgcagcatcacattatattgctggttacagacaggaatcttaattttgtttttgcttttccaccccggcctttttcttttcagcaacttttagcttcttgtattattggcactagctacagtgggccccttggatcaattatccgcttgggttgatttggcctatgtgaggggattgtgtgataattagaacgtgacgagtatgtgtcttggatcactggatgatatttgcagcttgcatgtgcttgtcgtgcaggaaacaag

SEQ ID NO: 11197 - DNA, 751 bp, Oryza sativa
  Intron number 2 from transcript LOC_Os03g17710.1 (locus LO C_Os03g17710) derived from phytozome v7.0 (chr-ID Chr3; po s 9853289 to 9854039 reverse strand)
gaaggtaagaacagaacaatgggcattaagagagcttatttctctgaagtataatggatttttctggtaaaattatgataagtcactttcatttggtgtaagtgtaaaacactagtgctgcgctaacgcttgcttaacagttgacattacaacttgttggtacgttcaaatttcaccaaacaaatcaagctgtttcctattaaaattgtgacctttccaaaatgtgggtgcaaatcttcggttgtgctcagcataggccagtaaagcaccatatccttcctaccctttcccattggccagctcatggcaggtcttgggttcagtggtaccataccgtctcttttcagctactttgtggacagagttccttcaagccattcagtgtgacattttctgttatttctttaagtatgctgtagaagtttgaccccccaggtcttgtgtgtttgacttgaatgatcttgttgaaggtttttcggttttttacacaacccgggaggtctgtggtggtctggtggaaggggtgcccttggtggaattggtggccattcttttttctccggaattggtgaccattcttccaaagtttgtcgaggactttggtgaagggtgcccttggtgtaatgttattgactgttttagtggaagttgcaagtcggtgatgcatttgagtacttgagtcatgatggcttactgtttggcaaccattggtgcagaatacgtgaagtggagttgaagcgcgactacgcgt

SEQ ID NO: 11198 - DNA, 577 bp, Oryza sativa
  Intron number 1 from transcript LOC_Os01g40630.1 (locus LO C_Os01g40630) derived from phytozome v7.0 (chr-ID Chr1; po s 22957252 to 22957828 reverse strand)
accaggacgccgccgtcgagctcggcaaggaactggtcaggattcttcttcttcttcttcttcttcttcttcttcttcttcttcttcttttttgatttgattgattgtcctttctccctccctccctcccaaatccgtcataaaaatccaatcttttcattttctacttttctttctttcttccccctccgggcttcgccggccggctcgccggcggcggcggcggcgaccgactctccggctcgccgtggccgtttctctcttggtgcgcgtccctagtatcctaggcagctatagtagtaggttttctagatgagcaaacaaaaccaatcatgattgctggcgagcgcggtgacctcagttgcgtcccgaacggaacaacaatcttacaatttttgcatgcatcaaaacgccaccaccatctcctccctctctcccccaccttttggatttttcttgtcgactcaagagagtagagagaggttgattggtttcttgtttttttacatttccccttttgtttttggttcgtgttggtgcaggtcgagaggggcatagacctggtctacggcggtgg

SEQ ID NO: 11199 - DNA, 485 bp, Oryza sativa
  Intron number 4 from transcript LOC_Os02g47670.1 (locus LO C_Os02g47670) derived from phytozome v7.0 (chr-ID Chr2; po s 29132081 to 29132565 reverse strand)
gtcccaccagcactagctaatcaggttagttcattttgtgatctttgttgttttactctatcatgtcagcctcacaaactcaaagtcattatactgtttataagttaaataacaatttttttttgcttccctcatgtgcatgaattgctatatagcttttcttttggccagtaaataaaagcaatactgaaagatatcttgtattcttggaatttgattttgtcttctccaaacaactgagttttcaaaggtctccagacctacttctgtaaagtaatatgatttaacttgaaatactagtaatttatagaagcacctgcaataagcagcaaattgatcaaaacatgcttcttataacttgcagttagaggatatatcacttttatcatggaattctgtgtattgctatgatatctttcttgcaactacttctcatttgcttgattgtttatgaagttactttttctcacagattgttgacgtcc

SEQ ID NO: 11200 - DNA, 909 bp, Oryza sativa
  Intron number 1 from transcript LOC_Os01g21320.1 (locus LO C_Os01g21320) derived from phytozome v7.0 (chr-ID Chr1; po s 11908267 to 11909175 reverse strand)
ccgtgcactacaagtacaaccccatcaagaccatcatatccttgctcatcaattactctttctcgatgctcatctaagttttggtgctaactgatagctgggttgtttaatttactttcccatttctagttaaattttgtcgattttaggtgaatttgctggattcggttagttttggatggggaaattccttcttttaagcatatatattcaactgcttgatttaggtagatggacgttataaaaaatctagatatactcatagcatgacatatccgtgttagtaagaatttagtaagaaaaagttagtacgtatagccttttccgataacaaatagagtgtgaatagatttcagctgtaattctggagctgaggtgttcatcttgattgtctggtcaacctttctcatttatttttggccaaattcattgcatactttatactccatctgaacatgaagtcagggcttgctttctgatacataaactggcatatctggattgctctaattaaagatctttggatctggcgttctgcaacccgcatctctagttgctttaaacttcatgaactgatggaaacgaagtttgcttaatgttgttttaactccaaaaaggattgaatatcaaaattatgctttctatttattttttgtggtaagtaactgtgaaaaaaaaacgatttttagtggaagaaaccaagtcaagattgcatacagttttttccaacaactagatctagtttagtggatttcgtgccgatttgttaatcggaatgtctgtcccgaaaggtcaaacaagcaagtgttttgatttgttgatgagcggtttcttttagtttctacaaatggttactgtgagccttaacatttgagatgacacaagaccaacgtggttgggacactgaac

SEQ ID NO: 11201 - DNA, 846 bp, Oryza sativa
  Intron number 2 from transcript LOC_Os02g42134.2 (locus LO C_Os02g42134) derived from phytozome v7.0 (chr-ID Chr2; po s 25323812 to 25324657)
atcaaattccgctttggtttcgacgaataccgtaggttggttttgatttgccggcatgagtgcattgtaggttgcaaaaggaatattattttacatttattgtgtgttctctgttcctttcccgatcgttttcatctttgagcagtgctgcatttctgattgtaatggtgccattttatttttattgctgcatcacacacttgaacaattttttaattcatcgtctaatttctcgagataaaatcctgtaaaaacttagggacgaaataagctagacgattttcttttccagttcaaatggctggtttgggttattagaagccatagaaaaaatagtgacctattatttaggccctgtttgtttcagcttaagtttattgtaatctacattattgagccagattactgtaagctgaattataataagccgacatagaataagctgtgagctgtttgtttctctggattataagctgttcgttagctgttagccatccaataatctaaaaaaacacctttagagtggattactagattatagtaatctggcttatagattgtaataatctatcataataagctatctgtttgtttcagcttattcctaataatccagattataataattctaagctgaatcaaacagtgccttagactcgaaggctgtgtgtagattggttttagtagttttaatatataatttggactgcaagcttcctgcttgtgctatcaagttgaatcttctctttttcctgataaatccttttgttttcatcttaaacagacctttacatgcatatatgctattgattgcggcttatttccattgatttgcaggtcaattct

SEQ ID NO: 11202 - DNA, 464 bp, Oryza sativa
  Intron number 4 from transcript LOC_Os03g15180.1 (locus LO C_Os03g15180) derived from phytozome v7.0 (chr-ID Chr3; po s 8302846 to 8303309 reverse strand)
gtgataaatcaccaactagttgtcctaattgccaggtttgtgagatttcttgcacttaaaacttgtgatatgtatttatctaaataacctggtgaacgacttattgtaagctacttgagcaagtgatacacgacttgacacatcactggtttgtagctaaattaccggattgtctatagatacataagcttccatttctatgcatatttgcagcttattcatacttgaaacttcacttttgatattgatatgtatcatttgtgctttggggagcatatgaaaggggggtttgttgaattcttatcgtaaaaccgcataattagttcagagctatgttcagtggaaaaagaagtagacatgattgcttttatgcttcatagtcgcatgcacaagtttccatgaccaattttaggtactcttctgatgcaggttcttaagagtggacatttactgctctcatctaa

SEQ ID NO: 11203 - DNA, 856 bp, Oryza sativa
  Intron number 2 from transcript LOC_Os01g50680.1 (locus LO C_Os01g50680) derived from phytozome v7.0 (chr-ID Chr1; po s 29104337 to 29105192)
cggggtggacgctatcatcggcaacgtcgacacaggtaccactacttgaaaaatgatattcgagacgatcaaaatggatttcacgagcgactggtacaaccgctagcaaccaaaaactaatgaaaatcgaattttttaaattaatttttcaatggatttttttttaaaaaaaacgcactaagagcacccacaatagtaaagtaaggtgctctctataaaaatgtacatctcagcaatagactagattgatagtaaaccacctcaatagtatgtctacatgggtatctgtagctctctcatccattgcctcgtttttctctataaactatctccagtttagtagatagatttactctctctctcttcatttaatctgttccaagtagaaaaatatgctgacatggatctcttgtagagagtctatagataaccattgcgggtgccctagaatatgaggaagtgaaattgagaaacacagccccaaataatgaacacagaacgatcggagcgaatcagttattccgtgcatcggtacatgcttcccgatgagatacatgcgcgagataacttaaaataatcaccccaagatgacatgaggttaacagaatcaaatcccaagaatacgggaactaaaaagtcaattcaaacctcgcaaaatggtagcgtcgccatgggcgcagtgcgcctgtgcctctgttggattacgggatccctggtggcctggttcagatgtgctgtcgtcctatctgctgtactgaagtgctgtgcagttagccatagccggaacctgttctgattcctgaactcctgattcttattttctgtgcgtgcacgtactccctacaaatgaaggtgt

SEQ ID NO: 11204 - DNA, 689 bp, Oryza sativa
  Intron number 3 from transcript LOC_Os03g10140.1 (locus LO C_Os03g10140) derived from phytozome v7.0 (chr-ID Chr3; po s 5134491 to 5135179)
agctccggctcccgcggcgcaaccggagcaacgaggtaattaatggcggtcaccccaattctactatccaatccgcaactttaccaacccatggtcaaaaccaaaagagtacttgcagaggcagttccagtaccgccttgatgcttgcgttgtcttcttggaggattgtggcgtttgcgggggaagaagcagacgggagcggaagtttcgcggatcgatggttttgtcacgatctgatgtgcgcgctaaaaaaaatgcccgagagttttgggggggggggggggggggggtggggggcagtagttcgttcgttgtgcgttcctcgcacgcgcgcatctcgaaacctggctatattttcacatgccttaactgcagagaacatggggattgctagttcttggtcgtttcttcgaagatgaaagaaaggtgctttgtatagtaaatccaacggagtgcctttgtggagcctggaaccttgaatcggatgataaaaaggacatgctcatgaaatgaatacattgaaaaagatcctcatcatggcgagctcagctctcgttgctttctgcctctgtcgttattgctttgcttttagttgcaccttgacattaatctagcgagctagtagtatatgggtgatctaaatctgcctcctgattcgcttacactcgttgcgctgcatgcagatcggg

SEQ ID NO: 11205 - DNA, 747 bp, Oryza sativa
  Intron number 1 from transcript LOC_Os02g09359.1 (locus LO C_Os02g09359) derived from phytozome v7.0 (chr-ID Chr2; po s 4816112 to 4816858 reverse strand)
gggtgggcttcctgctgcaagggggtggacgggtgagtgcatatctggcgatttgaggattgattcgtgtgtgctgtttgcctgtttggtgtgtttttttttttttttggggggggggggggggggagaggggagatttgctcatttgggtgggttatgacttacgagggtgggggtggttttgacttgttgggtggaatcgtcggtaaacatttgcaattttgtttgtgattagttctgttggtggattcgatgggtttgctcaaaacagattactcgattgattagctaagaagaactttttttttctggggagaattttttctgctgggagctgagaagtgtcttgaagcagaaaatggtttttgtttggggaaatggtgagttgctgatcaagttttgtggttttgtgtgtgatttgctgattaatcatgcgagcatacaacaccgcaacattcacctgttttcattggatggatgaaccaaatgatgcgtggaattttctctgcttgtattggggaatttttctgttcgctctcggattgcagttgttggtcagcaagctgaaatagaatgacatagtggaaacttatatctaattaatccgttaaaaatgtgccaattcttttttttgggaagaagagtccgtacttgagagtttgaagaggaaatgaagctcgtttgttgatctgtttgcttgttctatactcagggttctacctggccggaggaagaagaagaaggaga

SEQ ID NO: 11206 - DNA, 933 bp, Oryza sativa
  Intron number 1 from transcript LOC_Os01g21960.1 (locus LO C_Os01g21960) derived from phytozome v7.0 (chr-ID Chr1; po s 12325837 to 12326769)
gaggaggtgaaggaggagatctggagatctctcaggtggtggctgcttctgcctctcttcttgattgtgattgctgctgcaatgtgcctacctttgttgtttgtttcttggtctggatctcggggtgaccgtcatgctcttcttgcatttgatttgtaatttttttcccggattattattcttgggtgaatgcttctcttgggatggttgagttacctggaaaagatccaggaggggagttcttggggaatggatgattgatgattcttgataaaaggaaccatctttcttttgtccttttggttgcaagaaatcaagctagaaaagataaagagaggaaaacaaagcaactagtatcttttttcttgccaactgtgggaagaagatgtaaagtcttgccaaccatggtagctctagctagcagcggctgcttggttcgtactccactttgtacttgcttgctgaggattgcttcacgtgtaaaacgccctcaagggccatgatctttcctccaggtccagggcggcgaacaaacacggtgaaaaaaaaagagaattaaatgtgctagctgttgatccttgtgcatgtcggtacagggttgggttcgtaccgtgatcggcattgcgggaatttaatcccctgtacagccttggagcagaggagcagtaacttcttgcctttgcttcccttccagcccaagatagtgtactcgtttgtcttaattggcgctctgtagtagtagttcatgaatcgggaattattatacgctcgtactgcgaatgtagatgcttgcatttgtttttcactgcgaaaagagctgtaaggacattagtatttactgcattgtgtggtaattgcagctgagctagatgggcagctaacgtggtcatctgaatttgtttgtttgcaggagcgaagcattgacattccgct

SEQ ID NO: 11207 - DNA, 744 bp, Oryza sativa
  Intron number 2 from transcript LOC_Os01g49310.1 (locus LO C_Os01g49310) derived from phytozome v7.0 (chr-ID Chr1; po s 28345930 to 28346673)
tcttgctggcgacaagtcttcggtggaattaggcaagtagctgattgtactctatgatttacctagtcatttgttttttttttacttaagctggtagaacacctttcagcatcttttttttaaacgaatgggcgagccgtcaatttcattgaatagagaaggagtaaaactgtacagtgtaaaaggcaaaacaggaccaaaggtcctaacaaactatgttacaagccaatttcccagacttcttcgtgttttgacagtacattctttttttttcgtgttttgggagtaaaatatttgtacttgcattttctgtattagttagtgtcaacttctatttactccctatgttccatattgatattgcaaagtgattaagttttgttctaagttaaacttctctaattttgaccaaatttataaaaatatgcaccaatatctaaaacatcaaattaattttattaaaattcactgcgaaatatgtcttgacagtggatttgtttggtattctagatgttaactatttttctgtttgtttagaaatcagtttactatgtactgtactgttaggcggtctcaataggttagatttgtctcttcatagtatgtactgttgcgatactccacccctctattaactagtttcactgggcataattgttctttattgcattccacaaattaaatttcatttctaacaattgttttctttttgcagaatcttaagccaaatctttgaagccgata

SEQ ID NO: 11208 - DNA, 901 bp, Oryza sativa
  Intron number 1 from transcript LOC_Os01g52100.1 (locus LO C_Os01g52100) derived from phytozome v7.0 (chr-ID Chr1; po s 29959893 to 29960793)
cgagaaccagcctcgccgtgacccccggtcgccaggtaacaaagcactccaccaccacagcctcggtttggtttcttgaagcttctagtgctcgtttcttggactgttgcgttgcctgttcatggatgttggcgcactgggatcgatgggatgtatgtactagtttgttggtcttccggttgggttcgtcttcgtttccggcgtgagattagatgggttcatcaggtggtgatttgggactgcatgcggttgtctttgtatcggttgggattcttgggtcggtggcgctggcggtggtgatgtaaattccctttcatggtcgccgtaatgcacagcgttgtattgccgccgcatctctccatatatgaagtcctctttaaagcgattgagattgatctgggctgttatggaatagggaggggatggtggggagaagttcgtgttgatttcttgttttgaatgcttgtttgcttgttctagtttttctggtcacgatcatgttgatcaagtgagtgttatacacgatcttgtttttagtttgcaatcttgattaatgagatgagaagatgagatagatgcccgttgttgtaaccagtgattttttttcttgctttttggacctgccgcacagatgccatcagtaaaccaaaccacctttttttcaagtactaacttttttttactattgtttatgtacttatgatgctcatagtcatagatcatcatcatcttttctcttctttgcacctttgacttgatgagttataaaaaagcacaaaagctggaatttcttttcacttttgttcgcttccatcatcattgaccgacctgatatgcaacagaacaaaaattttggctattttcagggacaggttactctcatctttggtgcttgtgaaca

SEQ ID NO: 11209 - DNA, 902 bp, Oryza sativa
  Intron number 1 from transcript LOC_Os01g05530.1 (locus LO C_Os01g05530) derived from phytozome v7.0 (chr-ID Chr1; po s 2631848 to 2632749)
gaagagctcgtgccttcagacgcaagcttgaggaggtaattcctgtcacggcccgagctcgaaatggatgcacatattcagacttctcacataatattcagaaaactcagattggacatggataaatttagggatctagggttctattgttaggaataaacttgggcgcgtgaatgaattggtcgtgcgccgttgggttcgacgtgcgcgaacgggagcgccgctacgggatcgtacacatagcgtccacattctctgttttgcaagaaaggaaaaaaaaaagaaggaaagaatgcagaaaacgctgcaagttttatacgaaagcaccaaaacacgtgtgctcatcgttttgtcgattcttctctctctcgcacgtgtttgctacatcctctgttgcagctaacaagtggtataagggtgaggctacacccctggcatgatgtcactccccataagagctgaagacctatgcaaccggtggctctccgtcttgcccctaccttgccacgtgcgccggagtaagggaggtcatcgtcgatcgcctgatcaagtggagctcaggttctgtcgtctaccccacgttgacaaggaccaactacactgagtggtacatggtgatgcgtgttatcctgcaggcgcaaggattgtgggaggcaacctgctggctaagggatgacttgaccctatgacttgtagtctaagacttgactccctaaggaaactgattccctaaggaaaagactttattgactgcagcagcaaggattatactactacctcgaacttttctgtatttgaattcattgcagtacttcattgcagactttgttggcacatttctctgaacttttctgtacttcattgcaggaaaataagaattcaaataatagaccccgtgcctc

SEQ ID NO: 11210 - DNA, 828 bp, Oryza sativa
  Intron number 2 from transcript LOC_Os02g07670.2 (locus LO C_Os02g07670) derived from phytozome v7.0 (chr-ID Chr2; po s 3993683 to 3994510 reverse strand)
accacgcaggcctccactaaggtccttttttctttcaattgttctcatgcgattggccgagtaaatactgtttacatttccttagttggagaaaatgacataggttagtgaacgaatgtttctcataaatgcttacagctagaacacttttagggccccccccccccccgtatttttttttcctttttgaaagaagggcaaaatctttgccaactttagggtcccttttgaaatgatggattgtcataagaattttgaaggatttaatcttctaaatgattttttatttctatcgagccaaggatagagaatattccatatgaagtaagcaagaggcccaacctcttggaaactttcctttgctttgttagtttcctatgatgctatcaaagggctcctcttcatctttcctgtgtttttcattcctgtaggattagagaaacatgcaacttcaattcctgcgtttttcctatcccgcgtttcaaagggacccttagataatgttacagctagagctagaggggtcttgatgtcaattccatataagtgtagggtatgctattagaattaccaaatgcaacctaggacttaaactagtctattgtaataacatgatattgggctttgtgcgtctttgacacagcagctgggttatagcaatgcacccgtagtcaagtgtaataacatacttcattatcgaaattttaactgaaaaaagttagttcttgaggaatatattgattttttttaacgaaccatatatattgattgttttatgtttgtcaatggccaagtgcttgtttaggtgtacaaggccgtggattcaaa

SEQ ID NO: 11211 - DNA, 503 bp, Oryza sativa
  Intron number 1 from transcript LOC_Os01g70950.1 (locus LO C_Os01g70950) derived from phytozome v7.0 (chr-ID Chr1; po s 41068525 to 41069027 reverse strand)
tgtggactaataaggaggtacgtccatcatccatgaactattcttactagtgcatgtgaacattttgttacataaatacctcttcccagtccatagaaggtgggcttaatgatttaaacttcttagactaatttgtgaggcttaaccctatgttcagttgatttgagttttactgctatcacatcctgctaatatagatattaaactcttcagtcccagttccacttgatttatagtaccattatagcctgaagattcttttgttccataccaaatgtaagcattgaaggaaacgaattttgtaaatactactcagttttatacaatagctcctaaaaaaataaatagtatctgtttggtagtagttacattaataattccattgaatttacacacttacattatagtgcctgagatctagagatatgcatcttttcattaaataggtacattatgttcttcacacagattgaagacacacttggggagaattcagagctatt

SEQ ID NO: 11212 - DNA, 1007 bp, Oryza sativa
  Intron number 1 from transcript LOC_Os02g39790.1 (locus LO C_Os02g39790) derived from phytozome v7.0 (chr-ID Chr2; po s 24039553 to 24040559)
gagcggggaatcgtaactttatttccgaggaaattgtaagatctcgcgcgacctgtttgttcttcttggtgttcttctgcctagttacttcgtttgttttatgtttgatctatagtcttgatgatctgtgaagactagttgttgttttcggtacggatggtaggaaaggtattttcctttgtttaaggaattgcaagatctcgcgcgacctgttcttgatgttctgtctagtacttcgtttgtttgtttgatctagtatgttagatgatctatgaaaagtagttattttcggtacgaatggtaggagaagtattttcctttgttggcgtcaaaatataatctttaatcactcagtcttgtgaatggtaattctgaattcatatttttcttttctgatctatatcgtgttattctgtttatgattttttgctgagtagatccccttgtgctcgatgtatgataagttatctatatcgtaatagattcgtatgtcaaaacttagtcgaaattttcgatctcatctcttctgttagccacaggtggctgattgaaatattcttcaattgagtctgaatttttatgttatatgcaaataattgtcccgctccagttcatatgtctgatgaaacatgaatgtaaaggaattaagactttggttatatgattcgagtctgaattttcttatgcttatgcaaataatagtccaaaagaattggtgatttttttgtgtagttcatatggttgataaatatgaatgtgtctcaaaagcaacgaagattttgatgacaagacaatctgctatttgagtctgaaatttcttatgcttttgcaaataatagtcatagtcagaacgaattactgaaatttccctccagttcatacggttgatgaaacatgaatgtatctctttagtaattgaaactttgacgatcagacaatctgttgcattgcctagtcttgcagattctcatcgatccttttaattcttctctgcagtcaacaaattg

SEQ ID NO: 11213 - DNA, 801 bp, Oryza sativa
  Intron number 3 from transcript LOC_Os01g49330.1 (locus LO C_Os01g49330) derived from phytozome v7.0 (chr-ID Chr1; po s 28363597 to 28364397)
tctgcctcagaggtttcttgatatcccgccttgtacgtctgcctgccaaagcatcagcttagccaattctctcgtactgtttgattgctctggtgcgcaacgaacatgtaccgtctcatgctcaagcagaaatagttctcttggctcctttcaaaaaaagctctcttggaaatttactggtactcgtaaattaagtcgtttagtacagcgacacggtcttcaaaacataactttgacttcttgtttctataaaaatatttattgaaaagtaatatatgtatactttatgaaagtatttttcaagacaaatctattcatataatttttacattttcaaacttaacaacttgagagttattcatgatttatattcttaaggtttgacttaaacattgtcctaaacgacttcctttacgagtacggatggagtattgactaagcaactggggacttctgctttcctgctacaatccatgttcagttgtctgtgaatggcttatattccttgaatacgcacttgtcaaattagatgcaaagtaacaaaccaaaactggataacttataggagaaccaatgttaaccggttggtcttctgtttccagtctataaattgccaaaaccaaacgtgataacttctgagttcatagtcaaccttataattggtgctaaaagcagcctactttgccacaaatcaatatgggacatgttgaattttgtctactgagtgctgaacattgactatttggcatttctatcttcataccaggaactgttaacatacacccgagtttgctgcctcta

SEQ ID NO: 11214 - DNA, 804 bp, Oryza sativa
  Intron number 1 from transcript LOC_Os02g58410.1 (locus LO C_Os02g58410) derived from phytozome v7.0 (chr-ID Chr2; po s 35712242 to 35713045)
tcgcccgccgccgcatcgagaccgcgcaggcacaggtaactcctctcctctctcctctcgcctcgcctcgcccggaattccatcaccagattggggcctgcctcttccctccctcacggataaacaacgggatcgggacggactcacctccttccttcctagggttcaccccccttccagatcgcccttccggttccggctccacactctgatttgttttatttctttccttcaccctcttcatctcactggagccccaattcactcctcgaattggatcgattgcaggtgcaccacctcttccaaccgcttaggcctagggatttcccccataccctatgttcaaagtacaattgctctatgctgccgcttctatcagtgctccaaatcattgccatcccaccattgttattactgctacttccttctctatgaaactgcctcctcatgcgtgtccatttgaatttgatttgcttgtgctgcgacatgcccacattgttgaaaaatgctcaaaatcgtactccacctttgatggtctcgttactttcacatgtgtgctccacctataatactgggtcatgtttccaagagcacgatgatgtttctctcaatactacttagctcaactgcatggaggaacctttctacctagacattctcttgttttcttgaggcattattattttacctgccagatgaacaacttcaaaattgattactagcttatatcatcagggcaaatgttattactattacagaaaatacatctgacactaaatttctttatttttgaaaatgcatagg

SEQ ID NO: 11215 - DNA, 662 bp, Oryza sativa
  Intron number 1 from transcript LOC_Os01g67080.1 (locus LO C_Os01g67080) derived from phytozome v7.0 (chr-ID Chr1; po s 38943931 to 38944592 reverse strand)
gggtcttgcttgcaaggtactccatggacaaaatgaaacttaaacatctcctagaaaagaagaggtctagctagctagttggttccctcatcaaaatcagaggagggcgtcttagtgcttgggttgggtgttgctcctaacaacaactcatgtaggccacatcccatggccttctttgacaattctgtcttcatcttgagactatttggctcaggtttatttatttataacttagttggatctatcacctcaatgttgcttgtgtactgcctcagtttggaataaactagtcacctttctgcttgcttctgaattttaatcatcagaaagagcaaccaattctcataatctaatatcccaagtgctttactctcttaggtgtcaagcgtactaacaagcaactaacataaccaacatggaacgcgtaaatatatgcattcttttttacctgatcagaagcactttttggatgagccttttgggtagagttagtgagtccgtgcgattcagttaactcagtcggcaggttttcgcactgaacttgattgaagaactgaactgaacctgttaggttgaaacatatagtttaagaactgtcggtgaattggaatcaaatatcaattgcagggtgcaaaccttttctttttggtggtgtggctgaa

SEQ ID NO: 11216 - DNA, 576 bp, Oryza sativa
  Intron number 3 from transcript LOC_Os01g02180.2 (locus LO C_Os01g02180) derived from phytozome v7.0 (chr-ID Chr1; po s 641679 to 642254 reverse strand)
ctgctagatcaggtaagttcctgctgactagttactatgttttagttattgacttatgcgtgagacacagatcatacaaacataaattttcacatgacactatactttgtatacgccccaatgtcgacatctttgctaagaattaatgcgattttagagtgttagatatttctattaccttttgatttttttcagacttggtctgttgtttttatatctacatgttcgacagagctacaattgcattgtctgttcatatatagagtataccattttgcgattcagatgttcacatgttcttttctttttctttccttattattatttgtcatggtcttggctgggatactatgcactgctgattatcattatgttgttcactgcattataaaggttcttggacatgtgaaagtttttatagttattgctaataaactttcatcatgctcttttgcctttaaacatacacaattacatatggttacacacattctttctcaaatttccttaaacgacattcatgtaaatcctttttctgtaggacctggtacatttactataacagtggtggctgtt

SEQ ID NO: 11217 - DNA, 772 bp, Oryza sativa
  Intron number 2 from transcript LOC_Os01g64990.1 (locus LO C_Os01g64990) derived from phytozome v7.0 (chr-ID Chr1; po s 37721642 to 37722413)
tcgccatattccggtaccacacccatcaatcttgcttgcttagccttttttttactgtctcatgtatttgcatctgaagtcgtgaattgttgagcttgggatagggatggaattactaagaacatgaaccttttaaagtaattgactgggtgttacctttactggtaagtgccattaagctgaagtgctgcgaagcagcacctagtgggagtgatggagccagaaattatcaaagtgtaaggctaaaatagggctcaactaatgagatattggttttctcaaaaaaatacgtggtggtttaagaggatttaagcatgattttggaggcaagcctagggctcaaggccaagctgccctaggcttgtctccgctaagtggtgcgtgttaagaaataatacacgcagctactataccatgcttaacaaaacgttgtgcaggtgcttatcattattataggtttatccacgatgttttagttcgatctatttgaaatttgtttttcttgtagcatgaactggaaatgagtattcagcatgttgaatgttttgtcattcaggttcaatgtaccatggttcccctttgcttctatcgcttcttggcccgttgactaacaaaagttgattgatccgttggctatgatgcttctctggttgtgtgattggttgcactgctgcagctataccttgatactattggtttatttcattagaccaacgtttgaaatactaataacatccttatatttcatgctatcacaggtctgctggacatc

SEQ ID NO: 11218 - DNA, 508 bp, Oryza sativa
  Intron number 1 from transcript LOC_Os01g07540.1 (locus LO C_Os01g07540) derived from phytozome v7.0 (chr-ID Chr1; po s 3609430 to 3609937)
cggtaagtgggacttcagctggttttgccaattttatttgcttgtcattggctctgcaatttctatgatcttacatccatattcacagggcaatgaacccaaaacacataatccatgcgatgaatctaatcaagatttcctggaaccctcatgtatgttttgttatttgaacatgccacaacttttgatttcaggacatatgtgttcagctttcctagcttcgacctcttttattttgttatccatctcttcaaaattttgaaacagtaatgtgcaaccttgcaattcatatcaaattatcaatgatagtaattatatgtcatagttgtgaaaagaaacctgtaatgtgaagagttatttttaccttgatagaaaatgggctgtcctaccattttgggaacaaattgtggaaaagagaacttttatatagttggatttggggaaaaaaataatgtgagtgcttttcatgttatagcaggattggaacaagatataccagataaccaga

SEQ ID NO: 11219 - DNA, 1065 bp, Oryza sativa
  Intron number 1 from transcript LOC_Os03g21690.2 (locus LO C_Os03g21690) derived from phytozome v7.0 (chr-ID Chr3; po s 12382785 to 12383849 reverse strand)
gaccccacctccaactcctccgcctccttcatcaggtgcgcgttcggcgctgaattttccccgtctctcctcgcgcgctagggtttttgtcgggggggatcagacggtcctgatcctgatcgggcgcgtttcacttggggtttcggattccccgggggtttggatcagatgcgctggtcaaatgtcgcacctgtaaatctcgatcggagattttttagaaatttatgcgtacatggattgatccattgggatgatctgaagtagctagtactaaaaattgattcttttcttcgttcagttcatgtgatccgatatctattactgtattcgaccagctaacttaattttgttttattattcgtactgccatgtgattaggttgctattcagggatttttttttattattcggttttactgccatttgattacgctgctattcagggagtgctagcaccttttgtttctacaataagcatttttgttgggtatgaaatgtgttcgttatttaccaccacgacaaggtgatctgcgtacccgccatgtcaaatattggagcagtagcatgtaattaacacacatggcacaaacaacatggcagtagcataactacacggtggccaattttggagtatccatttgatcaagcatttttttccatgatcatttgtattaaatgcatgggtaagcacagacatactccctccatcccaaattgatcatcttataaggtttgtgcaccaagaccaatgataatttaaaccacatcgatcaagatgtcatgcacaatatgcacacattctcccacaatgcatgcatcgattaaaacacaatgcacaattaaaacctttagcatgcacacattctcctgtgttgtattaattatattccgatgaaatccgtgtccatacggttacatgatgatcaatttgagaaattttagctttcattatatgatgatcaatttggaaagaagggagtactatggaaagaagaatgccatggtcttatttcactggtatctctttcaggtttgactctgtcacatttcgacggacccaggagt

SEQ ID NO: 11220 - DNA, 709 bp, Oryza sativa
  Intron number 2 from transcript LOC_Os03g18200.2 (locus LO C_Os03g18200) derived from phytozome v7.0 (chr-ID Chr3; po s 10204339 to 10205047)
gggggcgcaggaaaaatttgcggaaataaacagtaagacgctcgacttaagtacattacagtgcctgtatttcagctatattcattttgcatttttagttatgtgatggtgagaatgagataataatgcatttagtattgccaccctgtactaatagatgttaggcaatggtgttatcaaatctcaaagcaagatcataacgaacctacccacgtgttggcaaaagctttctgcattgttatgggttcgtttacatgtgctaattcttgctttgaacaagctagctggcttgttacagttaatcctgagtcttttataaatgttgcatattaccttttgaatatctttaggtccagaaaagttatgtaagccaacatgtttgtggtcagtgtttaatttgcatctgcttcattacaatttacttaccactattatcaacaagttttcttttctcttcttggtaataagttgcatcccattggtaggtacaattgtataaattgttattattgttctttctgtgatattgaattattttgtcaacaaagaatattcctagctgaattattcttcaataaacaattattcttagtatttaggtgtttcctctcaaagtaataaggggtactggtgtccctcttcaaactcaaattgttcatatcagttggagttctcattttaaaagtgtattggtgttcctttgcagcat

SEQ ID NO: 11221 - DNA, 922 bp, Oryza sativa
  Intron number 2 from transcript LOC_Os02g04760.1 (locus LO C_Os02g04760) derived from phytozome v7.0 (chr-ID Chr2; po s 2176814 to 2177735 reverse strand)
cctggcttggtagtatatttaaattgtatctgtctctggctaaataatttatgcttagctatttcgtggtttaatttctggtgatctagctaatttctgtacaaataaatgcagatatttgccttatatgtcactggatcactggacactatcatatcaccagagcatcggcgggagatatgtcgctatatctataaccatcaggcatatttttttccgtatatatggacgactgaccataaaataattataatatgctcatgtattcatggtttaataattttaattatagaagaacgtgtgttactccagtacttgcagtacgaatgtttataaaaacaaaaatgggtggtttgcataaattaaagcacgagttcagacttatttgctcagacaaaatataagcatatttttctaagtaacaattaaatgtcattagtataaaaaacactgagtaaatttcccaaaactacatataacttaaccaaactgtgtcaaaactatagatttaagataacgtatcacaaaacacaaatttaccatcaaaattatcattaaaatattgcaaaagtacatatctaataatgtttttgtcacaagactataggttttatttaaattactcgaactatatattattatattagagtaataagttatgatgaatttggtgctaaacctataattttgtgataactttattattaaatctataatattatgatactcgctcttaaatctgcaattccgcgataaatttaatattaattctatagttttatgatacaccattttaaatatataattttataatagcttggttagagaatatgtaattttgtgaaattcactttaaaaacatttgattttccatattttgtgactgcaaattctgcacatgcatgtgttatatagaacgagg

SEQ ID NO: 11222 - DNA, 1031 bp, Oryza sativa
  Intron number 2 from transcript LOC_Os03g12020.1 (locus LO C_Os03g12020) derived from phytozome v7.0 (chr-ID Chr3; po s 6295239 to 6296269)
atccgtctggcagggagagaaagcttcctctgaaggtacactatacgacgattatccttcttttttttaagtcggttctgtagatgaccatgttttactgaaaactgaaatatgaatgccttgcatttgatctttgccagtgaattcatcaagttcaccagcagtcttgggtaatcctttagttgttgatgttgtggattgaatggctggcctttttttttcttgtagttctcaaatgttgctgtgttggtctgtccttagcagcaattaccaagttgagtattcgaagtctcaaagttgtgtgtcgggatcaattttcttagctcgtgttggacaaacacggtatgatttgacgagtgtttctattggctactcaaggatctagaacgtatgagttatgatgaacccacacatggtgtaggcctgcatatgagcatatctgtcaggcataaacatgaagtggtatcaagatcccaacaaaaccatgtgctcttacatgtaccactgcatgtctgcatcactcccaacatacccaaaatatttactgtttgtctccactcttagttggcggattgctggagtagatgcattagtgtgctactgggttgccccttatagtgggtagtggtgtggcgcttgatcactgatgtgacaaagacttctccaagggtggaacttaatgcaccttgaatagcataattgttcaacttttattgttctttctggtcctatttcatttgattgattttttctatactctaggctcctagctatgtggtacatataaggtaaaacccacagggctaaaacaggtatcaagacctaagtcataatgtggggagctatcaactttatccttatgataggctttttccttcttgacatctgattctgatgttcagcagatggcgttcctttcatctttgtttgagtacaatgatactgcaatgttgctgttgttattgtatcttttatcatgcgggtagtattagtatgctaacttttgaaaacctatctgtagattttaggag

SEQ ID NO: 11223 - DNA, 595 bp, Oryza sativa
  Intron number 1 from transcript LOC_Os02g58560.1 (locus LO C_Os02g58560) derived from phytozome v7.0 (chr-ID Chr2; po s 35792621 to 35793215)
ttgcccttctcgtgagtgctatgctctctaagatttgttctatgctcattattattattattattattattattattattattttgagctgtagtgtacagttcttaattcaccgtgtgctagattaggtttcctgttcattttttttactggtaataatagattatcattgctgtgcatggaaaatttgaaagtcgatatcgagtttagaaacaaacatgtttttcttgtctttctggaacaaggaaagctcttattatcttactccaataaaatagttgataagtccagcaaaccaaagaaaaattgtgcagatttggtattcaactgtatatgagtatcttgtgtcctgttttgattataattgttcttgttcaaatctttgcacggtcatttgaatagtcattcttcttctgaacaaaatacatatatacgtcgcacaagtttgtgtgcatccatagaaatgcttcaatgcatagctctctttggcaaattccatcttcaagatttgatgttctaattaacatctgacttgctgtctctttaattggaaaacttgtgcactgcagtgtcttgactccttactacaaagaag

SEQ ID NO: 11224 - DNA, 618 bp, Oryza sativa
  Intron number 1 from transcript LOC_Os01g09950.1 (locus LO C_Os01g09950) derived from phytozome v7.0 (chr-ID Chr1; po s 5172650 to 5173267 reverse strand)
attaaagggattgaagatagaagtgggtcccacatgtaagtgacaaatgctaaaacaaaacggggccccctgtcagccccatttttttcttatcttcttcctcctttctaccttcttcttgcagccgcacgcacggaggccgattcggccggcttcatccaacactggcgccagttgatatgaggtggaagtcgctgacatgtgggccccaattgccaactcagcgagtcaaccgcggtctagcatccatgtcagcaaatactgcttgctaaaccactaaaggagataatttgcaccggtttttgaagatgagggattcattatacccggttttgtggttgagggaggcaattcaatcaagcgcaagagatgagggagacaaaatggacttattccatcataaaaataatgtggcatctctaggcccagtccattacagttcttcaccaatatttattttcctttttgttttttatccacctaagaaagggggaaactacatccaattcgaatccgataagaagaatcaaatccattgcgtgtagaaatggagaggaacgaattcgccggagatctctggttgttgtttccccggaccagctggtgcatttctccctg

SEQ ID NO: 11225 - DNA, 846 bp, Oryza sativa
  Intron number 1 from transcript LOC_Os02g52860.1 (locus LO C_Os02g52860) derived from phytozome v7.0 (chr-ID Chr2; po s 32316152 to 32316997 reverse strand)
caggtgagttgggggaacgcctggatctgtgaccctgctggctttggcgcttctgggagccctgctccttcgtagatctggtgatatttagttttgttcgatggttagaggaacgtgtggttgcgaacttgtgatatccatctaggaatctaggcatgtcgccatccgtttgcgtaaatccagccgcgcgcgctttgctgtgcatacagctttgactgtcgttaaaatctgtagtttttatttgtcccgtcaatgttcttcgtcggttccaatgtgcttgcttctcattatttagttggcgtagggattgatgaggagtagatactagagtagctatcgatgttaaacatgttcagtactagtgtttctgcagttgaactggcgtatgtagaaactggagagttgattcacctgccctcttatttaagttacactactaatccttcttctttacttggttgcaaattattccgctaccagcaattatatttatctactgttaagttccaagctttttgttagtgttagtgtcgtggagcaaaatgcttgtgtatcttttggtgaagatactttatatttctcactttgataatactttatgtttctcactttgataagtcgattggtgcatctcccttttgccggtctctactttgtttattggaatgtagtttgattctttgagatggttgggtaggcaggtaaaatgatcggtgaatgtgcgatgtccagtcaatgtttgttttaagttgtaattgaaatgtttctattatggattttggactgacaagttttggttgatttttttcagattgatccagcaaaatacaagagcataacatctgg

SEQ ID NO: 11226 - DNA, 780 bp, Oryza sativa
  Intron number 3 from transcript LOC_Os01g16210.1 (locus LO C_Os01g16210) derived from phytozome v7.0 (chr-ID Chr1; po s 9172671 to 9173450 reverse strand)
atcgacaagcactaagagcaaaatacaatcttccggtacgagcttgaaacttactcttttctggtctttgacatttctcggatgttactggttacatgttttagatttagtagtcaatagaggcagttttttcacgacatattgatataaatggatgatatttccttactgcacaatttaatcaatagtgggatttatggtgaaaattcttcatagttgaactttagttgaaactgaaatctaccttacatatatgtaaggactgcatataaggcaatccttccactgttgctattagtctagcaatttgagctctgccatggtgtcttgcctaccaaagtatgtttcttttgcaagcagtacagtagtaagtgaatagaatctttaactgtcaattgaaacatgcatttggttgctggtttcagtgtcttgtgtgtaatttgattcagctacaaaggtcatgaccaaattgttaatctcaataggagccaatctaggcttccacatgactatgatttcttgatgtgttgtcgatgcattgttcataaatctacagtaaaacatagtaaatttatattttagttgcatgtatctggaactggatgctttgaaagcttacaagagcaagagctgggataaagggatctgtatgcaactggctatatttgataggatactggagtacatcactagggctgtatggttgttgagtcatggcaaatctagtttactgattctaacatgttcatttcaaatatattttcttttgcaggaagcacc

SEQ ID NO: 11227 - DNA, 619 bp, Oryza sativa
  Intron number 1 from transcript LOC_Os01g05650.1 (locus LO C_Os01g05650) derived from phytozome v7.0 (chr-ID Chr1; po s 2693324 to 2693942 reverse strand)
ggatccggctgccagtgcggcagcggctgcggagggtaagatccgatcaccatcttctgaatttctgttcttgatctgtcatgtataataactgtctagtcttggtgttggtgagatggaaattcggtggatctcggaagggatattgttcgtttgctggggttttttttgtgtgttgtgatccgtaatgaatttgtgtttatccatgttgttgatcttggtatgtattcatgacatattgacatgcatgtgttgtatgtgtcatatgtgtgcctctccttgggatttgttttggataatagaacatgttatggactcaatagtctgtgaacaaatctttttttagatggtggccaaatctgatgatgatctttcttgagaggaaaaagttcatgatagaaaaatcttttttgagatggtggcttaatgtgatgatgatcttacttgagaggaaaaaaaagattcattataggagattttgatttagctcctttccaccgttattaaatgaggagcatgcatgctgatggctgataaggatctgattttttttatcccctcttctttgaacagacaagaaataggctctgaatttctgattgattatttgtacatgcag

SEQ ID NO: 11228 - DNA, 807 bp, Oryza sativa
  Intron number 1 from transcript LOC_Os02g05630.3 (locus LO C_Os02g05630) derived from phytozome v7.0 (chr-ID Chr2; po s 2744547 to 2745353)
ggggactgctcgccggtcagcggtggcgggctcaggtgcgttccttcgctcgatcttgggctttcttgacttgaccctcttttgtgttgccgtggtttcgtgttagggggaagatccaagaggaggaggaggaggaggagaaggatgacaagtttttcatggcgcggtcaggggctttgtgcttgatttgattggcggctaactatcgagtagtgattcttgaatcagaggctaggacatgaggtttcagtggcggattttgaattagatctgcccgattttgctctgaattagcttagcctaatcgggttccagctcctggctggtgtgaggatgtggccatgattttgaatttgaggagtgtttgaaaacgaaaagtctaatcctttgtaagggcatatggtagaggaattaacctttttcttgtttgatgtgtctgtgtgtagcaactgatttttatggagtgttattagttgtagggatctgtagtctgatctgatttggtaggagctccaaaaaaaaaaaaacattcatgaaataacatgtgagaaattgatttatgcaaacaagttctttttttgtccatttagtatgtagtaacagttttgcgccatcggcataaattttcctgcaaatattatcctattaatgtaactgagaacatacagtactgctagctaataaagataacacatttgattgtcacacgaaattaagtgcactggagtccatgattttagattttgcgtatgactaattaataaatgttccccttttctgttgacagtgaaaacggcaagttcagtt

SEQ ID NO: 11229 - DNA, 753 bp, Oryza sativa
  Intron number 1 from transcript LOC_Os01g74510.1 (locus LO C_Os01g74510) derived from phytozome v7.0 (chr-ID Chr1; po s 43153230 to 43153982)
gcttgatagccatctccaaggtgaccgtccaatatataatcttgatcttttttatcatatatttgatttctgtgagttatgtatgtacttatatgggagatttgttggtttgttcaatcctagaagttcttcaatggggagaataacgaaattattctaagccttccatccatgtgattcttgatatgaggctacagatattcttatttggagtagcacgagatctcacatctctaaattaatacacataacctcttcacttttctgggtaaatctgcacaatcataatcagcttaggcttgttgatctgaagattaaacatgtattgcttatgggaatgggactgaggatcaatttggaccaaatcgaatgtgtaaattcctgaacctccagaactgaggtgaatgcatatgcgtacaattgatatgatgcaacctgataaaggggacaaagaaacattatacatctagatggaaaacaatcgccttaaaaatatattaaatttactttagaatattgtcatatcaggaaactgtttctcctgtttgggagctttattcctgtgttttcagcagtttctgttgcagttatacttgctagcaaaacaaaataatgttgatacccgtgacataattagggcctttttgaagctatgaaaccaataatgtatgtgaaatcttatctgctgtaaaatcatcatagaaatttgtgtttctgatcccatgaaatggtcttgtggatatatatgcagat

SEQ ID NO: 11230 - DNA, 824 bp, Oryza sativa
  Intron number 1 from transcript LOC_Os02g08380.1 (locus LO C_Os02g08380) derived from phytozome v7.0 (chr-ID Chr2; po s 4460437 to 4461260)
gtcctccttctcgccgctcctcttcaacccgacccgtaagccatcctctccctccatccttctctctccgcgcggcggagtcagccgtagccgggcgctttccgtcgtcgggcgccgctgccagcgcgcgcgcgcgcgcggaggaatcctccacggcggtattcttcggagcccaattcgatcggggtggcctcgtctccgatgccgccgcggcccaccgctttgcctggcgttcgtattatcgggtggcctcttaactctaattagtgcggatgcgagttgggttgctgtgcttgcggttagggtttcactgggcgttaaaagagagaaaaagaaattcattaagtctcaatttagttgaatgtttttgcggcggtgtgtggggggagattgttgcgtttgtgctgttctaggtgacggccggaaatatttggtttgtttttaggtttgacaataatcttttcgtcggttttcggggtccttgtacaattctatcatttcaaccatgtacaaagatgttccttttttatgttaggaattggtttcatttagttctagtggacatacgattctggcatgtaggtaatttatttcattatggtaagttttctgttgtagtagtatctgtttattcagggaattgtataaaatggagcattacacattagcttagtccttgggcttccgttctccccttttcttttgatcggtggagctttgatctttgttgaccagtgcgtccttgttgattatttttcttatgttatagcaacacctgaacattttgcacctgttgtttctttgttgttcaggttctaagataa

SEQ ID NO: 11231 - DNA, 874 bp, Oryza sativa
  Intron number 1 from transcript LOC_Os01g32140.1 (locus LO C_Os01g32140) derived from phytozome v7.0 (chr-ID Chr1; po s 17588235 to 17589108)
actccgacagcggcgtcagcgaagtacgccgtcaggtgtggaggatgaggtcctctcgcggccaccggtgccgactaggccgcgcgcactccaggcatcgccgccgtcaccgagcaagccgcgaccaggataagagagaaagaaaagaaagagaggaagagagatggagagctaacatgtgggcccaagggcatttttaatatttcacgtgatttttctctcctcaaccggaaatcattattttaatcagcgcggtgtccattggtaaattaccacgtttatgaagtgtttttccccaaaagtgagtttgggccgtgtccgacggctaaaaccacacaatagcagtgtcctgtagcaaaatttgccaaatttgaattgggaaaggatgtcaaacacgtggttttagagttgagagacttctacttttagccattactaatgcaaattcgaggttcacaaaactagtacggggttgtgtccttgtgggcctttttttccagtagagtgtaactacttgcaactttcaagttgtgcccgtgtgggtcttttcttccgatggagtgtaactatttacaactttaagagtccctttgaatcacaggaacgagaaaaaaaatagagaaataggagaaaacacatgattctgataggactctgatatgttatggggggtcgaatggactttattccttctattttagccattactagtgcaaattctcatgttcgaggttcaaaaaaactagtatggggttgtgccctcgtgaaccttttcttctggtggagtgtaactatttgcaactttgagcgtccctttgaatcgttggaatgaaaacaaacagataaatagtaaaaacacaatattctgatagga

SEQ ID NO: 11232 - DNA, 807 bp, Oryza sativa
  Intron number 1 from transcript LOC_Os01g73990.1 (locus LO C_Os01g73990) derived from phytozome v7.0 (chr-ID Chr1; po s 42857977 to 42858783)
ccaaggacgattgctggctcatcatcggcggcaaggtcttctcccttttctcttctcttctcttttcttttgattagtatgacacacggtcttgctgggaacttttagggacaaacttttcatcactgtgcggatatggctttccagataggataggatagcaaacatccctcataaattagcctatcctgaccttaatttttgttgagaatctcctactgcacattttttttcctgtaatgttcctgaacatcttttcttaaccagtcattttcatggagcctatataagaatgtacctcactagtcctggtataaatattttgtggtttaatgcgagaaactgttctttgtaatctaaatgtgcagctcttgtttcatcttttattccataggattcacaattctgttgatatgtcaaacgctaaagaataatgcaagatcttttacttcatagagccaaggaaaaatcagttttgcttacttctctatttccagttcaatcagatgaacaagcctgtttaaaatatgctcagaactttagggagcttatatgttctcgtgtagtatatgtcaagaagctattttgactctgtgaacatgatgttggctgatcaaaagatatgtattttttcaacaaactgttctataagggaggttgctagggtcatttgctcatttttatacactgaaatgtgcttggttattgttgcttttatattgacgaggccttatatggtgaaaaaaaaatcccctttacacaaatcaaactcatagaagtatttgttttgctacttgcaggtgtaca

SEQ ID NO: 11233 - DNA, 975 bp, Oryza sativa
  Intron number 1 from transcript LOC_Os01g44280.1 (locus LO C_Os01g44280) derived from phytozome v7.0 (chr-ID Chr1; po s 25409937 to 25410911 reverse strand)
cttgctgtcgcctctatcagcttagtcaacaacaggtgagaatcagaattttgtttagtgccactgaattttgtttagtgccagtggcttcgattatttagctaaggccaggaaggagaagatggggagaatgaatagaaagcctaggatgacttgtgttcaggaatttgagaagtttaattaagacaacctctatggggaatcggagggaatatcagaatatgttttgatgatgaaataaaattaaaaaatagctgcatccagtccacctgcattcagattacatttggcatagtggattgcggcttatagttttttttttccttcagcatacctcttgcactgatctttttttttataacttataggttcatgtgaatctctgtgagttcctcacttcctgtgcccatgttcctatccgttccatatgcgtttctcacttgatgtaatttcaaatcgttgtgtttcacttttgggccatgcatctggcagtaattcaaacaaataaagttttgctaggagttcttgctaacgtctcttcctggtccttgagatcacatctgcttggctttgcatgtcctattgtttgaaacttgctgcctattagaacctccttagttactttaccacaatcaaattggttcattttgattattgtttgctgagatgggtatgtggcttaaaagctgttccttttgtcggttgcctacttagtgagttctctgtcattggtaagatgaccataccttatttatttttatctgtgcgtgcctgtttatgatttatctggtttgtagtatctatttttattagtgtctaactcccactcttttgcagttgtgaacctgactcttatcaatcttcctgggcttactaaagttgctgttggtcagtattatccattgtcatctgtgagctattttcctttctctgttttttttgaagaggtccatttcctgatttgccactggctat

SEQ ID NO: 11234 - DNA, 516 bp, Oryza sativa
  Intron number 1 from transcript LOC_Os01g02290.2 (locus LO C_Os01g02290) derived from phytozome v7.0 (chr-ID Chr1; po s 721037 to 721552 reverse strand)
ttcacaaaggaggacagcattctgcaaacctcgtatcaattttctgaggaaaaacatgatatactcattattgatttctatgatctgcagatttaactatttggtatgaaaaatctaaatgatttgaaataaaagcacaacctttacttccatttattacttattttcttcttgtttcctagtactttagaatttgatctcacatactttttaattcttgtcatgggatatattctctgtcatgtagttctagccgaacacttgatcaacacatttgtgggcctagaaagtcataatcctgcgaattgtcttgacaactgtatgcctcttatgagttatgtgcagctacaagtgcaagcttaatatgttttactgtaccctggcctttttttactgttctgactaatatggagcaacatattccatatgtttgtgtatctgagtatagggtggatctaattctttacttttctatctgcaggttcaaaatcacctgccaaagttatcataggtaac

SEQ ID NO: 11235 - DNA, 739 bp, Oryza sativa
  Intron number 4 from transcript LOC_Os03g16000.1 (locus LO C_Os03g16000) derived from phytozome v7.0 (chr-ID Chr3; po s 8819632 to 8820370)
agcgggagaatcttcttaaatttcttggagagcaggtgctgtcatattatcattttcctctctttcttaagttttcagaaccaagcaaaaacaaatacattgcaacatgcaacggatatttaaataaatatatcataaattgtatactcaaaaagctttatataaatcctagaggaaaacatatataatctgcaagcacacatcaatccctaaatagcatcattataagcaacatgcacttattttctaaaaaaacacatgcacagatgttatgcttatcctcaaaacatcccactaactcaagatgtggtgtgcgatggcacttactatcaccaacaccactaacttattttatattgcatagaaatttcaatgctgcctagaatcttgtttaatgttcttaacctgaatcttctaggtttccatatatttttctttttgtacccttgacccttgagttacctgaaattaaatggtgttctcctgaaagtaacaaaacagtgtaaaaaacaattggtggattctactccaagagtacatattatatatggaagtttgctacaaacagaaacttattcagctttgctgatgcttgatatttaagttgatggacgtagcatagtttgtttatgcagtgcatggagctggagggaatttttttttattgctgtgtaaaactgagtgccttaattgcttcatttcggctccaatcttgcaggtttttgagcctcttcgagaa

SEQ ID NO: 11236 - DNA, 615 bp, Oryza sativa; identical to SEQ ID NO: 9549
  Intron number 1 from transcript LOC_Os02g35356.1 (locus LO C_Os02g35356) derived from phytozome v7.0 (chr-ID Chr2; po s 21256908 to 21257522)

SEQ ID NO: 11237 - DNA, 562 bp, Oryza sativa
  Intron number 1 from transcript LOC_Os01g05220.1 (locus LO C_Os01g05220) derived from phytozome v7.0 (chr-ID Chr1; po s 2451870 to 2452431)
gccgcggtcgttctatcggtggcggcgctgctctggtaagcctctcaaattaacgctcatgtacaagcccctgtccgaccgcattactatccgccatgatcggagccaagccggccgtccctagcgttctccttatgtcaatcaaatgtaaccttaattcttcatattgtttgttttattggtcgatcgctgcgtcgtggttgtgtctcgtggagctgtagtatcatcatgtaatagtgtttgcttcttattctagtccattgtgtgtatcacctatgtatgatcacgtctccttctgttcttggtctgtcaaagtgttattcgattgatggccggcttaatcgacgagtgttttgttaattatgagttcatataatctcggcgtggaaatctcggcgtgggctgagagacttaagttagatgacagacatgtaatctcggcgtggaaatctctcttctccttttctatccgctccctcgatatataattggactctctgtactttctttgctattaatggattcaggtggggaagctctcccccccgggtgaattttcaaa

SEQ ID NO: 11238 - DNA, 889 bp, Oryza sativa
  Intron number 1 from transcript LOC_Os02g51290.1 (locus LO C_Os02g51290) derived from phytozome v7.0 (chr-ID Chr2; po s 31401517 to 31402405)
ttcttgcggggtatgctcttctgatctgaaagattttctggtttctctctaacctctagcggagatccctggtagattcctcttgtgttcttggtaggatttgtgttctgcgctgcgattttgtccaaagtaaccgtctctttgggatagctagcggaagaccatgtagggattgctgagaggattgattttgtcatactactggatgaagctacgagaagtatgtaattatgcaatgttgcaggcctgcagcttacgacttagcaatttttaggattttacattacaaggataagagtttttgacttgattatgctgttcgtagtatttccagcatctagtaagagttctcacacgcaatccttttgcctacttccaaaacaaaatgacaataagattcctcacaatgttcaaccataggatgctggtatacagcttttagttagcagtgcctttctattgttgatgtaatagtaattgcctaccatcatgaagatgttgctcattcatttagtttattagcgaattgtaaagaaaaaaattcaacttatacgaaacttacttgatgttttttttggacgaaggactataacttctaacctctgcaccaactaatgtgtgtggacaccaagagtttaatcatggtgggtggagtcatgcactcacgacttcaccaccacaccaatggtgtttcccaacttactggaagtaataacctttaaacaataattagctttctttcttttagctaagggacaatcatcatgctgtaagttgctaaatgcagctgatgcaggttttcaggaagtttcagttctatttgcactaagctgggttttttttttttttggcaggcctatagtttcacttgcttatccactgtaagtta

SEQ ID NO: 11239 - DNA, 494 bp, Oryza sativa
  Intron number 4 from transcript LOC_Os02g03580.2 (locus LO C_Os02g03580) derived from phytozome v7.0 (chr-ID Chr2; po s 1458668 to 1459161)
tggggagctcaggtaccctttgtatcttaaaactttattggttccttttatctgatatctgttgaaattacgggaaaagtggcagtaggagctttgtgctatctggaatctaggtctggcttatccggactaggacagtgtgctaggttaaattggagcaacgtaactgaatcctttactaaatattattatctgtttttactttaatactcactggacacaagcatatagatataggtaacatcaaaatgtagatggtttcatctttcaaagatcagaagaattagctagtatgcaacatgtagattatggttctattgttaaatcaggtggtcgagtgcaatgcaaaaaattaagcattctgccggaggtaaaaaatggctatagaagttaggcaactgcaaactgctttccttaacagcatatttgtgtgttatttataactattttcttttgtacctcaattcaaaatattgtccctttaatttcagccc

SEQ ID NO: 11240 - DNA, 881 bp, Oryza sativa
  Intron number 2 from transcript LOC_Os01g44050.1 (locus LO C_Os01g44050) derived from phytozome v7.0 (chr-ID Chr1; po s 25234578 to 25235458)
tggtgcggttgaaaggcggcgaccctctggtaatacactgttcatgtaatgcaacttatctaggacctgggaatttggctgtgcacgctcgtgcaagcacaacatctgttgctattgtttatgcctttcgcgattaacggattactcgtcgtaatccatactttggtcacggcttgatcatttcagatgctggatttatgttggaaactgtttcagtgtttactattatcagtccacgcttttgtagaaatcaaagttttttcgctctgagttgcggttctggaaagcaacagataagttggaagaaaggctaaattctggtttgggagacgattttaggcttttttgcatagagaagttcttaatcctggcacaaaatagaaataattaggagaggaaacgattagtagaggaagaggaaatgaactttatttaggctgcttctctcactctctatgcgtgtgtgtttgtgtgcacgcagcacgcacgcttgtttcaatgtaaatcaacaatccctgttctgattgattttgtcagttgtataaacagaaatgcttctcatgaagtaacctgcaaaaagtaacgattttgtcttttgaaggtgcacggtagtaactggaaacatcctatagtttcgtatgcccagcattattagtcacaccatttgtgtgtacattacatatcgatgcaaatccttcaaaggtgctgaaaactactagtccagtgtgccacacatcactaagcataacatgctgagaacataggcatctaagaccgacctaattttccatgtagggggtatgctaccttttgcccatcattaataaacactaaaattattatttgttatcttttaggtctttggaaggggtggagaagag

SEQ ID NO: 11241 - DNA, 690 bp, Oryza sativa
  Intron number 1 from transcript LOC_Os02g02480.2 (locus LO C_Os02g02480) derived from phytozome v7.0 (chr-ID Chr2; po s 877560 to 878249 reverse strand)
gagggtacgcttgatccgcttctgtttctttttgaggagtaaattgagctcgaattggggtttgttgcatgcgttttgtagtgtttgctgtccttgtcgctgcaggtttgttgcttaaaaaaattgcggtgatgtttgatactacttaggagtattttttttcttgagaaaaagagggggattttcacatgtacaccgtctagttggttgattgattgatcgattaggttatagtagtatatgaacgaagaattgtgattgctagctgatttataggcgggttcagcaaatgctgctacagtacccatcgattggagggcaaaaaccgtaaattacaatagcgtgtactagtagttctggtgctgttggtaccattccaatcgagcttattgaaatcaattagcaatttgattgcgcccttattggaaaagtgggcgcctgcgtgataaacacctagttgccaactacttgccataggatatgttacattgttctttgctctctgaaatatctacacaagtatgattctgaatgtaaaatgttagctttgaagcacttgctaatggaaatatgtatggcagaatcttttgttgcctacctgagcagctataccttgcttgaataatttttgttcccatcaactgttattcacttggcgcttactttgtaattattgcagacttgggattg

SEQ ID NO: 11242 - DNA, 428 bp, Oryza sativa
  Intron number 1 from transcript LOC_Os01g70570.3 (locus LO C_Os01g70570) derived from phytozome v7.0 (chr-ID Chr1; po s 40866500 to 40866927 reverse strand)
atcatcgagtgctttgaggttctacagaaagaaaggtgcaatcctcttttcttattttgatcgatctgattcgcctcttgatgtgccctaatgatgtgtattaatggctcgaatggtatgcgcctaatgctatataatggttcgatacttcaatcgtccatagctaatcagtaaacactcatttcttgtgatctgatgtttgtaacttcatagtatcttgtcctctttgatgttggttgattatgattaatacccctctggcggaagaacctgcggaataacctgattttagccttatgactcgtggtttattttgctgatgatggatcatatgaatatactttggtctaaaaaaaatatttgagtagatttttccttcttttttttctgaattattttgtttctgtctatagtgggcaaggaggttg

SEQ ID NO: 11243 - DNA, 967 bp, Oryza sativa
  Intron number 1 from transcript LOC_Os02g07210.3 (locus LO C_Os02g07210) derived from phytozome v7.0 (chr-ID Chr2; po s 3708788 to 3709754 reverse strand)
agcaaggtgcgggatagccacctgaagttggattggttggttcctttcagttaacccttctagttttctggatttctttgatgcgtgcttgttcttgtatttgtagcagaactagcagtttctgttaaaaagaaaaaaattggggattcagttgaactcccatgctccaatgttaggtctacccatcatctgtacaactttttttgccttgtagttcccggaaaaatggtaattttgtgggtgtcctttttgtccggtcagggagtccgttccaagttgcaagctcagatccatggcttcattggtacagtttttgtgtggtataattcttggacggttagctaaagcttgggtattgttcagagagttcgtagtttcctccagtaaatcggtagtgcaaggaggcgtgtgaaatttttgcttctctgaaaatatcagatttatctcgtttgattagtagtgttgccgtgtgaggaacgggccttccagttacccagttgacaattgtctcgttttcttggaaattagttgccttatcatctggcattctggtgcatcgtttctactacttcagttctttgcgtgtccttactggtttataccaatgagacaatcaatggcatttgtagctcagcgagtttattttgcaacaaatatgctggatacaagaaatcatctggtggagccagatgtgtaatatgtttttttttttgagctagcagctgtgtaatatgtatgctccaatgttgatattagaatatttaggtaggtaattccagcatagaagccattcagtgttgtgtctgaacactttgctgtttgctaggagtacttgccatcagtttctttaatattgtacttactgtccatgttattatgcaaatgtatgctcttaactgttgatttttttttatattgcagcactgattctttcctttggaacctgcagccaatccatatattttca

SEQ ID NO: 11244 - DNA, 679 bp, Oryza sativa
  Intron number 1 from transcript LOC_Os01g73960.2 (locus LO C_Os01g73960) derived from phytozome v7.0 (chr-ID Chr1; po s 42844919 to 42845597)
caccacctcctccccaccctgcaggtatgcttgcttgatccatggatgcaaaccatgcgttcttgtggcacttctacttcttgttcctacagttcttggatgaatagtttctgcttattgcttcctctcttcagctaaatttgctatcagattgttctctgcatctgtattgtgctgtaacagattcatgtcttcttgtggcacttttacttcttgttccttcagtccttgaatgaatagtttctgcttattgcttcatctcttcagtcaaatttgctatcagacagttctttgcatctatatcgtgctgtaacagcttcatgtattttcctggcctttcttgaagagtatagctatgtttgtcaatgaatttctatgcacctttttccttgagttttctgtcactattttgtggttgtttgcaagcatttagaagcattggcttggtcttcagatacaaccaaaaaaaatgcgcttctttcttgccttctcgtttaccttgacttatgggaatcattgcaagattgagaagaaagctgaacacctggcctttttcttcaattcaaggactagcataaaagaaaaaataagtttgattaatgatgacttgacttacaacatttttaactggtttcttcttatttgattcagaggaaggcgaattgtgggagtactttcc

SEQ ID NO: 11245 - DNA, 604 bp, Oryza sativa
  Intron number 2 from transcript LOC_Os01g73960.2 (locus LO C_Os01g73960) derived from phytozome v7.0 (chr-ID Chr1; po s 42845681 to 42846284)
ctgtaagagagcctacctctcaacttgttctatttctctctgtaggttgttttttggatggactaatatgcaaaaaccagctttcattaatcaaagcctagtcttaatctaaccagttgctcatgatgtatatgcatcttcaattatgagatagtacctgtatatgcaagggaacaataatagctttcttggaccacttagcaaatctggagttatagggcccgtgagtaagcaatcttctagagactcccaagtcctaacatgatgctgtatttatattaacacatttcaaggaactgaccctaatttcctctcatagaaaaggacttttgtgaagtaatctctggatgaaattattgttgcttaacaagaacttgtgttaacaatttcaagaaacttagcataagttactgacatatgagacaattactcgttcatactacaaatgtggaatatacacaaattagataaagttccatgctaaacttgttcctaaacaaatggtaaacaagtcaattttatgaacttgctgtccattctgaagctgagtcgatgttcatggaattcaggtgtgcccgttgtgcgccgacaatatagggagaga

SEQ ID NO: 11246 - DNA, 717 bp, Oryza sativa
  Intron number 1 from transcript LOC_Os03g14320.1 (locus LO C_Os03g14320) derived from phytozome v7.0 (chr-ID Chr3; po s 7795661 to 7796377)
acatcctgcaacagaagcccgggaaggctgcacaggtcggctccgactgcttcgacgaatgctggagagactgcatcctagggacaccgtttacgagtttgtgcgaccagctatgctatcaaaaatgccttgttggttcccggaagatctgaagcaggcgcttgcattaaggttggtcagatgcatcagtagtgtctgcgctgcgcatctgcgttcagataacagcattgcgatcatttgtttcgtcagtaaattgagtataataatttggcattagcatgcgtcgtctctacgtatacatgagtttgctttagttcgagcattcacaatgtataattccgtatgggtattaaggtggggtccacaatatggataaagcaatgaaaagatctgtgcaatgtatggagcccttccaactctaaaaatgggatccacaaccatataattatttcgtttttttctcttccctatcagtgctctcgttactttgcctgcaacattgtaaaaaagaattgttattttatttggagtgtccgtcctcacgtgaagggccgatttattagggctagggtatgataccgccgcctgcaatgtatagagcgtgtgctacagtgaaaagattctcttagtacccttgttaattcacacattgcaggtgctcttagtaccgcttttttcttcgaggctccaataaatgtttcggctgttcaagccgtc

SEQ ID NO: 11247 - DNA, 447 bp, Oryza sativa
  Intron number 3 from transcript LOC_Os01g07110.1 (locus LO C_Os01g07110) derived from phytozome v7.0 (chr-ID Chr1; po s 3352892 to 3353338 reverse strand)
agagaagtaagaggttttgcggtttgcttttttcaaagtgttacattctcacaacaattttattggtcttgtggccctccttttgtcttttggggacacataatatccgcacatcttagatatattagaagaaacgaagacaacaagtcattgcagtccactgaattacaaacaaacaagagaaaaatggagcaataaatttgaattatttccaatcttctggtcatgccctttcctctttagttgctgtgatgatttcctcgggctactactagatgaagatacccacacacttttctttttcttaaaagttgctgcctatcttttctgaagttttgcatttcttgctttgttgatagcatggaattcaatgtctttctgttctctttctccaagacttgcataccaggctgatacttgtatgtattgcagggcaaccatttggtg

SEQ ID NO: 11248 - DNA, 540 bp, Oryza sativa
  Intron number 2 from transcript LOC_Os03g21900.1 (locus LO C_Os03g21900) derived from phytozome v7.0 (chr-ID Chr3; po s 12528233 to 12528772)
aaggcaggtttactctaattcgttttttttctcctgcattgcagagtaatttgcatccaaatgtgcaactagaggaagatgttccaatttgcttgcaattgttatcgcgtttcaagtaagatgtggaccatatctcggtaactgctagaaattgacaaacatcaacttcctgatttttttttcaaacttagtgaccactcataaactatcctattactggaacctcccttatgcacaattttctctttttcttgtacagtcgtcggattcattaaagtggggtaagtttacagaaaacaaatgaatcaatagaacattaatgcaggcatcggtaaacatgaaacagtttattccatggtatacaatacttaatagcaagctccagttgtttgaatcgtgacaaatgcccattctttgaagtaatactttattttcgtgttgcaacaatccttacaatcaggaccctttttccttaccaacttcttgccgttcttttttttaacagagctatcaattgctctgcgagcgacatccttcatt

SEQ ID NO: 11249 - DNA, 703 bp, Oryza sativa
  Intron number 3 from transcript LOC_Os02g36974.4 (locus LO C_Os02g36974) derived from phytozome v7.0 (chr-ID Chr2; po s 22330298 to 22331000)
actctcctgaccgtgcttgcaatcttgcaaagcaggtttaatttctactgcattctatttcattatttgtgaattggaggaccatatggagttgagaagatattttgaagtttataccattgttgtgaaatataatgtcttagtaattgggattgaacaaataacatgtatgaattagtaatacacctggaacaggttctacttagttctgttagcaaatagcaaagtgtaggctccttaatgcaagtaagctgaacgggttaggtgcattgtcatgatggattttcttcattaagaatacttgatagaaaatgatgaatcaaataagaggtgtaagaaattatagtttacagttacagatttgcccaccttgaatacttgagtgcttctaaataactgatgaagtccgagcatcactatggccattgtgacgtggaacaagcttgtctcaatatggccatcgttcattcatagaggcctaccagtttgttctgtaatttgttaataatagatatctgatgtatatagaatggtttactgcagacaagtttgctataagttcactgctttgtccatggatataattgatcttggacttggagcacacattatgtgccttactttatgaaacttgcttgtgctagtacttatatttgccatcataatagaatgtgacagtaacctactttatctcaggctttcg

SEQ ID NO: 11250 - DNA, 604 bp, Oryza sativa
  Intron number 3 from transcript LOC_Os01g74330.1 (locus LO C_Os01g74330) derived from phytozome v7.0 (chr-ID Chr1; po s 43067700 to 43068303 reverse strand)
aacttctacccaagggtctagcccgtgctaaacaggtttcctcttccttccaattaaaataggatgcccgattattattcatactcactgctagaaccttttgacttatgaattactagtatcttattgtttgtcgcagtattggatcggtctggctgcttttacgcaccacactagaatatgtattgatacagggaaaataattcactttcagcatgaatgttgtcttcacttgcaaagccctgtcaattattgatcatgctcacctgatcgccacaatattcctctaaaataatgtactacaagtgttcctcgtcatttttctatatcttgtacctgtagctgacaaccaatctctttaagcccttattgtggatgatttacacccacttttatgatttttatgctttgatcttttgatctcctcattttaatgtgtttcatattattttaaccattcatttacagtacttgcaagttagcgaagggatttttccatagctatatcaaatgattcattcctatgtttgatgcaataactcaaaatgttgctgtgttaatttatttctttttatttcctacatttgcaggcttttcttacagg

SEQ ID NO: 11251 - DNA, 1057 bp, Oryza sativa
  Intron number 1 from transcript LOC_Os01g71670.1 (locus LO C_Os01g71670) derived from phytozome v7.0 (chr-ID Chr1; po s 41533420 to 41534476 reverse strand)
tctgatcattggagcatttgcttctgctccaacaagtactgatcagattctctctatgtttctagcaaatagcaattctctgttttgcttgcaatgccctgagcacgtactgtaagtgtttagtggctagtcagagatttgaggggaacaaaattctgaagagcaccacaatgttctttatagaataaaccacattttatctatatgcatcttgttgtcttttcataactatggaatttccccacgtaattttacacgggtcagttgaattgaatttgatatagaactcttagttcctatttccatatatgcaatattttctacacaatacattacaattgcaatagtactttgtatacaaatattgctatatactccctccgtttcaaaatgtttgacaccgttgactttttaagtacatgtttgaccgttcgtcttattcaaaaaaaattgtgaaatatgtaaaattatatgtgtacatgaaagtttatttaacaatgaatcaaatgatatgaaaagaataaataattacttaaattttttgaataagacaaatggtcaaacacgtactaaaaagtcaacggtgtcaaacattttgaaacggaaggagtattaatctacaccgttaatttggtcctagatgatgtaattagcttagatcttattattttattaatatgataatgtataggtatacatagcgaatatggtgacttcgtttcaagttatcattatgttactatacaatatatatataatagatcatgtctggtctagataatataatagataatatatagatagatatatggaagatagataaatagatagatgaaactaaataaaatgtccggaccagatagacactatagctttgggttaattctttttgggcaaacaaagtttcacttgaaattcaactaggcatgctctgataattcgaaggtgcacgttcattgtgtactctgctatggtttattggaaaacctaactttatgctgtcggtgtccattatcctgtcgtgcatatgcagctgtgcaatccatcggcgtgtgct

SEQ ID NO: 11252 - DNA, 887 bp, Oryza sativa
  Intron number 1 from transcript LOC_Os01g50800.1 (locus LO C_Os01g50800) derived from phytozome v7.0 (chr-ID Chr1; po s 29180778 to 29181664 reverse strand)
gcccgtgccaccgtggcactagggctgtcgtagaggtgctgactgggcagaatgggggcgccagccacactggcgctgcccctcctaccacggcgccagcatggctggcgcgcccctcctctgtgggccgaccccttaaaccccgtgggccccaccacctatctcctccccactcccattttcgcccaagcaccagcccgagctgagcagcagcagctctccccctcacctccccacctcaaatccactccatttgaactcgtttttcgcgagattttttgtggaaatcgaagagaaaggtagactctttcattcacccctctttttttttgtttttagtggttgaatttgtagatcggtgggtaaccctagaaccccttttttacccaaatttgtgatttttagcatttgttcttaggattggcttgttgtagtgctacatgtttgcaatgtacttattggtgtcacgatttttttaaccatatatgtggtaatgttaatttttggatggtttggttggatggatggatgaaaaattatggttgaggcatgaaagtaattttaatttgatggacttgatgctatagtctataggttaaacttttaaccattaattatatgaatgtgagaaaattttggttgcattatataaattgattatagttaactagaactaggttgggttgtatgacggagtatttgtaatatttcgatgtgtaatgcactagtaaacttgttgatagttgtaggtggattaaatatttttttggagtagtagctttgggacaatttaagttatgcattggttataatatgtcggtttggactacgtttaggaatgaagatttaatttttgttgcaaagttacatttgattttttggtgtag

SEQ ID NO: 11253 - DNA, 263 bp, Oryza sativa
  Intron number 2 from transcript LOC_Os02g36600.1 (locus LO C_Os02g36600) derived from phytozome v7.0 (chr-ID Chr2; po s 22097048 to 22097310)
tagtccttggctacgatacagttgctgaatacgttgtaagatcatacataatcccctctgtttcttcatcctcttcccttcttgctgatcagtgatgtattactacagtatatatagataaacagatctcaaacaaattgttcactctcaaattaagtggcccaaataaattttcttttctgaatcaaagttggcttgtgaatgaatgtggcgtgcacattaattcagaacgggacggcctacttcggaggactgatcggccg

SEQ ID NO: 11254 - DNA, 598 bp, Oryza sativa
  Intron number 1 from transcript LOC_Os02g14980.2 (locus LO C_Os02g14980) derived from phytozome v7.0 (chr-ID Chr2; po s 8360002 to 8360599)
cgattcacgggataccaaaggcttcagtctattaggtatgccacatactcactttgtgtttcattctcttttgttaatcttgttccattatggatctagatttgcagaacatccttttacctgaacaagaaatctgtttttaatttgcaacaaggccatgctgggctcatggcaggtggttgtgacttttaagttcagttgaaaatttggtgtacgagcttgcctgctgacatattgatacggttattagggcttagctttcaagaatgtgatgccccacatgcctaacaatgtagttatcttgataggagctgctggccttcagtttggctttaagttttttgataagatgacatacatcatgaaaaaatatatgttttcctttaccttctgtacttggatttgacacatgaagtttctacgtggtatcagcattatgttgggaggatttcgtgttgttcttttctcaacttaatcaaatttgcatagtgtgaattggtaggcatatcctgcattatatcattataatattagttaaaagaataacatctatgttaattcaggctctggtgtttcaactgataagcaaaccagctat

SEQ ID NO: 11255 - DNA, 820 bp, Oryza sativa
  Intron number 2 from transcript LOC_Os03g31070.2 (locus LO C_Os03g31070) derived from phytozome v7.0 (chr-ID Chr3; po s 17707582 to 17708401 reverse strand)
accatcctccgattcaaggtagtgaatcccataagatgggtgtgctgcttcttctaatgagttgcttactactgtagtagttgtactcttagtcctttcacatattgttgtggaatgtatagaggaatctgacaaacattagaagatgactattcggaaaattatgtcaagaataaatggtctgggatggatttggcaccatcctggcatcctatatcctatataggaaaataaggactaatttgttttgattgttcagttttttttttggaacagagtcagggaaaaaaatgttttttgaacagattcagaagaaaaaaaaatgataatgagcattaaggaaatggatcgcttgacttgacattttatatcttatgggaaccaatgcacaacttagaaagttcgtagtcattgtcatgacgagtatttatcctggaaaccatgtaaccaaccattgcatttggtttccttgtgaacttatcctatatacgccactcatggctgtgtgcattgcaagctgtagacgcggggttctttattccattatctaaaaaaaatctatacactccaaaaaagacaattggtacaatacagccagctcccaactattgtctcttttaaatatgctattttaggtttgctctaataaggacagcgtggttatttgcgagatgtataactttacacatgtaagctgacaaccctgtatgattgtttattgtgcagcttgtcgttcttatgtttcatatttcatatagagttctgataggttcaactttttacaggagaagctcacggagaaatttggaacccctctgca

SEQ ID NO: 11256 - DNA, 744 bp, Oryza sativa
  Intron number 2 from transcript LOC_Os01g08460.1 (locus LO C_Os01g08460) derived from phytozome v7.0 (chr-ID Chr1; po s 4169141 to 4169884 reverse strand)
gatttcagtctcagattcagcttgcattttgtgaggtggatttttgtccctggagggacatcccctcgttttatacatgtcatttaaaaagttatcaaaaaaaaatttaaaagcaattgtcaagataaattaatatatgatatattttttcacaaacatgcgagttaaaatttgaccaatacaattcgaaacaaaaataacaaatttgaccgtatattaagcgttctattcatacttaaatttgttatttttgtttctatttgtataagttgatttttgaatttacatgtttgtgaagtgacatcacatattgatttatcgtactaattttttttcaaattttcaatgactttttaagtgacatacaaaaatgaggagttatcatcttaagggatgaattgagttttcctgcattttgtgaatttgatgtccttgacgacggcgatcaccagctgttcttcttcgtgatgttcttgtcgacggtgaggacgaggaagacgcacgatcgccggaattcatggcactccgagtggtggccggcgaagatcgtgctgtggatgggcttcaccgtcgtccccttcttcctcccctcgcctctcatccagctctacggtcagtgttgccattgtcaccctcctcagctcctctcacccacccgttcttgattcctctttgctcatggtgttcgtctgaattttcatattttcagggaagatcgcgcatttcggagcagggtaagccccg

SEQ ID NO: 11257 - DNA, 826 bp, Oryza sativa
  Intron number 1 from transcript LOC_Os02g57600.2 (locus LO C_Os02g57600) derived from phytozome v7.0 (chr-ID Chr2; po s 35271237 to 35272062)
aggtaattgtgaatgaacatctttgtttttaagaaaaaaaatgccttcctttttttcttttacaaaacgtgagggattttcctatggtcaacaagtaggtcggtaggaatgtaaggacggacttgaccagtagcagacatctttagttagaatcaaaccatatgcatcctcttgcaggacaggggcaggcctagatatttgatcgggaagtatgctgtggttttccccccgaccaatatgaaggtttctattatcacaaggatgtcttatagcacatactgtaatatccctttacaccttaagggcttgtttgggtaggccgaaatcatggtcaacacatgtggatcctgtatttgaggcccatccaaacaaatgctgttctgataagtatcttaggttgtaatgctaagtgagaaacacatggtgagggacaccttttttcaagtaactagaggattcccctcgcattgcagcgtaagccagaaagtcttcatagtatattacatttgaagggagcaagtaactgaaggcatgaatgatggttgagattaaactcaaagagagatccagtggcctatgttttttaggtgatgtggctcaatgcattttgagcatttggtgctaattatataggaatacaggatataagataagattgtttattttggcctccatggtttgctgaaatccagcatgtttgatgcttgttgcggcaattctgattttactggttatgaagtggttgctatcagctgagttctaattaacgcaggcttctgttggcttttcagaaaattaaccaagctgtaggaccgttgaatcgcat

SEQ ID NO: 11258 - DNA, 445 bp, Oryza sativa
  Intron number 3 from transcript LOC_Os01g11430.1 (locus LO C_Os01g11430) derived from phytozome v7.0 (chr-ID Chr1; po s 6139163 to 6139607 reverse strand)
agcagatacgagttcagagcaacaaattatttcaggtagatttgcaatgctaattaacttgttgattgattctgtgctttgtatcttcgaaacaaagattctgtttttctttcagaagtacaatcattcattaaaaaaagtgaatctttactcggttttctcttgctctgctggagctgaactagttatttcatttgcatcactgcaaagtatttcaccgtttttgttaaatcttactaggttttctctgcctttttttttctgaacatgagttttctgtgtcccaacaacatagtagcaaaaggcaaagaccaaacgaatgaacttgaataccttgttttccttgaaaaaaagagtagcacattcgggtgcattcttttctcttttcgaattggattctcacggataatttgattttacttttgatctgtgatatgcagtgcca

SEQ ID NO: 11259 - DNA, 707 bp, Oryza sativa
  Intron number 1 from transcript LOC_Os03g12064.2 (locus LO C_Os03g12064) derived from phytozome v7.0 (chr-ID Chr3; po s 6326673 to 6327379)
ctttgtggtcgggtatggatgttccgtctcaacgtcaacatatcgagctaattagtatttctttggacaataatggcgatggagatctgtgctgaagctttccctctctcaaggtaggttatcaagtttgtttgcatatctcggagctgatccctatcaacggaatggatttttgtgtacaacgacgagggagaagagaatcagatatccagttccggtggcgttcatggccgcgagatccggatccggactccccattccacagtagccctaactagttgttcaatactctagatctgaatcttattatcacccttagcatgtttccattaaattttagcatctccatgagtccatgaccatgccggtacgtgcatgcagtagagtgccgccgccggtgtactgcatgcgcagtcgtgttcccaatttgctccacatgtgccttgctgccattgatgacctcgaccaccactgtgagctagtaattcaaaaggcatcagcagtgccgtggtggtgggtggtgtgagcttgaaaaggcaaatctcttcgttagaggtgggcagcatgcgtggtgggggatgggacaggggttcagcaatctttgtcctcttcatttaatttcttactcctagctgttagtagaaattttctttaccaaatttgtttttgcagattcccaacgctggagaaatcttactgcgcagact

SEQ ID NO: 11260 - DNA, 882 bp, Oryza sativa
  Intron number 2 from transcript LOC_Os03g12670.1 (locus LO C_Os03g12670) derived from phytozome v7.0 (chr-ID Chr3; po s 6754199 to 6755080)
gaatctaaacgtggagctacagcgcaacaaccaaggtacaaaagataatctacatgtgcaatattagtcgtaatcaaatttccatatcattcagcgtttcataattatcactgccttaaaatatccctagtcacataatattcctggatttactttaaattgcttgaattacttaattattattatcattgccaattaatatccctgataaacagcagtattatcatccctagaagtgcatctcacatattgactcaagttgattaaagttacgcttggtaattggtttaagagcagctggaatactacgcaattgttctaacgaatatctagtacttgctttgtatacttaaatatatccataagtcggtgtagtggtaatatttgcttccgagattatgtgctcagctatactccgaactgtcaactatcagtttggaagtatgttatgttggtcaaatactattatgatgtttccagcatacgattggagaactcttgtccaatttaagtgaaataagctcttgttcttgcccagaatttacagcgctcctgcgccttaatatcaactaattgtgtatgatttaaccgctcagctctttcactttgccctttctgtatttatgcatgtacgagaaggctagtaatgttttatatatttgcactgtgagaatttcttttcttggatagtcagcaatgtaacctcttttgcaagctgtagaatatgatcatatgttgtcctccttagcattatgttagtttctgtacgttgaagtacgagaatttatgttcttgaagcaaaaagttatttagcatttgtctattcatcatagtttgtactatgtagaaattgtagcattctctcgtcgttttaaggtgacc

SEQ ID NO: 11261 - DNA, 620 bp, Oryza sativa
  Intron number 1 from transcript LOC_Os01g13390.1 (locus LO C_Os01g13390) derived from phytozome v7.0 (chr-ID Chr1; po s 7457209 to 7457828)
accccaacttcaggtaaatatatatgcttcatacttgtgtgtatacgtttgttttctgagatggagcttcatgtttcagaatctataattggcatgttattagcatcaatcagtggttcttggcttccattttaatgtcagaataaatccttggaatttatgtggaaatgggttcctgaatttgatataatggatattagatttgttttgttctccgtaccaacgaatggttccatggtctagcggttaggacattggactcttaatccccctattttttttcatcttattcatatatattggctagagtggctgtgtgtgtctctatatatatatatatatatatatatatatattggttggagtggcaagcactttttttccattcatctctacatatattggcttgagtaacaaattcatgatttgtaagccaaagctcttttttgtctttttgtaaaaaagaaacttctgaagattgccaaaaaaaaaaactactttatgtacatgtagtaagattcttgtatcaaagaagagagaaattcaaaaataccagctcaactttttcttgcaccttcttgacaatgccgtgtgcgtaactgcgtatgtatatgcagggg

SEQ ID NO: 11262 - DNA, 1013 bp, Oryza sativa
  Intron number 1 from transcript LOC_Os02g07840.1 (locus LO C_Os02g07840) derived from phytozome v7.0 (chr-ID Chr2; po s 4110008 to 4111020)
ccgccgacctctccggcttcggcttcgcggactcggtgagtgattgattactgattattatgctgcctgctgcgactacgtagtatagtagtagtagtagggtgtgttttcacgccaaaattgaaagtttggttgaaattaaaacgatgtgacggaaaaattagaagtttgtgtgtgtaggaaagttttgatacgatggaaaagttgaaagtttgaagataaaatttggatctaaactgggccgtagtattaaattcgtgtgctaaaattaagttgaacacttgctgtattggatagcttgcagtagcacgtacggtgcttgtatatgcgtttttttagaaacgtgcttgtatatgcttgactagagtttcatgtctgcgaaattttcgttaattgctgctgatcagctgactcctactacctttctcaagtagaagactgttggttcatcctctaccatttttttacttgtacagtaatttttcatagttggtacgcaagtactccctccgacctccaatccaatatactcatatacttacgtgcaacttaatgcgacatatcctaatactatgaatatggatagacagtaataaatttactcttactaggagttttttttccccgattatatggaagacacacatcacaacacaagcacaccaaacttgcacaattttagttcgcgaacgaatgatgtcttgtgttttaaaagaatttatttgaatagcccgataagaggaaatcatgaattctaaagcatggaagaggagaaaccattttaggttaacagcataacatgagagtttccgttgtcatgacagggtttgattaagttggtattaaggactggtgataagtaattcttttcatataaggaagatgattacaagccctggttgcttatcttaaatcgtacttgattcttgatttgcatgattgatcactcgattaattttacttatatttttgtccaagcagagcaccatcacagggggcattcccaatcacat

SEQ ID NO: 11263 - DNA, 815 bp, Oryza sativa
  Intron number 2 from transcript LOC_Os02g41900.1 (locus LO C_Os02g41900) derived from phytozome v7.0 (chr-ID Chr2; po s 25175760 to 25176574)
tatccaaggtaactttcatgcttttcctttgcctccttttcttcacgaaagaattaccagtattgctcatgagacagaagggtggacttcaacactagaattttgcacgtcgttccactaaaaacaaaattaggttgggggaaactcctactgggggtagtaaaattatggatcgtggagggttggatgtgtgataaacgctgcgtgtaaataaatggtttcttagtaattatgaaaaaaaaacttgcacgctcaatatcgtgattttccaaatgctctgtgtcgtacatgcaatgaaaccatcaaattgttccattgttaggctacgagactaacgaagttactccccctcccctatttttatgtatataacgttattaacatacccttctgtcctaaaaaaatatctaatcatatttttatgtagttaaagtttgctctttttttttttacatagtatatgtttaaccaccggtcttatacgagtggagttgtaggtccactaagcacaactatgagtttctcatatttaggaagggactcggatcgacacgcggttataaaatggatccactttagttcgactgcgtccactctctagtgtatctaaactgcgtccactctctagtgtatctccttttagtagaagaaaaatgtttacccagaggttttagggggcagtcatatataccctgtgttagcaatttacttcctccgtttcatattataagactttctagcatggctcacatctatctatctattatattattaaaacagctttgaaaggaggcaccacgttcgctgtggggcta

SEQ ID NO: 11264 - DNA, 883 bp, Oryza sativa
  Intron number 1 from transcript LOC_Os02g51150.2 (locus LO C_Os02g51150) derived from phytozome v7.0 (chr-ID Chr2; po s 31294187 to 31295069)
tcgtcaggggcgtcctcgtccagcaggccttccaggtcgccgtctcgctcaccctcttcgcggtaatcctcctcgccgccggttatctcttccagcatgcgggcacccgagttattggttggatgaattgtttcattttttagctttgtggtaatctgatgcgaaacatgcagaatcgctttttttttattattattttccttcagaagtgcagaagcagagatgcaaatacttggggtgaattttgaagtaaaataggcaaattgttgtacatgcgtcttgattagattgttttggagaacaatgaagtaaaaattgcttcacacgcatttcgattagattgttttggcccaccatcaccgtgtagcactcaataaatcaatctttaaacctcagcatctgtgctaacatgcggaggataggagctaatcgcatcatgtattaagttttggtctgtaggtgtgttgtttggtaggatagctttggtgctacttaaaatacattttttgtattcacttcgtatggaaggaagctgcacataactaaaagaagaagtcatttgaatataatgagtagggagcaaagttatgatacttgtgttgattttgcttctgcgttgcttatcaagaaaatccgtgctttgttgctttctgactaagtagaaaaatatatttatgagatggcagctgctctatgctgattgaagtatatcaaaatggtgtccatggaaaataaactgatatgcatgaatgtccagttgtacgaatgcttatgtgtcttgaaccaatattgtatcttgacatttcttttggagtttacctaatagctttacttgtatggttctcaaactgttgaacttctatcgaactgcaggttattggtg

SEQ ID NO: 11265 - DNA, 544 bp, Oryza sativa
  Intron number 1 from transcript LOC_Os02g33030.1 (locus LO C_Os02g33030) derived from phytozome v7.0 (chr-ID Chr2; po s 19630556 to 19631099)
tgacagtggtaagaattctgtttatccttcttttgcatttttcctcagctagtctattgttttgttgtttagtttatcttatgatatgtgatttgttgaccatccatgtgacaatggcacagatttttgctctcccgaggactacaacagaacaactttgtccctcaaacttatttttttcttatttttttatagtttttcagcttgtggcgaccttttctttactcggactagagatgcatttacccctttacctctcagttcttcctttgattctttaataactacaattttgatatttatattgaatggaagaaagtcaagataaaaaagtcacaaaatctcataaaaatggaaaaacaattcaaattcctcagtcataccaaatattataatcattgtagaatatcagatatcaaactggatgatccaaagataataaaactcagtggaaactggatggatcattgttacgagtaattttcctgaaacaccttatttctgatatctcatatctgatctgtattgcctttacctgaagcag

SEQ ID NO: 11266 - DNA, 849 bp, Oryza sativa
  Intron number 1 from transcript LOC_Os01g66280.1 (locus LO C_Os01g66280) derived from phytozome v7.0 (chr-ID Chr1; po s 38491982 to 38492830 reverse strand)
caagaagaacaaggcggcgtcctcctcctcctccggtaggttctctcggtcgattgaaaccgatggtgcttccggtttgtgcgtacttgcgcgattgggatggtgaaggttggggggtctttgtgtgggaagcggtcaaacctttgtagattcgatgcgggttggagtgatcggcgcagggggggtgaggtttcttcgttggaagttgttcaaattgagtcatgaaaatggttgcgttagaacttagaacacttactagacatgggatcgagattggggtttattatgtatttcagtggatttcttagccgtaatgtttcatgacgtttgggggtaaattttgtgctggtaatgaacgaattcgacgtatttacgattgggatatctttggagattgaaatgtttctggtgcaagtatggtgcaattggtgtaaaatggtttgctatgcttatttggtcgtagaaatgatcgaaatctgattatttatatgatttttttctctgaaggtttctgattgcttgttttgtattctagcttacactgctaaattagcatattacatgtgtttggcatttcttattttcttagtattagtataaaaagacaatgtaaagtggatcattggatgcgagctttatggaatgcaaatggataacttttgagttatgtggtggtggcaccgtggcagtttctttcattgtgttattaaaaataatatatatttctttcaatcctcataagatacatgtgttttttgtggaaaacataattcatgaacttgattgattaactagtcgtaggtctcaccaaatgaccaaatcgataatttctacgtacaggaaaaggtg

SEQ ID NO: 11267 - DNA, 614 bp, Oryza sativa
  Intron number 1 from transcript LOC_Os02g12340.1 (locus LO C_Os02g12340) derived from phytozome v7.0 (chr-ID Chr2; po s 6423265 to 6423878 reverse strand)
tggcatctgaaccattcctgcttgatccaacggcggtgattatctctctctcacacacacgctctcattttaatacattttgcaaaatcgtcctttattttgatggttggttgcgacccagagttttggttcagatcaccgaccgagcaagggaatgagatgaggaaggctaatttgaaaattttgctatccaaataggggtctatatgcataatttaggatataattattaaggttgtgttcttccctacacttaccgaacctctatttcctcgtttttcgtacacacgtttcccaaactactaaacagtgtttttgaaaaaaaattataagaaaattgcttttagtattaatatatttttcaagattttttagctaatacttaattattatgccctaaaccgttgtttcgctttgtgtgctaaaggggaaggttcccaaccactagtagaagtggctaaggcttccttcgtttgcgctgtcaaaacaaatggggaagacaaggttttaaatatcatcaaaaggctcgacatttgccattgatgtggtttctgcacttgattatcttcaccaacataggccattgccaattattcactgtgatctcaagccaa

SEQ ID NO: 11268 - DNA, 968 bp, Oryza sativa
  Intron number 2 from transcript LOC_Os01g60600.1 (locus LO C_Os01g60600) derived from phytozome v7.0 (chr-ID Chr1; po s 35032618 to 35033585 reverse strand)
ggtcaaaagaagatcaacaacaccaacttcccaaggtttaaattaatttctcaaccccgtgcctgcaggctagatatatcatataccttaacccatggattaattaatcgacaaccctgctcatgtcaaaatgctcagataattaaccatcgcgactactcgttttgtttttaaatgtaacgagattatggttacgaatttagatacgcatgcatcttctcttgtccagattcatagccataatttttatatttagaaacggaaaaagtatatatttagcaaaaatgggtaatttaccatgtcgttgtaaataaaaaaccaaggtgagtacttttggaccatgacggttctagctagctagagacagcgtataggagaaaaggtattattcgtgatgtattgattggactttgttggatagcgaaggcgtggcaccggggacggaagagacaaacggaaaatgtcgcttgacacgcaccctacaactttatagattcttttgagcagccaggcgaattaattgatcgccacatgtttgaaaccatccataaagttaagccttatcagttggagaaaccaaagttaagctgattttttttctgtcatgtggaaattaagctgttctgttttcttcacatgatcattttgtccctggtgtcacgttgtgtagcgcgagcaaataactgtggtttatctgcgtgtatcactgtgagctctctgctagtttaaagctggagtttgggttatattatatcggaagcatcttgtgacgtcatcacctaataattatttcttgtgatgtgacctcatcaggccagcttgctagctagccgccatgttcttggattaggttacctaattatgtatacagtacacgaatcttaattaaatcttaatcgtttgttatactgatgattcttcctaaacacgcaggagctactacaggtgcagttaccaccgggagcgca

SEQ ID NO: 11269 - DNA, 548 bp, Oryza sativa
  Intron number 2 from transcript LOC_Os02g09740.2 (locus LO C_Os02g09740) derived from phytozome v7.0 (chr-ID Chr2; po s 5020402 to 5020949)
gggatctcctgctccggcgctggcgtcaccgaaatgtaaagatcccgtgatgcgacagcgaagctttcattggcttttttttattggatttgatgagttctttcattggctggtgtttgattcttactgcattctaaatttctgactctctgcaagctgaataaaaacaaatgtgcatttgggaatcgaatcacaatatcacattgtgcaccatcttcattgatggcagatagtttaggattgccaaaatcttctaacaggattaatgaaaagaggggaattaaactccttttttggatccatctatggaatgtgactacatcgcactaaccaacttcactacattcatggcagttctgttttcattggtgtctcaactcctcttaccaagtttgttggaaattcagtgggaaaaaaacttcattttggaacatacatcatcttttgtttagttttatttacttttgttactataagaagctactcaacactgacttgctctcgtattcttcttccattgtatagtaggcttgctggggtaggactgg

SEQ ID NO: 11270 - DNA, 1001 bp, Oryza sativa
  Intron number 1 from transcript LOC_Os02g38020.2 (locus LO C_Os02g38020) derived from phytozome v7.0 (chr-ID Chr2; po s 22966833 to 22967833)
gttgcaggtaatattccaattagatcaccttatcagttaccgcccttttgagctttgctggaatggtgacgatcagaggatgcaatcatgtagtgccattagcagtacataattactgagacttctgcaagtttcagtatatgaaacaaaatatttaagacattccatcagcgacacattcatgatgcaagaatagcatgatctacctagcaaggcaaaatcaatagacctttgcacttgaagatgctaggttaagccccagaaataaatgatagcagtaagttgtagcagctttattatattcagtgaaacctactgcatgagaaccttctatgagttgattgtactatattacacaatttcctttgaggtataaactccacaatacggtaaacaacttccatggtaggaagtgaaaactgaaaagggaaaggaacttaacagcatagctttaaacttgttgaagtcttttaacgtaaggattttaatccaattatatgcagtttcaggatgttgtgtaacatccatccgtgaatgttgtgcagctcacttgcaattaccagagtttgatgtctatcttatcaacaatcccaactagcagaagtacagaagcaacaaaatgagacaattaaagacaatgctcactagaaatatagcaacttttacaagggatagactaatggaatcttgaatcattagacaactaggcatgcacaattttgatgaagacatttttggtgggactctaattgcgggagaatgtttcatctgcttaatcattggaattaagatattttcatgattgcgggaaaatttaaatgcatacatcatgcctcaaagaaatatttaacataaaattaaatgcctctgccaaagatccaattgtgtgctcccttttacggttatctgagcatagcatattaacatttctcagagtcaatatgaattaacgcttgctatttctaggttgcttcctcctacggctggcctgtttcaactac

SEQ ID NO: 11271 - DNA, 1032 bp, Oryza sativa
  Intron number 3 from transcript LOC_Os01g73790.1 (locus LO C_Os01g73790) derived from phytozome v7.0 (chr-ID Chr1; po s 42739293 to 42740324 reverse strand)
gcagcttcctccccaccgaccaccctctccgcaaggtcatccaccatatcactctattttgacgtttcttctggataataatgtgcttgtgccaattgtacaagtctgtgtgacattttcttttttggttggttgactgaaaagcaaactgattggtactgattagattgggggtggaatggatctggtgcaggtctgctagattcagttgttcagctgccattatcctgtacttgctgttgtacggccttgacagtaaggttgggttagatttggtgttggttgggaatggattttcttattggaccttgtctggttgttggttgacactcggatatatggtcttgtgatggtggttctgtttcaggattattgaatgttttgactttcttaggatagcagagttgacagcatctcttggagtgtcagtatttctcatgttgctctatccttcatctgtgtagattgtccagtgccatgttgtgttatggaatgacttgttcctcctctagtttgatgatacttatttcttcaggcataactatgtttatgtgctactactgcacattgctttgcaagtggatatagtaatcaagaatacatggcatcttaaggaaatgtcttttctaattgtatttccaatgtgataagttagtcctgtaggtgcatcagtatttaaagtgaagtcaactagcaacacgcttggagggtcaggatctaatgataacttgcttattgttccatggacttccccaataaagtttaccctagagtctatattgttgagttgtatgctttgcaatgtatttgtctactttcacggagacagtagaggagggccctacgcccctactgaaatgcagtagtccagttgttgcattctctttagttaaattgctatgcatttgcattgacatggatggagaaaggagcaagtgtaaacctgcccattacatgtcttaattttgatcacaattgactcttatctgatatttgtgtaccttcaaactttgaaacaggaacctgaatttt

SEQ ID NO: 11272 - DNA, 675 bp, Oryza sativa
  Intron number 1 from transcript LOC_Os03g36110.1 (locus LO C_Os03g36110) derived from phytozome v7.0 (chr-ID Chr3; po s 20031375 to 20032049 reverse strand)
gccaggtatgagtcgttgaggtgcagagattttgttgggatattttctgtagtatggggatttctgtggtttcttgagatatttgctcattctcaagttcgttaggataacgcgtgttcttcttcggagggattgtttctgctactagcggactaataggcaaccaaaaccatggtgaggcaaaccggcctccttctccattgccgcagggtgtttagattgagaaccatcttcctaattcccttcaaagatttggcgtcaaattatttctcccgccaaaaacgatgggtctatatatacagcctcatttcccaaaccaatcttttcaacatccagagtcaaacagaaacagaaccttgaggtttctacggtaggtttcccggagagaagctgcaagcgaaggtaaagtgctaaacgattcaattcgatctgggaatactatttgttagtcagccttgcgcacaaacacaccaccatgtttgtccatcactgcctctattgctgcaatcgccgcaaacgatgacaccgccgctgccgatgtccatcgtgtccatttgttatgtcttcttctcaattatcattctttcggtttaatttgctattcatatctttttcgtcccctgctcttattgtctagacgcagtaaatatttcttttttcaatgttacagaaaaa

SEQ ID NO: 11273 - DNA, 323 bp, Oryza sativa
  Intron number 2 from transcript LOC_Os01g70550.1 (locus LO C_Os01g70550) derived from phytozome v7.0 (chr-ID Chr1; po s 40859903 to 40860225 reverse strand)
gctattcccctctccctcaaggtcctccgctctcttgtcttccatttgagtagtctgcaactctgcatctcatttcagtttgggacttattttattatttatacaaactgaaactatgttgcattaccgattgtcaaatttgaactaacattgaagaacataaatagaagaaaataatcatatccgatgcttctcttctgaacttttatgattttcttttttaaaattactagtagctgagttttgatgtttcttggcctcaaccttttacctgaagcaaacatgcagaggattccagaccgcggtcgagctgtgaggagagt

SEQ ID NO: 11274 - DNA, 795 bp, Oryza sativa
  Intron number 1 from transcript LOC_Os01g43870.1 (locus LO C_Os01g43870) derived from phytozome v7.0 (chr-ID Chr1; po s 25131952 to 25132746)
gagggaacggcggcgaggagctgggtgcatctcgggtacgtgcctcctctctctctctctcctcgcgtcgctcgagctctgctttggacgggggatttccggagctcgatttcctgctcgggctcgactctctgtgattcttgtgggttttgtgtaatttgatctggggggatgcttcgctctgtgtagggtggtacatgtttggctgcttgagtatgtttcagctagttgttgggtggttgagctttttgtacccgtgagaaatacttgtaagctcaaaatttgggccgaggtatagagaggaattgtgtttgtgtgaaggttttcgggctgctcggtggaaaaggagtagcgagcttttgggatgtggcatgtgtttggggaattctgtaggctgcgttcctgctgtagcttagtttctgatcttaattactgtcctgacaagttcgaacgaaaatttgtttcatgggaaagtataaaaaagggaggggaaagcaaggaagggattttagttggtgttaaagttgttgcttgctaggagggtttaaagattttgaaagggttgttcgattggtgaattcactggagtgagtgttttattttagtggtagattttggagaaaaaaaatggtggctggctctaatttattgagaacatatgggtaaagtatgttcttccagtagatcattagtctgtagatattttaccagcttcacttttctccactaatgtctttagtgatatcaaatgtttcaacagttggacttttcctactggaactgcagtactttcaa

SEQ ID NO: 11275 - DNA, 695 bp, Oryza sativa
  Intron number 1 from transcript LOC_Os01g12720.1 (locus LO C_Os01g12720) derived from phytozome v7.0 (chr-ID Chr1; po s 7037761 to 7038455)
gccgccgccgccgccgcccccgccgccgttcaaaggtgagatggagatggacacctctaaattcctactacttgccttgtcccagaggagatatacagatcttctgtttcctttttgtctcactagcaacacagctgcaagacgttgctatcaactgaaaattttgctaaattgctgtcatggtaaatgttttttttggatttattgaaaaattttgaaggacttattcttgtttgttatgggatggaagaacatatcgttaggcaaaaaaacacaggatgtaggttttggtgtggattgtgctaagtttaccatggatggagtagtggtgttgtggattatcagttcatcacttgtgttgagataacacaaaaggttaattctggaaagaaagtgacaagacctgacatggtcatgtagtcctgaggttaccttacttttaagccaaatcatttggcaaacaaaaagcatgtcattttcttactttttcattctttgagttaaccatcacagagttgaatatgtttctttacatatatttaatctgtgagcaatcatctaaaaagaaacaaaaacaaatgtgcaatcaatcatatccttctcatatcattctgcattgagaaaatctatttggaatattaactatgatcggcggtcttttcagtacaattcttgctgagctgcaggggatcact

SEQ ID NO: 11276 - DNA, 834 bp, Oryza sativa
  Intron number 1 from transcript LOC_Os01g17040.1 (locus LO C_Os01g17040) derived from phytozome v7.0 (chr-ID Chr1; po s 9764378 to 9765211)
cggcgagggttcctcatcaatctgggtttcgccaggtgaagctgctcatatgcgctgatgcttttcttgctttggctgatttgatatgccgccattgcgtgattgttgtgctgatccgttacattgctggcttttctcgagggaatcattgtggaaaaagcaattgccaagttcataaataataggacagcataggatgttcatgtatgtctgaccgagatcaaaatagaaccaaacctgcaaatgttgccgagtacagataaaatgaataccgttgaaattgcatgcccatttatgacctacgaaagaagaggatttagtctttatgaccatttctgttgtgtcaaacatgaattcacttggtgtggattcaacggttccataaaaaagtattatcgttgctgttccataagaaaaaggatcaaatctttatgaccattgatgttccaatggttcttcgtaaaaaggaagctcatcaattcagtttgtattttaacgactgctgagacagttaaaccagcaagatagcaactaccaaaataaattagagtagctattgttggtaccagccagatctggtactatacatagattttgagcaaggtgacgggaagaacaaaatgccatgtattgggtcaaaatctgtcaaataacgcaccctgatgttggagactcatgtcattccacacactacttttttgcagcagttctgtgtattctactgctggaagtattttagtatttgaaatgtaacagcattttagagtttgagatgttagctcatgttgacaactctgtactgcagtgtactgctgactggagcagcttttcttg

SEQ ID NO: 11277 - DNA, 918 bp, Oryza sativa
  Intron number 1 from transcript LOC_Os01g68930.1 (locus LO C_Os01g68930) derived from phytozome v7.0 (chr-ID Chr1; po s 40057214 to 40058131 reverse strand)
atcagaggtgagctctttgggggtgcttcgcgtgattcgggatgattgcgcgggtgggaaaggcggtggttttttgattggtggattgggagggggatggaattgcgatttttgtcgatttgattctgtcttcgctttagttttttgtcctcgttgatccctaatttcgctttctctggtacggttgttggttgggggagcgggattagtaccaactctgctgcccttctttttttcttcctaatctttatggcgtgatgtgatgttaagagccgggaaaggagacttcgaattctgggagaaagtacccgtggaattctttcgttggaagctttgttgtatcttttgctctttttgtggtgtgtactgtgtctcagttcgttgcagttaaatgttgttacttggttgcttttgctgctaaaccctagtggctggttgttcatgatttttgtaaggaatgctagtgatgaaagcattcttgtgcttttaacttgctctcgtttaggcatttgattggatatccctgcccaacatcaaagatttcctttttttatcttttagattgccaatgtttagcttttgtctcatagctttgccctccactagtctgcaatctgagttttctgaacattcttgtgttctacagcaaaaacccctgtaatgcggttcacaggatgaaagctttgcgtttgctatttgtaattgttggttgctgattcatacagcactccataggtgtaacagtcttagttgaacattggatgcatttttttagttgacattgaaagtcctctaaatcataagatgtgcaaagatatatgctctgtatcccactcatttatttgacgtttttagaactttttttactcgagtaattattcataacggcgccttcaatgtggaacattgtacagtgaa

SEQ ID NO: 11278 - DNA, 729 bp, Oryza sativa
  Intron number 3 from transcript LOC_Os01g59880.1 (locus LO C_Os01g59880) derived from phytozome v7.0 (chr-ID Chr1; po s 34632524 to 34633252 reverse strand)
ctcaaacagaacagacaaaccaagttgcaacaccggttggttcagatcttcccttttaaaaagtttctgttccctttttgtttcattttggatcgttgttttaatggcgttggcagttaggcttatgtattcaaatatcctttttcttaatgcaatgatacacccatcttttgcatattcccgggaaaaaaaatgtatatacagtttcggatgctagttgaattgttccttatctttgccaattgaacatgattaggggttatttggatctccaattttaggaaaagtaaatttaattaagcaagttagcttgcctaaaagtctaatgccttgttggttaaacaagataagactaggatagcaaagttcatttgagttttaaagaaaacagctgcttcctgtttttttcacaaaattcaaaatatgaatatagtaaacaactagaagaaactttatatggcatcattttcatcagtgaatcccttcttgtggagggcaatcccttatttgccgttgtaaagttcatgcgatcccatgttagttatttgcaactgaagtttcattggcatgtgactgcatggcccatgtcagagagggagagagaaagatagacttcttcaattagataattccattaacgagtttccttttgccttgagatcatagaaggaactaactgtgttgtatggccttacataataacagggaagtttggtccaagttcttcta

SEQ ID NO: 11279 - DNA, 755 bp, Oryza sativa
  Intron number 2 from transcript LOC_Os02g40830.1 (locus LO C_Os02g40830) derived from phytozome v7.0 (chr-ID Chr2; po s 24736379 to 24737133)
acaccttgaagaacgtcttccctagtgagaaagaggtgatgtttccgttccttattctttattgcttgtgcggccaatttgagacttggttgtggcagttatttgatggtattaggatgtatatagagaatgtagtttactgcaatttctgctgatggcctgaccagtttttctccagaggggaggttagtggttgctgtagtatacgggatatagtttcatataatacgaatgggtgaaatacatcactgttggtgcctggaaagtaacattacttgtaattagtcttagctactctggtatgacactattattggtgttttgagtaatttttcaatgctgtttagtcataggactgcatataaactttttttttctccttttcaaagattatacacccacatgtggtctctttaaaataatcatatcttctaggaaaatattgccaaggtttatagtcaatgtggcttgtaagcccttaacttggttaaggggaaaccttttgcttatcacaagatagtattggggtattccgcttcaaaatgtttgttattccgtaaaactataaagatgagtcagtagatggtaggctggcctactccaaaatcaaatctagctgattgttgtccctagcctactttgtagggtagatctatgtattattgcatgaatcattttgtggttcaattcagccatactcaaaacatgacacaactgcagatagttgttaagagtcaaatcctggctggtggccg

SEQ ID NO: 11280 - DNA, 1042 bp, Oryza sativa
  Intron number 1 from transcript LOC_Os01g49550.1 (locus LO C_Os01g49550) derived from phytozome v7.0 (chr-ID Chr1; po s 28497655 to 28498696)
gtcgtcaactcgtcgtcaccaagaaggtcatatattatgagccttccatctagtgaataattacttgaactttcttttattaagtgaacaaggtgtattaaacgaggtaaaaggtattttgctgagagctaattgatccctaactatatactagtagtttaacacctccaaatcaaagaggcccagggtttacattaccggttgacgaatttctcaaaaatattactggttgaccactaaatttcaagccccatcggtatcacggttttcaataaattttgatcggttttcgataaatttcaactgaatctactgtttaaccttcaaaattccaatcgaaacttaattccgagccatgtagaaacatcgaaatttcatggaattcaaccgattttcgtcggaattgtgaaccctgaagaggcccttaaaatttgaataaaaatctagactatctgagagagttagagattcttaaaaaaaacttacatctactataagctctccaaatcagggtttcatatatctcgcaattatcgtggttaccgtgcttaccgcggggtacggtaggggaaaccgacgatatggtttggatgaattttgacaaaattcaaaattccagaaaaaaacgaaaaaaattgaaaaaaaacatggatgtagttcttgaattgtacttgccaatggtgaagaatttttttaaatagagtaagctaaattcaaatttgagggtaaaaccgaaaatagtttacaaattggaaaaaggacgacaatattgggcctcaattatcctacatattctttcaattattctcaatttctaattttctacacatattcaactatatttttgattttttttcactatttattttttatttacatgattttacctacacagccccatgcaaatatcacgattatcgcagtaaaccgtgcgattatcgtggttaaaccgtgaaaccgcaaagttttgaatttgaatttttggatgagatttttgtgcattttaggcggttaccgcgcgattaccgccgttatcgcgcta

SEQ ID NO: 11281 - DNA, 927 bp, Oryza sativa
  Intron number 3 from transcript LOC_Os01g13210.2 (locus LO C_Os01g13210) derived from phytozome v7.0 (chr-ID Chr1; po s 7363444 to 7364370 reverse strand)
agtcactaagttccttgaggaattggctaagattggtaagaattggctaagttctaattggcttgtatttgattgcatggggtattgactagaataatcacaatatgtaacttgtcccctttttttatattttcgttcaaaaatgcatttttaatgaaaataaagaacctttatcacttatttccaaaatgaatcgtaacataaaaaatgagttatttttttaaaaaataatttaggtgtcatttatgaatcacctttttttcccttaaaaaatagtagaatccgtagtttcttttagcaatcatgtttattcattttcttatgtttttattcgatagagacctatactatttgccctctgagcaacaatctagactttattccctcttgctagaaaattgaacttcagaggaatcttctcgtctaccatgtttccttgaacagaatctcacatgcaaactccgtttctttagctgacgcagacaagaggccaaaccagtcgaacaaaaaacaaacgaaactaacacagtttttttttattaaacttcagccacttatttttccaatcatatataaaaaccaatccttttatagtggattaattttatagtcttaagaggtattgggaggcatcaatatttttaatacaagttttggtacctcctaatactggaggtatagaaaggtattaaattttacattaagaaatatcggtaaaatcaattttttatatatctgaaaatatttgaacatgtctgttcctgaatagacatatttgctcgttaggtagtcctaaaaattatataatttttatgcaaacaataaaagatattttaaatttccattaatatttttacaatgaaactaatgcaatcctctttttttttttcagatttccccggagccaagccggtgagcgacgcggtg

SEQ ID NO: 11282 - DNA, 616 bp, Oryza sativa
  Intron number 1 from transcript LOC_Os01g41400.1 (locus LO C_Os01g41400) derived from phytozome v7.0 (chr-ID Chr1; po s 23439230 to 23439845)
agggccaggaaggattttcctaaggtatagtttttaaaatgtatttatgtgttgtacttggtagtaagtttgctaaaatttgtgataataattaacaatgcaaatttagaattatggttaatgaaattgaaaagtcaattgtggaaataaattagcaacaggtttagtaagaatacaacatattgtttttttattctatgtatgcacggaagacgcacacactcattattattttttagaaatcgtacatcagtatattactaatcatgcacactattagctcatggaagttttcttaaacaattttgatcctttcaccattcttttactgatacttatccatgatctaacgacatatattgtatcaaccgttgcattcaatggtccatattttcatatgatgtagctcaatgatgttgcattttaagttttacctttcacttagagagatttggcaaccaatgataattgatcattggattatcagttccaattatcataatttggtttatgaaaccatgatgatgatgatgatgatgatgatgatgataacgctctattcctctccaattaatgtgcaggttttgctgatctcttcggtgttgtgcagtctcaa

SEQ ID NO: 11283 - DNA, 497 bp, Oryza sativa
  Intron number 1 from transcript LOC_Os03g03390.1 (locus LO C_Os03g03390) derived from phytozome v7.0 (chr-ID Chr3; po s 1444160 to 1444656)
aagcaagtgcgtgatactacctaattcaaagttttcctcatgcgttggggcatgcagtatgctattgctagacgtaggtttatgttggttaacatcggttgatcctgtcggatatggagtctgaaggagttgctgttgttgttcctgttgaattgtaactagcaacgtttgttaatgctacggagtggaatttgggaactgccgcaaacgagtgaacttggcttggattttggaaaggagttgaaattcacattcttcacgagttatggctgcacatagattgaatttagtgtagttaatatttctaatcgaaccaaatgagtaacgtgaatggaatggtggtttgcactccataaacaagtttatttcgtcagattatactgatttttctgtaatttagatttgttctctttttactgattttaaagtgtagttagcattttttttttcattatgctttaggggtgggaagaaggtgaaggccttggtaaagataa

SEQ ID NO: 11284 - DNA, 927 bp, Oryza sativa
  Intron number 2 from transcript LOC_Os03g22030.1 (locus LO C_Os03g22030) derived from phytozome v7.0 (chr-ID Chr3; po s 12622829 to 12623755 reverse strand)
agccggtgtgcaccatcgtctgcgggggagagccggtgtgcgcattcgatggcgaggaaggaagggcacgatggtgagggatggagggcatggcggggagggaggagcaaggaaggtcgacgatgagcaaatcccaacgtcgcctcatgctcccatcatcatcgtcgtctggagctggccatcatcgcgtgaaacggcggcgccgccgccggctccctatccacgcgccccctcgcctcaaagccgccgcctcatcatccaccgattgggaagagggccgccgacgccaagtgggtggagatgggaaggggaaagatgtggactgtagaggaagagagggaagaaggtagagaatgacgtgggaccaattgttagattggagaagatgatagagaagctgttggagtgaaaggcaaatttgactctccaacttttttttgtaagatggctaaatgagtatttagagggtgagatttggagatgctcttactgatgatatgtttgtaaaagtttcttgcggctgtagtttttaccagaatcaaaagttttcgaaacagctcagttttttttatattttaaaaaatagtagttgtagaatttaaataataaactagaaataataaactagaagctgagaaagttcctccaaacagtcattttttaaaaataaaaaactcatgcatttatttaaagatcaaagataggactattacacgagtgattagagtgctaagagcaaaggaaactagaacacaaccagttttacagacaagcccctcaagactggacaaactacacttttagaccattattttgcagaaaggaacttaacaaaatgagaaaacgcaattgggtccttctggtatggttgcttgagaagttaacgacggtagcatgtaactgggctccggcagaggaagaaaccat

SEQ ID NO: 11285 - DNA, 700 bp, Oryza sativa
  Intron number 1 from transcript LOC_Os01g43690.1 (locus LO C_Os01g43690) derived from phytozome v7.0 (chr-ID Chr1; po s 25038111 to 25038810 reverse strand)
cgtaaggtttagctgaagttttgatttctgggctaaaccttctgcttcagacgttctgatttctcaagctgacgctcgaacattgtgtttttttcttttaagaaaagaacatttgtgtcattttacttttttttaaaaaaaatacatacagagatgggcatgtcgcctacgtggcaccgtcccaccaccattacactgtcctccacctcactcattgcactcacagtcgtcgtccatctgacccttccctccaaaaaaaggtcggctatgaccctatccaagagctactggtgccgtcctcgaaaagccaacaagagagtggaggtagcggcacccccaagaagagtgcatgaggaagacgaggctatgtcttttctaggagttcaccgcctatgcctattcataatcttgtgttctttggttgtttcttcaacttcatgcttaggttaatggatggatggggcaactggcagaggaggcacaatgtgtggggacaggaagaatatgacttgcttggttctatgcgataccttcatgtacattttttttgttggtaccagacttgatatgcaacaactggcctcgataccttgtgggtattaggtatgataccagtatcataggtaccaggtctggtacccaaagcatcaaatctgatacctcaggtatcaactttggctcctgacaagcgtggtgatca

SEQ ID NO: 11286 - DNA, 406 bp, Oryza sativa
  Intron number 1 from transcript LOC_Os01g58890.2 (locus LO C_Os01g58890) derived from phytozome v7.0 (chr-ID Chr1; po s 34032436 to 34032841)
cccgcttcgccgtcaccgagcacaacaagaaggccgtaagcgccccgctctaccctcctccctacttctcctcttcgcaaggccggtcgtccaactagatctgtgttctatggactaattatgcaacgcatgacacacggctctatttaatttttaaattgattctcgccaaggaagtaattttgattcctagtcatgtaaacctgctcgagtcggtgagaaaaaaaaagatgcggtgttgcgtatgtttgttaaaagtgcaattaggcaattttttgtgttcaaagattgtgctgtgttctcttttatgacaatatggaacaggaggttctggactgattagcatttaatcttgatactaccatgcgcagaattctctgctggagttcgagaagcttgtgagtgt

SEQ ID NO: 11287 - DNA, 769 bp, Oryza sativa
  Intron number 1 from transcript LOC_Os01g69100.1 (locus LO C_Os01g69100) derived from phytozome v7.0 (chr-ID Chr1; po s 40167091 to 40167859)
ggcggcaggggttggcgtcaggagccccggttctggtaggattcgttgatcttggctctcttgggtctttttctgaagtgagtttcagtttcagatggttgtttgattgatcagtttggttgcttagctaggtaagtctattcttgaaaggttaaagagggagatgagtagatgacttggctgatctttctgtggaaaaaaaagaagaagaaaagaggccttttgggtttgtttattgattgatttattgtttgggtctggatttaagaatttgaaagggaagttttatggtgttaaaagtagtttatgaagaataaaaagattgcttattggtattaacaatagcttccgaagatcaaacagactgattgtttcagtaggaattgatgatattaactgaaacggacctctgttcaagtgttcatacaagctggttttcgattcaggttcatccaaatcaggaacttgcttcatggccatttgattagcctgggggggggggggggttgcagtgtgtttgtatctagtattactttgtccaaaatcaactgcttgctctttgtgttaccaatcatcgacgagatgtgcaagttgactgttttgtgtattctaatgttcttgtttgtcaattgggcacttcgttgaatttgtgtgttcattaattaagcctgatcgaatttataccatggttacacatgcttgtctgacctgaatatgcagtttttaatggatagaggaacttaaagaacttaatttgcaggtagcaagg

SEQ ID NO: 11288 - DNA, 555 bp, Oryza sativa
  Intron number 2 from transcript LOC_Os01g69100.1 (locus LO C_Os01g69100) derived from phytozome v7.0 (chr-ID Chr1; po s 40167929 to 40168483)
gaggtaatctaatgatgcagagtaaataggttccttctcactggcatgtctgtagtgccagtgccttgttcatgctgtttccttttcaagtctatcctattattgtatcagtagcatactagcatgaggcctgttctttttgtttagtccaaattgcatgtgcgctgattgatttggtgatgatacagttttatctgtctctctggattctaaggggcttattttagccctttgattgcttgttgagacaaaaggttgaggcctttgatttcgtcttttggcattatcatgtttctagcatctaataatctgttagctgcattggaccccccacctttaacttcggttacctattccatggggtcctttatttcagaagtcttgctatacacttaaattataagaaactccatttcttctgcatcattctggaagttcaatgaacaagtagatattctactgtaccaagtgattttgattgttttcaattcatgtgtaatgtatgttttttcgtgtgcagattttactccgtctcgtggcagcactccaaactac

SEQ ID NO: 11289 - DNA, 723 bp, Oryza sativa
  Intron number 4 from transcript LOC_Os01g61860.2 (locus LO C_Os01g61860) derived from phytozome v7.0 (chr-ID Chr1; po s 35789934 to 35790656 reverse strand)
cgagacataacccatcagttggttactgtcaggtatggctttcccttacttctgactcatgtcacttttcttgtcactggattgatgtagcttctttgggaaaccttgcatattgcaagaccaatctgttgcacatgtaattctgtttgcactgttgcccaagatgtagcctcatcttttcgcttatgcttatgcttatcagccaaaatttgaattttcaaccttgaatttgaagttttttcatcgaagtttatttttcagcctttgcttttagatcactaagaacacatatataaaagttttgttcacaaattatttttcgtttgcaaatatgctgtttggcttattcctccaacaagccaaccgatgggcaccttttagccggcctaatcagcgattaggtgcagctaggtaacaatctgccacacaactagcgccttggtgaatgctggctatttgaatattgataagactgaaaacatgcaccaacagggcaacaccaaaacacatatttcttatttcaccataaaactgaagttctgagcatagtatttcttactccctccgtttcacaatgcaagtcattttagcatttcccacattcatattaatattaatgaatctagacatatatatttatctagattcattaacatcaatatgaatgtgggaaatgctaaaatgacttatattgtgaaacagaggaagtactcttctttgtat

SEQ ID NO: 11290 - DNA, 819 bp, Oryza sativa
  Intron number 1 from transcript LOC_Os02g06410.1 (locus LO C_Os02g06410) derived from phytozome v7.0 (chr-ID Chr2; po s 3204640 to 3205458)
ggcctcaccctgtggactctccatccaaacaccaggtagtgtcttcttgaattgaaccatacaaatcatttaatttctttcctcgccaaaaagggaagaaaccattatttcttcctgacaaaatcagatcataaataaattgcacatttgcactaatttgatttctcatcatcgtggagttaattagctgttgatgtgtagataattagtgcttattcgggttgtaggatttttttaaggaattttaacctatatatagaaataggaaaaagaatagaagaaatagaaatacatgcacactttaattcataggaatctttcaagaggtttaagtggtagaaaattttgtatgttttctttctacagcttgtaatgaaaaatttccttctgttttcctatactcatattcttgttacaaactgaaaccgaatgacacacataaaaaaatatttcttcagaattcaaaacctttgttttttagctgttgatacgtgtaattgtaaaaaaaaatgtttttattgacacgttgtcggttgttgtgaactactccaatcttgctcacaaaattagacaataaataaatataactaatttcttattctagtatgtgttaaattataattgtaaaattacttgttaatatgtccatttgcaatataagtttgtaacaacattttttttttgaaacaacccgcataagatagtgtgagtttatatagacgtttctattgacagagagaaacaatttcagaatggtgacgcaatttacgattgccttttacaatttgtgttttgtgaactgcaagtgtgctggattgc

SEQ ID NO: 11291 - DNA, 761 bp, Oryza sativa
  Intron number 1 from transcript LOC_Os02g10420.1 (locus LO C_Os02g10420) derived from phytozome v7.0 (chr-ID Chr2; po s 5477387 to 5478147 reverse strand)
aggtaaccatatataaacatatgaatttaacagtaactcgttagactgtaaattcagaaataacacctgcttttcagaatatcatacagcctgcaatatcctttttttttcctccgtcaaaacaacaaaaagttgagtgaactttacacagcaatggtggtgcaatgcaaaaacataatagtgatgtcatgctaattctggccaggccaatgcgagtgcttcttgagaacggggccctatgatgagatggggcattgtttcttttctagatcggcgaagaaatgtcatatgctctccatccatctcatattacaatttgttttgattttttaaatcaaaattctttaggtttgttactatattttttttacgaatttaatcaaacttaaaaaagtttaaattttaaaaaaaatcaaaacgctttataatataaaacggaatgagcagtatctgtttcaaaagtccatctcccaatatgaccaaccgttgtgcacaaaactgcaggtctccagctagcttgaagcctttcttcttcttcttcttcttcttcttcttcttcttcttcttcttcttcttcttcttcacttcatttcacgaagtgaacttcgtaggaggcatgagatgatcaggcgctttgttcagcacacccaccctatgccaccattttgatcgagttgccttccactgtcttattgttgttgctaaacctctcgatcaatctcaaagaacgtgccggtagagttccaggaggcgcacgggta

SEQ ID NO: 11292 - DNA, 519 bp, Oryza sativa
  Intron number 1 from transcript LOC_Os01g41900.2 (locus LO C_Os01g41900) derived from phytozome v7.0 (chr-ID Chr1; po s 23759894 to 23760412)
gcagaattgtccaggagaggaagaaaggtaatactaatgttgaaatggccttgcaatactctgcaatttttttattgttcagaaacattctgcagttttctttttagagggcatactttgcaattacagaagcatttaaaatcttctctgggaaaaaatagagagaaaagaaaatttggtatggaaattcagaggcttgtaatcttaaattacctaccaaatcttctactagtatctttctttgtttagtttatcatcccgaccgaacaaaagttacattatccctctgaaataaaagtagcattatcttctgcgatgaaaggataccaaggcatatctgtctccttttatatattcaccaaatgaatgttcaggacgacttatcatcctgaacaacataacccccagaaaaattcagtactagtagtacatatatatagtcatataacaaatcaaaataatctgtatatgaacatgacaggagttccgtggagcgaggaggagcaccggctgttcctc

SEQ ID NO: 11293 - DNA, 740 bp, Oryza sativa
  Intron number 3 from transcript LOC_Os02g14770.2 (locus LO C_Os02g14770) derived from phytozome v7.0 (chr-ID Chr2; po s 8182428 to 8183167 reverse strand)
aggccctgcagagggaggtaagttgatttttttttttgtcaatttgtggttacaatattataaagtcaatcatagcaaaagtgtccaccgcaccattttgattattttactgcttatcagctcaatggcttctttttcttgatgacttaaattatgggtctctgggcttaatgagatttgtatactctcaggcagtagcttaatttagaattaggtccatcctaaaagcttaatttagtcgaagtggcaaatcatgtttgtgcctcttttatctatgtggtgcctgtcctgctccatgatcttgccaaataatttagaaatcttatctctattgtctgtacaccattcttttatattagtttatttggacaaggatttttttttttacattagtttagttggagacaaggaaaaacattgaacactaggtgattatttccagatcctcaaaaggtgtttacctatcacgttcataaattaattgctctgtacttttggactctgtcttgacagttctgaagtccatctccaatagttttcttttgatacacttgaaatgagagctctttttgctagttctgatttctgagtgaaattcatcttcaatcagagaagtgctatgtgcatattgcaaagtttatgcagaaatgtcgtgttggtttctactactctgttctcatcatgcctttctgattgtgtggtttaacacgcttcacagattcaagcagctttcagaactg

SEQ ID NO: 11294 - DNA, 739 bp, Oryza sativa
  Intron number 1 from transcript LOC_Os02g35315.1 (locus LO C_Os02g35315) derived from phytozome v7.0 (chr-ID Chr2; po s 21229479 to 21230217 reverse strand)
ccgctgccaccgacgacatcgacgacgcgtagtaggttctttcttttctccctctctccgaaatccggttcgtttccagcgcgtgattgcatatgtgcgtgctgagtacttgagttgactagttgaggtgatttggtcgttcttgagggatgtctgattgcggctaaggtccggatctgtgcgctgtacttggggcaaaagagcaaataatttccctttgcttgtgtaatcttgcttgtgctatctcaaagatcacttgtagattcctcattagttgcgcagtcaatcaatcaaatgcttcgtagcactgccacaccaaaaggggagaaacattttttttgggcccattcaatttgatctaaggtgaattatgtagagagatttatgcttctctgtttcaaatagagagctgtcgacatgttgggaagaatgattcttcagatgtttaatgagatggttcactgcaacagatggcattaatttatactgtaaaaccgtatgtcaccggccatctggagctgggaaatttgcttgaggcgtgtggctgtgagattttcagcttgattagagaggcccatggttgtgccatggaaatttcttgataagcgtgcgtataagtcatgaatgcaatgccttttgctgtatttattccatttgggtgcatatagaattatgggacatttcaccactaatgcgtttgacaatttttgcagtttaagttttccatctatctctggaa

SEQ ID NO: 11295 - DNA, 967 bp, Oryza sativa
  Intron number 4 from transcript LOC_Os02g19650.3 (locus LO C_Os02g19650) derived from phytozome v7.0 (chr-ID Chr2; po s 11486035 to 11487001 reverse strand)
tatccccaaggtactctgatcctgtcaatccttgtgtgcttttttttctgtttcttttcactggttcagagaaaaagaagggctaggctttattcgagacttgagtcacaatcacaaggggatatttttttcaactttggcacttgaaggtttcagctgttgctttccttactttaaattctctggtttctggatggtctttcaattgattagaaaattaaatatgatttgacaatgatgaaacgaaaaatctgccagctgatatgtagctcagagaggaagagtcaatattggcgcggtctttgccaaagaccggagtttattgttgccacgttaaatttgtactagaattaaaatgaagatatgtccactatatacaaacaaatttcttccgtacttttgaatctgtagttactggttttgggaggaagaaaaggatattttgcagcatgattgagacctccctttctagtagtatgtacactcaatttgtgaaagcaatggatattttgacaattttacaccattcacgtactaacgtacaatagttcttctttttcaccatgcgttgtcaccgtgtccatgtccataataataaatatctgcaaattaaagtgtacaatgtttataatttttgcaatgaacaatgtcaaatcaatttggggctcttttaatttatgggtttgacattttgtatgtccagtgcttgtatttataaactatccatgttgttcaaaacagaactcacgttgaagccttcaaacaagttgttcagtagaatgcagtcttatcttgacattgtcaaagtatatatggtcttggtgaataacagttatttaatttatgacatttcgcttattgcactaacatgtattttttagcaaaaaataaaataaaataaagtagcctggtcctaatgtccgttgcatttttcggtccagattgattggcagaccatatccctcgc

SEQ ID NO: 11296 - DNA, 710 bp, Oryza sativa
  Intron number 1 from transcript LOC_Os03g31400.1 (locus LO C_Os03g31400) derived from phytozome v7.0 (chr-ID Chr3; po s 17884643 to 17885352)
cctgaccgcgagtttgcaagcaagcctgatattgggtaagttttttttgttgaatgttgattgattgctgcaagtatgttcttatctaatgtttgctgaggtgtcgaaagctttgcatttgcgggatgttcttgtgagccattctggctttgattataaatgttggtgcttatattaactttgtgactgtaaaaaacctttccttcataagtctgttgagtcagtcaagctggttgatattctcttgaatggttggatgtaaaaaggttcaaagtttgattgtcaccttaattgatgcttcctacctgttagatccaatggtaaattttcaagtgttccttttccaaactcaacctatttggagttcaattctttataaagatgtgaacaaatattgcatccaaaagtagttcttttggaggtgtgctgaacttgtggagtaacttttttctggattcctctttgttatcatcaaaaccatgtaacgtgaaggtttgtgtgtattttaatttgtgtgctacaggcccaaatatttcttaatgaatcccaatgaacgtttacggtttagtttatttacaaaattttaatctactgcattgctatgcctataaattcaagcttattgtttcattttttatgcatacccttaaccttgttaatttaatgtttgatcaggcaacattgcttctcagaggcatcttcacgcagac

SEQ ID NO: 11297 - DNA, 949 bp, Oryza sativa
  Intron number 1 from transcript LOC_Os01g15290.2 (locus LO C_Os01g15290) derived from phytozome v7.0 (chr-ID Chr1; po s 8554848 to 8555796 reverse strand)
gcctgtctagatttgatcccgctgcttgcttgcatgtgagatgtgaacttactcatctagatgtgagatgtgaacttacttcatgttgattattagtattgttgattttggactgatggtcatgctccggctgaaaatactagcagtttttgttttttttttcttttggatggcaataatatctcttgactgaatattgttattatttgagatgtgaaatgtacctattgagtttgttgttcctgacagcggggatggagaatccatggggggcgatgggagaaaactatgccccgttgcatttcgcaggggcgggaacgtgttgccatccctagcttctcttctatatctggaaaagctaaatctttgcctaacccaactactactattagctgtttgtttccaaggaggttcttttcgggtgggggattagtttggctgatccgccatggccatgcccgcacgttaagttagcctctgagtctcgaggtgagctttcacctgcgtctggtggacatgcccgaatctgtttttgatgcgctggttcaggcctgaatttgttgtaataatcttggataataacgccatggtggaattgatgcatttttttgtgagctttagtaagcataagttgctgctgctgctgctgatgctatatggccattcaaatatgcaattgcagtgctgattgaagtagaacctttttggaatacttaactgtttatcgtcgatcagcatggccggactaaacactgttccttttcatatgtactgtttgtttgtctcctggttttgaatttcagcttacaattcaaattgtttacaaatcagtggtaaaccattattcacttgtgttgtcttaatgtgaatacctgtatgcatttttcgccaactgaaattgtcccctgtctcgcttgttattttgctgcagagagagatcctagcaact

SEQ ID NO: 11298 - DNA, 691 bp, Oryza sativa
  Intron number 1 from transcript LOC_Os03g08770.1 (locus LO C_Os03g08770) derived from phytozome v7.0 (chr-ID Chr3; po s 4532039 to 4532729)
caccggcaactcggtttcgaggctgatctcggcaggtttgtgtctgccctcgatccaaaaccggtgctgtggtttgtttcacgatcccgttaaagttgtcgaatccgttcggcgattgtgattcaggtagaggaattagttttgcaagacaggttttacaaggaattttttgggggggagtgggggacacgtttttatgctgttgttctgatgacttcttgaaagtcacacccaagttagttagttatcagcagctcatggtaatcttcagtgatggattaaccgctctacggtatctaggcaatttgagagtagaagcaagccgtagcctacagaacattttgccatccaaatgcttggcattttgatttgattacgcaggcagtaattttggagtagaaaacgcgtcctaccgaacatgagacttatcacaagtatatcgttttttgacaatagtcaataggaactctgcgttgaggggtttgatttcaatttgttctagatttgatccattcttcttccttttatttttctgatgcaaccaacaattagtctggcattggcgttagcgattaccatctactagttattttccgttagaatctatatgcatgtacagcttattgattaccaccaactgttggaacatatgtaacctgctatttctttttatgcagattgctctagtaca

SEQ ID NO: 11299 - DNA, 835 bp, Oryza sativa
  Intron number 1 from transcript LOC_Os02g50480.1 (locus LO C_Os02g50480) derived from phytozome v7.0 (chr-ID Chr2; po s 30817905 to 30818739)
tccatttcgagaagttcccgtccgccatcgaccaggtgagccgacgacgcgtaaagattgtttttttccccttttgatgatgcatcgttgttgctgttgctgctgtctgcttgtaatgctgcggcaatggcggaatcctgggatccctctaaggattggtttgtttaaagatgggtttgctggttcttgatgcttccaggcatgcggcttagtcgtttagcggtacattattgctgtagttggttcccatgtggggctcttgatgtttgaatatgtggcattctttgagtagttggggtttttttatgctcacagacgcctctgaactaactaggctggtagctcgttattttgtttatgcactggtttaatagttggtaatacgacgttttgattccttttgtttatcaggagagaaccgctgcagctgttcagttctgggatcttgacccaattcttatattcttttcgagttaggccctctgcttttgtaactgtaattttaggagtattatggtgtggaactgtgctgttttggacacattctgcctgtagtaactggcagcaaacagtaacgaacaaatctgatccttagccgtagttgtgtatctgcatttacaaattgttgatgaattaagactcttgacataattagaaccggaccgattcgggggactgttaatttcatcacgacattccttttttatgcctaggctatttcatcttggttcttacagaatctagcattttccttccttctactgtgtttcattttgcattttgtgcaatgtttgctgcaggatacatttgcaaagtacacggcaaggacatcgtt

SEQ ID NO: 11300 - DNA, 528 bp, Oryza sativa
  Intron number 1 from transcript LOC_Os01g08140.1 (locus LO C_Os01g08140) derived from phytozome v7.0 (chr-ID Chr1; po s 3936752 to 3937279)
gcaaagccactgacggtttggcgggacttatagaaagtaaaaaaataaacttgaacgataattatgttcgatttgtaaaattctaatgacaataaagagaaaagacagtggatgggccgtaaaggagtataatggcagcgtttgatgggacttccagaaattataaaaacgaaacccaacgagataataaactcaaaaaactataagatctaatttttaaaggtttcaagaagaataaatagaaatagtggtagaccgagcaagcaaataaaaaaggatatgacagaagtaacgggtagcagctggtataacttttaaaagctacgtaattagaaatatggggatgatacgtggatagctatttaataaattttaagtgaaatcatactgaaaaatatatgattttgtttgggtgctagccgcgcaattatgcgggccacccaactagttttaagaaagagctaattttttttggctgtttcatggtgagcaggcacacgcgagcacgagcaaggaggagaggaagtc

SEQ ID NO: 11301 - DNA, 675 bp, Oryza sativa
  Intron number 1 from transcript LOC_Os01g68470.1 (locus LO C_Os01g68470) derived from phytozome v7.0 (chr-ID Chr1; po s 39788892 to 39789566)
cggaggcaacgtaagtcacctctttctagattatatctcgtgcgatatcccctcgttaattgcatgtcactcaaataattatgaaaaaataatctgaaaagatatattaacatgtggtacatcactccacaaatatgcaagttcaaattcaatttctatatctcgcaacgaaaaaaacaaatttaactgtgaatatacgttaactagttatagtttaatttggttttccgttgcgagatgtagaagttgaatttaaacttgcatgtttgtggagtgatagaccacgtgttaatacatattctcagattttttttttcacatttttcataaacatttgagtgacatgcacaaaacgagaggatatccccttaagaaattaaaatagtttcccattatatctctccttctcttgatcatgtttcttgtcatcgatcgatgttttcttatttttcatctactaccttaattagcttcgtccaaataaaaacttttgaaacacggatgttgtcgatcgtgtcttagttggttttaggtgtttcttttttctcaatacctacatgcaattctcgaaatatacgatacttggcatgtttttttttttgagaggggcatgttgttttatatatgtatgattcggaagatcttccgtccccaaatataaaagattttggctac

SEQ ID NO: 11302 - DNA, 497 bp, Oryza sativa
  Intron number 2 from transcript LOC_Os02g26814.2 (locus LO C_Os02g26814) derived from phytozome v7.0 (chr-ID Chr2; po s 15735081 to 15735577)
ggccgaggtacatatgttccatctaaggtcaatgaatttctctttcattccttttaaattgccactttaccagcacggaattccagcttgttctgcatgttaattcttcttttggtgctttttttttgtctgtgtgcgtgttctgttcttggggttaattcttgatgagttgtcagatgaacagaagttgcgcggtttgatttcttgtgaagagttctgtttggattgcacatttcttattttcagttttatataaccagtttcgagtgaatgtttctaagttgaatgggtagggactatatccaatcattgaatgattaggggatgttcctaacatgtggcatgaatttatgttatattagcagataataattgctttactctgctagtgattcctctgttctacctgaaacatttgtaagcaccatgttgatggttgtgaaagtgaagtgaaaccagccagaaactttgatatatttgaatacaggtctcaggag

SEQ ID NO: 11303 - DNA, 651 bp, Oryza sativa
  Intron number 1 from transcript LOC_Os01g16600.1 (locus LO C_Os01g16600) derived from phytozome v7.0 (chr-ID Chr1; po s 9424007 to 9424657)
tcgtcgtcgaccccctccccgccggcaaggaccatgtacgcaagcgatcaaaccaaattctctctctctctctcgtttcatcagttttgtctgttgcgcaatgtgggggcagtggcattgtggtccagcaggtgttcagaagaacacatgtgcttgtgaattttagacgggactaagtttttttttccccttcattttttggatgaaaatgaccgcttctatgcaactcttaatgacaaaccgaatgttcttttttacaacattatgatttgagaacagcttccggatagatagtgtctgtgaatttcggcaagaagattgcgtgagaagtgaacagtcatggcttacttttcaatggtacttcacagaacaataatatcataactgaaggttttcttcagttttctgacccacttgtctgaacttatgcctccttttcttgccttcccatgtgggtactattctctgttcggttgtacattgaatttgcttgttgtgtttgtgtgtgtgtgttttatgaggatttgtggcgtgttttacttttgtacgcaactatttgcgccgaaatcactttgcagagtatacatacatgatcagtcaatttggtaactgaccaaacttttttttttgttttgaattgtttgcagggct

SEQ ID NO: 11304 - DNA, 955 bp, Oryza sativa
  Intron number 1 from transcript LOC_Os03g14850.1 (locus LO C_Os03g14850) derived from phytozome v7.0 (chr-ID Chr3; po s 8095547 to 8096501 reverse strand)
agagtgattgtagtgagttgggaccaaaaggtctggtgagaggaggaacaaaatattgaaggataatgccatgcgtgtccatgttttagcaaaaccataatttctatctggttgttagtgtgcacccttggcttggctctccctgtaatgttgcttgtagggtttgctccatgggaattctctatgattattttgccaaatgatgagaacaaatttatcataataatgttgtggttgtcatatttgcaaggactgagtgcgtagatctatatattaatattggtggtgttgtgtattttattttacttctagtgctcagttctctttagaccttgtttcttttaattccagctgctctaatctcttgtaattggtgaatttatattatttgtcctgcttgtgatgttatatctatctacttgtttgtatgtttgttgcatcaaatatagttttcatttcgtgggaacttataccattatctcattgtgatcattaaccatcagtttaatctttaaacgtcttgtctgtgcaacatttttgcttcagtctctcgtaatctattatgttcatggtgaacttacctatccaatctttaaacccatgatgcatatgcaggtgaagctgaaagtagaagtgaacttaacatcatagcctacgcaaagcggtgaaaactgacatgctttcagatgacacatgtaccattctgtcccatgggtttattgacaatcaactggattttatgtatttgaagtatgatgccctttctctgattcgcatatcaatggaaaaactcaaaaccgtctctagattttgcagatgacagttacgaagttctctgaattgcctcaatcatgtcttcatttctaatttgtagctcttcttcgttccacaaactcactgcttgtgcatgatatatgcaggtggcagttgtgcggttgtggttccgcaattctct

SEQ ID NO: 11305 - DNA, 885 bp, Oryza sativa
  Intron number 2 from transcript LOC_Os01g65550.2 (locus LO C_Os01g65550) derived from phytozome v7.0 (chr-ID Chr1; po s 38047652 to 38048536)
ggttcagagatctaggcctccaaccccacagcgttagacatttgccattatctcaccagctaacaaaagcaacatagaacacacagttagctagcttgcttgaaagccttcgatgacaacttcttatgagttgaaaacagcccaacaccaaaagctcttgaaaaagagaagtgataatcattatagatgcactaactctggcattttctatgatttccacatatagtttcatgatcgcaaacttagctgttatgattttatgcgcaaaaaagttccttcctgccaatagaataaataagagcttaaagaacacgacatcaagtttgcctaactttgctaattggctaagccttgttagatgaggaccttttaaatgcattggtttagcttagtgctaactaatttttactaagtacagagcatacattttgacaggactgcccttttacctagcagcaaaaaaatccatagtcttgacgatattatcttggaatttagttactggaaaagtagataaggaggacgaacaacattagcagtacaaagatgttagttatccttgaaataagtgccttgtttcggataatgcgctatactaattataaatcctaggctcagataataaactataggatcaaaccttaaccctaaattaatcgggacagattcagagaatcttttacttctattatgtcgtcttgcaattcagcgaccgaagaatggtttgaccatctctgtgaataaactcattagtggtgcatcagaacaagtgcaaggctgctttcaagtgtctttttgcagataatgctagcaaggcaatgtgggtaaatttgctctaattttcttgacgatgttgctacaggaggggctaggagctttagggtg

SEQ ID NO: 11306 - DNA, 576 bp, Oryza sativa
  Intron number 1 from transcript LOC_Os03g01890.1 (locus LO C_Os03g01890) derived from phytozome v7.0 (chr-ID Chr3; po s 549178 to 549753)
ctccgcgcctgccggcgagggggctcggactgaaggtcgccacactctaccgccccacccatgctccctccgcgcgcgatctaagctaggcctaatctagggttcctgattgcttttccattttcgcccggacggaccaaactactactgtctatctatctagcttcttctgctgcttctcgtgctgctcctgcatatttttttaaaatttttatttcatctcatttccgggttactctcatttatcatctactccgtaccactattagcaagcaacccattttcccccctttttttcttgagatttttgtgggcgaattcgagtaacctttactccccccattctaggaagcggtttcttttagcatggctttgtttttttcttttcctctcccgctttcttagttaatcaactttaccatatctgttgcgtgcacttcaatccctgtcatttgtatccttcccctagattttgatgctcaaacgattgttttcaccaaatgctgagtcaaaagaactctccttttcttttttcccccagggatctaggcgagctgaaaattgaagtgcaggcaa

SEQ ID NO: 11307 - DNA, 461 bp, Oryza sativa
  Intron number 3 from transcript LOC_Os01g62610.1 (locus LO C_Os01g62610) derived from phytozome v7.0 (chr-ID Chr1; po s 36254103 to 36254563)
ccatcgagagttttcccctcccaaggaagatcagggtaattccgtatctccttcctcatggaaacgcactagttcatctttaggcccaaatcgaaaaagtttatatatggctagttcttgtgcatttttggtggtgtcactcatttcagtacttgatggagcatattattcaggaagaatattcagggaacatgattgtccatttttcatgttttgctcgtttgctgggataatctcttaggcattcaattttaaggaatcagatatcagcgtaccatgttttttcattagatcctaatagttttgtttttttgagaaaatgcattcttggatcaaatagaagaaataaaattttaaaaaaatgcataaaagtaggaagaaattggttgtggtttgcttcaactatatgctagtgggttctatgctgattttcaggatctcttcttgagataaaaacagtc

SEQ ID NO: 11308 - DNA, 751 bp, Oryza sativa
  Intron number 1 from transcript LOC_Os03g25970.2 (locus LO C_Os03g25970) derived from phytozome v7.0 (chr-ID Chr3; po s 14874444 to 14875194 reverse strand)
ccggcgagcggagcaggggaggggaggggatcttggtgagcatccatctgcattctctttctgattcatctatctctctcttccaccgggattgcacctccgtggaatttgcttgcgttaaccctagcttctcttatagatctggaagaggttcttctatttgatttcagagccttaaccttaatacaagtaacagtttgtttgttccccccaatagtttgggggttcaactgaacccccacgtcccaagttggatccgcccctgattcgcgtggttggagtgttttggttagaattttttttttgtcgggatatctttgttagttcttcaacttaataataattgaactgtaaaaaaagagtcggagaggttatcatgaatagaccaaacaatttttattttttctcgttagatcttttatagtaatctagttggtaggatcgaaagatgacttttgttcattgtggtatgggattgatttgttcatgtggattcgtttaacgcttggccatgataaacatgccatcatgcagccatacaagtgtaaggattattaatatgtgctgtcattacgaatttgacagggtgattcgtgtgattatagttgattttatttggtaaatgagaatttcaggagggtttgatgtgaataatcttagaatagcttccttcttgcgcgttattttagtttccatttatttgacccaatattctctactgtgttgaccgttctttctccgattgtagaca

SEQ ID NO: 11309 - DNA, 914 bp, Oryza sativa
  Intron number 1 from transcript LOC_Os02g55970.1 (locus LO C_Os02g55970) derived from phytozome v7.0 (chr-ID Chr2; po s 34249998 to 34250911)
gatcggtgccattcttttttgctttccttcgtcaggtttgttcatctctgaacatgtttggcacaattagctttgatacatctgggataaagtttcatttcctttttgcagtgttcctgccttttctacctttttcgctctttgttcttgcgactaatggggctacagatcgttgatttatggttgccaaaattgactatgtacttgggaattcagtgcgcttgtggtttcttgtcagaaattagcatcccttgctcttgctggtttctttctttctttctgcagtttgtaacgagatgtaggttcagagcaattccaacagctctcctcttgtttttgtttcgcagcccatcttttttgggagtgtttgtttaatcagttggtgatcttcagccgtcctagctaatttgaatcgtttttgagtttcttgtttgcctagtttttgtgccgttttttaggatgctgttgcagagacgttattatctgctcctgtacgttggccgagtccgcgaattttggtgaaaatttgttctctcttgctccgtttatatatggctctttctgatcgccatctttcttctcatatcattttctcccaagagaagtaacctcggttctttctatgctttgttgcctagattgctacaacagaagtttctcagtggtgagcttgccttggtttattagcccacttcttgtttccccaatttattcacccaatcttttataactctgaacttttgagtaaatgtttgattatttggatatctttattcatgtaaatcatttcagatcggtggtagcggcaacaattgttgttgttgttgttctattcatttctgattttctttaacaacatgttgtgttgattccttgcagttcaatcgtagctctctgtgatacaaaaaaaaaat

SEQ ID NO: 11310 - DNA, 947 bp, Oryza sativa
  Intron number 1 from transcript LOC_Os01g58790.2 (locus LO C_Os01g58790) derived from phytozome v7.0 (chr-ID Chr1; po s 33970422 to 33971368)
ccgcgtcggcggagcaagggaggaggcaagtggaggtaagctgccgtcgcgttcgcccccatattacctgcttggattgggagggattaatttcataatttggattgcagcggagaagcgcgtagaattagctttgatgttcgtccgttttggtttcgtactaaactagaggaatgcacggaggaagattttgagctgatgcaaagcaatcacgctaaactcagaggcgaatcaccagcttgattttgaaaacttcctacgggcgagggcgagctagaggtgccgcgttcagctgtcgctgagccgtcggtggcacgaaggtcccgtcgcgggggacgttccctgccgatcctctcgctcgacgccggagtcgtccatcgctgaattccgtcttgctcggggttggcggtcggacgttcgccgtcggcgtcatttccaccaccagccgcgaccacgtttggcttcttccgtgctgccgcaatctctccccgcgtgcactcgatgataagagagcaaaagtgcaaaacttcccctatttgattggaaccagggcgcaatgccgaagagcacatggatatggataagaaggctgactgcctgctcttggaatcgtcatctgttaattacgttttctccctgttcctgctatttcattgagtatttgtgtttccaaaccaggtctgcactcgcatttcctttccatttcccgggttccaaatggatccaatttcttaatgatgacaccccttggttagatcatcatactataacttctgttgttcagtttgaatcttacccattatgctcaaatagcttcctttcttaatgcttatcctttctttataaattctgttttcttgggagcttctaaaaattcttctgaagtccttttcttttcctgacacaataagtatatagtttataatggtgtgtactttaggttgagt

SEQ ID NO: 11311 - DNA, 623 bp, Oryza sativa
  Intron number 2 from transcript LOC_Os02g02850.1 (locus LO C_Os02g02850) derived from phytozome v7.0 (chr-ID Chr2; po s 1088169 to 1088791 reverse strand)
gcatcttggttcagttgcccctacctcatgtaagttttcaacaattttctttgggccaatgtctctgtataacctatccactgatattgaattttggcccttaccaactgaactggtagttaaatgtatttttagtgaggtacattcctagatatgtatggcagtatggcacaccatggaaacattactttatgcacaatattttctggaaatattgtgatattggtgccatctccaatttgtacactaaatgtttctatttatgttaactggtttgatgctgctcttgtgaaagatatctggtcttagaaaaatgtgtgcaaacagatcctttgttttaggtagtccgtcgcattccctttgtggtctttcgagtttgttgtcagcatttgtttttaattagatggtctatactggtgcttgcagttctctgttaatcttgttgcattgtttgtagcatattaatgatggggatatttttgaataattttttgatcaagatactttgaatgattttacctgttagcattaaaagaggtatttgcctgctagcatcacacaagttttccatgtcttccatccactgagcatctgtatttctgctctctgatggtttgcagcat

SEQ ID NO: 11312 - DNA, 847 bp, Oryza sativa
  Intron number 4 from transcript LOC_Os01g51632.1 (locus LO C_Os01g51632) derived from phytozome v7.0 (chr-ID Chr1; po s 29664935 to 29665781 reverse strand)
gggctgcagggttaccaggtgaaatatgttttactagccatcgcatgcatttattgtttggctaccataggcatggccccatatggccatatgacatgtacatcttcactaaaatggcatgtatgccatgggaatgttcttaatgagtagggacaacttatatcttttaaagtaggtggttactggccagataaacattgtctgaaatgggtgagactttgccactttgagaataaatgcatacatgtttgccttgtgagtctaaacagcattgaaataaaaggatggtctggttcggttttcaatcgggttctgggttagattgtgttctaaaccaagaagttgaaattatttttgtgtgtattccaacaaactgggttgctgtatgtggacgacataaattataaaaaaaaatacgaaaagaataaaatactgagctcatcagaaagggctagaggtacctagggtgggttgaaccactgaagtatagggtttgcttatagtggggtttgatgtggttggtaccaactatggatttattgaagagactaccaatgattttgggccttggacttggcccaccaccatttagctgttctttatgagttatatttttctctcttgatatgatttaatagtaggattatactgttgaaaacatattagaaggttctgacttgactccttgcaagcagatgattcacaacgcatgttgtccttttggttgcttttgtttagtgtctaggaaaatataatgctttggaagtttgcttagttagtcctatagttgaaaaattaattgcaacttacagattggaagaaccaaagtattcctgagagctggtca

SEQ ID NO: 11313 - DNA, 888 bp, Oryza sativa
  Intron number 5 from transcript LOC_Os03g21980.2 (locus LO C_Os03g21980) derived from phytozome v7.0 (chr-ID Chr3; po s 12591974 to 12592861 reverse strand)
tgtcagaattcaatagcattctgaaaggttttgaggtatgtgtatgatcaagtatatcgcctgcattctgtgcttagactgtgcaaaagaacatgacatatgatctctttgataaattgtttgatagcagatgtgtttatggagacacccagatactgccacatagttaaataagaataaaacatgagtttgtatgaccagtaaatacaccagaggttataaatatatcctgtcaatccattgtggaccttgactttgaattttactcttgcgtgttcctggatttgcttagatccagctgcaattcgtgagatggaaaaaatgaagtggaaaaacttatttggcacattttagcatgcttggaatccaagagggaaggtcaagcaggcccagtagcatcactgtgtcctaccttgtcgatttccaattatttgatgatggatgtacttcagtgaagagtttaacaagttcatctaaatactagactaaatttaagtttaggaaccatgtaggggtggtataactaaatagatgaaggactcctggttcattacactcttgcataacagttgctggagtattggacccaatgtgaattgtgaatttgcaaaaaggccagcccagtttgatcctggtaataatttcaccttttgacatctgggctttttccccaagaaacatctgattggtacatagcccaggtgagttgttttgctgaaccatctgaattgtttgttatgcatttcctttttactcaatacagtaattatagacattgtcagagtatttttatctctcattttacagtttattctgcatgtgcacagtttcattaaattggttatacatgtagggaaaccatccatttcataattacactgctcgtgc

SEQ ID NO: 11314 - DNA, 786 bp, Oryza sativa
  Intron number 1 from transcript LOC_Os01g56940.1 (locus LO C_Os01g56940) derived from phytozome v7.0 (chr-ID Chr1; po s 32892517 to 32893302)
ggcgaccgcctctgcaagggcctacccaccaccaggttcggctccggtgacctccccccttttcttggaacccagggtttcttaatccatttcgccgattggtgagacctaaatcgacggatccgggaaatctacttcttccccacgagcgtattgacagctgctggtcctaccaggggtttcttccgattttgttttcttggtcccgactggtgaaatccatttcggaggaggggtaaaaggcacgtcttgcttcggatgagagatttccgcattttttaggtgggtgtaggaaggggggggggatttcttgtttgttcagtctctctcaggattaaggtaataaatgtgcggcatttgttttcgcccccttccaggggcagtacatttactgaaatttgttatccgcctcagtgcccagattcttgtatgtctaggttgcattgaataaaatacacacttgggagagatccgctgcttggcatctggtgccgctttagttcagagaattcaccattttagtttgtggaatttttattggaaatagcttagacatgaatagttcaataaacgttaacaatagcttagcattgttagtagtatctttttactgtatgggatatcttctaacattgctgcatttttgatgtcgtgaactcataatgcggagggccatagatttgcaactccagtttttatcatcatttatcaccgttgtagttgagcaccataacttacaccttgtgtttcccctcctgaatctgaaccaggcatattgagtattgc

SEQ ID NO: 11315 - DNA, 402 bp, Oryza sativa
  Intron number 1 from transcript LOC_Os02g12590.1 (locus LO C_Os02g12590) derived from phytozome v7.0 (chr-ID Chr2; po s 6579065 to 6579466)
taggactagaggtaggtggaataatggatagagttccagctgtactgtataggaaaaacataattcaaaataaactgctgtttatacgataacatgctcaggttaaagtagttgtttagagtggcatgcatgcaccatttcttcccatataattggtcctaacatctttctattactgtctttacgtgaaattctttgttgctttcaactggtggctttgtcttcttgggaaaaaaggttgactttcatcgaagtaattaacatttgtgaaaaaaaaaagattcgtaagagaaaattgtgattttccatgtaaaaactattatactgtaggtatgttcggtggtgcttgctgctgctgttgcgacagctgaaaaacggctacaggcaacagcagctaaaaac

SEQ ID NO: 11316 - DNA, 869 bp, Oryza sativa
  Intron number 1 from transcript LOC_Os02g34060.1 (locus LO C_Os02g34060) derived from phytozome v7.0 (chr-ID Chr2; po s 20348089 to 20348957)
tggagatattggagctaatcataacacactcagatgtgagcatattttgattcttctatgttagcatcagtttgtagttagaagtttatgtttccttttcttctcgtgccgtcatagttgtactgggaattggcacgcttaactagagcaaatgttaatagtatagctatgtgttatcactagctccaatatttccatgtcaatgttatgtcacatcaatcaaacaactaaacacacatgtacgctttaatgtttatgatccaaagtgaattctattttcatgaccttgtgacatacccctttgtcccaaaaaaaaaaagaccaatcctagctataaacctggacacacaagtgtccagattcatagatagaattgggtttttttatagacagagtagtatgcatgtataagtctgtctatctcagaaaatacatagaaaggaaaatcatcgaacatcagatagtgcaccaaaggggaaaaaaagaggtgaaattgcaccgaaataaaatccatctaataccatttttacgtaaacacttaatatgcatacatcaagatcaagacaggacgaaggagcatagaggaaaacgaaatccccaaatccacccatacccatacagcacaagtatggatgattatcctactccttccgtttcagattttaagttgttttgattttggttaaagttaaactattaaactaagtttgtaaataaatatagtaatatttacaacaaagaattaatatcattaattaaatctatagttgaatatatattcataatatatttgttttagtttaaaaatgttactactttaatttttctataaagttggtcgagcttaaagcattgcctctgatcaaagt

SEQ ID NO: 11317 - DNA, 785 bp, Oryza sativa
  Intron number 1 from transcript LOC_Os02g07230.1 (locus LO C_Os02g07230) derived from phytozome v7.0 (chr-ID Chr2; po s 3715541 to 3716325)
aaggtctcgctcatccggattggcacccgcgggaggtgatcgcaatcgatccaaccctttttttttcttctccttctctaattctgggtgctgctcgtgtggataagcggtaaaattcgcgtattttaggtgctgaattggtttggatttggggtcgcggtggctgcgagatcttgttttcctctgggaatttgggtgtttgagatgtggctctgacccaattgcgtcgttagatgtcaggcattgcgagcactggtagaattcaggtatagagaattgaggccgtttaccaagatatgtgcctttagcttcgttttgatggaattttggatcagtgataacatgccattgttaacattagtagtgctaaagaatagacttttgttcagttggcaaaagttggacttttagatgtttcccgtacgattgttggtcaacacgacaggttgtattgttcttgcgctttatgagctagctggaagttacatgtgattctttgcacgattctagacattagatgctttttttttctgattttaacttggatctcgtgtaaattttgcatccacattaaactcttatgaggaattcacaagaattgttatggttgctctcttttcaatattgacttgaaagtgactttatggttgcgaaaaagggactttctttcttttctttgtttttaacaattttttcttgtgatagagtagcttatttgagatatgcaagtatgtaattcaaattattggctgtataggacagtcctcttgcactggcacaagctc

SEQ ID NO: 11318 - DNA, 606 bp, Oryza sativa
  Intron number 1 from transcript LOC_Os01g42950.3 (locus LO C_Os01g42950) derived from phytozome v7.0 (chr-ID Chr1; po s 24427762 to 24428367)
acgtcggcaaggtgcccaaggagctcaagggcgtacggagcgatgctgcctcgcttattttttgttaggtttccgtgtgcctagatgtccactttggcgattgctagtaattagccgctctagagtccacaagatctgtgatttggtttattttgggcatgggatgtttgctagctcaaaagttccttctaattaacatgttgaagtgattagtgttactgacagtggtaaactggcaactgtaccatttgtgagttgggatatatttagtaacattatctagatttgtgcgttagaacataatttgagctgaaaattgacataaggctttgtcttttgtatgcaacactttgcagtgccatatccagaaaattcattaaatgggatcattggtacttataaacatttgcagcgagctttctttgcagttaactttctaatgcaatcaatctgtctgaaatctgccaagtttcctgggaaggcatataaattgttacgtggtacttagaatacattcatttacaaaaagtgccgtgggttctataaagcatgacgatgtgtttcagctgtactgagatttgcttgtttattgttatgtttcaggaa

SEQ ID NO: 11319 - DNA, 523 bp, Oryza sativa
  Intron number 2 from transcript LOC_Os01g42950.3 (locus LO C_Os01g42950) derived from phytozome v7.0 (chr-ID Chr1; po s 24428438 to 24428960)
cccatcttgcccatcgagctatatcacccgaggttgaatgcagcacattcttcaactcatagtttctgcacgaatgtttcatgttatggatgtgctttgtcataaatctgttagaatcctttttcattttacctgttttatttactttagttagtttctcaagttttctagtacaacaatataatgttctttgccttggagttgtctctgatgaatgcttagccaagtccattcatatcatgctgtgatctaggctagccgctcaattttatcatgctgttttttgcgcacttaactatgcatgaaatgagttcaaaagaatctgctgcacgaactggtgttgcgggaacacataatctaacactgcctgccaatgatcatgcatatactagttaatttttgaatctgtgatttcccctgctcttgcataatgcatttagcctatttggtcttcatctgcaagtcttatgttctgtcgttgtaataatttgatttcttttgcagacggtctttataactttga

SEQ ID NO: 11320 - DNA, 1017 bp, Oryza sativa
  Intron number 3 from transcript LOC_Os03g10440.1 (locus LO C_Os03g10440) derived from phytozome v7.0 (chr-ID Chr3; po s 5316839 to 5317855)
aatccttttcttacgactactcatcaagcattgaggcaagtcgttctctaatatgatctgtaactgttagtcgtagtacacactgtacactagctagtacttcatctgctacatgttatcgacgaatgtatcgttggccggcctaaggcatcgacagaaattaattatattcctgcttagattagcgagcaattaatctcgcgattaacaattaaaagctagctcgattgggatgacaatagctatatcacgggcgggagtggcggcgcgatatgttaattattacgattatcggcctcacgcaatgcgtttccggtgcgagttagcatggaatttctttcttaatttgcccgtacgtacactatatgcttttcagtaccatgcacgatagcggcggcggcggccggcgcagcgtgtcatgtaagctagctccaaacaaaatgcacacatcattaatcatttatcattatttggtttttttgactataatatatactctctcattccctaaatgtttgacgctgttgacttttttaaacatgtttgaccattcgtcttatttaaaaacttttataaaaatatgtaaaactatatgtatacataaaattatatttaacaatgaattaaatgataggaaaaaaataataattacttaaattttttgaataagacgaacggtcaaacatgtttaaaaaaatcaacggcgtcaaacatttaggaatggaggaagtatatatcaatatatgtagttatatgcaccttttctctttggtccattcttgtgctcttcatcattttattttcttattgtcattagtttgatgatcacgtttaggtatgcttcagatgtgtctgcagagcaagcaaagcatctctatgttgccgagattagagcagcatgcacttttatgcatgcttagacaaattaataaagttaattaattaattatggcgtctgagtgtgtgggcttgttcggtacagtgcttgcctgagccgccggagccccagtacggcgg

SEQ ID NO: 11321 - DNA, 1029 bp, Oryza sativa
  Intron number 2 from transcript LOC_Os01g08970.2 (locus LO C_Os01g08970) derived from phytozome v7.0 (chr-ID Chr1; po s 4497870 to 4498898)
gcctgttttacaagtttattggcttccgtgaacaggttgctgtttcattttcttagtgatgatcttatgggttggcttccattaacttgttgtaatggtttctgtctagtgtgctattttttgcactttcagtagcaaactgcattgcaactttccatcttttacatcggtggcgttttaaattttcttaggttctattctcatatatgtattgcaacgttagaactttctgtatgtttcggtccatcgtagcaatggcaaccttccgtaatttaaaatgcagtattcatatgtgggatggaaccttgttattgcagggtgcggaatagctattttatactggtggtgtagagtagtttttctatgatttttatgaagaggctactggaagcgggataaatctttgcaatgggattatctgtatacatcatttaaatttaaaaaatatcctgactgtaccattttcttctacttgattgataaagaaaacccctcccgtactcccaaagaaaggatccccactggtttaggtttgcagaacccaggaaactataacaagcagtcatttctaaatatttgtagcagtattagtccccatcaagatcagtgctttcccttcttagtttgctgcattgctttcatggtatctgtacgcatatctatgtaatatggcagaaatcatgatcattgtatatttgaaccctgtgaacatataaagaaactgtttacacactaacgcttatgcaagatatacaccaggtgcattaagcatgtcatcacagtttgaggtatctgaaatttgtgttgagcactatatcactagagatggaagactttgaatttcctttttccataggaaaatgggattagtgcatcattattcactgatggaatggaactaccatcaggcatgtccaaaaatcatctgcttgaacttgccagtatagaattgacgattagcgatgttaatacatttgcctcctgttgcagtctaataaaaattttcaccatgaattttctttctatagg

SEQ ID NO: 11322 - DNA, 182 bp, Oryza sativa
  Intron number 2 from transcript LOC_Os01g21610.1 (locus LO C_Os01g21610) derived from phytozome v7.0 (chr-ID Chr1; po s 12108862 to 12109043)
ttccaaaacgttttgtggacgactaccttcgtgtaagcaatcaaattgtttattattaataatcacctcctttagaaacatttagagttttctgtttaatgttttgaagatggttgtctgagtctgatttgtgatattatcgagcaggtagttgcctgtgcgaacaaggatagagctggtgt

SEQ ID NO: 11323 - DNA, 777 bp, Oryza sativa
  Intron number 1 from transcript LOC_Os03g12900.4 (locus LO C_Os03g12900) derived from phytozome v7.0 (chr-ID Chr3; po s 6954107 to 6954883 reverse strand)
tcgccggatctgcgctcgcctacacgctcggaaaggtggctacatttttgtctctcactcgtttgttgacgtactcgcatttggttgaggcgaatcgttcgtatctttttaggctggaattttgctttcgtaactactactagtaccagtctaccaccaacttgtaagtggcgcaccaatgcaccattgatacgaaaatgttttatttgttttttctaaaagtaatacatctgggttttttttctttaaaccgggccaacaatagctggtgttatgtacttatgttcagtacgagatgcagtttatgtacacttttcacttaggagtaaaattaccaaagcgccaggttttttttaacaatactatgttttaggattagtgcaaatttctaatcatcaagagttttaccatcatcttccttaaaaccacctagattgaccatggaactgtactagttccatttcactctatttctcacttaaaatactttcgtactataattttagtaacctgtacggtgaaaataatgtcttgtagaacgtgaagagtcaaaattgctattgatacaaacacattgagataccatagtgtcttttgtatttggtagaatgaatcacttctattgtactagtatcattcatgttatccgacaacagaacactcaatagtaaaaatgcagtcatgtatctcgttaccatcaagcgatgcattgtggtaaaaacagaaatatcctgaaaaagaaaatctaatattcctggtttcgtttgttgaattagg

SEQ ID NO: 11324 - DNA, 999 bp, Oryza sativa
  Intron number 1 from transcript LOC_Os02g50560.2 (locus LO C_Os02g50560) derived from phytozome v7.0 (chr-ID Chr2; po s 30867414 to 30868412)
cggggatctacgacttccccattgacaagtttcaggtggagtagtttctaatcctgatgaactaattatgagcgtatagagtgggtaatggctctggattttacgtggtgcgtttgattgcttggggcgctgaaacggttgggatttgagctagcagcgatatgttgctctgtatatgttaagttccgtgtaggtttctcctgtttgaggctacattggagatatctgacgactctgcaacggtgaaatcggattctggccatttcccccgggggggggggggggggctgtctcgtttgagtgatgattggtataagtagttctggtgtatatggtatcgtggaactaacaagtaaagtcatgattcgttgtaaataaattttctgtactggctagtaatccactgtcgtatgcaattgaggtttatctgagtccttgtttgtgcgtttatttagatggtaggattgtggtcgattccttttttctggaatacgcaaaaggattgtggtcgattcctgttatacattgtgtcttatcattggtctggtttgatgatattatttatgagctacttgtaaagctgttttgcacaacagataaaacaaagatttccatgtcttgattattagcgacgctctagtgctctctacttgtagtattctactgctgttgaaatgtttgtgttaaaattgattttaaaaatgttagaatatccattgggtactaaaacaggaagggataaaagggtagctttggttttctgccaacaaatctacctcttcaccattggtaacaggaagacatttggaaaattgatgctaatcttttatgttgcacgaggtcaccggatattgaacagttttttccaaattctagcaacttgctacttgttgtcctgagtgtcacctcatgttgtacaacccactacttttcattttcttacctgtttcctgtcttctctcagcgcttggctatacaagcatttttgagaggctcatc

SEQ ID NO: 11325 - DNA, 893 bp, Oryza sativa
  Intron number 1 from transcript LOC_Os01g49940.1 (locus LO C_Os01g49940) derived from phytozome v7.0 (chr-ID Chr1; po s 28696594 to 28697486 reverse strand)
ccttcccctcgcttcgattcgtctcgtgccctaaggtaagcggcgaaccccctctctctcttgtctcgagaaataaaatcctcagacgagtgataaagctctcgcaccgtgattcgtctcgtgctccggtagaacttaatttatagggtttgctgtgggatttattattgtaggttgatgtgcttagctctgcttttgtacgattacgaatttggccaagttagagattttcaataaaatgcctgttgagtgtgtggggaatagtttctagtgtttaggcgagcactggtaatagcatgaatatggataaattttgtatacgctgccaataactgatgattggttttatacgaactactagatgctatctagcttttcagaacaaggaattcatattatatgaagtactaaatgccatctaacttttgagaacggggaatttattttatgcgaggacagggcagtgaagaaaagtctgtttgacctcattgtattgaaaaactcacgggatataatccatactcaggcactaatttaaattattatttgaactttgttgagaagatttagggtcaaaacacggttggatgcagaaatatttttgtttaaggtaatataatctatctgattgcatggtttggaagcgtgtactttgatcgaatatatcttttttcagggttttgcatgaaacgccttgatctcctttgacttgttaaagtggaaataagtttgttaacttctcaagcaataaaaaggacctaatttttaacatatagttcactaatatatctaatgcttatttctgtgttctctagttacccacggcagaaactattttagtgttcttattgatttctttgttgatggcagattgctgagagagcttggctcaa

SEQ ID NO: 11326 - DNA, 1025 bp, Oryza sativa
  Intron number 1 from transcript LOC_Os02g17600.1 (locus LO C_Os02g17600) derived from phytozome v7.0 (chr-ID Chr2; po s 10128528 to 10129552)
aagcttggatcagctacccgatcagctgtcgcgtggtagtgcgaatagatcagaaccgttcaccgcgtcactactcagtagctgacacctaggggctctcagagtcatcaaggggtacctacctagcgacgtgttggaccaagcacgcgtcacccttgcaagccatgggtgagaaccattctaggagtctccagcagggttaggatgggtctcgccagttggcttattagttacgcaccaatcaaaggttgcactaaggtataggcagtcatagatagtatcctctactttttctcatgagccaggtaggcttccacttgtatataaggagcaggggttttccgaaagggggttggaaaaaaaatgtgggctcccaggtacaccaaagttgctatatgggggtggtaagactagggttattatcctttgaaaacctgaacctaaataaaccttagatccccatcacagaacactaggttcccatatttggacgtattgggcaccgcccatcgacatatatatttaacatttatattattgtgactttgtttattaaagttattttagacatgacatatattttttttacgtataattgtgaataaaacgaatggactaaagttttgttcaaagatcaacaacgccatatatttaaaattagggggactatatataaattttgtgaaattcctatgtgcatccgaggagaccctaaggtctcttttgactttcggaaccggaagcagctcctctgccacaatggccagtgccattggacaatcgagacaaacgtttcgaacctttgaatttttcaggttccagtatcgaattgattaatgcgaaaatcgtatggaaatcttgagaaattcatgtgttccacaggaaacttgtgcctggagaaataattggccaaaaacatgtggtattacagtctaaaaaaatgaaataattcattcaaccaacgttcagcttcttctgctgattattcaggtttagaggacgcgcctccttcgaactcgaacctc

SEQ ID NO: 11327 - DNA, 776 bp, Oryza sativa
  Intron number 1 from transcript LOC_Os01g57966.1 (locus LO C_Os01g57966) derived from phytozome v7.0 (chr-ID Chr1; po s 33527693 to 33528468 reverse strand)
cggggaaaaaagggcatttacttattatagaggtgtgatttgactcttttttttgtttttttagccctacctacaccccggttttacgagaaagagtgggggttcgcggagagaaaaccaaattagtaagggaaacccacgcttagggaaggtgaggtgaactaacaactccttctgtcgtgtatcctcgactgacgcggcctcggatgcttcaattgtagattttagtattgagcgaaaggttacacctacaggataggttctgtattacaggctaatcctactctactagtactaataggtagcataggggataaaagcactacacctagaaataggaatcaacaagagaaaaactttgttagaaattaaccctttcctgattggtatcagggctgggaagaatggttgggataacaaacaaccatcaagtttgtactttggatacccctataaccatcaaagatcgttgaagtggctaattcctctaaataggaggcgttgagaacaaagaaattcttggagctatcgttttcctctagcattaatagaattcattggtgttaagaaaaacctcttgtgggaaggttggctagagatttcttggaaaaataccagcccctttcggtccataatgagatggaactaattctatttttattctctagattttttcgcttagtactatgtacagaagggaggagccgtatgaggtgaaaacctcatgtacggttttggaacggagattttttgaatagaacgaacgaccgtaacgg

SEQ ID NO: 11328 - DNA, 790 bp, Oryza sativa
  Intron number 3 from transcript LOC_Os02g01370.1 (locus LO C_Os02g01370) derived from phytozome v7.0 (chr-ID Chr2; po s 208471 to 209260)
aagattcaaataaagaaattggcaatatcgatacagtaagtttctgtcattccacaaggttggagtactccaaacttgataaattttgtgggaagtgaacaaagtttagtgggctacccaacaaataagttttatgtattcatttctaactttttttttgttgtaggaacaaccatcaccactatggtctttttaagtagtaaatattttttttagaccatctatgttttatgtcagtcgtgcattataagcacttggtagtggaaatggaatttcttgtaggtcttttaagtctttctactactttttttaaaataaaataaaatggcttctgcctttggctactttgccaagtcattgatagattacccaatgtgattcaaattaagggtgtgtttagttcacgccaaaattgaaagtttgattgaaattggaatgatgtaacggaaaagttggaagtttgtgtgtaggaaagttttgatatgatggaaaagttggaagtttgaaaaaaaaaagttgggatctaaacccggcctaaggttcaaactgaagtgaatggttttaatagttcggtattcagagagtgtaaaacaaacttttcccaattcctatcagctcctaattcaatttttaatgagctgcatggtttactttatctacaatagcaaagcaatagctaaggtacagaaatttccttccttttttactctccagatctttctatgtctagacttccttttgaatgcagtttcttcttccttttgcagcagagagcttgctggtggtggca

SEQ ID NO: 11329 - DNA, 566 bp, Oryza sativa
  Intron number 4 from transcript LOC_Os02g56560.2 (locus LO C_Os02g56560) derived from phytozome v7.0 (chr-ID Chr2; po s 34640494 to 34641059)
gggcttggtaggaaagccaatcaggtttgcgttcctacctggctattaccattttgtgtttctgcatgtttaaccacatcaatagtttcatggtattccatttgatacagtggtgccctaacgccttaaatttttcgtaacttggtgctcttcattgctatgaaggtccaaaaagatgttccagtagaatgatatggcttgggttttaagggcctgttcactttgatgccattttcaaccttaccaaattttggtaaagttaccaaaaaagtagctacatttagttttctaccaaattttgataactatataagaaatcctaccaaaattttggcaagttaccaaaattttggccaaaatttggtaaggtttttttggcatcaaagtgaacaggccctaaattaatgctctgatatctggtgaatttagttaaaatacaactgtggtctgttaataataattgtagataacttgtgggatagaaagaaacaagatttggttagcaaatcttgaatccagttaattttgactatttttgaccttgtttcaggtatatataatagatt

SEQ ID NO: 11330 - DNA, 601 bp, Oryza sativa
  Intron number 5 from transcript LOC_Os01g05120.1 (locus LO C_Os01g05120) derived from phytozome v7.0 (chr-ID Chr1; po s 2400361 to 2400961 reverse strand)
tctgacttccacaagctttctgaaccaagatacctgtaagtaattctatcgaaagaagttttttttttctttagaaattaatctaaattgttcaccttttctaattcagattttttttactggaactaaaactcatagaacaacagttaggatcatcttctactgatggtaatattgacaaaataactttcaatactgactgaatacgatcattatgactaaattattgaaatttccgttcgaattttttgaaatttcaggccctctcggcaccgaactatttcgtccgaaattttcaattttttaatcaaaatttgatcaaattccataaaagttctgatcgaaatttcgatgccccgtcgtagatatgaacaacgaaattactaagcctggttattctttcctactataaagttaacttactaaattctaaagcttaacgtacagatatatcacattatcatccactaacaattattacatttaattatcataataaacattgctatattatctattattttattcgacattggttgacatatgttgtgttgatgtgcgtgtaggctggagtacaacttccgcaactacttctgcctta

SEQ ID NO: 11331 - DNA, 838 bp, Oryza sativa
  Intron number 2 from transcript LOC_Os01g42460.1 (locus LO C_Os01g42460) derived from phytozome v7.0 (chr-ID Chr1; po s 24138041 to 24138878)
gtgaaggcgttggccttgctgatatcaacccactggtaagttcatatattttccccttcgtttttgaattggttttcttgaatatcattttaccttatgctttcttgcaatatatttaaatattttcattttgatcactcaatggacagataatcactattatgtgaacactatatcaaatttgtttctaattgtgaaaagtcattggatgggcaatagtgtcgacattttgttaattccaaatatctgttgttgagaagccatatcggtagctagaatcctagagctacaagttaccttatcaagttgtatctagtactagttgatgtgaggagatcatttcccacttttttttgttgggaatcgtccaccttgtatttgtggtatatttagttattcacgcatgacatgaataattcgaagttagagttttaattctcatgtataaaaagtgcatcacaattttcaaagagcaatatttaaattcacatttttggaagtgaaaatgcagtccaactgagttagacagagtaggcattagcgtgttacccatttgcatgacctgagaagagccagcttggttgcgacaatcaacttgaaaattgagatcatttctagctggtacagttaaacatccttttgagctaattggcataccattttagtagagcatggttaggtattaacagtcatgatacaagattgaaactttcctgctattgtgtattacctgtgaatgttaagtcatttgccttttccatccttttactttttctgagaactaaaatattataatacccttttgtttattggtcacccaggaagctattggtgggaa

SEQ ID NO: 11332 - DNA, 665 bp, Oryza sativa
  Intron number 1 from transcript LOC_Os03g11930.1 (locus LO C_Os03g11930) derived from phytozome v7.0 (chr-ID Chr3; po s 6249969 to 6250633 reverse strand)
gggccgtgtccgtgctcgagccggtacaatgatgctagctagcttttgtgttttctgggtgatgctaccagtggtacagtaccactgctactccctccatcccacagtataaggaatttgaattttgactttttgattgtaacgtttgaccactcattttattcaaattatttttgtaaatataaaaaacgaaaagttgtgtttaaagtaacatagataataaagtaagtcacaaataaaataaataataatttaaaaaattttgaatagaacgagtgatcaaacgttacaagcaaaaaattaaaatctcttatatgacggagggagtacttcctgctggatgtgttgtactgagtggagatcgtaccgcgcgcgtatgtgcggtgtctggtatcccggtcggtcgtccggtgattttttttttcgcggcgtggtaattattgttggcgcagcttggcgttgaaagggaaaggaggggtgcagtgggtggtgtcatttgggtatccgggtagtatgattgattagctgatacgattttcggtccgggtcgtcttctgtatgagctgtgagcaggcgtgtttgaattttcttggtgtggaaaagcttgagctgcgaatgatgattgttcagagcaccagtcgcgagctaagggagcttatcattag

SEQ ID NO: 11333 - DNA, 991 bp, Oryza sativa
  Intron number 2 from transcript LOC_Os01g46510.1 (locus LO C_Os01g46510) derived from phytozome v7.0 (chr-ID Chr1; po s 26463427 to 26464417 reverse strand)
agttaagcttgagaagctcgccgagggagacactggtatgtggtgcagtagttctagctgtgatcggtagtttggcatgctatatagttgttatgcatgtacggtaaatggttgaaataaggaaatgtgcgttttactctcctgatttgggactgttgagaatacgtgtgttgtctgtgtagaactaggatactactactttgcataatttcctgtagtaatgtgatctcatagtctctcatagtaataacagaccttttagtgataagctttcttctcatgcactcatatttagggagcaactacgagagaagtatatcgtcaagccaggggttgatacgatttcaatttatcgttgtttttgtttaccgctttctcttgtattctcaaagtagtccatacatttgaattaacctgtccaaactcacaacatgctcagaccagtgaagccctaaatacagaaaaaggttaacaaaaaatggccatacgtaccctattacatggcatacaacaaataccgaacctccttgatatgattaaattaggggtagaaaagtggaaatattgcaatagccgcattcttaattatcatgcgacaaatattgtgaatcaatacttccctttggaggatgtacaagcatacaacacagagggattaatcagtaaaagtaacttatattttggagatttggcatcactagatacatcaatgcagcataaatttgaatctctggtgatgttggctgtagtacggtccttgtgacaatagtctgttttctggcttcacatcattcatcttaatgttccctattcatgatatttcagtttttggatgttgtctccatcttttcattatatctctcttctttaaagatggatgtgcataagcagtagttctatataagatatcattttgggcttctggcttattctgatctttgccaaattctctgcagattcaaaaggaaagcccactgaagccatccgaggt

SEQ ID NO: 11334 - DNA, 638 bp, Oryza sativa
  Intron number 1 from transcript LOC_Os01g36550.1 (locus LO C_Os01g36550) derived from phytozome v7.0 (chr-ID Chr1; po s 20284041 to 20284678)
ggagttgctggtccttctaacaagagtgagtcactgtttcttttcaactgatgtttttatttatttattttctgcagtactgaaaactgatacataaggcttcatgagaacaagtataaatggtactgtggacatgatattagatttagtgagacacaataagcagatggctccacgattgctcttcaagtttacaaaccgaagctaattttcttttgatcacaggatctcaactactgtgaaatttgtgtgtactactttttgctcctttctaactggatgctgaacctttgcatctcctttctttgtttgatgattttagaggttcgtggcttaccaatcataatagcagcatccatatcagttgccatgttgctcctatgtgtgttaaccatcatactttgcctgaaaaggagatctactctgcccagtgttgaagcaccagcgcataaaatggagaaaattcccagtaatacaagcattgctgcactggagagtcgtttctatccatccatgagaatcaatggtcttgttcttctacctttattcgtgtttttagtaaaaatacatccttattaatattattgagttgattggttgcagaaattgatccattccaaacagagaggcctgtgatt

SEQ ID NO: 11335 - DNA, 785 bp, Oryza sativa
  Intron number 2 from transcript LOC_Os01g56690.1 (locus LO C_Os01g56690) derived from phytozome v7.0 (chr-ID Chr1; po s 32714589 to 32715373)
gacgtcgcggtggagtccaaggtacattacaaatgtcgcgcacaatgagaaaacaagttcatgtgcttctgatttgttaatattaatcaacatcaactgtgtgccattgattgatggttgaaaagttcaaaaaaataacaagttagtgtcgtaaaaacatatgtttagtatgtgctacttggtgatcatgtgtaaagaaaaaatgaactgtggtagttgacttgaatgcatgacttcatagcgagtcatgtaaacgagtgacagttttatatatgtggaccagattaaacttataaactcattgattttgtcgctactgcaaaagtcgagtataaagtataaaccccacatttcgtgtggctagataacttaatgtaaagctgaacttgtttgtttatttacgactagtagtgtcaattggatcaacttgatctcattgctttcattaaaaaaacagtatgcaacaacaaatgacatgcatgaattaatcaatgcacaagatattaaaagtaggaggaatatatcaggcgctgaaaattcttccctggccagaataagtttgccagatgtttcacattccagcttaattttagcacattttaggaggattgacaatactggcattgatctccatcaaccatgcatgcatctattgtctcagttatgcagatgagaattaattttgtgtggtttaacaacaagtactacatcccaaaataataaattatgtatacgaatctgaatatataacaaaatttgatttattttaggagaaggaggattaa

SEQ ID NO: 11336 - DNA, 749 bp, Oryza sativa
  Intron number 2 from transcript LOC_Os03g11340.1 (locus LO C_Os03g11340) derived from phytozome v7.0 (chr-ID Chr3; po s 5842254 to 5843002 reverse strand)
tctcagcaaggagattacagagttgtcaccgaactgtaagaaacacgtcttcaatttcttgatcttaaaattttctgctgacatacataaggatctgtaaggatttttagattgttatgtattgccttttctatgtgaaagaatacaaatctgctcgtagattgattgtttccgagtggggaaaaacatttgtcacttatggtctccaaggtcaaaacttttgtcttgcttggctgctccaacatccgaaacactcttttactccctagttaattaaaagtgcaatgatatttcttgcttgctgatttgatgtggaaactagctgattaagtcctttatcttcatgctgtagctgtctgaggaatcttagtaaaaggctcaaagctacacaaaattcataattttaatagtttcttgctgagtcttaaatatgcaacctcaacctgaagaactgtacctgaccacgctttcttgtgtatgccagatataaagctttggtgtatgaggccataaaatggattagaaaatcctcttacatgatgccatttcgttccttaaatttcttttctgtaaatgctttgaaatagttggcaagaataattcttaactgttctaataccaatggctgctgcatatggatctcaactctattaaccgcaaaatcatgcaacttatgttaagctatattatatgtttgttgatgtacaaatctgagtaactatattgcttatcttatttcagtgaagtct

SEQ ID NO: 11337 - DNA, 932 bp, Oryza sativa
  Intron number 1 from transcript LOC_Os01g20020.1 (locus LO C_Os01g20020) derived from phytozome v7.0 (chr-ID Chr1; po s 11371883 to 11372814)
ataaggtaagtgagtttgttcccatccaagggcattttagtcttttttttcttctctaaattcattgtcgctacaatgttaacattgtgattataataggatcaaacagtagctttggtttcggaaaggagggtcaaacaagcaaagttaaaaaataaaacatgataaaattgatagttgaactttaaaatatggtcaaatgcacaattatccctttaagttatgctaattttttttcaaaggtttggagggactagccgccgcctcctctatcttcttcacttggcatttgcttgtagtctcgtagcctattagttgacttatcaactgcaactaaaatttaaatttcaaataattacaatgattttagttttttttatcgtagtctagttttcagctaacttttagactataatatagatagatatgttttacgtttaaattgattttggttgcaaagttaacatagctcaaccaatcagagccacctgcaatgcacattgagaatttttcatgtgtgcttttgaattttcaacttattcgcgtcatgttctatgaaatttggtccgatcatatcatgatatcatatattctcctgaatttctatttttgttcccccacatgcctatgttaacgttgatttgtccattttataattaataaatgtaggaagacccttctccccttttttgcatggaagggattttaatgtttattaagcgtacgatatactcctacattcatatataggagtaccaaatattagtatgcacaaaactcatattcctttcacaccaaaagcacaaaatagacttctccatagttacggaacaacacacaaaaaatggtcagataaaagaacaaaacacacaggaatacaagcaatcgatctcaaacatctatgggtgtgatttttcatttttcttaacagc

SEQ ID NO: 11338 - DNA, 925 bp, Oryza sativa
  Intron number 1 from transcript LOC_Os01g48770.2 (locus LO C_Os01g48770) derived from phytozome v7.0 (chr-ID Chr1; po s 27966091 to 27967015 reverse strand)
cagacgcctccgttccagcccccgtcgacgaggtacggcgcctctcctctcccctctctccctccctgcgctggaaaggtgtaccttcgtgtgctgccttcctctagatctgcgagatatttgagtgcgcttgtgctcttgtatttcgtggggctgtactactacccgtgctgttgtattgctgctcgttggtgaattcgtaggcgttggtccgtgggatattgtgggtgctgaatcattggagtttgccgcaatttgatttctatcgatgggtcagaccagagttgtgttgtcttttatgttcgacggaaacatgattctattaaacatgaataggatgggttgtgtacattttgagtgctcaaggtcaagacatccaagtatttgagatttgagttagcatttcattataaaatttagagagattttgatgctaggtctttagaactcagtatattaaaaaaaatgggtttattcagaactctgatgctaaactaacttttctaggcacaagctacaaattttatcccactgaactgtttctcttcaatgctatatttgtccactcaattattcctggaaaatggtcatacttttctctttctccaccaattgttcctgttccatgttatcttcttgtatgacgccaatattgcgtaacaggctttgcaaggcatctagtagcatggaagtcaactgcttagttctagcaaataaaagacctgacttaatgctatctccaatgacaagtttaaatgtttacatgcaagtaacaagcatttggcatgatactaagtagtctttggaatcttaagcctttaggttttaactgagcatcacagtttatctaccagttgtgtaactaaattgtttttgcaatgcttactcagacgaagcgcaccaagaaggctggaattgttggcaa

SEQ ID NO: 11339 - DNA, 703 bp, Oryza sativa
  Intron number 5 from transcript LOC_Os01g01830.1 (locus LO C_Os01g01830) derived from phytozome v7.0 (chr-ID Chr1; po s 439605 to 440307)
aagtgtgcaccagatcgtggtcagactaattcacggtaaggctgtgtctgtttctcaacccttgatatatagtgtatgattgtgttgtgttgggtgtatcctggaagaaaaacaaatgcatgtctgagattgtttcttcgagattattaaaatttagctgtcaattgagattgtaactatggtctatattacattaacgcatatatatgcttatattttttttcctttttaatttttttagatggttcgtccatacaacttaaatgaatatatttaattcattcattgtataatagaaatatagggcgtatagaccgtataaaataccaaccatgtgcaggaattataatgccgatatgtatacgcatacgcacgccactcaaagttttattgtgcctacgcaatatcatagtctcgtaaaattttattgtgcctacgcaatatcctagtgttgtactttacgttacatatatttgatgtgcgacatgaattgaataaaagttcaaatacacagatcatataaaaatattttttgctaacatgaaattttataaattatttaggacaaaaataaaattgcagcgtagcgtttagcacaggcatattactagtctccttaaatccatctcctttggctttcccctctaacaccgtctccctaatcccagagtctacctaccccacccctcttgttgccgccgcc

SEQ ID NO: 11340 - DNA, 916 bp, Oryza sativa
  Intron number 7 from transcript LOC_Os01g01830.1 (locus LO C_Os01g01830) derived from phytozome v7.0 (chr-ID Chr1; po s 440699 to 441614)
ccggactccaagcccagagcgtgctctacgtgcaggtatgccatcaaactcgattaataaagcacgcagtggatctaaggtttggagctttgcgggacatgttgttgtcccgatgatgtgaaaataattggagatgggtttcaatagatttcgtgaatatacatcttgactttagaaactactgtgctgtaggagctgaggctagttcagttagtgaatgttgcaatgtatacatctctattgcctaagccggagacctctttggcttggctgcttgcatacctaattcttcttgattaaattgaatctagtttattaaagtatcattagttctctgataaaattaaaggcaaaatctatagtcatgtgattgtttgttggtatgcaagctttgcgatactcactcttttccaacctagacaatgtgcaattggacaggacttattatataccaactgtgcttgtgtaatatttgctatgcacatgttttggttcctttgcccacccttccttagcctcgatgagtaacattagtgggcatttgttccagtttgattttaggcaaggaagtccaccctaccaagtctaggctagcaaatgaaccaaacatgctttacataaaaatgaaccctgtgagaatgttcaaatctcatagtcaagttccacagcactgagcaatgctgattgttttgctttctctgtcatattcatgctttcagtttctcataagattatttggtgttcttaaaataaagaaacaagtccacatattccgtttagtatttcttttaccctttttcgagtgctagttttgtttatgtttgaattctgtcaataaaaggctgcataattgtcttgattcgatgaaagggttagaatgaatatagcatgtacttatcaattcaggatagtttgg

SEQ ID NO: 11341 - DNA, 965 bp, Oryza sativa
  Intron number 2 from transcript LOC_Os03g20380.3 (locus LO C_Os03g20380) derived from phytozome v7.0 (chr-ID Chr3; po s 11527903 to 11528867 reverse strand)
aggagaaggttcagaagcacagattggttgaacaggtcattctcaggcatttattttttggagcaattctcaatcaattcccttataaggcattgcatcagtttttttatcaatcactgtgttcgtccaatatctttaattcatatatcagactaacctctgtgattcagtccactaggaatatccttttttgaggtaaacagtccactaggaataaagtggtcaaaaatcgaagtttcctatatcgctttcagtaaaccatacagccaatcttaccatcatttgtaatagtcaacaaagtttacctcccaaaaaaatgtatgtttcttacgtaattgaccacatgtgtaattgaaatatgtgattttctttcatcaacatttactacaatcaacttgcatctttgtatcaaggaacaaaactgaagaaaaaattttcttccttggatgttgccgtgccagcatgggagcataggaagatgtaacttcaattaagaatgattccgtgtccacatgactacgtacatatttgcatgacatcgagatatacccaaatggtgatcttccagttgaagtcatattaccaactcagtatgttctcctggtgccttgtgctgtttctaattgctgtcaactttatgaaaagttgaagtaaaaagaaaggacctcattttgtacaattcaagatatgttttgcccatgccacatggatgttcatgttctcaattccattgaataggctttgctcttcattatactgttctaaccatagagattttagacacagaataacattagatgcaaaagttgtggttagaactcataacacaaatgtatagttttacatatgtgcaattccaaggaacaaatcacatatacatttttgaaaggaagaaattatttatttgatatttttatgctcatgccattctaaattcaatgcagattaggcgtgaaatttgtact

SEQ ID NO: 11342 - DNA, 661 bp, Oryza sativa
  Intron number 2 from transcript LOC_Os03g21530.2 (locus LO C_Os03g21530) derived from phytozome v7.0 (chr-ID Chr3; po s 12299125 to 12299785)
catctaaaaagcaaggtatgtttaaagtataaaccattcataatgatactaggcacctcattccttcatcctctttgcatttgaagtttcttgaagtatgttgtttaggacgataaggtcctgaggactgtgcaatgcacaaacatactttaatagacaagacccatcaagttgaaaactcactttacttatgttttcttgtctatttatttctttggtagagtggtgtgcaacctgaaagaatgttttggcgttgaaagtttttcagtgttttctgagcttggattgcaaagcaaggcacacactgttactgttacacctgttccttgtgcctggaagagattttagcaaataaaagaaaatctaagagttagatctttaacagattatttgtctatttacctttatagtatctgtccggtttcatatattcacatttatcatgcaattttagcttgccatcaaaacacaagtaggaatatgtatcagatctatcatagaagaacttcctacaatagatgcacgcttgtgcttgaatggaagtaattttagttttgttggctagaatcctgctctagctttttttttgtcttctttatgtatggccatcctttgttgtttgctagattactgacttatcatcatacagggaaaggacagg

SEQ ID NO: 11343 - DNA, 327 bp, Oryza sativa
  Intron number 2 from transcript LOC_Os01g42370.1 (locus LO C_Os01g42370) derived from phytozome v7.0 (chr-ID Chr1; po s 24071582 to 24071908 reverse strand)
ctccacgacgtcagcggcatcgtcaagccccgcaggtgaaagaaagaaaaagaagcatcacgttttcaaaattgcttatgctttatataacgttacgtgtgtgctgctctcatggtttatttgcgattttttgaagcattgtaagatatttgcttgaagatatttttgtacgggatgccggttcccaggaaacgaaatgcttttcaattagacatgtccctgtaaactgtaaagttgatttgtctttgttggagcctagattaaccaagatcatttggaatttaacttctatgcttctcctataacacgttcttttgattatgcagg

SEQ ID NO: 11344 - DNA, 1021 bp, Oryza sativa
  Intron number 1 from transcript LOC_Os02g44111.1 (locus LO C_Os02g44111) derived from phytozome v7.0 (chr-ID Chr2; po s 26660242 to 26661262 reverse strand)
cgtcgagctaccccgagaggccgagaaaccctaaggtaattgttgtttgcttcagtggtgctgtgatttaggattattgggaacatcttttccatttgaagccatggatggttgattgattgattgccagtgaatccagttgtagtaaatgtagatcgaaagggcatcactagggaacaatagaaattataaccatatgtttcaccaattgaactttgatttttgaaccttgtgaagctttgtacaattgttcttttgtataattatagtgcatatgtttttaagaaagtatgaaatgactagtactgaatttagatcctccactatatattatccaactagtagtttagaactacatgaaattaaacatattaggctttgggttataaaaaaaaaatcaccccttcccatttcgaatacccaacctcaaaatcctgggtatgccccacctctaacccacaagccacaggcgtagggtgccggccggtggccaccacacgcacgcccagccccagccctgtgatcgaatcaactatggttgtgatttgtgcatgtgaacaacttggtagtttaatgttaaatgttgttgccattgtagaattggtaggacttgatgaatcatttggctttatttttagggcacacttgatgttgatgatttgtcattggatgtacaaatgatctgtctctcagtctttgcaaagcagaccacatgttatttcatggttcatatatggttcatggtcccaatgaaatgattggtgagcttgtcaaagtaaatgtaagaccatcgagagtattgactgatagtttgatgctatgcttcttttttttttttttgctactgtaccagtcacttattttgctatcttttgtgaaagggtacaagcacaactagaatagcttatctgttgatttttttttcctatttgcactataatctagcccatttcttcgtatttttggtaacaaatcttgtcttagtcagtgaatgtctgtgatggtccattcagatattagg

SEQ ID NO: 11345 - DNA, 847 bp, Oryza sativa
  Intron number 2 from transcript LOC_Os01g70720.2 (locus LO C_Os01g70720) derived from phytozome v7.0 (chr-ID Chr1; po s 40938420 to 40939266 reverse strand)
aaggtctggatcagtgatgttgcattgccatgggctattgttgtgttgaattctccgttggttagtagttctttgtctctgtaattcatatttgattccttttgctttgtgctctcttcagccgatgcaatccttctccatctccacagtgggttggcgcccttctgctcaagtttgaagctccgctgccgtgcggcgccgacactgtttcgcaattgcagatctggctagcaacaggtaatctgggaaccatctgtcgtcgcctagccaagggccatttgcaattgccttgccattgttatttatggtgtaatttacttaggggcaatggatgtatgcaacttcatcattaattgagaatccatatgtataggtattttgggaacctttttttttttgccttttcctacttccacttcaattttactaggtgatattttagttccacaatggttcaccttgaactctttttctaaatgacgatcatatttaacgaaaccttcactgcatgttctgatatgattgctcgccatcatctcagccactatctcaaattgcttattacagtggtcggaggtatgatattttgcatgcctcttacaagtaatgctatggcctatgtaaatgtctgcaagactacaaggaatctatgaatctatcctgctctgctgagggattctttattttagtacagtagagaactgagatcagtgcaaatcgaggtaattgatgtttactctcacttactacacattttatttgttgattcacattacatatatgcttctttcaaagaaatgaatgtccccgtttattagagattgtttaggggggagttgttttctaa

SEQ ID NO: 11346 - DNA, 613 bp, Oryza sativa
  Intron number 2 from transcript LOC_Os01g48850.1 (locus LO C_Os01g48850) derived from phytozome v7.0 (chr-ID Chr1; po s 28029187 to 28029799 reverse strand)
gggcaagacgtccttcaccttcgatttcaccactggttcgttctagctctcctctgctgcaaaactgcgaatgtgttttttggttattactcaccgaacacgcacacgcgtgcacaccacactgacagggaaatgtcccattgatatgaagagaactatcccgaaatagaatttcagtaaatgtagctgtgtgctccctcctcctaacataaccaacttttgcctatatccagattcataactagaaattataggaattaattttcttttaggattgagggtgtaggtttgaaagtcgccctgaattcattttttcttttcattgctcaaggattcaaagctcttcttggttaacataaattggttgtgaaaaatcatgtgttatgtgaggtcttacttgtcaaatgaatgacacctggcttgaaaaaaaaaatcgtcctaaaaatgtagaatgagacaatcactcctttgcgtcatgtgatggcttcacctagtcattcttttcttgaaacttctgccatcactttgatttcaaaatgagagatttctaacatcatcgaacaatttggcatttgtccatttgcaggcagctcttcaggttcgtcttacccgg

SEQ ID NO: 11347 - DNA, 523 bp, Oryza sativa
  Intron number 2 from transcript LOC_Os02g56500.3 (locus LO C_Os02g56500) derived from phytozome v7.0 (chr-ID Chr2; po s 34590559 to 34591081)
taagttgcaggattaggctgattgcagaagattcggtgagttgtttgacactcgagagaacttggtttgttttgaatttcggtctgtttatttgacctgttcttgtacctgaaacttgaaagactccgagtaagaggggagtaaacgagtgataagccccgcgatttgttagcggctgtttttcagctaaccatctttcaatttctgtactggtttgtcagtgacttctgcatgtggctgtgttgtgcgactaccttggtccttcctgattagtgatggggtttagcgcatggtaatctgtttaatgtgcatgcatgccgatgatctttcatgtagactgtatattcctgtgcttagaagccatctgtggatcaaatccatgttgtcttccaagcaattagctcatctgtgatttgatttgtactttactctttgggaagaatttttttgtctttatagcttttcttgcatgaattccattccatgatgcatttggtgtttcttgattggaggcagtgtttga

SEQ ID NO: 11348 - DNA, 948 bp, Oryza sativa
  Intron number 1 from transcript LOC_Os02g50780.1 (locus LO C_Os02g50780) derived from phytozome v7.0 (chr-ID Chr2; po s 30998267 to 30999214)
aggaacaaggtcctggagatgtgagtgtgctcgacatgccataagctacatgctcagatgctctcttgacttttctctctttcgttgcgcggtcgattggttagatttttttttctttttggttgtggctacatcgcggagaacgaagacatctccgcacttttgttaagcctcgtctccacttgttcgcgaggtctacgataaattcgtcgtaaatttagttgaaaggatgcaaagctttgttcaatgtgttgagacgaatgcccccacttcgaacttaagcctgtaattgtaaagaaggcacgggtttgctatagaaggattgagaatggggtttttgattggataatgtgtgtgtgcccaagttgttaagtattaaaaagtttcatgttataaaacaattatgagaaagttgtcatctcgagttaccaaggattgctttggttggtgtattgtttatctgatgttatctcgagttaccaaggtatttcctgaaccttttatcaacaaatcactgcattaactctgtaaaatagggaaatgctgaaaatctagtctaactttgcatttacaaggcagagtatagttgccctgactgtccaacagggaaaacaaaattgctcctaggagcattggcgttatttatgatgcttaagttattctattatatttggtgtctcaaactgagacggtttgaaccatgcatgcgcctcaccaaagtgttcagcctgaatgctctgcatatgaaggttagcacaaaataatgccagcataaaattttctatccacatacaaaagcatgcgaaggtaggatctcagctcagtatgatcatacattagtattgtggcgctatacttagatcacctaatccaccatttgcacattactgcgtcttgcaatgtttattttctattactgattcactaccattcttttcaggttttacc

SEQ ID NO: 11349 - DNA, 652 bp, Oryza sativa
  Intron number 1 from transcript LOC_Os02g10080.1 (locus LO C_Os02g10080) derived from phytozome v7.0 (chr-ID Chr2; po s 5251241 to 5251892)
cggtgcgaacggcgccggcgggaagcgcgcgcgaggtgagtcgcaaccctctcctcccctttcccgtgcccgacctttgctctcgtcttcccgaatcgcatccccctctctcccgccgcggcgagatttggtttcctcgctgcgtagttagatcgaggagcctccccgattcgtgcccttttgctgcttattctgctagggtttgtaggtttggaaagagagagagagagagagagactaagagcggatgtgactctcgtttcgtaaaggcgagctaatgtttttgtagtttttcttccaagattcgccgagttggcatgtgtttttctttttcagattggttggtctgcttaaaccagatctggtggtctcgttgctccgtgttcttcatttcaaggcgtactttgaattaattatgggttttaaaaacttggagggaagctgtgggtagttgataaagagtgtagtagctgcttcaattaatgcggtatttttgcactgtttttgcagtaggaacgtaaaagtagttaaaaggagtattaatgttctcttgtgtaccaaagattagcaaatcaacaactattaacttggaacgcataattaatttgatgcaacagaatcggagtcatttcaaaccggtgtaggaagcaaa

SEQ ID NO: 11350 - DNA, 920 bp, Oryza sativa
  Intron number 4 from transcript LOC_Os01g38620.3 (locus LO C_Os01g38620) derived from phytozome v7.0 (chr-ID Chr1; po s 21700092 to 21701011 reverse strand)
ttttgtcagcctccttgctgatccccgatattgtggtacttactatactgaattagtttaaaccattgagttcctttgaatcgaaaagacgaaactgctgtgcatgttttgttccttctgatctgttctttcacagtatactgtatacttatataagctccccttggttgtagtttaccttgtgctggcatgcaagctctttcttttccttatacatattatctgctcctacgttttacatttatatattcttaagcattgtcgccataccacccttttttttttcctttagaaaaaaaaaaggaagtgttgcctcagagtttttttttttgtattcatgaagttccacttgattgtgatcttttggtgccaggttcttattttgaactataagttaatgtaatgcaacacattatgcttagtgttactgctagtgctttaactttgatgtatatgccttacatatccaagctgctgcaagttttgtccaagcgtaacttctatatgacatggttatttcagtcatgaatcgtttcaacgtggacattctgccttattatatgttcatttaatgtgtgtatgattaggccttaggctgcaacctatcagttcacccatgaatattagaacacctgggatgattgctccctctctcttatacagttttctattacttctgtaattctttaaattaatactttgcaaatatgttgaaagccttttggtaggttgtgcattgaaactacaaaatgtactgtggttgcatcacagcagtttgctgcttctgtcaaacatttttatcaattaattgttatgctctttaagctacctagatgttgacaaagtgtatgaaggaccgcagcacattttcttgtgttctgtttgattgatcatatggtgtgatactgctttgtgtagga

SEQ ID NO: 11351 - DNA, 537 bp, Oryza sativa
  Intron number 3 from transcript LOC_Os01g26920.2 (locus LO C_Os01g26920) derived from phytozome v7.0 (chr-ID Chr1; po s 14995656 to 14996192 reverse strand)
ttccctccttgaagggatccacttttcctcagaaggttccatatgttattttctgtgctcccccatctcgttcggatgattaccctggggatgtgaggtaaatgagtacgattataatgatgaatccatgattatattactgttaacagtatcatcctaccttctggtatcatgtgagttcctaatggctaaggtccattggttactcctaaacatttattttctttttaacacataaactatccaaatttgtgtttatagtgtatagtggtattttgctaatgaatatgcctctggcaacatttgcttgtgggtgtaagtttcttttttgagaggaggggtttgaattcttttccttgaaggccagaaccatgatacgcaactctcttgcgtattcaagaaaaaaagaaccattccagaacaaaatattattgaatcattgttgtaatagttccattccaatgatatgaaccattcatctatcttgcactaatcgaaacgcatacatggacatgtgatgtattcttatttcagaaa

SEQ ID NO: 11352 - DNA, 692 bp, Oryza sativa
  Intron number 2 from transcript LOC_Os01g03060.3 (locus LO C_Os01g03060) derived from phytozome v7.0 (chr-ID Chr1; po s 1168762 to 1169453 reverse strand)
tcttttctggacatttgaagcttacggacgacaaggtaagaaagtgtatataattcacattatgcgcgtctttagttaacaacaactctgctaccaagctgtttctaccatccgtgttcgtgtaaggagttgtaccctatacatgtctctggaattcaaaattacatccatctttaaactggcgccatatccaattcttttttttttcttggatacatattaacaccatctgtgttgactgtctgtagtcttttctcatcattttggataaatattacaccaaagtctcttgtttatatagctatatgaactcagaaagctgagaagctgcaagtctgctgctactagcaacatgatttagatgcttagtggaagtttgctcaaatatttgaaccgcataagcttgctttgctttttacgtgaagcctaaacaagacattctattcttctatagttgtattttggggggatcgatttcatgtatgcctgatttccaatgtatttggatgtcagttttgcctaggtttattttatctattttgggttcagcttatatttttgctgtctgttatcatgctatattattctagatatttcaaaaactaacagtgattttgtctcttctatgagatgcacctccttgcatcatttcacggccctacaggttttaagtctgtagctgatctgtcggg

SEQ ID NO: 11353 - DNA, 697 bp, Oryza sativa
  Intron number 1 from transcript LOC_Os01g33450.1 (locus LO C_Os01g33450) derived from phytozome v7.0 (chr-ID Chr1; po s 18416129 to 18416825)
gatccggtggtggcgacggcgttggtggcttcccggtgatgtttttatttttcttccggttctttttctcaatcgcttgattctcatcctgtaatcaacataataatcgctttatttgccttatgatgcactcggaagatagatagactgaatctgacttttctttttttgttttcatgttttttcaccctttttcgttattacgaacgacggaaacgtctttaattttttttacctcgtcacatataatcggatccgtgtttatattaatttgttagttaaaaaaaagagaggaaggaattgagcgggagagaagaggagaggagatttaaaggggaaagagattaggagcgtacataattatggaggaggggaatataccggagggtaaggggactttgttttatgttttctttaacatagatctaattggcttgagtcaaacaagaacacttataatgggatcgactcccgactcccgtgttgctcgccctaggcgacacgggaggcaaacggcccttgtgcgcgagggctcccaggctgcatccgctcgcgtcactgatgccggcaccggcgacggcggtgccggtggcggcatctccctccttctttatctccccttcttcctcctctctcttctctccctccctccttttctccagatctagggcttccggtgccaagaactactccccac

SEQ ID NO: 11354 - DNA, 981 bp, Oryza sativa
  Intron number 2 from transcript LOC_Os02g07640.1 (locus LO C_Os02g07640) derived from phytozome v7.0 (chr-ID Chr2; po s 3964306 to 3965286)
gccggatcattcaagcttcatatgtaagagtgtcagattactgaaaccttccgtataaaaatgaatcaacttttaaagaaaaatatgaaaacacttgtttagattcatcatcataagttgattttttccgaggatgaaaaaaagtagatgtttgtgtgcgtgctcggattcagagattgaaagaaacaaccctttcttttctcacgataacattcacaaattcaaaagtctctgtttgttttttcttttaagaaaatggattaaatcagtcactacatccaaaatagatgtacacagccaaattacgtacctactactacaattcactttggatttcagaactactccctccgttccaaaaaaaaaaaaaaagataaaccctggttttcgtgtccaacgtttgactgttcatcttatttgaaaaaattatgaaaaaaattaaaaagataagtcacgcataaagtattaatcatgttttatcatctaacaataataaaatactaattataaaagaatttcatataaaacgaaacggacagtcaaacgttggcacggaaacccagggtttactcttttttttgggacggagagattacctactatcctactgtgaagatgctcatagggatagggttgcgtgcgtgtgttcatagggggtgagtgcgcgtgcgttgtgagtgtctgcgttgtattgtaattctaaaaaaaacatgaacccatcaacaaaaactataagaaaccaaatgcgtttactgcaaaagcaaacaataccaggtggataggatcccaaggccgagtttagttctaaacttttttttcaaacttttaactttttcatcacatcaaaacttttctacacacataaactttcaacttttccatcacatattttaattttaaccaaatttctaattttggcgtgaaaacacaccccaatttgatcgccgttgcgttgctgggtgcgggtgggtgccagtgagc

SEQ ID NO: 11355 - DNA, 489 bp, Oryza sativa
  Intron number 2 from transcript LOC_Os03g22060.1 (locus LO C_Os03g22060) derived from phytozome v7.0 (chr-ID Chr3; po s 12644627 to 12645115 reverse strand)
aaggcaggtttactctaattcttctttttttctcccgcattgcagagtaatttgcatccatatgtgcaattagaggatccaatttgcttgcaattgttatcgtgtttcaagtaagatgtaagatgtggatcaagatgcggtaactgctagaaattcacaaacatcaacttcctgaaaaaatatacacgcaaacttagtggccattcataagctatcatattattgctgcttactggaacctcccttatgcacaattttttttcttgtacagtcatgttcatagatttgttttttatgggatagagggagtacttaatagcaagctctagttgtttgaatcgtggcagatgcctcttctttgaagtaatactttgctttcgtgttgcaataatcctatcaatcaggaccctttttccttataaacttcctgccgtggtgatttttttcaacagagctatcaattgctctgcgagcgacatccttcattct

SEQ ID NO: 11356 - DNA, 1036 bp, Oryza sativa
  Intron number 2 from transcript LOC_Os02g17940.5 (locus LO C_Os02g17940) derived from phytozome v7.0 (chr-ID Chr2; po s 10387207 to 10388242)
gtggaattccatcgcttatcagcctggtaaagaatactgttattaattttctaaaactaagagcaatgccataacttattctctatccacttatgataggaggttttattcttatgaaattgtttatttcattattgattcctcaattttctgtagttttttctatgcgtgctaactcagcaagctcttttatgggcctaattgctcaaagacagattcttttttactctagattgaattaaattatgtacataacaagttgaaatcagatgtgcatatttaatggctcagttctgccgaccaataataacataatatttaaacatttagttcggatcataggttcgtctcgatatctaattctagctgactgactatcaatttatgtatttttgaaaaaaaaatcaaatttaaagtataatccaattataatatattatggcccatatatacacaaggctcttatacgggcatcacaaagtcgcgcaacgcgcggctaggtggctagttatactagttgaaatatctaggagataagagaaggcaagcaatggaatttgtttttcccattcaggcattcagccccgtttggaactcaattccacaatgttactagctcacttccacaatgtcaaactgcttgaaataccagtccctttcttctgcccaattccacaatgttaaatagtttgaatacctttagtttaatttcaaaaaaggaatttgaagattccctttcttgtgctcaattccacgatgtcaaacagtttgaatacctatccctttcttcagctcaatctgaatctttttatcttatctataacgagtcattttttttcaccatgtacatcgtacatcatttcttctactgttgaatagtagctgagaagcagtgtccattctcattatgcttgaattttcaatccattttcatccaagtatccaattcaagatgtatttgcaggctatagatgagctgaaagatctcctttcttttcaagcaagaacaaagttaagcaagggaagatccaagaac

SEQ ID NO: 11357 - DNA, 830 bp, Oryza sativa
  Intron number 2 from transcript LOC_Os01g16380.1 (locus LO C_Os01g16380) derived from phytozome v7.0 (chr-ID Chr1; po s 9301456 to 9302285 reverse strand)
cggtgcaggggatccagcaccgggcgttcgtgacggtgtcccggaactgcgacctccgcgcgctgctggagtcgttgctgaagcagctcgtcgagacgccattgatgagagatccgcgcaaatgttgcggccaggaaacggccgccggcgacggcgaccatgacccgctcagaggaatcgagaccctgggacgtaccccaactcatcacccacacccagtgcagctttcaattgaacggcaaaaggtactcctttctacgcacttgcttaattttaattacttctctctttctctcaaagtaacgaatcatgtatgtacatatttaaatttaggattggtttctttttagacagatggagtactcccctcggccaaaaatgtttgaggtagctttttttcttatcatgtggaaatggttttttttttatctcaacatcatttccatgtcatttcatatttcttaattttaatgccatactgctagataaagaaatagcaaaaaaaatgttattataaataacatagcataaaaagtcaggtagacgtctgtggagtgtggagtgtggaccaacatcaatagaaagattgtgacatccaagagcagcccaatcgtttgccttttggccccaaaatttaaatttttacaagttatttttaagttgattttgagtttttttatcataatttattttttagcattgacttttaaatcacttaaaagtttttgcccataaattagtttttgatttctgtctatagacatcaagatacatgaagagttgatcatggagcagctagggaggctccccagccttctctccctcaagct

SEQ ID NO: 11358 - DNA, 544 bp, Oryza sativa
  Intron number 2 from transcript LOC_Os02g40500.1 (locus LO C_Os02g40500) derived from phytozome v7.0 (chr-ID Chr2; po s 24561236 to 24561779)
tggaaagtgagtggattatttttttttctgttattttctttcttctggttatttttattgtacatactaacatatgctaaatttcgtcttctttgctctccaatctatatacaacatattactccgccgtgctgcatctattttagatatcattggatttattgtagttgagtttagagcaaaactggttgcaataatgagtttaatcaaattgaaatgctgaaaatggctgtaaacttcactcttttgaaagaaaccggccggttatttaaagagaagaaaaaaaaagagaaatgcatttgcaaaattctgacaaatagtgcataaaagagaactaaacaaccgaacagagaagaaactacagggacccacttatagctctgatacatcaacactcagtagggaggactagatcgacgttaaaacagtgtagaaaaaagatcatatattattacatgagtcaattttagaatgtcctggctattctttagttcatacattgtaatttatcattgaactaattcatcctcataatacgaaggtg

SEQ ID NO: 11359 - DNA, 997 bp, Oryza sativa
  Intron number 2 from transcript LOC_Os03g37450.1 (locus LO C_Os03g37450) derived from phytozome v7.0 (chr-ID Chr3; po s 20763946 to 20764942)
aggtgcgtggcttgttttgcagattcccggcaactcggtaggagttttgatgtgggaccaaaactatctgaaaagtagacttcataagctttccaaaagtactaatgggccccgaaattccttctagatcagcagctaggtccgtttgaagttgatgctgtcaggaggcccgaatccgaatccaaaacgtgtagaactttatctcttgtcttctatggaccaaaagtgatgtggtgagatgaaggaagacatggaaaaggtcttggtttggtccccaatcaacttcttcaatcatccatgcattccttacgcttggtctcttttctttcgcccaagcaagtaactttgcaaacaaaaatacacgaaactcattatgtagcaacatttgttcaaatatataacaagtaaatctaatgtagaacatatacacctttagttgattaatacataagttagtcatggttatatccgtgttagttgtgtcctcatcaccatacccacacggtatagttatccgattggttatagggataacttatatgtatgaaatatgtaacagatcatgacttgagtattacgtttccttgtatattatggaacggcctaaagtcctggtttgataatattgtaaagtagatttaggaaaccggtaccgtattggttgaggtttctatcttgtaatcctgcccccatcctatataaggtgggtaggaggccctctagggggcatgagcacacctgatcgtcagatcaatattacacccgacggattcaaatccccaaacaggagtagggtattacctctcatcgagagggcttgaacctatctaaattcttgtctccgcatccatccacttttaggtctcgtgcgctaccccttttattattgccgaaatcttgtttcgacaaaaatgttgaatcaaagtttgccaatgtcttaattctatcatttattattacagcaattacgttctgttagttcaactagagctaaaga

SEQ ID NO: 11360 - DNA, 944 bp, Oryza sativa
  Intron number 1 from transcript LOC_Os03g29540.1 (locus LO C_Os03g29540) derived from phytozome v7.0 (chr-ID Chr3; po s 16836855 to 16837798 reverse strand)
tttaattggtattttagtcttctgcacatccatcggtacgttctttctttctttctttctgcatgattcagttttcccgttgttgattgcgatgatccagccatctatccgggactggtttcctctccctttttgttggtctctgttcttgggttgggttttcagtccggggaatgaactcgctcgctaggctggaactctggatctggtgatcaaacggcgtctctgaaaaatcagggttgatgtggtgggggtggggtggggggatcgagttcatgtctcttttgttcatctttgatgggagaaaaatgagtataagaataaattgcgatttgatttgattaaacttaattaattattttttgttgtcctagaaatgatgaagtgttgctgttgggagggaggtagtaataatgcttgcagaatagtcgccctgtcacaatcaatcgtccattgaggataaagcgcttatccaaccacagcaccacactatggcacctaactagaagaatcttgcatcccactcactttgccacttgcgagctgctcactctgagctcttcagatatttagatccaactttgcttttgagtttggataattaattaatcatgtttctgttcttataatgaaaaaaaaatcagattgttaaacacaaaggtattaataaaaaggttcaaaacaccaaaacctcatctttgattgctctattttaaccaccacagaataataatccttttctctgaaacctgtaattcagtagtacttgtgtccattgatttatgattgcccatttttatcagataattatacttgttggatgcttacaaggtttactaatgttttgcctcttgttttccgtttgtatctcattatctgtatctctctgaaacagagctcatcatcagattgaaacaaataaagtgaagtatttgatcacttat

SEQ ID NO: 11361 - DNA, 985 bp, Oryza sativa
  Intron number 1 from transcript LOC_Os01g68104.1 (locus LO C_Os01g68104) derived from phytozome v7.0 (chr-ID Chr1; po s 39587369 to 39588353)
ggattctggggtgcgttcctcttgcccccgaaccctactactgtttctcgctcccgattcgacgccatctttaattttttttggtcgcgcctagtcgataggggaaattttgaggggtaaaaatggtgtggtggattgttgatcctcggtttcttggttaaatgctgggtttccccccatatgctccggagatctggggatattttcaccggcaatgcttcctgataggatgcggtggtattttggtgtatttgggggagaaatagaagcaatattcgtgtaggaaaatgcagtcatacccttgaactttaatcaggctcttggcagaactgcaggaaatttggctattccattgatgagttggattcaagtgaacaagttgatatctaggagtaataaggcagtagtttgtcttaatgaactgtgccttgctctggagagtaatacattccctgcttctgtttggtggttcctggatttagtatagtttgtattttcatgttatggttggatgatttagtgcttcagtttttttaatgaattaagcatggcatgaagcttactggagagtgttgactggcaaggtcgatgttgattggtcaatctttgatttttcaggtcttcatgattgactatggtttcttcttgcccatgtagatatgaaatatttatcactgaaatacgcgcattcttctacttatatttgccttcgattatgcgttgtacttattctgaacacaagtgtggcattcaaactgcccgttggcatgccactaatgttttttcccctctgtgtcaactgtgaagagatcttttgatcgcgttggacacaagcgtgatgggcatatttgtagagcttaagaaagaagcaaatgtttgtcattcccaatttcacgtgttgctcatttttaccaatgtttactaatggctttcatgaatgtaattcacatttctaggagttgctgtcagacctggagagacagtg

SEQ ID NO: 11362 - DNA, 750 bp, Oryza sativa
  Intron number 1 from transcript LOC_Os01g28610.1 (locus LO C_Os01g28610) derived from phytozome v7.0 (chr-ID Chr1; po s 16003733 to 16004482)
gatagaaaggtatgatctggaaaaaagaagtagagaagatttatttctaggaggagatttagtggcagttaagatgggggagagaaatggatcttacaggggatgctaacacactgttctttcatggggtggctaatgggagaaaaaaaggaagaaacatttttttttcacttcagaatggggaagatataatttctgagttctctcaaattcagaaacatatatgactattataagaatctgtttggaagggaaggatgcaggaatgtgcatttgagtgaacatgtatgggagacgggactgaaactttcggaggaggagaaaacaaacatgataagacctttcacaatgcaggaggttgatgaagtgattaagggaactaggggcgaacgcgcgcgttgcgcgcagcacttgtttggcagtgctggacagaactgaatgtgcagccactatgttgtatagtatgttgctagcgaaaggatgatggcctacctgcgactgcgcagacaattaggagagaggtgcatgggctttatgggcctgcgagtatggacatagaggctgtatatgggctttttaggtttctgttttgggatgccctatttctgccttttttgtacggctgatattcattcgttccattgttctcatcggaagttccgctgcctttgctccgctgtttggtggtgactggtgcgtgcaccgatgcgtgtagatccgaaggatttttgttgctggagcgtgatctag

SEQ ID NO: 11363 - DNA, 513 bp, Oryza sativa
  Intron number 1 from transcript LOC_Os03g06930.1 (locus LO C_Os03g06930) derived from phytozome v7.0 (chr-ID Chr3; po s 3515429 to 3515941 reverse strand)
ctctttgcttggtctgaaagtcgatttctgcacaggtatatagccttatcctatcaggtttaacgttgttctttggttgcatcagtttgtctttgagtttgatctgagaaaaccaaaaggaattatctttttgggcttgattggtgttcatatgaattcttggtattgtcttctgccttcttgcttgttgaactttccgtttcttgttagctcctttgtggttggttggtgtgccaactgaaaagattgcttcttgttacgtagattattgttgagattgttttctgaatttctcaagcagcggtgagtttttgttgaaattgagctgaatttctctgaaaccaactatttctggatgcattcgtttttgtagcttgctgagaaattcagactcctttttttccttttcatgatttcacaagtactggtttgaactgctattttgttcgcattagatgctgaatttatcaaattgcaggtactgcgaaagctttgggaatagtattgcagaaa

SEQ ID NO: 11364 - DNA, 718 bp, Oryza sativa
  Intron number 3 from transcript LOC_Os01g55540.1 (locus LO C_Os01g55540) derived from phytozome v7.0 (chr-ID Chr1; po s 32001076 to 32001793 reverse strand)
ctgatcaacaacccgtaagtctgatttgaaaaccagatgatccgcatgatttcggacctgggaattttttttaggctggctgagtgtacagattccgtgttcaacttgcctctagatctaacctgtagataatacggtatactccacctagcttgcaggttatgtactttttttgcgaacgcttgcaggttatgtactaataatatattagtatttggcaccattcttgctttgaatcgtccggctgacttattttattctacgaaaataattgttgacctttggtcttttagtgacctttcctgctctacctacctgtttttataatatttcaggtcatttttttgctttgcttttgttatatactagcgtgtaggattgattgatgttgttgcagcgctgggtatccaactgggtttgccttatcagtgccacactgccactagtttgtttggcccattattaccacttagatatatatttttagtgaggggcacagtatgttaatttacgagtactgcaggtctgcagctttgtgtgtgtacacagtatacatttttttttatgtatagacaatttcttggatgggtttacaggaagaaaaaaccattgactattttttacagcaaacttatgatgatattcccagttgtattttacctgtgattatttgctttgactaggtcacgtgttaaggagtatttgccgatcactggac

SEQ ID NO: 11365 - DNA, 596 bp, Oryza sativa
  Intron number 1 from transcript LOC_Os03g37140.1 (locus LO C_Os03g37140) derived from phytozome v7.0 (chr-ID Chr3; po s 20591186 to 20591781 reverse strand)
ctttcctctcgcattgggtcgacggtgcccgcccggtaacgcgccctaatctagtaatctcctccgatcgatcatgtcgcttcttgggctctctctcgtagtcttgactgattttggccggtggcggctagggttttgagggtttattcgcagccgcacgtagccaggacgccctcgtactcgtagggcctcttttgaccgtttcttggcatccgatcgttccggttattttattgctaacttcttctgtttattctttcattaataaggtatttgattttggttattgacattctttcttctgtcccccccgcccccaatttcaaattgatttcttgtttccttttaagcctagtttttttattttttttttcgcattctatttttctttattatttcgagatttcccttcctcatttatttctaaaggttgtgcatcatcgtgtcattgctgtccattttcccttttctctttaataattatcttgtctggatttctcctactcgaataatccatgggggtttgatcattttgatgttctgatgtcatatgaattccaggttaattaatctgtgacgcgtgaagacttggatca

SEQ ID NO: 11366 - DNA, 1033 bp, Oryza sativa
  Intron number 1 from transcript LOC_Os03g25110.1 (locus LO C_Os03g25110) derived from phytozome v7.0 (chr-ID Chr3; po s 14336131 to 14337163)
cgctgcgccctcgaggaggctctcttcctcggcaggtaacccaacaatcccctctgctttcctgcacacccaagaaatggccattcccttatttggataacaaatgtgctgtcgattttagggtgattccagttaacttttgtgaattcaaatgttcgaatagttcattacatcagacactatactatagggttggtacaattgaagaagtacaaggtgaaaatttagacgtggagagggggtttgtccaaagattctgcaatgtagtgtagtactgttcttctacttgttgaatcatttgaatgcggtagagtttataatcagagctctggaatgtcttcatatgaataatgtagattcatgttccgtgttgagcattccttggttgctctttatgtcggtaatattccttgaaagtcttttatgttcattccttctatttgtaatttccttctctagctgaattgtacatgaaaaattgaaaactgaatatctacttaggtggacaatgttttcatttttagaaatacacatcacattcccttccctggaaaacaggaatgtttgctgataactcaagtttgtgcctcttgattcagaagaaccgtagtcaatcaatacaatggtttactctgacaatgctacaatgagtatttcatgaaggaatattttgagcatcctcaggatccatgaaagtggtgtggattatgttcaaattgctgtacttgatgagtgtgcattgccttaggcatggtagcataggaaacggatgagtattagagggatattggggcatatcttctctatccttttcttccttcattccaggccagcatgtactgtagcaagttcctattattttccatttttaatttaattaattaattcataactacaattaaagtaatgtcagaagtacacaaggcccatgctatgttttcacatttctaagcacgctatcatatatgtttgatgtgaggcattaaaaaattattatttttaacaagtcttattgctttctagaatatttgtt

SEQ ID NO: 11367 - DNA, 1047 bp, Oryza sativa
  Intron number 2 from transcript LOC_Os01g15460.2 (locus LO C_Os01g15460) derived from phytozome v7.0 (chr-ID Chr1; po s 8662192 to 8663238 reverse strand)
gctacaaccacccgcgcgatcgcggcggcactgaggtgagtctcctaattcgcgcttcccttcccgatctggttcgttgcggcttgcgcgcgcgcgcgtgcgtggatgaggcagctctagggtggatggattaaccatgtgatcagcttagtgcccaagtgaggatcgtgccatggggaacattgattcggccaatgtaaatgtagttcttctgtagcttgaaaattgggcatgccactgcctagatcttgtccggcgcatcggtagcactcatcgggtagcagcattagagtttgggttcgcggtggaggtgcacctctgcaagttaaagcacttggatatccctttgaaagcagaaagctgtaggttgcctgctttattggccgcttcatgtttacttattctgcttttttgggtgttttgtgtttgctaattttgcttaattggattgtattgtactgggtcagactacatgcatctgcagatggcaaacttctgtgctcaatctttctttaagtaagatcagttgttgattctgataacataataaaaaatatccttcttttcccattccgttgtcattaatttggttgattaaatcaaatgtgtcaacaaagacatctaggatcaatgattattgacatgaaaatctttcttgcctgttttcttaccgttggttagcaaagtcctttgtttagcatatttggcttttggctgatagtttaccctctatcctgattttgtgaatttctcacttgttgggtttgcaaaagatatagcaactattcagtagttcttgttataagtttacattcttctgttgcaactgtgatctttctaaatgatttatgaaactcatgtctattgatagcctatctactttccatgtttctgttttcgttaagaaattgattagtttgtctgtgcgcatgggatgccatatttgcctatgctagtctataggtagtaaagcttcgcttgattttggaacatcaaaattaagtagttgctattttttcaaaatgtagtttggtggaggtgcaagga

SEQ ID NO: 11368 - DNA, 470 bp, Oryza sativa
  Intron number 1 from transcript LOC_Os01g66640.1 (locus LO C_Os01g66640) derived from phytozome v7.0 (chr-ID Chr1; po s 38703795 to 38704264)
tggcaagttcgctctggggttcttccagcctgcaggtgagcattttctttttatttctcagtaagcattcatataattcatgcaatagctaatcaaatgaagcaaggtttgaattatctagaaacagaattaaaacagtagtagtaatgactggagagtggagatatgtaaaccgctaggatgatttaccacgctatgagattacacttcccgattgaaggatacttaaaaaaaattggagcgccatgggcggtctatcttgggccgtcccagcaaaataattggagcgtcatatttattttttttcttaattcttagtaaaactataaaaagaaggaagcaattcatcatggtttatgtttaaatgtgaggagttaattttgttcagggacctttcatatggcctgacatttttcttctttcttctactcctagctggaggatcttctagcaggtggtacataggcata

SEQ ID NO: 11369 - DNA, 815 bp, Oryza sativa
  Intron number 1 from transcript LOC_Os02g46380.1 (locus LO C_Os02g46380) derived from phytozome v7.0 (chr-ID Chr2; po s 28261678 to 28262492)
aggaggtccagatacagatcgcaggtcaatcaaatctttcccccccttcctctgtcgaaagcctcactgtttagctatgtccgattttcttcgttgagggagtgggggtgaggaggttagagtcgtcttgcgatgggcggcggtaaacgcagatgaaatgaactcgttcgttctctcgggcttatttggtgttcgatggtgtggggaagtaagcccgcgaggtgttcgatgaattgccttctcgtgcgtggcgtgttggatatggccatatgcccatatgggatttgttttttgtttatagaccatattaacttttcagactatcgtgacatcatcgagtggcagagtaggcatgtgagtttaattggcaaacccctgttgttcgcgtacatgagctggataagtggttgatgatagcaccagctatagtaatgcactgcatttaacaaaagtaaaatctttatattagtttttttatattagtgcaggatttccctgagattccaagtaactcgctttcatttgatagtttcaccaatggacaatactgtaaggatggagctatagtcttgtgttgctcgactttctctcaataaatttagagcttttggggtttatatggccaattgttggggggaaaaaaaggagaggagggtttcacttcactatgggaactttggtagtctattttgaataggaaaagaaagtttcagttggccgtgctatgcttaacacatgaagtttgggctaacctgttgatactgcctaccttctgtaacttgcagattcatccaaagctgcaacttcgtcaactc

SEQ ID NO: 11370 - DNA, 926 bp, Oryza sativa
  Intron number 1 from transcript LOC_Os02g49310.1 (locus LO C_Os02g49310) derived from phytozome v7.0 (chr-ID Chr2; po s 30129636 to 30130561)
agttgggttcagccttccgggctcagttcagtctggtgagatttctcttctcctgcctttttctcttcttctggtgcccaattcggttcttcagagaatcctctgctttggccctgtagatctgccttggcttgatcgtagtaaaccttttcctctctgtttttatctttcttgcaaagaatgtaagatttcagtctgctgcattttgcagagagacgagaaaagggctttccttttggcgtgttcttgattcttgctttcctcacctttctgcgctcacaaatgacatgttgacattttactggaacgaggtaggccgattgatatgtgctaccactttgtttatgcaacctctcggaaggaatacatcaacaggcacagcttttgctcaactagagtgatgctgtttaatttagaagaaagaaaaggctccatttgccatttctctcttttttttggtggcccctttcatgtgctctcatctgatcaaacacttgtttattgtgaaagggaacgctagatctgtagtgtgttgcatgattattggccttagtggagggttaggcaggattgatggttttaatgccataggaaggagctctccatggctttagctttcgtagttaagcagacaaattcctgtgtgtggcacacaatagtgttaagtgtccatttgaggggaggttgatggagaagggtgtggactgtggaggccatttcttgatgtttagttttcttgactgaaaccaaaccattgattgacttgcctacttttaaatatcttaatcaggtaattagtttgttgttggccactacatctcttttgtttgtttggtgaatctttacctcctagtccaatcatggaatgatagttggtttcatgaatgcacctttgaatttatcagatttttttttctcctttgcag

SEQ ID NO: 11371 - DNA, 970 bp, Oryza sativa
  Intron number 1 from transcript LOC_Os03g05470.1 (locus LO C_Os03g05470) derived from phytozome v7.0 (chr-ID Chr3; po s 2706794 to 2707763)
gtcgttgtccgacgacttccatccctcacaacagcgtaagtcccaagaacaaattaacacgtgaatccatcctcctcctcctcttcttcttatccataatttctccgcagcttttagggtgttttttttccttgaaaaagtttcaaatacgatacttttgtcggccaaactagtcctttttttgtgtgtgttgaagatagtactactatcttgttcgtcaacggcttgcggtcaacgcgtacgatagtgtttgtacggcgctgtaattggagaggataatctcatgatatatgcagaagtaatatttgctcacgtactaatggtagaaaaaatatgtccagtgatgacaacatttcgaggtatttttcttcggttgaactcgtacggtgtttgagcaaaaaaggtttgatttcttttcctttttaaatccgagggtagtttggttgtatgcgttttgtggcgtgtgttcatcaggatggtgcctactcatctaagatctcttagtttaatcatacgtgtgtaacactctcgaactgcttctttattgttttttgatttgtctccacttgatcctggacccatcttggtcaaaattcacctaccatattccatactataagcgaacctatctataagctatcatttcttgatccctctctgatcaaagcagaatttcaagctctgtaaattaacatggatgatcatgcaatctccatgcaaagtattgctctgaacaataaatatttcagtagctcatgccagagttatgatgctcatattaattaattaattaattaatataggtgtcgttgaattcattaaaaaatgtggatgcgaatttttgttttcacccttttcactgcaagaattatcatcgttatgttttttccccacctggttcagatacttatttctgttaattgttaaatcatcagtatcacagtcgataagctcacaaggttctagcagt

SEQ ID NO: 11372 - DNA, 981 bp, Oryza sativa
  Intron number 3 from transcript LOC_Os01g63890.1 (locus LO C_Os01g63890) derived from phytozome v7.0 (chr-ID Chr1; po s 37068778 to 37069758 reverse strand)
cagaccgtaatctgattgcaaagtggaaaaaggttagtattcgacccatgatttgctctgtaagatgcccatcattccttatactctgtgctagtttagtaagatgccttatccaccttgtataatctttaagactttaattaacttgtgtacaaagataattcagatgaagccatagacccctggatacaccgctaagtttctcacattttttccccatgcttagaatgtaacttaactgcttgaagccttgaaccatactttttgtacttgtactatgaaaaataaaacactaaactaaccgcatcctaccatttcttgcagtaaatcaattatattgggttaagctatcacatactgatctagtttgacatgacacatcataaatcttgttttagaatctaatctatatgtatgaacctgcgattaatagctgtatgtcaaagttgagtagtgccttattggatttcttgcaatgaaccgtaggaaatagtgaaataatgcagcatgagtgacgtggggatttatggactagatattctcttatatgggtgcaccatgaaaaataagattttgggagcaaaaagaaaaggcagttgactaaaagatgtttatatattttccgctatgtatttttattggcatactagcagctgatgtaaccagaaatcaaatcatggatagacttctaacacccaatgatattttttttcctggacatctgataaaagttggcagatttgggagggatgcaatacttgtgttccatattactactttatatacttgtctgaacattgataacgaggggcctaaattgccctaagaatattgtgagacgtacgtgacgaattcaactgtcaaagttttcagtcactttttagatgcaaatccagaagatgcttttttgtcacaagagtttgtcaggcattcttatatcaaatgtatcattgcttctttttgtgtgttttcagccgggtt

SEQ ID NO: 11373 - DNA, 575 bp, Oryza sativa
  Intron number 1 from transcript LOC_Os01g59130.1 (locus LO C_Os01g59130) derived from phytozome v7.0 (chr-ID Chr1; po s 34158013 to 34158587 reverse strand)
gacctcgggaacccgccgcctcgcgcacctgggtggtaaggaatccctaggctgtttgaatttttgttcttttcttttacctggtgggtggtgtgtttcttcgtttctgcgagcagtccagttcgttgtgggtggatctgcaccctgctaattaatccaactcatccttttttttgtgtgtatgtgaatctattacacccaactgaaccaccaccatgtccctcgtttatagactacctctgatacatgagtgtggtttagttatggttagtttgaatcgatgctctatactactgttttagcaatttggctttgctactgtttcacaaaatttcatggctaaagttgttgggatgggcttgtgaaatccgaggcgtaccaaataaaaatctgcgtgaatttaaatgatttttggatttgaaaaggtagacctttgactcatcttgtttttttatggccatgacttgtatgaactataagtttgattgcagaactcacatatgcaaacaccattgtagttttgtcgaacactaaaaatagatgttcttggtcaagttaggattggagtacttcaa

SEQ ID NO: 11374 - DNA, 532 bp, Oryza sativa
  Intron number 3 from transcript LOC_Os01g11570.1 (locus LO C_Os01g11570) derived from phytozome v7.0 (chr-ID Chr1; po s 6242686 to 6243217 reverse strand)
aaccggcgagaatccggtaaggatggaaggaataaccagcagatggttttaatcggttttatgttgctatatggtattcttgttgcatttgcctgttaatgacatgatggtgtatttgccatcctctgtttattttatccatggcattaattcatgctaattgtcttagaacgacaacaaaggagtcaaccaggaaattagtccgataaaaattactctgttcaagaatttaaaaccgagttcataatgcaccagcacagtacagggtatgcttatgtttgatttatgaacatgtatccataagcagatttgaccaacatgttgtctgtatttctcatgtaaaagtatgtgtattctaaattatgggattatttcatatttggtttatcgggtatatatccagtcaccacttggtggcccttagcttgatctgaagatccttttttcaagttacaaataaaacagtgtgctttttttttgtaaagaggatttgcaaactgtacttattgtccctgtctttccttgcagggac

SEQ ID NO: 11375 - DNA, 651 bp, Oryza sativa
  Intron number 7 from transcript LOC_Os02g51119.2 (locus LO C_Os02g51119) derived from phytozome v7.0 (chr-ID Chr2; po s 31272427 to 31273077 reverse strand)
agttttccttccctgtcgtccaagcacccaacagtgtaagaagcttagaattaaatgagggaagaggtcacttgtagggggtttatagaggggtaattagggtcaaacctctgagttcaaatgctaaaagtcggtccgtggaaacctatgcagttttctattcagatctgaagtgttcataccagttctatttctacgagtattccttcctgcattagtatgatcttgttacaaataactagcggtaaaaatcttgcaaatagatgtgtttttgtgctaatactccctccgtactcgtaaagaaagtcgttttggatagcgacacgatctccaaaacacaactttgacttctcgtttctataaaaatatgtatacttttatgaaagtatttttcaagacaaatctatttatataatttttacattttcaaacttaacaacttaagagttatttatgatttctattcccaaagtttgacttaaacattgttttaaacgattttctttacaagtatggagggagtaccttttaaattattgtgtgctaagcaggtgacatgcactcttgttttacagactttttacggtggagtgttaacatatgtagatacattactaatgcttattgcttcagttgtctgccctttgtagc

SEQ ID NO: 11376 - DNA, 841 bp, Oryza sativa
  Intron number 1 from transcript LOC_Os01g65530.1 (locus LO C_Os01g65530) derived from phytozome v7.0 (chr-ID Chr1; po s 38030458 to 38031298)
gcgaggaaccctacccgcaccgtctacataggtgagcgtctgtctcctcttccccctccccgcggcgctcgcggtggcttcagattttggttttagttcggattggagtagattgatgtacacctcggtgatttgattgatcaattagttggttggtacttggtaggttggttaagttgtatgatgtttccgtggtgtcctcggttagcgtggttacgcgtgatttgtggatttagcgtggttgctgttcctctgatttctgatgggtgcaactgcaaatgtatcgttgaaaggattcctgttgttccccttgtatttcttttactggctaaaacgatgagtgcatttggaaatagagctgctagatgctagtatcaaagcttgacaagtgattgcactgttgctgctatgaactttacttgataataacgttggactgtgtttcacaagtagcatttcaatttctacacgtttcttaaacttacctggcatggagatactgaacttccacttttctctctttttttttttggttgcgaggaacttttagtcttttactgtttgttgcattagtgaatctgtagcggctctagtctattgaacttttctccagttgttagctttcttagcaattctctgggctatgctaatttattcggaaccttgtcaatttatttgcctgcaaatgcaatgttttttgtggacagtcctggtgtcatctggtattgtttgtatgtatattgtatatctagtgttttatgtagtctaagcagcttcatttctctgtatcagagtattgtattaattatattgcaattttttcctacaataggtaacttgg

SEQ ID NO: 11377 - DNA, 436 bp, Oryza sativa
  Intron number 1 from transcript LOC_Os03g24090.1 (locus LO C_Os03g24090) derived from phytozome v7.0 (chr-ID Chr3; po s 13675105 to 13675540)
ctgatcttggtgtgtccttcctcttcttctttgttcctttgatttttttggttcagaacaattaagcaagcatttccttttattaaaaatgtgtttctctctcttttattggctttctgagcgcatctgttgctttttttctttgagattagtttcattggtttaccctgccaagtatacatgttcttccatctgttcagttcttgttcttccctccccttttgattcggctcctgggaattttcttatccctgcgatttttttttaccgtttgcttgcacatcatcacaaggcaatctataccgttagattgtttatactacaagtatatactggtagtacattgtaccataaaagttctcctaaattaatctgtttttgtttaatcgtttggtcttaaggtggttggacggttagcatcttcctcctcaagctg

SEQ ID NO: 11378 - DNA, 693 bp, Oryza sativa
  Intron number 2 from transcript LOC_Os02g57180.1 (locus LO C_Os02g57180) derived from phytozome v7.0 (chr-ID Chr2; po s 35008062 to 35008754)
gtccgcaagggaaccggagggaggtcgtctgtgaggtgaggagctcaggctggttccgttcctccgattgattctatcgggcattcccgttgtcacgagtctgcgtctaggtttggccttcccaatgatttggtttaggttcattaggttgtgataatgttctgatccatccgtactgtcatagcagatatgtgttccttagaatggtcttcctgatgcttagatcgtcagatttgtgcagttcgtatggttgcatttgcgatggacctgttcttgtatacttgtgcatctcgtggaatttggagttacctgtaacacagctaggccttggaaattctgtgccctgaaaaaacagagagtcgattttagttattatgagctgaattggagctctggttgacagatatgtgatgttgttctaccaaatgtatttgatcctacttcccacatttttttgctaggtttgagaaaattcatttgccatttgcatagggtgttgagtgtacgaattgtggtactaatatttatcttaaagagtgttacttgcacatttgctggtgtttgttgcatcttgggagcaatgacgatcaaattaggttaatgatactcttaacctgcaaattttcctttgaatttataacaagaaatttcgtgacagtggaatcatagctacggtgtttggagctactggat

SEQ ID NO: 11379 - DNA, 679 bp, Oryza sativa
  Intron number 1 from transcript LOC_Os01g45790.1 (locus LO C_Os01g45790) derived from phytozome v7.0 (chr-ID Chr1; po s 26008796 to 26009474)
aaggcagtctcggttctggttggtttttttaataggtgacgattttttaaaagaatcggcactatatctatattataggtgtcaattctttttacaaaccggcatctacagtattggtatcggttttttatctagaaccgacacctataatgtaagcaagcataggtgccgattattttaaaaaaccgacgtctatagtattagtaccggtttttttaaaaaccgacacctatattgtttaaaagtgtcggttctgtattttttcattgaggcagaagtgggagaaggtttaaaaccagcacatgtgagccgacaccaatgaaggtttttgttagctgaacggaaggcccatgcacaaatatccaatacggcatgagttgtggatatacacgttgcctagcaccatgccaatcggacggcataaaaatttgattgaatcagccataaaatctgtcgactgatttttagcaacaccatacttttatactcttcttgcgtgtttatatattttcttaaataaatgagcggtgaaaagtttaggatataatacgaaattatttgaagacagagtgagtactaattacagcaacccgtgcagtggtacatcatgtgaaaaaaatagaaatgctagatgttgtatacagatcgctcggtctcggtgactcaagagaatttagaa

SEQ ID NO: 11380 - DNA, 539 bp, Oryza sativa
  Intron number 3 from transcript LOC_Os02g10400.1 (locus LO C_Os02g10400) derived from phytozome v7.0 (chr-ID Chr2; po s 5472815 to 5473353 reverse strand)
acattgaaggtgtgatcacaaacatatcccatacatgcttcttcatgagtatctagtatcatcttgttttacctatccttgaccaataacgattttctttcctaaatctggtgatgtgaaatgaaatcactttagcagcaatgtagaggtataatgagtttgattgctttagttaaatatttgccccttcaagttttcacttgtactactttttccgtaatgtagattgtaaatctgtactgtaggaacaatagctttcaaattacatttttttgcataagaatacttctaataatttaaattatctgttacatgccccaaaaaaaatgaaaggaaaatcaggacggaaccattacatctagctaaacaggaaaatggcatggctttaaatgatgaccattgcgtttcccattatacttctcagctcgttttagcactgcattaatgaatgtacaatgtgcactgcagaaagatttatataaccattttcacaattctctacaggagtactaaaggagttgattcaacctggtatagaa

SEQ ID NO: 11381 - DNA, 929 bp, Oryza sativa
  Intron number 1 from transcript LOC_Os02g10400.1 (locus LO C_Os02g10400) derived from phytozome v7.0 (chr-ID Chr2; po s 5473993 to 5474921 reverse strand)
tctgccggcgataccttcctccgctcctggttcaggtacgccatggctggtctggtttgctgggacagtagcggggggtttgttcttttactgtgagaagaattcgagagcagaaggtgagtaaatgggggcagcaaagtagagtcagcaaaaaaaaaaaagttttagcttcttccatgcattaatgttgaatggtcttgaatgatgagctaaattttgccttcgctgggcatagatagccgtctcttagatagcaatttaactatttaaggctttaggatcattagctcctcaagatagcttttcgtgggtaagttatactatctttgaagtttggctagtatggttaattggtttggacattagttgtcggttcctgtcgcatgcagcttgtgttgcattcgatcatgtaatggactaatgatcatgatagcacttttttagataatggatccacatgataggacactaattaggagttttaagattagtggctgtggacatcatgccatggcagaactagtcaatgactcaaggtcctggaaaatgttaagcttccaaactggcaccatgctattcttagacttcatcagatgtttagttcttgtaattcagtgtacattgaaaacccaaatcctgcgaataacaacatggggaggagagcatgtcttgaattcttttatgattgcaaactttgttaagagaacatgaggctttctctgtaccattttcagctgataggaggcacgccagtagcatgttgagctatgtcaagagaaaagcatctttggcctgttctctttatgtaatttatgaactttgccctgggtgggcttgtatagtatggacctttggatcgcctattgagaattttttgttgtaatttttgtgcagtagtgaaagaaaaacctggcacagcccagccttaa

SEQ ID NO: 11382 - DNA, 898 bp, Oryza sativa
  Intron number 2 from transcript LOC_Os02g12130.1 (locus LO C_Os02g12130) derived from phytozome v7.0 (chr-ID Chr2; po s 6311731 to 6312628)
agaaaacttctccgacggaaataaaattggacaaggtagctttggctgtgtttacaaggtactctcttcaatagaaaaaaaaaatgtcatcctagatttgcgttcaatcatcttctattcattttagtgagacatatatctagaatatgtaatttggatttaccaaaataacatgattattttttttcatatacatcttcaatgaagacaagccaagaaaaattaattggttgaagtgacttcttattgactttgcaaagtaaaaaaggaaccaccttatcttgtccggaggagtaatgaatatgcttgcttcacaaaattcagtttccatactttgatatcataagaaacagatcatttgcttttcctactgttattcatgtgtttactgtgattccaattcatcctaattaatctttgaggatattgcaaaaatcatagctatcaaacgacaatggaatgtgttgtaactttagaaacttcattattatataattggtttcttctttaggtcaactgcactttttgtttgcagtcagggtcaactgcacgatgggcttgaggtagctgttaaaagatgttttgagttaccttgttcacgtaatcaaatggatttccaagatttggagttccaaaatgagatttgcttccttgggaagcttcagcacaccaatgtagttaagcttctgggatactgtattcagggaacagagaggattttggtctatgagtatatgctgattggaagcgttgataccttcatctttggcatgtgttcagtattacttcacctcaattttggatcaaaagttctgtgcagactatgcttagttaatgatctcatttgtgtttccattttataggtgcaagaacaagaaggttgcatctggactggtct

SEQ ID NO: 11383 - DNA, 864 bp, Oryza sativa
  Intron number 1 from transcript LOC_Os01g39430.1 (locus LO C_Os01g39430) derived from phytozome v7.0 (chr-ID Chr1; po s 22216785 to 22217648)
cgttccggcctggacagtatacttctttgatatatagtataattagttagtggtacatttctttcggcctagaaaacttcgattaattccttatatctgaatggtgccacacagatggcggttaagaagtgtgttataacatatactcactctctcccgaaaaaagaatcctagaaatagatttgaaactacctaatggagagtgtcgtagatagagaggttgttggagtgaggaatgagtttggcacaaattaattgaagagctgggctatattcctagtgtaataagtctttgtttagttcccaaaatttttttcccaaaaacattacatcgaatcattagatacatacatggagcattaaatataaataaaaagaaaaactaattgcacagtttacatgaaaatcgcgagaacaatcttttgaggctaattagtctatgattagccatcagtgctacagtaacccacatgtgataatgaaagattaattaggcttaataaattcgtctcgcggtttccaggggagttacgaaattagtttttttattcgtatccgaaaaccccttccaacatccggttaaatgtccgatgtgacaaaaaaaaattttcttttcgtgaactaaagagggcctaaattcatttgcactgataagtggagtaatcatgtattactaggtactccagtactaatattttaaatccaaggtagtactagtagctagtcaagcatgcagctggcagtcaattttttatgtatatattgacaaaaagatttcacagtacgtactgaattgttgttaccgtgttggtctggtggtgtatgcatgcactgtcagtttgccaggtaaaagctttgcaagca

SEQ ID NO: 11384 - DNA, 814 bp, Oryza sativa
  Intron number 2 from transcript LOC_Os03g21490.2 (locus LO C_Os03g21490) derived from phytozome v7.0 (chr-ID Chr3; po s 12277575 to 12278388 reverse strand)
aaggtaaggcgcttctgatcgatgctttcatttcttattctgccaaaaaactaaatattaggacaagaactttgctaggatcgacactgtgcggaaatattgcctgttacctatgtaacacttctgttcctgtatatttttgtttttattagcatagcatagcagattgtctcgcacaattttgcgaggagctaaactttggaagtcgaattggatttagtatacacctctcaactttgttttcacctgtaacagttgtattttgtatacaatagattattaaggtgaaattgaatttgataaacaattctttagcttctgatggaattgtactttgtatcacgctacatcgttaatttggaccaaccatgatctaacggtgtagatctttctttttcctccaattaatgtggtaatttatagccaccaaagcgaacatggtgactcattttcaagctatcttaataatagataatacatcaagtgttttctgattgcgatagaattgtttatatgtattgttgccgcctggcttctctagtatttgcttctgtgagaaattgtgccatccatgaaagaggtttctggttgcctcgtgtgtattcttagtccagattaagaaagtgcaactagaataatccagtttgtgatcttgaagttcaagtgcttttggagatcaacccctaagtgttcaatgtgccttcccaccatcctgattaaaccgagaaactaaccatgtttgttactgtgatatctaaaacttcagtgaactgttgcatcctttcgtctcaggttctggctgggcatccagagt

SEQ ID NO: 11385 - DNA, 694 bp, Oryza sativa
  Intron number 2 from transcript LOC_Os02g20870.2 (locus LO C_Os02g20870) derived from phytozome v7.0 (chr-ID Chr2; po s 12346784 to 12347477 reverse strand)
gagttggggaaggtgaaatgtttctaatccctttcacaatatttctggcatttttatgcaagcagtgaggactcttgtccctttggttgtatatatcatttactatctatgtattatttatttgtcactattgaatttactatttaagttttgaccactaatatattttaaattgtttgattaaaatgaatgagagtcttatcattaatttgttaaccaatgttagctagcagtattgtgtacttctaaatgtttacaaattacaattcgttgctggaaaaacaatcgtcaaaatttatgcagtgagttcaacagtgataagtacatgaaaaatggaaaaaatatgtttgagttctgacaatgtggacatatgctcatgatttttcttttgactttgaaacagtaggggaatcccctatggtatattttatattaaaggggcgtttatgtacaatgattcactatttaatatcttcttgaggggtgaaaaccatttaatactgcaatacttcttgaagtcttactactaaagaattttccttggtgtttagggcagctctgcttcaatcattgtgtactatgataaactatcaccagaaactattgttttttaattgccatctcatctcacttcatttatcttttacgttatcttgcagcaataccctagagcatatttgaccgattctggttc

SEQ ID NO: 11386 - DNA, 942 bp, Oryza sativa
  Intron number 2 from transcript LOC_Os02g12260.1 (locus LO C_Os02g12260) derived from phytozome v7.0 (chr-ID Chr2; po s 6386049 to 6386990)
gattgccggtggtgagatcagcagcacggcgatctctcggaggacgatcgacacccaacagtaaggccaacacaacacacgtaatgaaaataaacattaagtaaggatactgcatataacaggaaggtaaaactaattagagtaaatttcagaaaactacatgttgtatggttcaaattgcagaaaaccacacatattttgacagttgacacttaagtacatatattttggtagtttagtttcacaaaaccacactatcaatgaatggattcacccgtgagatgatgtggttgttccatctaggatgaggacgtggcatcctattaatttcgtgcaatggctggtaataggatgccatgtcctcgtcctaggtgaaacagtcacgtcatctcgcgggtgaatccattcattagtagtgtggttttgtgaaaatacactaccaaaatatatgcacttaagtgccaagtgtcaaagtgtgtgtgattttctacaacttgtactacaaaacgtgtagttttgtgaaatttactcaactaattaatactccctctatctcaaaatataacaatttctagcctttagaatttgttctaaaatataacaattttttattaacattcttttcctaatcaatcacaactctccaccattcagttttcttacatacttccacttcttgtctaatcataaccttcccccatccaattctacctacttttttaataattgtctccaattctaaaaatgcttatattatgggacagagagtatataattaattaagtttaaaaaacatgttaataaaaattgagatagaatttgtatcttaataaaaagaatgagatttcagtactacgagtatttggcagtctattaactggtaccctgatcggccagttaggtgacattaattgttttttttttgttttttagaccctggtg

SEQ ID NO: 11387 - DNA, 854 bp, Oryza sativa
  Intron number 1 from transcript LOC_Os01g27380.1 (locus LO C_Os01g27380) derived from phytozome v7.0 (chr-ID Chr1; po s 15288303 to 15289156)
gcgagcagaagagcccggcgcatctcgcccgcaacgtacgtaacgcgatcttccctcttcactctcgtgcaaattcaaaacttctatgtagctgagaaagagtcagaaccaatctcagaagtagtactacttcatgtagcaagattaggatatgtaaaatggttgttaacagtggtctcttagcgttgctaattaggaatacttgttgacatggaggaaagagaaagaggagagacaaaacatcgttgttagggcatgtacaaatatagagtcggatatgagctctacgttatttagagactagcatcctacaacagttagagacaatatggtctctaatcattaatgtatcaaaaatactttttcttacttttatttcctttctttcaccaccatgcaacaaaatttgctctagtaaatgctaagagtcgattctgagccgttgtcatgcataacaaccatactcctttctctttcctctatgtcaccaaatttacttgcatggcaatagagagagaacactaataaacaccgttgtacatgcccttatacatgacaacggcttaacaacgactcttacactataatatagaaatatggttgcatgaggataaaaatatggaaagaatattaacaaaaggaatattttttgagttaatgattagagtctttgtcgtctcaactattataaagacatggtctctaaatatcttgtattgtttaagagaccatacctgtctctaccattgaacatgcccttagagctaagctagatttgccctcgtatgagtcgatctttatttgttttctttctatctgctttcagccattcggtcaagttccagctttccaag

SEQ ID NO: 11388 - DNA, 764 bp, Oryza sativa
  Intron number 2 from transcript LOC_Os01g27380.1 (locus LO C_Os01g27380) derived from phytozome v7.0 (chr-ID Chr1; po s 15289160 to 15289923)
gcgatcttatccttttcggtaagatatctctaggggaaaacttgtacatactctagaactgaatagaacactacttaatataaagaatctaaacatgctgttttgtcatgattcgttgtaatatatggtgttctatctaatcctactgttagagatatttgtgtgcatgcatatcttattctgtttttgccgtttatctctcacaatctattccgattttgtttctataagtcggttgagatattgtggagaggtagaggctatatgtacacatgttgcgcgatgaatctttttatcgtgttgagctatccctgctttcacctacattgatatattataggacggagagagtaaatgttataactttgatgaaataatcaaaagttcaaaacataagcatacttgtagggtattttggtaagttttagtctagactttggtactttccaatacctaagtcaatgagaaatatcaaaatttgtattaaaaaatatgataaccttttaagagatagggagaatacgaaaaatgagatacttagggtatctacttatataatccactcgtatatttttacgcctcgtaacaatacaaatgaatgtgaatacgtaaatttaactaagctgttgtcttctctgccatcgttaccaagttgtcactttcttttgtcgattgacagagtctcgtgcaattgcaaaatatatactccacttcgcaaaagcgcatcagacttgctgaaggaaagcaacctctcgcagtctgca

SEQ ID NO: 11389 - DNA, 785 bp, Oryza sativa
  Intron number 2 from transcript LOC_Os03g33580.1 (locus LO C_Os03g33580) derived from phytozome v7.0 (chr-ID Chr3; po s 19188793 to 19189577 reverse strand)
gggtttagcgccggcgccgaccacaccgtgcgtaggtcagccattttgagttaaccccgttctcctgcctcattcaactctttgcacgcggttgatttgacggttcaggaggtttgttctggatactgtcattttcaacaattgctcctttatatgcttgctcatgatggtttgggatagtactccctcgagtcaacttggagcatcagtactatcgtaaccagatttgagtagattttttttctcaatctcatgacactataattttatttagtttccaaattgtattgttatataaaatagtgcttaaagttgtctttcataagctgtgttaccgtccaacggccagaaaaacaaattgggatgcaattgacacagatgatagaaaatgttaagggttgttaattcgggatcctagttagaggctggagaaatggagtagattttatgctcaatggaccatgttacaatgccatggatgtatttccccgtataacaattaacatgtatgcacatatatgtatatattcaaatacatataatcagctactagcgtcattaagcaaccatgaacacatgagtgaactaaatgtttcttgtaaattcagttgtctaaactcaacactttgttgcttgtaaataggcttatattttttcttattgatatcatcattagctcatccttattatattctaccataacgtgaagacttggtaagactaacaagcaatggggcacgtgacttccaggttagtatttggttcagcaaaagaggatcttttag

SEQ ID NO: 11390 - DNA, 991 bp, Oryza sativa
  Intron number 1 from transcript LOC_Os01g12650.1 (locus LO C_Os01g12650) derived from phytozome v7.0 (chr-ID Chr1; po s 6966945 to 6967935)
ggagcccatccacaaggtcctcggtggaggcaaacgtatggctgctctctctctgctgatgatctctctctctctctgtttcaaagctgatttggtttgaatttgttagagcgggtggggatgggctggatctggattgattgggagtgttgggtttcgggctagatctggtagattagcacttggccaatgggagtagggttttagccttttgctatgtgtgaccatctattcagatctgtgggtatttggggatgagtttagatatctttgacaaatcggaacaactaatgtgatcctcgctgtgctagttaattcaaatttcggcaatgcaggttgcgtgcgtctcgtatactcgtatacaatctgatctatgtgatttcattttatccgtatctttttgagtaagtagtggacatgtttagctttgatgaatcataagcgattgtggcaaagagaaaaagatatgcttgtatgtgtcaggatccatgtgaagcggggttttgattgacatgtaaaaagtaatggaataattgaattcatgatttccttggttggtctgtcacattattgtctgctggtgtgctagtactggtccctttagagtgacaatgagcaagaattgaactgtttgtaaacagtatgtgtttgaaggttagtgattagcaatagtgtactccgcctcgtcacacagttaagccgtagctaacacaatcatattgaatgaggatgtacctcattctggtgaatccttatcaatagctacaaaggattactataagccacatatgctgttgattattgctatatttgtctgggattgttagtcttctgctgtcctgccttcaaaacaaacacctttgctctctccataggggtggtcatattttgtggttgaggtgaaatttccattatgtgctcatgttatatagcctgattatccattgttcatcctgccatattgatttcagttctctatttgcagccgctg

SEQ ID NO: 11391 - DNA, 1040 bp, Oryza sativa
  Intron number 1 from transcript LOC_Os01g12550.1 (locus LO C_Os01g12550) derived from phytozome v7.0 (chr-ID Chr1; po s 6903898 to 6904937)
acccgcttcgagctcccccaattcctcgccagcaggtaccatttccatttcctcccgtggagggtttgcttcctgcgcagtttgttcttggccttttttctcgcagcagtgtatctgttgatgttgccctatgttagattggggccttcgttactgctgagtgctgacacgaaatgttttttcacctgttttgactgagtgagaattatgcgctagacggctagactatgcacttcttagaagtggattacataatctaggagaaattcttacctgcttaccgctaccatgaattgattctctcattagaagtggttttattatactacattgattaatccatctaacccagtgtgccaatattgcaactcgcaccagacgtttgggcatattgtccaccttgacgccagcacatagaatgccaacatggcaggctcaggctgtattggtttttgtttttctagaacctgctgaccatcagaccaaagtgggattgagccttgtatgtgatactccataacctgaagcaccgtagatgtgcatacagtgaaatgcaaatattagttttttttaatcttgagatagtttttttttttaaaatcttcagatactgaaatactactccctccgggctgataatacttgtcattttagacaagggtgaggtcaaactttagaatctttgattatgaatcatttttaaaatcattatctttcaaatatggtgattacatgcatatattagtcttaaaaagtactttaataaaatcatatatttgttaacacttttatacatattataatggaaaacaatggtcaaagttgttttttggagaccgtgctcttgtccaaaacgacaaatattatcaacccggagggagtatcatttgcaagtttctactttgttgaattggcttgcctacttagtactcacactatctgataacaatccaaattgttgattgtaacatataatggcatcataatgtattagttgtctactgaattgcacttttcaaatttattttctcaggactcct

SEQ ID NO: 11392 - DNA, 431 bp, Oryza sativa
  Intron number 1 from transcript LOC_Os03g06440.1 (locus LO C_Os03g06440) derived from phytozome v7.0 (chr-ID Chr3; po s 3218343 to 3218773 reverse strand)
ggggcgccgtcgttcgtcgtccgacgaatatcgcggtgagcatccatcgtttacgcgcttcctctttctcatccctctacagtcactacccacgcgattcttcctccaattttttgcgttaatccctaaccttattatgtacaactgttctgtttattccgcaaagccccccatgtcccatgttaacgaaaaagaagtcctgattttcttaagtattttatgctcctttcgatttaagataagattattacagttaatttgattttcggttgtgctaaactgctaccagttcatatgtttgatggtggacagcatatttcacattgtctaaaatggctcttctcatttcagagttacatcgagtgattatgttttcatattaaaactggtactaatttgcccaaacatttttttttatgtcaggattcaag

SEQ ID NO: 11393 - DNA, 747 bp, Oryza sativa
  Intron number 1 from transcript LOC_Os01g33800.2 (locus LO C_Os01g33800) derived from phytozome v7.0 (chr-ID Chr1; po s 18600454 to 18601200)
gtgatttccccgccgtcgccggggagctccgtcaggtagggttcgttccctatcgcatttttaaatttccgacgagaatttcctttggagtatgggttaagttgtcgacagacccgtacaattgcatcgcatgaaaattcattgctttgctcgaggcatacctctttttccatgaagagttcctagctgaactgtgtgaagtttcagtgctatttgtccatcttaagcagtcataacagtgaagatgaactggctgaactacatgtctaataactactaggaccaactatggccatattctccattcagttatgccttgttaagtccaatgcaattttcttttttgatatattgccttgtttaagtatctatagccatcaaatacatgaatagggggaatgccattgtcctaccctccaacctactaattacatgtttgattctcatcgtctgttgtcatattggcttggtttgtcctcagttacttgttctaatacgttgtgattactgattagcagatctacttaactcccttaatgcttcttagtatcatgccaaaactagtatatccacacctcttgttgattttgaacatgctaagtcatttgtcttatcagtttatgaatgatatttgtggcactcccagagttccagctatactgttatttcctatcctatggaccgtttctaattgccccatggaatagtacattaataagaatttctattaatttgcagcttcttcaa

SEQ ID NO: 11394 - DNA, 594 bp, Oryza sativa
  Intron number 5 from transcript LOC_Os02g48570.2 (locus LO C_Os02g48570) derived from phytozome v7.0 (chr-ID Chr2; po s 29731460 to 29732053 reverse strand)
ggcatccgaaagatcctccacagcgaccagatcaggtgaatatcttgtttgaacgatgtgccaatgcactttgatcgatttgccgtttgactcaggcatcaaacagtgttgattcgagatatataatcgggagtggattctaatccctcgaggggatatcccctcgtatacctttttcttctaaattcgatgtaaatagttgtgaaaaattctaaaattttttttgacaatgtagagtataatgatacctactagtccaccaaaattcaagttcaaattcgatctacacatcgagaaaaaaaaacaaatttagatataaacagtacgctactattcatatgctgaatttgtcttttttatatctcgacgtgtgagttgagtttggacttaagattttgtggagatgtatatatgtgttgtatgaatgttatcaaattttttcagaatttttcataaccgtttagataatttttaagcaaatgagggaatatccattcgagggattagaatagtttcctatataatcgatgtgcatttggtggcgtgttttggtgttcaggttccttgacaaggcggcgacggtcaccgaggagg

SEQ ID NO: 11395 - DNA, 1030 bp, Oryza sativa
  Intron number 1 from transcript LOC_Os03g01130.2 (locus LO C_Os03g01130) derived from phytozome v7.0 (chr-ID Chr3; po s 100052 to 101081)
gttcggcctcggcatcttccactccggcatcgaaggtctatatcactctatctccttcccccttccttgtgcgtagatttaccttctctacgccacgccacgccccgccagggaccctacctctaacctggtagtatagtaggcgtactccagataggtcaggatcgaggtaccaccacacctacatgccttgccgtatgccgtatgctgcttgcttccttcgggacctgctttgctcttctactctggagtactaccttactagtaccattttcccccttttcttttctttctcttgtattattattaatcccaaccaacaattctcatgctctacaattcaccacatcctataagccccccccccccccctacacggcacacgccaccaattcttgtgtgtgcctaccgttacttctaattagaaacaacatgtgcaacttaccctaacaccctgtcaatgccccaagtccgactctctaccaggcaaggttcacattacttgttgaccaccggatttatcacgctttgggacaaaattctgcctgcattttgatcaagtttactgtttaccatttgaatttgtcaaaaccaccaaatattccaaccgaaaattgatttccatccgcatcgaaacattgaaaacccgcgaaaaccaatcggctttcattggctctgcgaaccctgctctctacgcgcagcctgtatgtgagctcagctgttcaatcgcctcatcgagacttcatttggtctccaaatggagtacaaacggcacaaacctaagcagtattgctttgctatatccaacttttacccccccccccctttttttcttttgctacacacgtatctagcacatttgctatatattacttgtgggctggaccaactgttatttgttctaaggtcttcagtctgctgatgccttagctgctcatagaattcccatgtttgctttgcaaccattactttttttttggtttgacatccagggatcagcacctaacaactccaataccatttgcagtgc

SEQ ID NO: 11396 - DNA, 615 bp, Oryza sativa; identical to SEQ ID NO: 9549
  Intron number 1 from transcript LOC_Os02g35338.1 (locus LO C_Os02g35338) derived from phytozome v7.0 (chr-ID Chr2; po s 21247882 to 21248496)

SEQ ID NO: 11397 - DNA, 1013 bp, Oryza sativa
  Intron number 3 from transcript LOC_Os02g10970.1 (locus LO C_Os02g10970) derived from phytozome v7.0 (chr-ID Chr2; po s 5827753 to 5828765)
ccggacagctgagaacttcagagcattgtgcacaggtaatccttcatttagcttgttctcaggaaaatatatgatgttatctgaagaaacatatgttatataattttcttacatgtgattaaactttgtctcaaaatcctgagctggaaattgcatagtctgacaatgtaaagaatcctacgattaaatggcattctatagatcaattcaagcatgttaatatgttacagttttgctatacatttatcgacaaattttctcctaaaaatttgacatgtaaatatagcacaatcgtagtgtaattacatcgtaacttacatgtaactacaatgcaacttgtatgtaattttcaaaaatcttgcataacatgctattttcacgaagcagaggtcatgggaccaaatccccttatttgtgtgtgtgttgtgattctttttcttctccacttgcatgaatcttgaagcggatctaacggtttcaaaattacatgtaagttacattgtagttacatgtaaattacaatgtaattacactactattgtactatatttatatttgactaatttttaaaagaaaatttgtcgacaaatgtatatatagtcccatatgttatacacctgtctggactgttttttttttttgaaatttattttttgtcgccacatcgtgataatatgactggtgtgagctggagatattcagaaatcacatcctatacagcaggcgatgcgaatataaactgctgtaagcttgtgactgctattctggtctaggagttatgttctgtaccatgagcattaatgttttgtttagatatctactcattatctgctatgttgaagtcacgtaataatgtcggtggtgttggcatttatttacattttggtctagtactctagtgcccacatattcaagaagcactttagggactagccttttatttaagaagtcccaccctcccttatttgtgacactgttgctcttgctaattaaggttgtcatctccaggtgag

SEQ ID NO: 11398 - DNA, 621 bp, Oryza sativa
  Intron number 1 from transcript LOC_Os03g37270.1 (locus LO C_Os03g37270) derived from phytozome v7.0 (chr-ID Chr3; po s 20658687 to 20659307 reverse strand)
actacctgtacaactgcttctcccaggccggcgaggtgacgcgcctttccttatccaccttttttttgctgttgttgttgatggtgatgctgtgtttctggttacaaaattatactttgtgtttggcaagagtaatatcactagcttccttttgggtgctcggtaaaaaagggggacttttcatcagctatgtttggatgctcagtaaaaaaaggatcttttgatatgataaatcaatgttacccgatttggacactgaagttccgtcctttatttagtcagtttctaattttaggtctggtgggaatgggtgtgctgatagattcggttggatgtttacctaatttatacaggaagcagaggtcttctaagttaagagtgccatgaataccacatgctctgatgctgtgttagtgtgtgggcaatggtttttcttacatagagaaaaaaaatgccagtcttttttagcatgcttgttttggatacacctgaacaaatttgctgcctgaatttgtaattgcttgaactgttcacttcagatttgggatttacttttaacgctttgttgacattggtcattgatcagcttatctcagcaaagataattcggaacaagcaaac

SEQ ID NO: 11399 - DNA, 737 bp, Oryza sativa
  Intron number 1 from transcript LOC_Os03g01600.1 (locus LO C_Os03g01600) derived from phytozome v7.0 (chr-ID Chr3; po s 377932 to 378668 reverse strand)
gtcctcacctctctctctccacgccgtcgcttccggtactctcttctcaatctcaaactcgcctccctccccacctatttttctcgtcttcgctttgcaaataccatgcgtttctactacttgctgcctgcctgcgtgagtggatacttttgaactagaatggggagcgaaccttttcttctttttctccctcttcttttttttaaacagtgaatctcctaactagttgttgcccagcgattcgagcgtctaatcatacatgaagggattaagacgtggcgtttagctctaattgttggttacttgtaaaggtttaggctaaatgaccattaccataacaaagctgttcgttttccctattttccttgttctggactgttatcatctgaattcctaaataaatgaatcaggcacaactaagttgtctactgtatcattcattggcgtgtggtagtggctactctagactctagtgctgtagagtagatgccatctctctggtccttttgagtgaaatttgtgcttgattggccctactggtcccatcccatgcatagattcaagcctcgtctgatttattgtcatattgtatttcctactactagcaaagatgcatccgggtttaaatattttcaactttcgatggccttttgatctgatagaagaatatcttttttcccccacctcttcttgctactgcagatcaagaatcacacttattcagtgccacctccttt

SEQ ID NO: 11400 - DNA, 727 bp, Oryza sativa
  Intron number 3 from transcript LOC_Os02g48180.1 (locus LO C_Os02g48180) derived from phytozome v7.0 (chr-ID Chr2; po s 29488219 to 29488945 reverse strand)
acagcggcgaaaaggttacgtaaaaactagattaacctctttcctagttgatattgtgaactatcatataatgagcaatgtagcacaagaaacttgctaggatttacatctccagaaattctcttatggactatgggacaatcatttttaattgttaggctttaggctttagtttcttatattggccttgtttagttccaaactttttcttcaaacttccaacttttccatcacatcaaaactttcctacacacataaacttccaacttttccgtcgcatcgttccaatttcaaccaaactttcaattttagcgcgaactaaacacacccattgttgagaagcacaatgtagagctcacaaagcaaatgttctgtacatcgtacagttcattgtgggctctattatcacatgatgcagtttggcatttcagcaacagcaagcgaactgtctcttcttgcatctaataaaggctaaaatgatacaattcattgaaacctctatgttccacacatgtagttcactgaaaactatataatcaaatggtacagtttggcatttcagcaagtgaactgtctcctctttcctgtaatattgtgtggtctgtagtgcttataagattttagcatatagggaaaaagacaatgcatacaacatcctattacgggcctttaatcaatatttgttgattcaggagacatctcttcaactagttggctcagaaactgt

SEQ ID NO: 11401 - DNA, 883 bp, Oryza sativa
  Intron number 2 from transcript LOC_Os01g51690.1 (locus LO C_Os01g51690) derived from phytozome v7.0 (chr-ID Chr1; po s 29720463 to 29721345 reverse strand)
gggaaaaagtccgttaagaacagccctaatccgaggtacaaaatgctacgtactgtactgcctagctaacaataataaccatactataatgcatactataatgaggagtagtaccaattatcaacagcttagcctacggaatcaattcagttcagtctaggcatatgcataatatgtagtaatccctccgtcccaaaatataaatatttttagcataataacaagtcaaacattttaaattttaaccattctctactattataaaaattgaagatgtttttgcaggtattttggtacgtcattcgtgtatgagttggtttttaagttcggttgcttttgaaaatacatatctgtatttgagtcggttttgaagatcatacacttttagtaatacagaaagaatcatataagaaatctgtttaaaaaaactcgcatgctaacttgagacgatcagactactaactgcggctcatgattttctaaaaaagtatatatctaagcgaactcacacaatgaattttatcttaattaaaccatataacaataataagattaaaatagacttcacctattgcaacacacgggcattttttctagtaatagcaaaaatataaaaaatatcaatcatataaaattgatgttactagtatagatttatcattcaacaaactataatatgttactctttttatttaaacatcttaatattgtttattttaaactattataataatgtttggtcattggttaaagtatgatctcagagaccgtattagagtttaaaaatatttatattttgttacgaaagagtactaatttaatttcatggtgacttgaatctattgcaggaactactaccggtgctcgacggaggggtgcaacg

SEQ ID NO: 11402 - DNA, 962 bp, Oryza sativa
  Intron number 1 from transcript LOC_Os03g06760.1 (locus LO C_Os03g06760) derived from phytozome v7.0 (chr-ID Chr3; po s 3434869 to 3435830)
tgagaacctctgcacgattcccgtgtcacaagcaggtaatttgtaatccctcctgtcttctcttgttaattcgaacctatataatctgaataaatcaagttacgttcaatttcgaagatgatacttcatggttactttgatatgcggtgtcatttcaattgattggtggtgttgagtgtatggtattttcttaattggtatggggattgaccattgatgatagtgacaatgatttacatgctgtcatgttacagtaatagcaataatggtttaaattagccatgcataatcacattgagtttagttttagtcccacccctctccagattctctattcatctccctgtatattctgtttgtacaatgtcctctcttccatacttttgggaagtgattttttaaattcaattcttgcgtttctctatgaaattctcctgttgcatccattttcgttgccaattagttgcagcgccatgatggagatctttccaaaatttcctggggcaatgttaaggtgccaagctccttactgccaaatgccaaggaagggaggatgcacgaaattagtgctgatccgtatctatttctgtaatgtggactgtacatattatgtactcatatttaggatttcatatgacaagaatatcaccatctgtaggacgacctccatactagtttagtgactgtatagtgatcttcatgcttgtttagttcaaagtaatgctgaactcaacatgatctgtctgcgtgatgagcatgacaatgttaaccttaaaaaaaaaagcatgacaatgttgttaaaagaaggaagtaacaaataggctcttctgctggcctgaccgttgctttattttgtctgaacatgctacacattataattgatagtacttatcatatgacctttaatttccaacctctactgaactttattacctatgttgctttcattttacagttgaatc

SEQ ID NO: 11403 - DNA, 966 bp, Oryza sativa
  Intron number 2 from transcript LOC_Os02g05880.1 (locus LO C_Os02g05880) derived from phytozome v7.0 (chr-ID Chr2; po s 2916901 to 2917866 reverse strand)
agattgtaagttctccttctctgatgctttttaccagcaatgcttgcagaaagagatgcatgcagaagcgacaacttggtcattgtgatccattagagacagtaccgtctgataagggagcatatgattgatgtaactactcttgatgatgagatctagaaaccctccttttctctatcatttatatttgatatcatttgcgaatggacctctagctgagttggttaggtggctctagtagcactcctcaggtcctgggttcgactccttgtgggagcgaatttcaggctggggttgaaaaaaaatcccctcgtttgtcccacgccaaagcataggtctaaggaccagcctattttcacgggttacggtgctgctgtgtaagggtggggcaagggttcgggggttttcttgacctgcctgtgccgctgtgtaaggggggttagggggttttcttgacatgcgtgagaaggtcttaccctccctcccccgtcaggtcaagttttatatttgatatcattcaattagatttacctatgatgcatgatctgtgctattcaatcgcaatgcaaaatttgaatttgtaagattaattttatcaagatgagtgttgctatgagagcttttctttttgacctttacttttgcaatgtaaagatgaatgttgtttgttagttaatactgaaatctgacattttcttttgcatctggaagtgctgatacatgggctttttcgctaactaacggagctgttttacattttgtggatttaaatacttgatgttgcattcttctacttgattcatatgaatttagccttctttttttttgtattttttgtttctcatgaatatggcaaggatatatcctgcacagttcccatttatatttcctactgtaatactatgttttttatttccaacatgactgatacacacctttctgtcctgcagcgtacttattctataa

SEQ ID NO: 11404 - DNA, 706 bp, Oryza sativa
  Intron number 3 from transcript LOC_Os01g07770.1 (locus LO C_Os01g07770) derived from phytozome v7.0 (chr-ID Chr1; po s 3731838 to 3732543)
gaggcaaaaatttgcagctcaaggcctgacggaccgtgagctcgtaacactagttggtaaatcttcctccattcttgcttaatcatgcccgatacacacaattatatttatcaatcagtgaacaatttgtgtctcattttgtcatgagccaaactcagccctccatttgaaacagattattaatcggatgattgctgtggattatctacttgattatggtgataaacaaaatatttaagaaataaacttaacatgtaacttagaataaataaatggtctatacagtactccatccgttttagattataagtcatttaactttggtcaaagtcaaactactttaagatttgactaagtttataagaaaaataataacatactcaacacaagataaaaatattataaaaatatattcatctatagatttaataaaacaaatttgttattgtagatattaatatatttgtttgtaaatttggtcaaacttaatgtagtttaactttgactaaagttaaaacgacttataatcaaacggaggtaatacaatataataaacttattttaagcaaacatatttttagtggcatggagcctataattcgatgaagtaggtttatactccactgctaatgctaaccctgtgtgtggttcactgatctctgtaactgtaggtgctcacaccatcgggcagacggactgcatcttt

SEQ ID NO: 11405 - DNA, 489 bp, Oryza sativa
  Intron number 1 from transcript LOC_Os01g68740.1 (locus LO C_Os01g68740) derived from phytozome v7.0 (chr-ID Chr1; po s 39925724 to 39926212 reverse strand)
atccaattaagtgtcatctcctccacaaattaaaggtatcttatctatgatcctccttttactttgttttatgtttctttttcactttttactgttctagcggattatgttcatccatgcaagcttgaagaactaccatatcaggcacagttcatccatcaaccactagctaaccagatcgacataatcaaattcgtcagacacagttcattaaactctagctgatcaataattcaagaatacttctgaatatatctgaagtatccgttataggagtatatgataattggttctttaattcgtttgcaaatccgttcatgtataccgtcagctgaatgcaatatatcacatactaattacatgtattagctgcagccaccaaatatatatactatatataaaacaacgcaacgatcgaatctctgaatattcttgacatgtacgtgcaattttattagcttaatttgttcgatcgaccgctggataggt

SEQ ID NO: 11406 - DNA, 1007 bp, Oryza sativa
  Intron number 1 from transcript LOC_Os01g73260.1 (locus LO C_Os01g73260) derived from phytozome v7.0 (chr-ID Chr1; po s 42466163 to 42467169)
cgcaattattcagaaagggctctccctagtggttggtagccagtaacctatacttgacccaccattaatacattaatacagtggttatttctcaaccgttattgacttctggtcaatgatttccagtaaaaaagaagatagacttctggatatcagtattaggattaaatttcataaaactttatttactatgttccaagttatacaagatcataagtacgtataacccatgtattatactcttaatatttcataaaaccacaccgtaaactaatttgacatacttgtatatatcaaaattttaaaaactatagttacatggacataacatttaaatacgatagataaaacgactcaaaagatttgtagaacttaaaagtgtgatagatcaaaattaaaataattaatagtgtagttttatgaaacttgatgacataaattgagatacgacaaaaaagtaaatgttaccgatatggtaaataaagtgtcggagagagtaactatcgatgttattaaaatgaatcggaacctttgagtgctatatttttaaaatcgtgaactttcgatgctattaaaatatttttttcctgttatttaatatcgaacagttcttttttaagtactaacaccttaatttagctcaggtaatgtctacaatactgattcatcatctctaagctatggacaccatgcattattatatagggaaaatttgaaccatgccacacaaattttacaaaatttgtgatatgcaaccttgacccacatgtcattgactcatgtgggtcctacatgtcattaagatacgagtgacatatcttaaattttataaaattagggtggcatggttccaacaaaccctattatatatcccattcgagctaacgtgacctatgtcgtctcatcttgattggatcgtgcgtgtatacgtacattaactgaatctgttcatgtatactccatgtatgttagatcagtacgaggggcacaaagcgaaggagcagtac

SEQ ID NO: 11407 - DNA, 413 bp, Oryza sativa
  Intron number 2 from transcript LOC_Os01g23350.1 (locus LO C_Os01g23350) derived from phytozome v7.0 (chr-ID Chr1; po s 13129510 to 13129922)
ctgccagagagtgagtttttgcatcaatttcatgagactttctccaaagacaatgccttcttgctctatccatgtgcagtagaacctttttagggattttaagagtgcacatgtaaaatgttggcagggatgacaggactgagttgaccacggttagtctctgtccctgattcaaaaacatcgttatagtcgggagtcttctttccactctatcaatgagaggtgcaaattcacagatttttggttttgttgttccaaccggaagacctaagtatgtaaacggaagagctccaattgtacatccaaaagtccttgccaggagttcaattttatcctgattaacattgactaggatcatagaagatttgtggaagttgatttttaatccagtggacatggcataagattgcagg

SEQ ID NO: 11408 - DNA, 967 bp, Oryza sativa
  Intron number 3 from transcript LOC_Os03g12320.2 (locus LO C_Os03g12320) derived from phytozome v7.0 (chr-ID Chr3; po s 6493761 to 6494727)
ggattgattttccaaaagtatgttttatctcttccttttatgatcaggaaatgctaacttctaagcacattcatttattttatgcagttcttttaaacccttatttgcttctatttcttcttctaactttcttataggattactgataattaagttagtcttaccttttgtaatgttgattatgtcttcattatgctgcaatacatgtgattggtatgtaattgggtttaaataatgggtgttttgttaatatgcactgaaataaaggtcagcttacccaaagtttcccttattttggacctcaagatttttgtttctaaggttcaagaatcacatgaataaaccacatattatctattccctcaggtgacaatacagtgtatgctacctactgcctttgtccacaaatataagcatttgaaatttttctagatatataagaagtcctaccgaactacttatcccatcaatcacctcattcaaatttatccccatcttaccctcaacaatcctctcacccccaatcatccctcattcgatgagcggcaccaaaaatattttctcctcaaccttaatctctgctaaacaacctagaaatgcttatatttgtgaacagagtgagtaacagtaacttataaacactatctatcagctatcaatatcttatgagaatatattggaggtaaaaaatgcacagattgtcaataaaggtagtatcatattattatatgtttaccatcttaactacgtcgtaatagaaattaatagtcaaagttgtgttttcaaaaccatgtcgttgaatgtccaaaaaatcactctatcagaagggagtgtctttattataatatttggaatatttaacttggatgtcaatgctaaaatatctcaaaatatatgtttagaacttgagcagagcatgcatcctgttgcaggtgccaggaattgggtgtcagcgcttcgcaacagt

SEQ ID NO: 11409 - DNA, 568 bp, Oryza sativa
  Intron number 1 from transcript LOC_Os01g54210.1 (locus LO C_Os01g54210) derived from phytozome v7.0 (chr-ID Chr1; po s 31180311 to 31180878 reverse strand)
ccgacggcgacttccccggcgagctgtgcgagccggtaaattctttggccaccttttgtcttgttaattaccttggattttgcagtagaggtgccaatcatttctggcagctcctgcatatcacttcttctgaaattgtcgtccctttcatttgctgaactgatctaaactagagctatgtattttatcatcttgttttacgcctcgagagaatttgaatgcattattagaaaaagaaaaattcgcagctgtttgttggctcggctgttacgctgtcccataataactcccgttaaaccacacaaaatttgtcgcctataattatgcagctccaattcgaacttttctcccagataacaaaaatggaagaaaaaacccgttaatgtacttgaactaacgataccaaaacggtagccttttaaactgaagcagttgactgccatgtactctggaacaaacgagaattccattatcaaaattgtttagcttacgaaagcatatagcacaataataggacgctgaatttactgtcggattttctgcagtacgatcaactcgcggagctgga

SEQ ID NO: 11410 - DNA, 854 bp, Oryza sativa
  Intron number 1 from transcript LOC_Os02g09130.1 (locus LO C_Os02g09130) derived from phytozome v7.0 (chr-ID Chr2; po s 4688393 to 4689246 reverse strand)
acaaccgcgtcgccgccgcccagtacatcctcgaggtatgatccatcgccgtcgcccaatccaatccgccccccgagcttgggtaatgctagtgtgtcctcgagcttgcgcgtttaggaattcggttttcctgccctttccccgatcagcaacggagctccccggtgatgtgttgtttgaggtgcagacgaagtgtagctcctgctgggaatgcgctgtgggggatgggcacgagttgtttagttgttgttgcgaatctcgtttggttttttggttggatcgatgaggagagattttggttcatgtggcttgtaatgacaggaaggtatttcgcttttgctctgagggtagcggttttgagcttagttttggtatgtttgtgtttatgtgttggatggatgttaatgctatgttggttgaatggtggctgttggataggtctaggcagggccaatctgcagctcctttagtgttaggaaaccctgtggaacttgcctcttgccatatcttaccaagcgagcaagcatttccaagaatttcgctgaaccataaatgggatcataggaagtttgttcagttaaatgtcatgtccagctgtttagacaatgaagccaacccctttgaaaccttgcttggattgatttgagtatgcctatgctgactggtctatcccagtcaacatgttatgcattgtgtcttttaaggccattggtttcacggttttatgttgaacagtgtagttatatagtacttcttgagttgcatggttttctttgctgctctatagtatgtcctatccttttcagttgtttgctttggtgggatgacggttctcagcttgttgtctggacagc

SEQ ID NO: 11411 - DNA, 562 bp, Oryza sativa
  Intron number 1 from transcript LOC_Os02g27500.1 (locus LO C_Os02g27500) derived from phytozome v7.0 (chr-ID Chr2; po s 16266072 to 16266633 reverse strand)
cggcatttgcactcttcaagaacaaggtattcctctagtcctaaaaagaatttttttttatgcttggcaatcaaacttctgagcattaaatgttcatcatataggtaattaaatgttaattatctacaaaaaataattgctaagtgaccaagagaaaatgatcaggagtactcgtgattaaaatcactttgtaaactgtggatattaagttttttggttaagattccttcatatagtactcgaagtcttaactttttccagttaactatcaaagttatatatggagatctcactatactatttgagtattcaatgtggtttatgagcattgatgtcgtcttttgtcaatgtgtgccaatactagtctgagcatttttatgagaacctcttgaaatttggtttgggatatttcatcatgttctctttctgtagcaactcttttgtcattagtttttttttaagaaacaatctacctcatccaccttatatttgtgcacatgttgataatcttctcataacaactgtaggtatttgtagatagttcaaatattgatttggatct

SEQ ID NO: 11412 - DNA, 952 bp, Oryza sativa
  Intron number 1 from transcript LOC_Os01g58890.3 (locus LO C_Os01g58890) derived from phytozome v7.0 (chr-ID Chr1; po s 34032436 to 34033387)
cccgcttcgccgtcaccgagcacaacaagaaggccgtaagcgccccgctctaccctcctccctacttctcctcttcgcaaggccggtcgtccaactagatctgtgttctatggactaattatgcaacgcatgacacacggctctatttaatttttaaattgattctcgccaaggaagtaattttgattcctagtcatgtaaacctgctcgagtcggtgagaaaaaaaaagatgcggtgttgcgtatgtttgttaaaagtgcaattaggcaattttttgtgttcaaagattgtgctgtgttctcttttatgacaatatggaacaggaggttctggactgattagcatttaatcttgatactaccatgcgcagaattctctgctggagttcgagaagcttgtgagtgtgaagcagcaagttgtcgctggcactttgtactatttcacaattgaggtgaaggaaggggatgccaagaagctctatgaagctaaggtctgggagaaaccatggatggacttcaaggagctccaggagttcaagcctgtcgatgccagtgcaaatgcctaaggtctagacatgtttggtttagatacccgccaaacaaaattttcacctgttccatgcattaccatgtataatatatatatatatatatatatatatatatatatatatatatatatatatatatatatatatatatatatatatatgtcccttttctcattagaaaaccagagcttgtgccccatcctacttggttaaggccattgatgaatatgtttgttattctcttagtaagaatacaccttttaagtttttcgatcaaataattaagatattcaacttctaaataacttttttcttttctctagatattatatcactgaatcatttattgcatattgaattgacatgtcaaatctactaatttcaggcccatctcgtatcct

SEQ ID NO: 11413 - DNA, 948 bp, Oryza sativa
  Intron number 3 from transcript LOC_Os01g09810.1 (locus LO C_Os01g09810) derived from phytozome v7.0 (chr-ID Chr1; po s 5072470 to 5073417 reverse strand)
agcaaagagacagagaggaggaagggagaggaggggtaagagagatgacgtggcatcttgacatgtggggtccacgtaggttccacgctgactcagccgtcacgtaggataaaaccggtgtcaaaaccaccaaaaacctattgtaactggttttgattagttaagggacgacggatatctggttttgtggttgggggacgattttgtaactcgatgacaagttgagggaccttcgatgtactttttcctaacaaggctccaagcgaccaagctgccagcttttgggtttaaggactggtattgggccgaaaattatctccactactaaagtttggtaattcgatctagaatatttcactcacaaaatcttggcaaaagtaacaaactaaacataatttacacatctcaaccttatcaatattggtgatgccaaaatttaacactactaaattttggtaagttgatttaagtatcaaagtgaatagccccttaatttgcactcgtttgcgtggatttcaccaaacggagagcgagagggattgagatagcatttcgtcttcatttttcagtacagtgataacttccatccaacacgtgcaaaaatgccaatctgagagaacacgtacatataaaaacgattttgttttggagtttgaaatttttaattttgttgataggaaactaggagctctctagactataataatcgctaaacctatcctcacagctgtcattaactcattattatagtactagtactagcttttaggccgcaaaagctacagaagaaagaattagaaaaagttcagcattttaaacatgtataaaacatactaatatatattttttcgttcatctcactgttacatgttgggaactttttgtttgttcgttcgtttgtttatttttgtttgcagagcagctaaaaacgttccatcttgtttggtg

SEQ ID NO: 11414 - DNA, 288 bp, Oryza sativa
  Intron number 8 from transcript LOC_Os01g48900.1 (locus LO C_Os01g48900) derived from phytozome v7.0 (chr-ID Chr1; po s 28057020 to 28057307)
ccggagtaattctctgtttttctgtcgatgtatttcatttaatcttctctaggcccccaaaaggcaaaagttaaaaccactcatccccaaacaaattacaaaattattagtcctactgtggtattacccttcattgtgtactttagattctttgctttgatttatacttctagtttccattcagatttacgtcatgatattactattatgtgtgcaatattctttgccttcgaatatgttaattgcatgtttcctgttcctgatatgcagggaaaattgtacacaatt

SEQ ID NO: 11415 - DNA, 926 bp, Oryza sativa
  Intron number 3 from transcript LOC_Os02g29040.1 (locus LO C_Os02g29040) derived from phytozome v7.0 (chr-ID Chr2; po s 17197295 to 17198220 reverse strand)
actccaggtggacatcaacgccgccaacgagtcaggtaatctcttcgttttagcaaaagcgacttcccagatttttttttagaggttgagaaatttgagatctatggcatttgtggtattgtgggatgcggtaactttgcaacactggagccgcacccgcacggtgggtgagttttggtttttttttttttttttgggggggggaggctgggttggatgtacgttactttgatgtgtttaattcatccgagagagttacttgtactgttatagtcataacggaactgggtaaggtaattaatttgagcaaacaatttctgaaatggtttttgcttaaattgagcaagtaatttcttgattctggtgaataatcttttaaacatcttctactgtattgcgtaatctggatatattgtaggccatatctggttgttctttgtgctagttctttttatttaggcttagttgttgcatcattgtgcttatttttttaagttgccgtggaaaaacttatgtttgttatgccttttttttatagattaattatggttagatgatatagttatttaattgtcatgtttctttctcaattgttccggattttcaggatgcaataatataattgtttgtaacactgtttaaaagaaaataagtttgctgaacaccaaaatatctaaaagctaccaaacatgattatcataagtcaaccccaataccaaacagcgccttattattttaattttgttcctttggtacttatcaaactgatatcaacagaatgcacttgatttatcacgttatcaacaaacctcctatcttttgtttgttgataagtgatcagtgtggattgatctcttttgtttgttacaagaaaccctgatttgtttttttttcaatgattccaataggtgctacgccactgattt

SEQ ID NO: 11416 - DNA, 697 bp, Oryza sativa
  Intron number 1 from transcript LOC_Os01g72820.1 (locus LO C_Os01g72820) derived from phytozome v7.0 (chr-ID Chr1; po s 42240043 to 42240739)
agagctcctcctcccttgctcccttggctacacgggtataccatccatagtgagataagaaattcatctatgaatcctctttctcaaatccccaatcttttttattggttttgaatctgaattgattactgcgattaactgtttcggtggtgctacgataatcggtggagtagtaattcagcagtggcaagataacaatgctgtctttctctgtttcttatactccctctggtactgctcttgattatttttttcatgtcagaaaggtgttcgatgaaatgccatagtaataaactaggtatatgtgagtcaatggtaataaacagacccgatgcctttttaattcactaccttttagagttgaaattgcggagatctttaaattatcatccgttctagtgatatgttcttgtatttacaaccattatattcattatttccatcatgacgagtttgtgcgatcaccattgacagtggccatgccacaacctacaagtgcttctctctccctctgtcacacacatcttatttgttctatgtgaatctgctatatttatgtaagaccttttatatatgatcttctctctttttttgtcgattagtgatattatgagatattattcctatatttgtatcacacttttaactaaaatttgtactttcatacaggatttgcggtcttagaaaatttcggtat

SEQ ID NO: 11417 - DNA, 573 bp, Oryza sativa
  Intron number 1 from transcript LOC_Os01g66110.1 (locus LO C_Os01g66110) derived from phytozome v7.0 (chr-ID Chr1; po s 38390000 to 38390572 reverse strand)
cgagatccacccggagcccggcaatcccaggcgaggtaagatcccctcctccattgccgtcgcgcttgctcttcttctgtgtcggtgctagtttggtgtggatctatagctcagttttgtttggctcgttcgttcgtttggttgatggtttatagtgattcgttttcatggggacgatggttaatttagtttagtttgcgttcagctcgggggacacagatccgggttttgattcgagctagcgtgcggggtttccgcgtgtggtcgggggtgttttaatgcacgcgcttgattggtgtgggttggttgtttccatgtttgttcagacaaggggagatttgcttgctagggaagatggaaataatcgatttttgcgtgcaatggaatgcatataattttttccttttttttggggcattgttcaattggtgtcactgatgggcagatccagtgtttccttgtttggatctactgatcgggtttaatcttttatacacttcgagtttctgatgatatgttgtggtttgctgtgctctaggtgtgagagttcttgatcgggtcggcataggggtt

SEQ ID NO: 11418 - DNA, 1015 bp, Oryza sativa
  Intron number 1 from transcript LOC_Os02g15790.1 (locus LO C_Os02g15790) derived from phytozome v7.0 (chr-ID Chr2; po s 8922312 to 8923326 reverse strand)
tcggaatcgattccaggtaatacatcaattaatcagtttttgatatcaccatcgtcttcttctttgttgtcttcctcttgttgttcaattaccatatcgtttccttttgcatcttcaaaatcatacatttgcagatcgccacctcctctctctctagataaatttgataatttaacacttttttctttgctcaattgttttgattgatacttgtgaaaataacatgtgggatcatctgggtgaatgagagtgggtcaagatgtcaaataattgaagcccgtcttcacttgtgtttttctgtttcgccctcctttaatttctgttgctctgccgccaaccggtcgagagcaacttgaacatgttgatcggcatcagtaatcactagtttcactcttttttttattgttttgttgaacagaaatatcaatcttaactagttttatttgtgcaacacaatattgtgttacatttcagtcaagcatacattttttttatttttgatatatatggccattgaagtagggaacttagccccacaaacaacccaatctgaaattcgctccatagaagatttgaactcagaaccttgggtactactcaggtcactgtaaccactaggctatatgccctttcgtagagcatacatgtgccctcaaaacatatatcgttttagtagggttcctaccgatcaaaataataaactttcactactaatataaaagaacaatgtaagatagatattgctagattcttcacgaaagtaacttccataatatttaatcatcttttatttcaaatctcgtgttttcatagaaattgctagcgaaagtgccactctgcgggtcgtctagacatcatttattttgtcttcgtggtcgtaataaggatcacattttactattttgtatgtatgccttacattatgttgctaacaatacaaaattataatattcttttgaatgaaactcaatcctctttgtttcagacaagcaaatagtggtgagatttcccaatc

SEQ ID NO: 11419 - DNA, 658 bp, Oryza sativa
  Intron number 3 from transcript LOC_Os03g18580.1 (locus LO C_Os03g18580) derived from phytozome v7.0 (chr-ID Chr3; po s 10397475 to 10398132)
ttgtcagggagctcgagaagaagttcagcggcaaggtgaattacgttttcctgccttgtcaccttttttttttgcataggttgcatgctactagctcaatttactaactcgtaatacatttttgttggttcttaatgttgcatctcgggccgaaaacctgtaagcttatgttgttcatgcttaacttgcaacatatatactgtcagtttcattgaagataaaatgttgccttttagcgctgaatatgccatatcatactgttcatgtaacacctaacatcttggagaacatacacggtattgcgagcacttaacgtaaggctgcgagctgggcattttccattcttctactagcatagtactggctttctatatcaatgctgaagtgtctgatgtacacatgtagtggttaactggcctggggcatcatcctaagttactctgaggataccatcgaagggaaaacatcaaaattgttagttatgtttagcgaaatcctggcatttctgttttttagccttatttggtgcacggcagacttcttaatttgtgttatatttgtatgaccttggtgtcagtttgttgttgttaccattctctgaagaatttactattacttgactatttttattgatattgtacgttgaactacaaacagg

SEQ ID NO: 11420 - DNA, 273 bp, Oryza sativa
  Intron number 4 from transcript LOC_Os03g03510.2 (locus LO C_Os03g03510) derived from phytozome v7.0 (chr-ID Chr3; po s 1516052 to 1516324 reverse strand)
attttggccttagtgcgtttgctccacaaacaaaagtatgatatctagctagtacccagaagtatgtttttgtagttgttaaaaaattaaccagtttctttatcctaatgtgatgtgtttgggttttctagcatttttctggtttaattgacttgttccttaacttgcactattacctcaaatgaacttcggacgcataattatttgttttggtgacaagaaagttgaaagaagtaactttggtaaactattttgattgttttatttaggagg

SEQ ID NO: 11421 - DNA, 758 bp, Oryza sativa
  Intron number 1 from transcript LOC_Os03g03510.2 (locus LO C_Os03g03510) derived from phytozome v7.0 (chr-ID Chr3; po s 1516983 to 1517740 reverse strand)
gtcgagcaggtccgccgccttaatcatcctcaaaattgaatatttatctctttttttagacatcaggtaataacaagttggatcttttctcggaggggatcgaattaagaatcctaaattattctagatagatgctagattattataaaagatggattttcatggggattaataaacattaaacgagaatatgcgcttactacgtctctaccattgtcaagattctgtctgtttggattgtttgtgattgaagaaaggtcatgtgtccgcctgtccagcgggctaaatctgctctgatctaaaggaaattagatggaattgtatcaagtttgaatcggaaatgtaacaacagattatcaagctgggccatgtaactataacaatatctccgatgcggtgatgccaaccctgtcttaatcaaatgctttctgcctagcaaaaagctgtgctagctttggtgttcgtaggagtggcaagagttgttctagattcatttttttttctcggggagttataaattcagtctgactggggggaaactcgggtattgtacattccgtgctagatcactcattggttgatgcattgtttggtggaaaaactagtattttttttggttaaatatgtgattttccatatgatgtgttggcacaattaaatgtccctgctcgagctgttctgttttccagcttgagctttcgattgtgaatgataacctcatattccacttctatcagatcaaacgggagatttccaca

SEQ ID NO: 11422 - DNA, 489 bp, Oryza sativa
  Intron number 3 from transcript LOC_Os01g26920.1 (locus LO C_Os01g26920) derived from phytozome v7.0 (chr-ID Chr1; po s 14995611 to 14996099 reverse strand)
tgaggtaaatgagtacgattataatgatgaatccatgattatattactgttaacagtatcatcctaccttctggtatcatgtgagttcctaatggctaaggtccattggttactcctaaacatttattttctttttaacacataaactatccaaatttgtgtttatagtgtatagtggtattttgctaatgaatatgcctctggcaacatttgcttgtgggtgtaagtttcttttttgagaggaggggtttgaattcttttccttgaaggccagaaccatgatacgcaactctcttgcgtattcaagaaaaaaagaaccattccagaacaaaatattattgaatcattgttgtaatagttccattccaatgatatgaaccattcatctatcttgcactaatcgaaacgcatacatggacatgtgatgtattcttatttcagaaaatgcgtgcagagtagctgcctcaaattggactggtgaaggctctt

SEQ ID NO: 11423 - DNA, 640 bp, Oryza sativa
  Intron number 3 from transcript LOC_Os02g51160.1 (locus LO C_Os02g51160) derived from phytozome v7.0 (chr-ID Chr2; po s 31298558 to 31299197)
acccttcaaaagacgaaagaaatctcgcaagcattgtaagagatcttctctactatattctctacatattgagtttcctaaaatatggtactttttaatcaaatacaataaaacatatcttatccaactttatcctagatgcactttgttctaaacagactagatagcatatcttttgttctcttgtatctgccaaatgcctagccagcggcaagttggttgtagtagtactacctaatggatcagaatatctactactttgattaatgtttcttgttactcctgggttatgacatgttgagtatattctataaaaaatgtaaaaaaatatgtattactgtaatatattttatgaaaatatgatagtatcatttttcacataccaattcaaatagttttttatatattggtagtcaaaattagacaaggttgaccacacattttctttatatttctgaacagatgtatagtacaagttagcatcagttctggttcttacgactcatataagagattttctagtcaattctactcatatgctaaatgcagacatgaatgctgttcttttttgtttattaaatttgctattgctttcttccatcgtgcatactgctttaatttatcaaatgaatttttgcag

SEQ ID NO: 11424 - DNA, 458 bp, Oryza sativa
  Intron number 4 from transcript LOC_Os02g03950.3 (locus LO C_Os02g03950) derived from phytozome v7.0 (chr-ID Chr2; po s 1682229 to 1682686)
gagatcacacgttgattttttttattgtacaactggtacgagttccacaccttctgtaatctaattcaacaaactgttttttctttactgaaccaatactgaatacatctcagtaggatttctccaactgtttaccctaaaaaatgaacatgctacaatactgaactcaagcatgacatggttgcaccttattctgttaatgtataaagcagtaatgattttatggatttatattgatatcaccatttctttgaagagatgtggtagttagttcactgacttcttactaatacattgccatgatttctggcgtgagatccaaaagataaacgtttttgaataaatgcacaagaaagaggcctgaaaatggtcacgatgtgctgctgtaagatgcatctttgtttttgtcttacaatcttatccgttttcctgcctgataggttgttgctttattgggt

SEQ ID NO: 11425 - DNA, 970 bp, Oryza sativa
  Intron number 1 from transcript LOC_Os02g29620.1 (locus LO C_Os02g29620) derived from phytozome v7.0 (chr-ID Chr2; po s 17611899 to 17612868)
cagattccgccgttcaggtatatcccgaagcagaggtgagtgcatgttcatgtatacacttgtgagttctgagacgtataatagacttattaatcttcgattactagttgccagcaatggtctatgagtacttcggttactgcacatcttatgctgcctagatgttatcctttttcttttccctatgaatagatctactctctttgcattgcgtgtactgtatcttagattcattggttgggtccaacgcactttccctggcctttatttagctcggatcctgtttacattgttttcaagcaatcaatcaccaaattaaaacagatctgtaaaccctgattacatatgcgatcgacttttggtcctagtcatctggctgtcacttaattgtttacgatttggggataattttcttttctaattcattagcgatgagagcgccgtacattgttgagagactatcattaccatttgttgcactggcaatttgctcaagtatatcgacatattatgttatttcttatttaacctagtgcttaatttgttactgtattttttgctgtcttctgttttttctcttaagtatcaactgactcaaaaacttgcatgaataacctaaactttgaccacaattttcttaaccattagtccacacaaaatgtttgttgtgaaactaatttgccatttgtccacgtttgacttttgtaacaaaattttggagtattttaagtttttattttattttttcttttaggaataagctagattatagtatgttgtttcgtattagtaaaacttattattaagtcgcagaattcaacagccaccgaaacaacatcatcactacgacatataatccgtcaaaatcggtcgatgtcatgtgttactagtcaagtttgttaattggcacaatggtttatatgatgatgaactaagccgttgattttttttccttcttaaatgcagcttg

SEQ ID NO: 11426 - DNA, 775 bp, Oryza sativa
  Intron number 3 from transcript LOC_Os02g34860.1 (locus LO C_Os02g34860) derived from phytozome v7.0 (chr-ID Chr2; po s 20908663 to 20909437)
tccacaggtacctctactctttcatgtattacgacaccctcccaaacccgctttctttttcttttgtttgatgtaatctcctagtcttaagactattgtacattgtttccctctcctttaatacaaatacaccttgctgagtttaaaatgaaaataactctttcatgtattacgacttgcccaagcgtttacccgaggatatcggactcaacgacggcagtgacaaacctatcataaaaattatcagtgatatctaattattgagtgatatacttaattaacatcgcgtaaattaaactaggattgaatcatctacccagggttctgtgatcttggtaagactttataggatcgctactgctctacagtaggtgagaccagagcgatgttatcccttgagcggagtcccctcgaacaggcgagcccaaataccattcttttttttgagtagcgaaatgtctagtcttttattaagagaggaaaactaccttttgagaaaagatagggtttctcggagtagaggaaaggtagtgatgttacgtagaaatcgctatttcttttcagcaactttattggattattaccgacgattatttagtacgcgtctcgaaaaatacgttttcttaataaactttcttctactgtattgtattccttagaccatttattttttgagctatttgctaattttgtttctaattatatttaatctatccctataatcaaagtgttcttgtgtgctggttgattgatttcagctggggacgcaatcaaa

SEQ ID NO: 11427 - DNA, 823 bp, Oryza sativa
  Intron number 1 from transcript LOC_Os03g17910.1 (locus LO C_Os03g17910) derived from phytozome v7.0 (chr-ID Chr3; po s 9978107 to 9978929)
gttccggagctccagacgaagcccgagggacgaaggtaactcttcccctcattccctgccctgcccgtagatggtttatgtttaggatttaggaatgaattaggaaactaggatttaattcatagttgatttaggatttggtttatttcaatccaggaatggttcttacttcatgattgaacattttttttaaggatttgtgaagcttggtaggcttgtatcagagttggtactttatcagtgcacatatttagcagagttagcatggttattggttagtacttaaattagaagaccataatattgttttgttttgttgctgttgctgggcacactagccgtctagccgcaagaatgagtggggcaggttcatctgctggctcctgatgcttagccaacatactctttggcacaacttctgctattcagtacaataatggctcaacttgaagctacaataatggcttttgtccatcatattctgttgcaaaatcttgctgtgtggcagcatttcggtttttctgttgattataatgctgctgcataaatcaggatagttcatatacgtttggacatgcatttatcttttcatttgatatgttattgtgttcctcctaggccatgaggggctatttgaatgttttgaatatttgatgtttatttgtatacatacagtcaaatagttttgcacttttaaaatagaatattaccatgcaagaacttttatgcttctctcttacattgcctataactgacagtgttcagtttgaagatgctccatttcttttaactttcttttaacatttttcagtaaatttctgcc

SEQ ID NO: 11428 - DNA, 511 bp, Oryza sativa
  Intron number 3 from transcript LOC_Os01g28290.1 (locus LO C_Os01g28290) derived from phytozome v7.0 (chr-ID Chr1; po s 15845213 to 15845723 reverse strand)
ggtggtaagtatgtgcttgtcttgttcttatccgttaccttctacttctccctatccaatctgatttgctcctctcaacttttccaccaacagcaacgcccgtgagctaagaagatcatcctgttcgtctccaccgcgacccgagtctcctcttccagaggtctctttcgccgttggcgcactccaagaaagcatgtgatttcttcgccccaacgcctatttgtttgattacatggcagaactgccttatgtctctaaaaatgaatgaagagtctaagaacaaaatattaaccggagaagtgcaacctctagtaaatatccactagtttactgtattctctttctttagcataactgttgattggaccgactgtccaatgctctaaccaaaaggcacaacagaaagcatcatcgagaaaaaaaaagaaacaagagtaagcacacacatgtagaatgggaacacattgtgaaaattatttcactctaaaacttacatgaaaaattcaggatt

SEQ ID NO: 11429 - DNA, 672 bp, Oryza sativa
  Intron number 1 from transcript LOC_Os02g04320.2 (locus LO C_Os02g04320) derived from phytozome v7.0 (chr-ID Chr2; po s 1903163 to 1903834)
ctctcctccgcccctgcgtctcggcccacggtgaggtgccctccctcctctccgcaaggtctctgtgcggatcctcctcttcttccctcccgccctcgtacgccgcgcgctagggttagtcaggattcggtttggggggagagtttgcgtggttagcgtagcaaaactagcaataggagatttacgcagtgacgcctcttaatcctcgcgtttctgtgggatgttttgctgttgggataaacgagcaatcgagatttgttcatatttcgtcaaataaattattattactttttgaatctgctcgtgatgtgcgttgcgcttgggttattcggagatgaatcatcctgcttgtgtaaacagctgatagcattttggggaattaaggtctgccttgcaatgctcataaaaaaatactaatcatgttggtttttcagtatttttctaactctggctagcatatcaactcctgctactttatttgctgcacaacatattagttccttataatgtgcttctctgtttgatgcgtctgttgcgtggcaccgtagctgcacatgtgaaagacacgccgtttatatttttcatctacttgatctgtaccccatctgatcttagcttctctattcctatcaaataggttacctgaggtgaatacattggagttggctggga

SEQ ID NO: 11430 - DNA, 973 bp, Oryza sativa
  Intron number 1 from transcript LOC_Os01g16870.1 (locus LO C_Os01g16870) derived from phytozome v7.0 (chr-ID Chr1; po s 9636811 to 9637783 reverse strand)
gagaggtcgcctccgttcttgcatcgttttctttggtaaggcgaggagtcccgcttttcattttgggtggagggaaatctagggttcttggcgggggggtttttgcagattggattgttgtgtatgcgggagcggttgggcttgtgttgtttggtgcggttcttggtggtggtggggtttttcggggaggagaggagggcggattccgtggggttttaccgtggaagtttctgttcttttgtgttcttttgcggttttcctctgttcttggtttaaagatcgctgcattttgatgcattctattaaggagtttgatttggggttttctttctttttttcccctgatttcgttcgttcttcgttgcgttgttctcggggctttttcgtcttttgccgtttatggtggtttgttttagatgttttttttgaagatttatccgaaacagtgtttgtgcgattctttttcatttttgcgttctttcttcgtttgatatttctggtccttgttgttttaaacctttattttttttgtttgggagcacctccttttgatgcttgttttggtggatatctgcctgtgtagttttgttagggtttaggggtttttgggaaggtttatgatactgatcttgactgggaaaagaagatttgctgattaagaaaatggctaagtttcttgtacttaaaaatgggtaggttgtgtttgttgtagttttgaaagtctgtaggctggatagactcttctcctatctttttggaagaaaaattaagaaaatagttttctaattttgcttttcttttctttttctggaggaaaaactcttgacccagagcattttcattgtctggtatctgttagcatgggttttagtttcctttccttttctgttttgatttaccttgttaattgttgaatgagttatgtattttgtgtgcaggatagggcagcgctttgacagctttggggagttag

SEQ ID NO: 11431 - DNA, 769 bp, Oryza sativa
  Intron number 1 from transcript LOC_Os02g38100.1 (locus LO C_Os02g38100) derived from phytozome v7.0 (chr-ID Chr2; po s 23028871 to 23029639)
tggcaacagcttccgtggatccggaaaatattgcggtaaatgtcttcctcgttgccgatttacgacagctaacatcggctcgctgtttatatttttttgggaattgctaaaaagttgtcacaagtttttttggcaaaaaaaaacttttaaatgttactgtagtatagttgtagtataactacaatgtaactacactatagttacattgtacataatagtgtaactgtactgtagtaatctctatataagtgatataaagttgcatatagtattttaatacttatatacaagttacaatattgttacggtatagttatagtggaattatattatagttagatttaaaagttgttcctttaaaaaacttgtggcagttttttggatactatttttttcttatccattgtttcctcagcatgcaatctttttcaccagttcttttcgtgttatcgtgtgatttttttcaaccgagtttagaatgctctggattttttcctttgttttatctagactcttcacacacgttcaaaatgaacgtgctcttctggacacgtggcacattttgatgatatgtgaacttggtttttggtttggccacgtggcccaatgatttggtagagtttgcaccctgcaaccagtattttagatttgtgtgcacgcatgttatagtaataatagtatatatagctctatcctattatataattaaaattagcataaatggaaaaaaacagtttgctcgtccacttgtatccctaaccacgtagtg

SEQ ID NO: 11432 - DNA, 901 bp, Oryza sativa
  Intron number 2 from transcript LOC_Os03g18080.1 (locus LO C_Os03g18080) derived from phytozome v7.0 (chr-ID Chr3; po s 10095385 to 10096285 reverse strand)
ttacggagtggctggcgtgatcaggttgctcgccggtgagtcaccatttctatatagcttgtggtttttctcacgtacgatttggatagcttcgtttgtagtttttgcctgcacaatagtgatctgatctaaatttgcacatggaactgatttatcttgctgtactcatattttcctcatagggagaaacatatggatgatgattgtttgcttagatgtgcttgttttccctccatttagccatgtacttatattaatcattactgtttaactcaagtttattcacccagtgcttgacaagcaatttcagtttaaattacatcgtgctaatgaaagttccaccatacaaaatcacatggtctgacacttgaacctcctattcggtaattaattactaatacttgttggtgtcttcaaatttagatatttgcctagcactaactgtatgctgggaaacttctgcatttcaattagattcattctaggttttacacttgaatgtagtttttattatacatactaattccacattgtcaggaaaaatataaaaaaggattattagaaaatttattggtccaacaaaaaataaaatccaaatactcacttttacagtgcaactaattactgttttgctgagagtatgacagtgcagcatacaaaatccatttgctcaataattgagcatacattgcactgctgaagataatcaaacttatatctggtagataaaaatctggaaatatttttcgcttggaagtatttgataaaggaaaatgatttccttatgtctttttgtaaagttctccatgttataattgctaattttctgtccttttttttttggaaattataattttatgcagcaggctttccactttccctttttttttatcaggaagct

SEQ ID NO: 11433 - DNA, 510 bp, Oryza sativa
  Intron number 2 from transcript LOC_Os02g32290.1 (locus LO C_Os02g32290) derived from phytozome v7.0 (chr-ID Chr2; po s 19063564 to 19064073)
tcaaaatcttttcctcaggtgtttcacaaggtttgattctttttaacctagataatgttgaaaatggaagtgtatcaattatcaaatgtcaggatatgatagatcacatgaactgtgtatattcacaagttcatgaagaactagctgttcagcacaatatctttttcgtatgaatactaaatcataagttaaatctggattgaagtgttgttttgcaagcaattggaggagtggattgtgatgtcttttgaataggcctactattcttgctgaatttaggaaatattgtgcatctgttctgtcttttacgactgaagaacaaacaatcactaaaaataaaacgataattttaattatttgtttcaagcatttttcagagaatgtaaaaaccagaaaactggagcataaaacataactacattctagtttagttatgctgttttctggttcagatcattgatatttgaattcccttatgtgtaattgtgtggtgaggtgcagaaacttcct

SEQ ID NO: 11434 - DNA, 506 bp, Oryza sativa; identical to SEQ ID NO: 9604
  Intron number 1 from transcript LOC_Os02g32320.1 (locus LO C_Os02g32320) derived from phytozome v7.0 (chr-ID Chr2; po s 19078599 to 19079104)

SEQ ID NO: 11435 - DNA, 947 bp, Oryza sativa
  Intron number 1 from transcript LOC_Os01g46740.1 (locus LO C_Os01g46740) derived from phytozome v7.0 (chr-ID Chr1; po s 26621953 to 26622899)
aaacataggaaatcgtggaggcatgtgcgagcggcccaggggcgaggggtggaatgagaaggatctattgggggaggatgatcgttgcagcactcggtcggggaggagcgtcccgcaggccaacgggaaaactccctccttccgtcctaaataaaccaactttatacgtgatggttgatttattttgagacggagggagtggtgctgacggagagatggtactcgaaggtactaaagtctggaccactgttgaatctctttctatggatgaccctgatttatccttctctctcttcaaggatggttagaagcgctagccaaattagcatggcctcagtttcagtttgattcgatgtacgtgagcattcgctaccttaatactagcctttcggtgctaaacagggcttcaccctcagtatatgtttggttcttcggttttggtacatacgagtaaaaataaaacaaaccctgtacggagactcgattaaaggaaagcaggaagcacatgtggatacattataaacaaatcctgtacggatacgcatgatccagtactggcctcgctacaaatatgttccggtgggcgcgggcgacgtacatgcataggagtcggcaatgcagccagccagccatgcaggtaaaacagttgaacgcagtatctctctagttctcgaggataaacgatcgatcggctgatcttctccgttctcccggccggccaaacaaggtacgtaggcctgtgcttgtgccggatcaatcctcgatgatccagtaatttgtttccaaattcccgcccatcgcgatctaaaaatcatatccatgcgtgaagaatgtgatattgacctctagctatctccttgcagatcgatcgatggatcagtacttcgcccaggcccttgtgctcttgtatactccaatactgctctgctacgtagtacttagtactt

SEQ ID NO: 11436 - DNA, 689 bp, Oryza sativa
  Intron number 1 from transcript LOC_Os01g17396.2 (locus LO C_Os01g17396) derived from phytozome v7.0 (chr-ID Chr1; po s 10009683 to 10010371 reverse strand)
caggtttgtgttcttcagttcttggtttgttgttgttgttatgggcatatacagtaagttctttcatggttagctggatgagaaatgaaagaaaaaaaatattgagaggatcggtgatgtccttgacgggagttaattgtgtgcaattgagtgatctgcttcagcttactcctctgttcttcttctttaatatgatcggttgtttgttcttctcaagaaaggccattctttttggtttctgcatgcaggtttgtgttcttcagttcttggtttgttgttgttatggcatgtacagtaagttctttcatgcttagcaggatgagaaccgaaaggcacaaattattagtgaaaagccaccgtgtgcgattgagtgatctcttccagcttactcttctactaccaattactctgttttcatcgaattcttcttctttgatatgatcttccacggttctgatctctgtcatgttatgatcctgtctgctaactagaattcttttttttttttggcttttcttttctgaatattgctgaacttttctaactcaactagagataactacaccactaattttcgaaatgacaccatgctcttgcataattaatcctgttgcctgcctttcggtgcacaagtatttgcaaagtaatcctgaattaaaatattctgccctgtttttgttttctttcag

SEQ ID NO: 11437 - DNA, 657 bp, Oryza sativa
  Intron number 1 from transcript LOC_Os03g10080.4 (locus LO C_Os03g10080) derived from phytozome v7.0 (chr-ID Chr3; po s 5087366 to 5088022 reverse strand)
tacagacgggttttttgcagtgacagtctgtactggtgagtggaagggataagtatagcagagacaatgcattaacttcttttggagtagtttcctatttgtttctatttgcaattgcttgataaagaagatttctgtgatttgtctcttttgacatatcatgaccttagctgaaagttttcttgttgacctcgtccattattttgatgatcctagctgaaagttcaatactgacttagtccaataaaaaaatttcaattatgtcaagctatcatatttgttgtcttggctttccttggaaagatctcctggtattgcaaccctattttaaattgattcaagttcttcaagttattgccttgttggggacaatgtaaatgtcaacctttttgtttcatgctgatccattctcagttttcatgtattgtttgaattgagtatcagattctcaagagtaatgttgtgacacataagcaatatgcatggtataacaatccagttgtcagatgctattaccattaaatcatttgaactcattaagggttagattccaaagccaattgttgcaaatggatatacttctctgtttcctgaaatatatgtctattgttggggaagaaagaacattgaaagttgtgcctctgtctcgatgtgcag

SEQ ID NO: 11438 - DNA, 876 bp, Oryza sativa
  Intron number 3 from transcript LOC_Os02g45980.1 (locus LO C_Os02g45980) derived from phytozome v7.0 (chr-ID Chr2; po s 28009504 to 28010379)
cccattcaggctatcttcagtgagtagcttcgttactgtaattatgcttagcagcatgctaaagatcgattttattcattaactttcatggattacgcatgcaacctagtgacgactagagacatgtagcaaaacatatgttcagtgcctatgagatatttatttagttgtgttaatctgaatgttctgaacatttaacatgaatgactccattacaggcttatttacttaatgcacggaactttgatggaagaagtataataactattcagccacttgaattaaacaaataaaaattaagtccgcatgaagctcatgccaagtaaattaactgatgctacttagtttgttttggcttccaagttcttcaccatgttccgttgagcagagccatgaccagaactcttagatgaattccgcccagttatccacttctccttcatctatctgcatatcaagatctcacgatgttcctccgcaacctttcaaagatgttccttgttttcccaccgctgataaacagatgacatgtcacaatgagattaacatttatggccatacatacagctacgtcagtagattactccaaatctagctctctgcactcccaccatccatcctttattctgaaattagcaattcaatttccgtaatgtagagaagattgtaacactatgaacacaacaaggtatgatgtttgaatattaaatattctaaaattaggtctgcaatatctacttcttcccagttcccatggaacgtatccagttcagataagtagattgagtaaactgcacattaacgtcttatctttttaaaacattagaattcaagatgctgtgcctctaaataacattaacatgcttcttttgcagg

SEQ ID NO: 11439 - DNA, 591 bp, Oryza sativa
  Intron number 1 from transcript LOC_Os01g13300.1 (locus LO C_Os01g13300) derived from phytozome v7.0 (chr-ID Chr1; po s 7416437 to 7417027)
gcgatagatcagcccatcaaagcaagttctttcctctccctctctatctgtatctctcgtttctcgattaaacccagtttttttgggggtcatttgcttcgcttattcactgttcatccggttgattagagaccgagggttctttgatttgttccactctctcttgaatcatcgattaatggcggcggatttgggggctaaaagtttttgtcttttgtgttagatttcatcttcttagctgcttttcttgttttgattcttcgatccgagtgggagactgaagagagtgttctgtgtgtgtgagagagagacgtgttcttgaaaatttccccatgctttttttttcggatgacggagtgatctgatatttcagctatgttatatggttatctgtgatcttcttggagattttgcttcctctttgatcaatttggttgtactgctcgttcttggatacgatttttgttttctgtttaatgactgaaatattggtgtttacttccatgggtaatctgaatctaattcgcttgtcctttggttggttgttcttgagcagaagagagggagaccaccaggttccaagaacacgaa

SEQ ID NO: 11440 - DNA, 772 bp, Oryza sativa
  Intron number 1 from transcript LOC_Os03g13250.1 (locus LO C_Os03g13250) derived from phytozome v7.0 (chr-ID Chr3; po s 7149434 to 7150205 reverse strand)
agcagagcttgatagtgcggacgacagagccggaggtactcccacaatatccacacgaaaaagaataaacttcttttttcccctctttgttccaccaagattcgaggattcgtagggtttcccaatcctctttagtttcttgttttggttatgttccgatcgattgaaaatgcttaaattggcccggatcgtgagaaaaggcctagcaaagaaatcgtgagaaaagggagggggaaaatgatggacagctcgattgctcagttcttggattcttgggatcgcgtagagcttggtcagattggcgtgtgacacttcgattagtcggttgcaaaacgatggccgtgagtagagaaaggggaacggggaaggtgaaggtctagactctagaggcgcagtgatgactgacaggtgaggcccacaggccacagggtcccgctcataaagacaatcattttttgatgtactgcttagagccttgatgcaccttgggtattatgctggaacacgcaacaattttgaggatttattggattgacacgtacaaattacttgtggaagttattttctctgtgaaatttgattgattgtctgcactctgatgtcatttccttgaaaaatctgatggttactttgacctgtaacttttaagttttgatttctttttggatgggtttgaagattgattgaaactgatggagtgaaatgcgttaaacatgtttgacaaaaacatgaataatttagaatcaactagtactttgcttctctccgtagg

SEQ ID NO: 11441 - DNA, 942 bp, Oryza sativa
  Intron number 1 from transcript LOC_Os01g58194.1 (locus LO C_Os01g58194) derived from phytozome v7.0 (chr-ID Chr1; po s 33641107 to 33642048)
ctctggcctcgctcatctctccaactgggaacgaggtgctcgtcccgttcatgctttgtttctgattctctactcgatcggttcttgtcggttaaacttgcttgctgttctccggttttaaagattgcttatccaggccttgtactgtggcaagcgaacaataagcacatccttgatttctggggtggatttgaacatgctaggctggatataaatcatgcgggtgaattgatctgatattacgaaaatcaatatatattgtgctatggatgtatcagttcagtcagacggcaaaatcaaagtgagtaactcctcaggaatggttgactatccttaatcatcagtttttcacgatgaagctgcaagccttatgatcccatcgactgttgagtattaacctctcaaacaagtggctaggaacggggtgccaaagaattgaattacgatcctaactcctttgccagctctaagaaatctcaagtcccaactctcaaggttatacttataaattacagtataagattattttttggttgcaaaagtaaaaacgcaaaccgaaagaaaggttctaatataatacgcagatgcttttttttttcttatagagaacatccaaactgtatgtggattttgtgaaatagaagaggaatcagatttcggcttttagaacagttcggtattctgtagtccagtccacactacaagaatcagaatactagcttcgtgcagaatgtgtttgcaactttgctgtctcagtgttgacatctgtacgccttcttttgtaccgggaagcattcctttgctgccttttttgccatatcttgttccccatttctgtcagccatacatggtccaatggtccatgaacaatctgatcaaaactcaaaggaaggtgtatttttcacaggtgcagatttctgagctagagggcaagatcatagg

SEQ ID NO: 11442 - DNA, 652 bp, Oryza sativa
  Intron number 1 from transcript LOC_Os02g40900.2 (locus LO C_Os02g40900) derived from phytozome v7.0 (chr-ID Chr2; po s 24779586 to 24780237 reverse strand)
ccccaagtccagcaggtaggaactctgcccctcttcttctgattacgttttcaaccgctcctttctgtgtgaattctactgcccgtttgttgatgcggtgatggcggattagggaggatctagactctgttgttttagaggcttggagtaatgccagtttggggataatgcgctatgtcatgtttgattcaactgaaaggctcatttggtctttcgtcatccacctttcatccttgggacaacacaatgtaaaagtggaatactcaatggaagccaattcatattgcactataccagtgtatcatatacagtttgtaggttgtgaaatctgtctgcagaatgatgcacagaaatctacatattcggctcatgttatgcaagatcttagatgctacgtcatgatttcatttctatagatgtagggaggcgtgccaatgtttatgttttctaactctgaattattaacatttgatgagagacttgttcagtgcaactgtaagttgtatttcagtgtaaatggaaaaggatgtagcttcataaatcaagaacctgatagtactaatttttattttggaaactagctgtaactagtctattatggtatcaccacgacgcaggttcagcaactgttccagaaagattcacagataat

SEQ ID NO: 11443 - DNA, 522 bp, Oryza sativa
  Intron number 2 from transcript LOC_Os02g36974.3 (locus LO C_Os02g36974) derived from phytozome v7.0 (chr-ID Chr2; po s 22328944 to 22329465)
tgaggtattgattgtttgtacaaaaataaccattttattcttgaatattgcattttcacatgttaactaaggttcttaagttgatctgactgccatgtacaatatggagcccaacaaggggtagtgacacatatttctcaacttcagtatgcaataagtcagtcattttatatgtttttacatgtggagctgcggataatgtgacaaacttatgtaatcgtgaatgatcttttgatgtttctctgtttttctttcatgtagtttgatataggattcctttatctggcactattgaagttttgttgtaaataatgttattcttgcaaagattatcttaaatcaatcatttctggatctgaagaggtattgtaacaatctgaagctttgcacaaccaattgcaactaaacttttgtatttcttagggtgaggacttgaggttggtgtgatgggcatttagctaactgaaatttctctcaaacctcacagatttgaccttctgtttctaccagaaaaacacaaac

SEQ ID NO: 11444 - DNA, 885 bp, Oryza sativa
  Intron number 1 from transcript LOC_Os01g65740.1 (locus LO C_Os01g65740) derived from phytozome v7.0 (chr-ID Chr1; po s 38163619 to 38164503)
gtcttcttgggttgccaccgctgagcatccaggaggtgaagtgtttgttttttttttctttacttttgtttaagatattttttttcttctttacttatcttgttgacacaaaatttttaatgctattttgtccttgttctctgatttctctgttaccatttctgtgggtgtatggttcatctgtaaatatctaaaactggactagttggtctgcagaaaatgctgtcggaacagcatgtttcttgttttggtaaggaaatatgaatcacagaatttccatcttctgcgtgaacttccatggtgatttgctcctagtaactggagtaactgatatatctttcaccggctttttaattatactctttccattctatatattttagttttgtcctaagtaaaatttctataaacttagtttacaataacatatgcagcatcaaatttgttttgttaaatctatcactatatcttgatggtgtacttatttattattataaatgttaatatttttctacaaatttagtcaatgttaatagaatttaacataattaaactaaaatgactttactccgtagtatggaacggagggagtaccatttcacaaccccagtagcagtaaaactttcagaatcttggtactcctacggtgacatacaggtaatgaagcattgacattaattattgacttagatcagtgtaccgtgcatataatcactagtaccattactacccaatcatcgttaatatgctgacattggccacagggtcagcgagtgatcaccgttagcttcctttaatttaagtggccgaaacagtgagctgaaaggttgcagatgcttttgtctcgcaggtgattacgagtacatcgacgtgctcgtggcagta

SEQ ID NO: 11445 - DNA, 725 bp, Oryza sativa
  Intron number 1 from transcript LOC_Os01g72240.1 (locus LO C_Os01g72240) derived from phytozome v7.0 (chr-ID Chr1; po s 41886883 to 41887607)
gaactgcaaaggagctccttgagcttgcagagaaggtagtacatgtcactactatttgtggagttagttggtagattggttggttaaataaatttataagcatttcaaccctgacaagtcaaattctcctgttggatggataatcctgcaatttgtgtgtactttttagttcttagataatggacaatttgtgcatactttatgttgatatgtcaggctcagtccctgagttatctagtaagaaacaaattgggggttcggtagatatacctgtttatatagcacctgcttttgcttcatgaactgtctacttagactaggtctgttatactggagtccttgggaagtagaaacattgatttgatagttgagacatgctcagtgtgtgtttttctctgtttaaaatgtattttaaacatttctgtgcttagatatgctgtgtgctgcttcatctagtgttgcaaaaagaatgctccacagttgcagtttcttccttaagcagtcaagctagcattatttgtactttctgatttgttttttcctccagtctcatttcatccatttgcatgacctttagatatgctaagagcagattcactacttttagctttgttttttttctccttttggtgtgttttaacattacgctgtaattgctaaacccaggtaataatgcttgttaacttggttctccaatttttatgtaggttggtccagagatttgc

SEQ ID NO: 11446 - DNA, 726 bp, Oryza sativa
  Intron number 1 from transcript LOC_Os02g42314.1 (locus LO C_Os02g42314) derived from phytozome v7.0 (chr-ID Chr2; po s 25447417 to 25448142 reverse strand)
cgggatcgagctccggggaggggagctgcgagctggtacgtacgcttgatttcttcccttgccaccgcgatattccgatgtatccgtgatgtgtcgttcatgggtagatcggctagggatttggcggcgttgaggaaagcgatggctgccgggtggggggaattgttgtattagactctcgaagctgatatctggtgtggatttgcggtggaagccatggtcggaggcccagtgccttccgggagttgttgggttatcgggagcccggagggcagtgcggctcgccgactgctgccatgatccccgtcggcaaaatctccagattgggggagatggggggtaggaaccatttggattagtagtgtatacacggggtttcgtttattatatttagagcgctctacatgtagacagcacacagcagctttaacgtatggatggtgtatcgcagggaatgtatctcgaagacattggattaggctattattacatttagagaaccagattgggtttgcgataactagaaattgagtctgttatgaatttattgatggagcggacagggaattacgattactatctgtttagcttttcagttgtgaatgatgattatttcaatttagctaatcaaggttcctcaatcaaaccgttctaactttttctatttatgctcttggttacattttgacagaaacactttgtcatatcagtcaacagtagagagga

SEQ ID NO: 11447 - DNA, 612 bp, Oryza sativa
  Intron number 1 from transcript LOC_Os01g46940.1 (locus LO C_Os01g46940) derived from phytozome v7.0 (chr-ID Chr1; po s 26789428 to 26790039)
ccatccaggtcgccatctcacttgccgtgctcaaggtttgtcgtctcacaaccctcgacgttcagctagctagcttttgattgttgagtgatctttgtttggaacctcctgctgtagatggaaaatattactgtgtttatccataatgcagagagcaagaaaaaaaaaaaagcaaatccgtcgcattatggacgtgacggcatactggtacaccactgagtacagtcgctagctctagcggtttctaccccacatcagtaggtgatacggctgcattgtttaagaagaaccccctgattcacccatatcggcatatctgcagactgcagtgcctagcttcttccggcaagaagatgaacaacaacagtgcaacactaacttcgcatcaccctgcactcctgcctgacaaaacgcattaatcgatcaagagtaaccttggcccttaaactacactacaggttctgtacacgcgtgcgcacggtggagcagagcacagctcgtgatacgtgatagttacaaggctgcctagttacaactggttgattgatcttgtctttcttttatcgatcttacgcagctgacaagtgagaaagacggtggcgccggcgacgt

SEQ ID NO: 11448 - DNA, 371 bp, Oryza sativa
  Intron number 1 from transcript LOC_Os01g05050.1 (locus LO C_Os01g05050) derived from phytozome v7.0 (chr-ID Chr1; po s 2372518 to 2372888 reverse strand)
acgccgaggaggagagcgacggcgaccaagaccgggtgcgtgcgcgcgcgagctcctgaatctcactaaatcaaatgctgctattcgatcttctgctctatcatcagagaattatcttttgacatcattgaatcccctttgtttgttttgattttagtcgtattatatattaccatgaaataaacttaagcaatctgtcgccgttaggtacttcatatgttgtttgcgttatgttctatgttgctatagtagggattgggattagttatttaactttgtttttaaagaaaaggagtaattttcatactgtaattggtagcataatcatgtttacagcattgcaattgctttgctgagattgaggtaatatt

SEQ ID NO: 11449 - DNA, 912 bp, Oryza sativa
  Intron number 5 from transcript LOC_Os01g51280.2 (locus LO C_Os01g51280) derived from phytozome v7.0 (chr-ID Chr1; po s 29479474 to 29480385)
acattggggttccaagctcaccaactacaaataaggttattctgctaataactgaattctgaatcttgaactccagtttagggccaaaactagcaccataggccaaaatttccatagctatagaagtaaaccaactccttgtcttctccaacattggcttataaacgtacagtagcacatgaccgtgctgttgctataatactatggactagagcaatacatatttccttgagaggctagccttgagggcaaagaaacaagattctacattattcaaaacagaacataagctgtttcctttgttattggagttaaggttttgaaagtgttcaggaatctcatggcagctgcctgcacctcaccgatgattgaattgctaagaattagtacaatgaagctttcgtatcttccaaatatgctgaaacatgtcattcatatttccttggcttcaaaatggtcatgggttcttcgctatttttctgcatcgtgagtccatgatttctgatctgtacagaatgcttactgtcttagtcgtcctggtactagttaccttactggcttgcccacaaatgcaaaaatatccattagccttatttatcaggtgtgtactagttgttgggaaagttatatagtatatgcagattgtatgcccatgcaaatatctgtacaggagatcaacactattaattggatgagcaacagttaattatttgaaatttagatcatgaaactggcgaagccatcccactttgttttatcttgtgttagtttgcattctttgtgatgactgatggataaaaagatctactgctcgtttagttttttttaatgtaatagcctttctttaatgcatctctctcctgatatctgatatcagggtttcaagctgactaagcaaagcatatatcgtcc

SEQ ID NO: 11450 - DNA, 490 bp, Oryza sativa
  Intron number 3 from transcript LOC_Os02g07240.1 (locus LO C_Os02g07240) derived from phytozome v7.0 (chr-ID Chr2; po s 3718861 to 3719350 reverse strand)
ctgtaagtttttttcttttttacaggatttgttgatcatttcttcagttcgtgcgctttgttgttgtgcttgtgtatgctactcaatttttcggtggattacgcaaaccacctaagctagggacataacagaaataattggtgaagtttgttcgtttgatgctctatatatcaccagtagtttcatctttcaagttgcattcttctcaatcttgtctaaataatgacatgctggcctccttcattatccaatgcctcactttttttttaaacaaaaagatgcagtgatgtttgattcttttctgtaaaatttaattcttcgtttttttcacgaacgccttcttctgcttgtcttacatttgatgaacatgttgttaatttgttttgccaatcttcctttcatttgacatggtaatacgtaataggacatcgtaattattttctgaaaggacgattgtctaactagagtttttgcctttctgttcatccag

SEQ ID NO: 11451 - DNA, 936 bp, Oryza sativa
  Intron number 1 from transcript LOC_Os02g07820.1 (locus LO C_Os02g07820) derived from phytozome v7.0 (chr-ID Chr2; po s 4096586 to 4097521)
tacaggtaaataaaatttcatgcatcataaaaaatatcaaaattttgatgaaaatagtactatattgttttgacaatattatacttattggcacccaaggtctactttatggactattctatatattgcttaaaattttcaggagcttaaacattcattttggaattctaattatatttttgtatttattggtaacgtgaacctgccattaactgcgaagcacacagcaccttagtataggtgggaaaaaaattcaaaaatagttataagaagttcattatctttccagaaagcaattggaaatgccaaatatcatacatgatacattttaccttctaagttttacctagtatttttttttatttctagctttttggttgaagaggatgttacggttttgtcttcctaaaagattaatagagtatgtagtttgtagctttttaattatagtgaagttgctttgtttatggaagacagctaacctgcaatacatgtaaaaagtatatagtatataagtctctagtcaatcagaaataactagtggacatacaccagatcaatatacaatgttatataacatggatccatcataaccgtgcttatgttttcttctttttcctgtgattagcatgataatctctagcctaaagagtgaaagtgaagacttttccctgttgcttcaataaataacagatcatattttattctcccttttaactcaattcaaaacatattcaatgtagaatgggatcatcactaaaacaacaagttcaccaatcacatttttagatgtcacacattgctttgcaatattactagtactcgttaaacattggaattgtcaaaagtgagaaaaagtagagcaaccacttacgtcattgtgcatgtctcaaacctgtaggggggagaaagccttctgcagctccgagtgcaggt

SEQ ID NO: 11452 - DNA, 624 bp, Oryza sativa
  Intron number 1 from transcript LOC_Os03g05630.1 (locus LO C_Os03g05630) derived from phytozome v7.0 (chr-ID Chr3; po s 2810986 to 2811609)
gatctacggtaaaacaggatctttcgaggacgaaagtgagtttttttaaacaaaatcccttatgcagttcaaggaatattaatttacacttcccgtatttagcacatttggatgcccttgattcaacagtggcggcagcgattcgtgctaggtttatagtagttgagtttgattttgatgcgctgggaattgcagtgggtgggggtaacagggatgagggatgaagacagctaaaaacaaattcgctgctattttcttctctgcaatgacgaatgtttgtgtttgagaattacttcattctgaatttccaatcactttaccccccccccacccccccccccccaatcgatgtgtggcaaactggcaattatgtaatccgatgtcaatcattcacaacaccacatgtttagagaccaatgtagcacataaccacatgttttaaattgctctcacataaacacgggtattcaatccaaataacagaaaacagcatatgtattagggtgagaattatctcattctgaatttccaatcaatttataaccacttgatgtgcgacaattatgcaatctgattttgtcaatcaatttatatttatatgtgtgtgcagcggaaatcttgccg

SEQ ID NO: 11453 - DNA, 970 bp, Oryza sativa
  Intron number 3 from transcript LOC_Os02g24190.2 (locus LO C_Os02g24190) derived from phytozome v7.0 (chr-ID Chr2; po s 14009147 to 14010116)
gcaggtaaggagcttttttttttaatttatctcttttgttgtggtgggttggtgtcttttagaaaaagcatttttctgaaagaatgttttagaaaagcaattggatacaatcttctctttaaaaaatatttactggcaaaggttctcaaggaacatatataacccttgcatattttttatacttgatcagttcatatactctttgcaacttgtgcttaactttccgatctattatcggttgtacaataaatatgaagctgcataataacactaacatttaatcttgtattgcttattaagtgcatggcgatgttacagtgccattaggtgatttagaaattcaattccaaagggatctacttgtgccaatcagtaatcctatattgtaattccttacttttttactgtgctgtaaagttttgatatagtctgatttatggttgatttgcttgggatgtttggaagatacaatagtattgagatgtattgtacaatacaatagaacatcctttttgaggacaagtctgttcagcattcctgttgaagttacactattgccattagccaacaggaatacagcttacaatcctgttattagaagctaaaatactataactgaccatctaataagtataaatcctccagtaagttttatagatttgattcgcctcaccacattcactgtattcctgtcatgcggttatttaattgagaaacacattcttgtctctgcaattaatctggagttgtgctcgttatctgcacttgcagatgttacttgctgacatgtttcttcattgctcaagaaaagaaaaaaaaagctgtgcatgtgatgcaagctgtctataactaaatactattacaagtaattggtgtttattttatttgcttattgtcattccagagccaatagctttacttgttttttattgcagacgattgcaacagtgtgcatatttctggcttcaaa

SEQ ID NO: 11454 - DNA, 489 bp, Oryza sativa
  Intron number 1 from transcript LOC_Os01g53850.1 (locus LO C_Os01g53850) derived from phytozome v7.0 (chr-ID Chr1; po s 30954783 to 30955271 reverse strand)
acggtgagttcatcgagctggaatccttttgattatagagagagatgcgttctgttttgtttttttggaggagatcatcaacagaaaaaaggagcgaacccgaggatccctcgtgccgaaacagaatcagcatgaaccctaatgatcgtccattatatgacccacctgatgctaaactacattgtcgtcaacaattaattggcggccattatttcatcatactgcctctaattgtcaccgctctaaaccccaaaaagaaaaaaaaagagaagaaaacatatgcttccaatggattctagaaaaaagagaacaaaaatctcatagtggactaaccgtgcatatgcatggatcttgcatacagatgctggtggaattaacgggtggatcatggctggccgacctcgttctcgcgtgacatctcctcgagcgacttgcccttgggctcgggcaccaggaaggtgaggaggaagccgagcaagctgcagccgg

SEQ ID NO: 11455 - DNA, 980 bp, Oryza sativa
  Intron number 1 from transcript LOC_Os03g26200.1 (locus LO C_Os03g26200) derived from phytozome v7.0 (chr-ID Chr3; po s 14991746 to 14992725)
cctccccgcccgtcgccgaggagagctccgtccaggtagcgcgcacgcatacgcaaaattttggcgtatttaatccatgatctgtgtttgcatcgaatggataggacgtgctcttttgacttcagtcggtgctggtaggatgaaacgatgcaaagatactgtgttgttgaagacataatccgatttaaaacatttcttgttaacttggaacaagttatcttaattttcggtagtgatagtttctgctgtacatttttttccttaccaaatctaattcaattgcagaatgtagtaatgtattgatgcctttggctggcaacatagagaggttcatggactcgtttctagttctgctagtttcggtacttacatattttctgcacatatctgcatgttttttttttggttgaacataattcagttgtataatggactgatggcttgattagtaagtttcattggaaatataaggagcggaaatcaagaattcattccattccttgcttaatgtatgccattgatgatgaacttcagagttattttttagagtaaattgcacagaaccccatgttttatggtcaacgttgcttaagagtaggtacaatagcaggctataagccagctataaacatattttaaagagataaaggaagagagagaacagcagcgggctacagatttgtagccagctgcagcacggactccaaaacgtaatgtgtgtatgacaggtaggaccagatattaatagtatagtaagcaactattgtatgaattggctattacattggctatagatgatttggagctaatagttggctatactattaaacttgctctaatctatacatgtggttttctgcaactttgaccatagattgaggggtgttctaaaatttactcttatttgtaacttgtcggtttgtccatacttgtgctatacacatttactgaatctaattgtatttatcttacagtgaggt

SEQ ID NO: 11456 - DNA, 489 bp, Oryza sativa
  Intron number 3 from transcript LOC_Os01g74520.1 (locus LO C_Os01g74520) derived from phytozome v7.0 (chr-ID Chr1; po s 43160681 to 43161169 reverse strand)
tggctggtggaacaggtattcttcctttcttaccttcagcattaacatcctaagatgccatgtaccatgcatagcttactgacccacccgactaaaaacatagccttgctagtcaaaagatattagtgtatttgtgttatgtaactcctctgcatttttttggcatgtctaaaacgtcgatgtgctgtgctgtgttccatgtgctaatatccccatttcctgtgcaatactgcaaattatatgaaatgtgcatcaattaggtgacatgttaatttcggaacttttctttgttctaaaaatgcgcgctgtcctaaaataaggtgattttacacctaatgtttcaattactactagtctgttcatgaatgatatttcaacatgtccaagtaaacggttactcccttctcaaaagaatttatctagttgcttgctaatctcgttttgaaattggaaagtaattcatccaatgactctctatgccttcagggg

SEQ ID NO: 11457 - DNA, 419 bp, Oryza sativa
  Intron number 1 from transcript LOC_Os01g33762.1 (locus LO C_Os01g33762) derived from phytozome v7.0 (chr-ID Chr1; po s 18584571 to 18584989)
ttctttctgaagttttatcttcactatcttgctataattaatatttttctggccacaacacatttttatcacataatggtttgattttacttttccatgccacatgttttaggaagaggcgcactgcataatcaaacttaactgctgccgaggttaggagaaagcatgaaagggagaggtatgcttcactctctacagaacagaaacaagctaggcttcaaaagaactgtaagtataaacaacgtaagaaggaggcgactacatctctatcaggttgcatagatcccattgggtccaaacttaaccatgagaaaaaaaaaattcaccatgacatgtgaattatgtactcccaaaataagagtacatgtctgtgtaggttcacaaattatgaagggtgcccataagagatatcacaaatt

SEQ ID NO: 11458 - DNA, 474 bp, Oryza sativa
  Intron number 2 from transcript LOC_Os03g18310.1 (locus LO C_Os03g18310) derived from phytozome v7.0 (chr-ID Chr3; po s 10257901 to 10258374)
gtgggggctcagctgcatcgtcccttctcaccgcggtgagttgattggtttgatcgtacggtttggtcgctgcttatagcactaggattagtcgtggtgagcttggaagagctaatttctcgtggcatgccgcttaaatatgctagtttaagtttggattgagaaatgtttgattgggatgctgtacagtcgtaaggtgtacatattacttataacatgaattagtgaattttcattctccatgaaagcaatgtagtgtgaggatttgttaactcgaaaagaataagtgatttgtgaatcgatcattaatctgctctagattctagttaactgaccttttcttttatttgtgtaaatacagagttgcagagagttagagtttgtttaatttctgagcattctgactagcttttacgccatttgttattatttttgttagaaacactggatttcaagtttctattgaagccaaaa

SEQ ID NO: 11459 - DNA, 609 bp, Oryza sativa
  Intron number 2 from transcript LOC_Os01g08690.1 (locus LO C_Os01g08690) derived from phytozome v7.0 (chr-ID Chr1; po s 4326302 to 4326910)
aggtgtctgttgccgatctagttgctttcctgcaggtcagtttgtctttatctttttctttagtttaatccctgtttgacatttatgctagccaatgccttgtgtcatatgcaaagattgagagtcagggtgacttactagtgttcaatttatagaatgatttttgcatgtggatcatgtcacacattgctggctaaccaataggatcaaatgtgactctactacaactgtgaattgtctgatgagtataatctttatgaatgtgtaataatgattcagtttcgagcacatctacaatttgtatagccagggtctggagattatactatgaaacaattgtactagttaagtattacgtcagatgtatgtacataagagccatgaaaatgtttagtgaagcactgaaggtgctgaaatcaaaaccacattgccttttgagaattcattcagtacaataggcaggccatagcgttcccttttctttcctttttcctttttttcccctagctctgttgttattccagtatgtgtatgcggctcaaatccttgcctgatgcttctcttctacgcacagactgagattgagcacagagcaggggaggtgccggg

SEQ ID NO: 11460 - DNA, 610 bp, Oryza sativa
  Intron number 2 from transcript LOC_Os01g07760.1 (locus LO C_Os01g07760) derived from phytozome v7.0 (chr-ID Chr1; po s 3726757 to 3727366 reverse strand)
gcgccagcggaagcgcccccaagttcatccgcaaggttcggacccttctccttaatctactcgtctttgctcttgctctttttcttttttgtccctttcttgtgtgtgcgtttgcatgagcccgaatttgatctgctagtgcacagtacagtcagatacactgaaacgatctggaaattctggattattaggaaaaataaagaggtagtagacaagaattggagatactttctatcaagattggtctattatgcttggccatttcttgtttgacccaagtacttctttgaatctagagtttgctgtgtgtgatgtggtgtgtgtttgtgtcaccaaaaatcttcattagctaaaactgaaattttatttattaactgacctactaaaaatgtagagttctctgtgtgtgatgtgtgcttgtgtcaccaaaaatcttgatttgatagagtttttatttatttattaactgacctactacaaatctattgctgtatgctatgtgtgtctgtatcacctgaaatgcaatgtcttcttctttgttgttcttgatctaacacgtgagctcatgtcaacagtttgtggaggggattgaggacactgtgggtgtcgg

SEQ ID NO: 11461 - DNA, 611 bp, Oryza sativa
  Intron number 1 from transcript LOC_Os01g01590.1 (locus LO C_Os01g01590) derived from phytozome v7.0 (chr-ID Chr1; po s 292816 to 293426)
aggcttgagctcggcagcggcgacgagggggtcgggtaaggcgcgggcagcacgaagtcgagcggcgaggtcggctacgaggaggcagcggcgaggtgctcctgccgcttttgagctcgtggcgggcggcgaggaggcggtcggagaggcctggggacgaggagagtggggcgagcgccgaagcgagagaggaaaggggagagagatgaagagatgggagatggggagagagaggaggaagaagaggggtgaaatgacatgtggggcccacgtgggcccagccattttttattaatttgtgtgtgaaactgacatgtgggtctcacggggtttattattttcccgaattgaattgccacgtaagcgccacgtcagtgccacgtcagatcgagaccgagtcaaattagccacgtaggcgccacgtcagccaaaactgctattgaaaccgccgagggacctaattcgtaccagatttgatagttgagggatccgttgtatctggttttgtgattgaaggatgaaaatcggattcgttgacaagttaagggacctttgatgaacttattccttttgtttggctgggagactccagaaagtctcctcgagtgttg

SEQ ID NO: 11462 - DNA, 586 bp, Oryza sativa
  Intron number 1 from transcript LOC_Os02g57250.2 (locus LO C_Os02g57250) derived from phytozome v7.0 (chr-ID Chr2; po s 35068936 to 35069521 reverse strand)
tcgcctgggacggttgcttccggccatccacacaggtgagctgagcagagcagagcagaacacaacaccttcagggttcttgcttcttctctgcctcataatttcatatatagcactatatttattactcgatacaaaaacagtttcttttatgattctctgaagtagtaagagtagcagtaataaatttgtctgcaagattggttgccacttgttctgctcactggttagcatcataggatatttgcatatggcttctcctgtagttgtgcatagaactcacatcagcaacaacctccaaaacctattattatctacactccacacctgtgctgtgcataagcttcttatccttccaaattcaaggacaaaaaatgacaagtttggtgcttgatctgcactctaatatgtaactacaaacacttttgtttgacttgtggcgctagtaagattttctctgaaatgaggaccagatatatatcagcaccagagttgctgagctacacctacacatgtagacttttcaatacatttcaactaatcccaactgcatttcctggtttggcagcagctttggagtggtggg

SEQ ID NO: 11463 - DNA, 643 bp, Oryza sativa
  Intron number 1 from transcript LOC_Os01g66630.1 (locus LO C_Os01g66630) derived from phytozome v7.0 (chr-ID Chr1; po s 38698092 to 38698734)
cagcgccttacagtaagttaaagcatgaaaataattcataatcatgttagaacttactgaatgttgtaacagaaaagagtagtagactagtagtaggacaaagtgaagaaaatacaatggtcttcatgcttgtcttcttattatttaagcacatacatacgtattttttatgaaatcagctgtttgctccttcattttttgacgcgtgacttcctttagtacatacaatctttgaagccggaggatctagtgggaagtggtacataggtatctggtacaacaaaatcacagttcaaactgtggtctgggtggctaacagggacacaccaatctacgatctagcatcatcaaaccttaccatctcagctgatggaaatcttgttctcctagtgaagcatcttaaaatcccagtgtggtctagcaatattacaaacaacacagctactaattcaacagttgctgtactccttgacacagggaacctagttatcagacaaattccaacacctccaatgctatatggcaaagcttcgatcatcttacaaacacatggctcccaggcagcaagctcagtcgcaataaggtgactggtgtgatcaaccatctgatctcttggaaggaaccaagtgatcctgcaccagga

SEQ ID NO: 11464 - DNA, 861 bp, Oryza sativa
  Intron number 2 from transcript LOC_Os01g70010.1 (locus LO C_Os01g70010) derived from phytozome v7.0 (chr-ID Chr1; po s 40496064 to 40496924 reverse strand)
caaccagttcacccgcaccctcgacaagaacctcggttcgtgtggtgacgctacttttgctagctgaatccgtccaattgttcgcatctgtggtagtggcaccgttgattctgttgtttgtacacctagatgttgctagctactactaggccagttcgttaggctgaagatcatacatgttttaactagttttctaagggtaattgattgttatacttgtaatttgttcattggagaagctgaagggcctggtcaatctgccagctagtttctatggtttccaattgatgtgtgataagctgatcatatggtcattcactcattccatcaactagattaggtgttttttatgaatgtgctgaatttatcggcaatgtgccaatgtttatgtcttatacttgatctgccacacccgtacactgaagttgatagggtagctgaaggcctgtgagtgatgactcgcttgcctccatttttcaacaaatactgtgttgatcatgttgtctgacttgcatgctttcgtcggataacaatgttgccgtgatagccgaactgccacctttttgagtaactttatactggaatccttaatggaacaatgcatattccctttcaataactgtatgattcatttttttttttgagtttatgttttctctactattgacggatagaattggtgataaagcttgtatgtattcttcaatggtttttacaactcatgcacctgtgtattttgacatgactgtttgcaagctaaggttttatttgtactgcagcaactaatctattcaagatgctgttgaagtaccgccctgaagataaggctgccagaaggaaaggcttttgaaaagagcgcaa

SEQ ID NO: 11465 - DNA, 1039 bp, Oryza sativa
  Intron number 1 from transcript LOC_Os02g51610.1 (locus LO C_Os02g51610) derived from phytozome v7.0 (chr-ID Chr2; po s 31601151 to 31602189 reverse strand)
gagctcaccgcgcgcgcgcgtcccgtctcgccgaggtgagcgctaagaactagctttaccttgttgcgtcgtcgcggcttctgttgggtggaggagattgactggaagcatccgtttctttcaacggagaaagtttgctttgttcttttgaggggggttttgttgctgtccccgagcgttttgttgcatccgcgggagatcttccgattggtggatatgtgtatgggggtattttggttttgcgtggttgcatttattggcttcgagccaacgaaaggtggaatcttgcatttcttgctacgccgttctggagtttgtgggagaatcatggtgtgttctggcatttcctgggtgccatctcaagaacgtggctaggtttcttggttcttgcggcatgtgcttggcgtcgcgcgaagcaagagttggggttctgtggttattggttctgttccatcagtgcgattttgggcgagattggttgggttctttcgggagcttcgatgattctgggtaagggttgtggacttgtactttgtgagctgacgctacttgctgcgctgaaattaggcgttcgggtcccctcgttgttcgttttgttcaccggattggatatttgggggtctcgtgcgctcctgtgttgtgccaggatcacgtggaagataactggatatcgttgaaatgcgagttggtggttaatgttaacatcgttgcatttatgatggaccatttcctagccattctgtgctgtctgttctaaatggcttgttagattgcaacgctgccatagtgccacactagctgaagacagtaagcagttttagaaaaaggaactactgattttgtttctgctaatagaacatatttcactgcataacagcaaagccaacactggtcaacacttgtgcattatgatatttttgcttttcatgcataatgcataatgttgatgtggttatcgtccttggtgtaattcagattgatgttcttatgagctcttgtatgttctatgctctatggtaggtagtaacaaaaggacact

SEQ ID NO: 11466 - DNA, 983 bp, Oryza sativa
  Intron number 1 from transcript LOC_Os03g11240.1 (locus LO C_Os03g11240) derived from phytozome v7.0 (chr-ID Chr3; po s 5786691 to 5787673 reverse strand)
tgcggcgcctcatcacgaactgcctctcgtgccaggtatagcgatggtgtttgactgctggattgattgttccgagaggtgttacggattattagattgaagggtttctctgcgtggcttcgtgagcagcgagtgagtagagcacagccgttcacctgactcggttgtagtggaatcgaccggattaatgatattggcataagaggcagattgatttctatttctaagtaagttctatttgagcaagggacactggttagtgccctattggatcgttttgtgctttttgttcaaaagtcggaaggtcttgcttccaatagcacttgcatacaagcacatggggggtatcttatcttcatcattgtttgagatatatgcttttttttttctttttgcttcagatcatctgtttatactctttgaaacttgtttacacgccttgagttctcatccagtggagacgatgacaaggattaaactgcattttgggagaggagtatgattttgagatattcgatagtctattgttgaactgtttttcacagtaacatccatttccctgcaacatggaatgcatcagagtagcagttatcatgttaacgaaaagcttgtggaactacaacattgaccttagaggaaggtgatgatatgataaaccggcaaatcttcaagattcaaagtcgtagtcaacccatatgcatatgtgatgagcgacttgattggctgattgaatgaccatttttagtaggtgtgtcgggcgatagcaacgtttaaatagcttcttgtttcttgagaaatggaaagaaacttgttccatcatctttcttccttaagtccaaaagagtattgcacgccttggagctttcgtggtcttaagtttatcatttcaagtgtgatttttttattgattatatacacctgacagaagttatctatttgtgtctctaggttttcacatttggatcggtccctctgaagactta

SEQ ID NO: 11467 - DNA, 957 bp, Oryza sativa
  Intron number 3 from transcript LOC_Os02g28074.2 (locus LO C_Os02g28074) derived from phytozome v7.0 (chr-ID Chr2; po s 16612557 to 16613513)
tgaatagcagtgatccagggtggaaacacatcgttaattaattttctcttgcacttcttcagtataaatgtacctcgtattctttcttaatttcccgttttttttatccaaggagagtccatgcatgttcactcaatttcaacggtttcgcatatagatggccataaggcctgcccggcacggcccggcccaggcacggcccactagccatcgggccggcatggcccggttggcacttcgtgctgggccatgctggcccatgggctgcacctcctgcccaggcacagcccaccagcagtcgggccgtgctgtgccggctcaaaggcacgggcggcccatcgtgtctttttttaaaataagtctattttctgtcccttctctttgggctgttatatatgtatagctaaaataagtctattttacgtccctattatttcgaccatggcatataatatgtctatttttactccctattctttgtgtgtcgggcctggctgctggcccatcttgccgggccggcccaatgtgccggtgggggggaggcacggcctggcggtccgtcgggccgggccgtgtcgtgcttgggctgggccaaaatgccatgccgtgggctgggccgtcgggccttatgaccatctatattctatagtttcgcatataattgctgggagtttaatgggcctctatcctcccttgctctaggagttttcatcgtttttttccttgtcctggaaatggcactttagccaatttgcgttgtttaactaaagtatttgatgtgcaattatttctgtgtgttcgcgaaaaaaaaagatgtatgtagtcgcaagatctacatgtatagtattgacaaattaactgttaatttacatgcatgcttttggttaccacaaagtacgatcttattatgctttccaatttgatgcaatacgtctattccgaaggtaatactctctg

SEQ ID NO: 11468 - DNA, 975 bp, Oryza sativa
  Intron number 1 from transcript LOC_Os01g59560.1 (locus LO C_Os01g59560) derived from phytozome v7.0 (chr-ID Chr1; po s 34442307 to 34443281 reverse strand)
cccagcctcccgctggtaagctcatgtcgcagtttcatcagttctattttggacacatcctttgctttcttgtcctgttacattctttccatagtgaacggttgtttgttgaaattgctagcaagttatttgttccaaacaaactaagttagatattgagaaactatattatactccctccgtctcaaaatataaacatttttagcatagtgacaagtcaaccatttttaacttttactattaataaaaaaataaaaaagatcaatcatgtaaaattgacgtttctagatttatcattaatcaaacaatcataatatgcaattttttttatttaaattattatatttttatagatattgttggtcaaaatagcatctcgaagattgtgttgagatccaaaaatacttatattttgtgacagatggagtatatctcaaaataattccttacaaaaatccacgtgaaaaattttagaatgtgatagttgagtcgcagactcgcaggtgctttacttaacccaccaagttaatattgacacctaaaactgctatgaacttaagtattcccccgtccatataaacatacatctgtacagattcgtaatactagaatatgttagatctggtcttagattcattttttatgagacggagaaagtatgtgtttttaatagaaatttagtgagttttcctttaagcatactaggagagtaggctttaagcttactaggagagtatggtcttttttttaatgatattatatataggttttttttgcgcatatgcatgtactctcttcgtcccataaaaaaatgaatttaggttgatactaggatgtgtcacatcggtacagattgatttttagtgacagagggagtagctcttttattaattgcaaaaaatcttcttgtgctaatttcattatgattgtcggtttgtgatagtccatcagttttaggcagttttcacctgggag

SEQ ID NO: 11469 - DNA, 764 bp, Oryza sativa
  Intron number 1 from transcript LOC_Os02g55230.1 (locus LO C_Os02g55230) derived from phytozome v7.0 (chr-ID Chr2; po s 33821507 to 33822270 reverse strand)
gcctcacaagtccacaagttaatatcactattcaggtatgagaaataattctttttctttctttctttctttctgagtttgggggggggggggggaggggttgtatatttggcatccttgatgacaaacaagaggaaatatcaagagtaaattatattggtgatatacaaacttatcaggtatgtgcaatttactacatgaacttgtaaaatacttgttttggtgtatgaacttgttggatgggtgcaaactaagaccaaaaggacatgtcatggccaattctatcaagttagatgctggttaggataggacgtgcacacgtgaggtgagcatgaaacatactatatttgtaaacttggtttatactttattattctttgttctaccccttgtatcatttctcggtttttttatatcattctccgtgcaatcgttataggccttattaaaccattttagtgaaaatatgcatgtttatgtagcattcttctcaagtacatatttatgtagcattctaatcaatacttaaattagcaagaatagtcttgttatgttcttttggccttcgttcgcacgcacctagttcatttaccaaaatgaatgttttacgagttcatgcactagattacacccacctaacaaattcatatacagctaatacgatttactcaaaaatcaaagtaggcacaagatggagacatatatgattgtgttgatgtgaatctacagacaacatttaaacatccggtgttcaaagaccataa

SEQ ID NO: 11470 - DNA, 954 bp, Oryza sativa
  Intron number 1 from transcript LOC_Os03g25090.1 (locus LO C_Os03g25090) derived from phytozome v7.0 (chr-ID Chr3; po s 14325041 to 14325994 reverse strand)
aaaggtaggcatcgtaccttctctgatgattcttatgttcgcttttctgttagatcaaaagcgatgttccttccttctttcacttcgcgatctccttcgcgagagcgaaagtgctgataacgtattgtgaatagaattgattgagcgagagagattgagtgagagagagaattgcacacaagaatgtagagaatgaatgagccatcctttattgataacaacggttacaatatacagggagagaggcggcaacagaagacgcgatggttaccatcgtgtcgttactagaatcgcatgcatgaggcacgttggatcagataagataaaaaaacgggcgatgaaaaaaaagatgggtttagacagcgactgaaggtgcgtgggatcaaataatataaggaaaaaccggactaacggaaaaaatggcgatgaagaaaaaccggatggatgaaaaaaaaatatacggacgaaaaaaacggcgatgaaaaaaaaaaggaaagacgaaaaaaactgaatggatgaaaaaaaacgaacggacgaaaataaccaacaggaagtctttctgattttttattaggtatatagatataaggtatgtttagattgtagccaaaataaaccttaccaaattttggcaatgccaaaatattgtcaaaattttggtaatttaacaatattgccaagttttagcatgatttcttatttatttaccagagttttgtaaaaaactaaatggatgcaaatatttaataactttgctaaaaaaaagcatggtttaaaatggcatcaatctgaacaagctcgtagatttttccagcttgtgcattgtgctgctcctcccttttgtgtgaaagtcagaattcaagtattgtggctattgtccttgttggtgtgttgtgtgaaatatgttctatttattcaggcaagatcattacaagtagaggaagattctacttg

SEQ ID NO: 11471 - DNA, 602 bp, Oryza sativa
  Intron number 2 from transcript LOC_Os02g48964.1 (locus LO C_Os02g48964) derived from phytozome v7.0 (chr-ID Chr2; po s 29934175 to 29934776 reverse strand)
gccagtcggtatgtccaatcttctctctttgttgattcattgcatgtgtaatcaagttttcgcaacattattttttgtgaagttctttttttgtttgttggaacactattcactgatgatgacgaggagcgtaagatgagtgaacatttgtgcaattgggcgagatacttattacagatcctcctgtttagagagctatccgagtccaattaacgacaatactaactgcatgtgtgtactgttgtctgttgagaatcatgagccttataagctgtctgttgtttacggattgatttggttctcctttgtctcgtgcaacaacagtatgtgttgatcaaaattggatggagggagtagtattactctgtaagaatacataagaattcctgccacatgtttagttctagtttcctgctatgcaaatgctatgtcttgataaagaacaaattgtgtattttcttaataatagtaatcttcaactttaccaatactagagtttctacatgtatggttttcttgatatagtagcaatttgatcattgttcttattaaatataccacactgcaatgctctaaattgttgtttttccttcctgtgtaga

SEQ ID NO: 11472 - DNA, 670 bp, Oryza sativa
  Intron number 1 from transcript LOC_Os03g01520.1 (locus LO C_Os03g01520) derived from phytozome v7.0 (chr-ID Chr3; po s 336721 to 337390 reverse strand)
ttggtacggagttcttttcagaaaaataggctcaagattactacaatcgttatgcaaaaaaccaatgtcaccaaggagtacaacatatatgagattgcttgctactccaagcgcacaagctagaaaaaaaaagcaatgtcaccaagcgcccagacctattgatatgaggtgaaaagatggtctcttataattttttttctcatttgtttcagctcggcatgaggaggggtaaattcattgattcatcattcattttgcaggggtgtggaagaaatatagcactaaggggtgtgggagaaagatagcactgagggaaaaatacaacatttcattttttttttacatttgctaaatgagacttgttcatgtaataattcctctttttggctgattggtgaaccatgttgcttgatactaaattgaaagcttccgaacagttgtgatgtatggtcagaaaatgtcaaatgtggttgcacttgccgagaaaaaatgtacctgatacctgaattttgtttgatacttatacttttgaggtggtcatggtaccttgatgtgagatgtactgtgaggctaatacctgtactgtgtggtgccagtcatgaaacctatagcgacaatgtattgtaatgtataaggtctggtgtctgggttaagacctggtacctgggtt

SEQ ID NO: 11473 - DNA, 697 bp, Oryza sativa
  Intron number 1 from transcript LOC_Os01g21200.1 (locus LO C_Os01g21200) derived from phytozome v7.0 (chr-ID Chr1; po s 11824379 to 11825075 reverse strand)
acacgtaaggtgtgacgctctatcattatttatcgtcttaaaagattatcttatatgaaataaaacaacaaatagaaaatgtcggtagggagttaaatgaaccatttgtagaaaatcttacaaattcttagaaaaaaatggtattttcttttcacttaaattggaacacactaccatgaccattgcatcattttttaagtgccatgctactggccttccctcaattatatgcggtggcataatgagtttcttcatataagccactaacatagcaatacatatctgatttatatttcttactattaaatttaaattttaagactcatattaactaggttttccttaaaaaatactttagatcccgcatataattgggaaacagggtctacgggatgcatgtcctctgtttttatctattcatatgtactccatcagtcccaaaataaaatcaactcctaaagttaaaacatttgttctcaaataattcaattcctattttcttacgtaactttggtccatgaaccgagaaatttatccctccaatacattttacctgccaacccttcaatgctactttcttattaatgagacattttgatatttttgttcccttttcttggatgctaggattggtttttctactcccttcctcttcttaccagatttagcggtcgagaaggggcactcagaggtagtc

SEQ ID NO: 11474 - DNA, 729 bp, Oryza sativa
  Intron number 2 from transcript LOC_Os01g40570.1 (locus LO C_Os01g40570) derived from phytozome v7.0 (chr-ID Chr1; po s 22908552 to 22909280 reverse strand)
agttcaccctcaccacctgcacccccgagggcgtcgtgagtatcctcccctccctctctctctctctctcccactcggatccgtcacccaccatttcttgtctggcacgatttgtattctcgtgtcggtgtgaatttctgagtagacaatcaccacttagaggggctgatcatttctggtgattttcttagctagatcatctttagtcatccccatattaaaagaaacattttacgatttgtgttgaatagaagagaatagaatgtcggatgaaacaccgtgtttaggatctacatacgtgcatatttaagatcagatgatgtatgttgatgggatgagatgtccactttatagatgcttgcgcactactagtctataatacataggggcacctccacttttaagtgaacaacacctgatatttcttttaaaagtggaggtaccttcaaaaccttccaagcactgtaaaatgtctcttgggggataagatcatagatttattgccgtcacattgcgactgtgaaatctattattaagtgcaattggcaccttccatgcaacaatagcacatatggtctgtggttatgaattgtttaccgaggagattgatatgttatcagcaattcagtacaattgcggttcagcatgtctgcgcatttgatttgtgctttctatgttaatgatttttgtttgtactgcagactatcacagctgcaggaacaaggaaaa

SEQ ID NO: 11475 - DNA, 743 bp, Oryza sativa
  Intron number 2 from transcript LOC_Os02g46720.1 (locus LO C_Os02g46720) derived from phytozome v7.0 (chr-ID Chr2; po s 28529086 to 28529828)
gtattactcctgaagaaaaaatacgcattttgaaggtaacaatagcataatctgttaagaatttatcattgttgtgaaatccagtaatactgtatgcattgagtatctatagattttttttatggttgttaattatcatatggagctcactttatatggtcatatggttgcagtgcttatctacagtagttcaaagtattgtaaaggttcccatgtaataattctgtttgaatttatttcatgtatgctgctttcctttcacaagatgttcacatgaacttttgtgggtgcatgagtttattattgtactagggcagatctttctcagtgacaacatgcttatgtatctgatttaataatgaaagggcctgacaaggatgtcatctatgcgagtaggccccagaccccaagttgtttccccggtaattagctagtgttagtgagctaaccagggtacacaaggcattccattctgcccactgcctcttctttcttttgtttcctttttctttccctacaggattgctttaagctaattgtaatgttttttcccttctgctataacatacacacagctatgctgtttttttcataaaggaaaaaaatgaagaatgaaaatgccatggtctatttgatggtgtgaatcaaatttcctacatcctttttttaaatctatttaatgttgttcactggagtactttataacaggaacgacagaaattgtattccataccagaggaaca

SEQ ID NO: 11476 - DNA, 919 bp, Oryza sativa
  Intron number 2 from transcript LOC_Os01g37120.1 (locus LO C_Os01g37120) derived from phytozome v7.0 (chr-ID Chr1; po s 20719687 to 20720605 reverse strand)
agcaacaaggtgctatcgccaccaatcggaaggtactatttttcaatcattcattatttatgcattctggatttaaattgttacttatattgactatttatttgaaattgtttatctagtggttagtgaatctgtgaatttgaggaaattgtttgagtgaacacctttcctcagttattttccttccttgcatttcctctttgtttccccctttttttttgcattttttctttcttgtgtttccttggtcattaacattgaaaaataactattctattttattaaattttacaacgaaagtgtagttttcaaaactgtagatttacatgttttcagtgtttctttgaacaggtgtaaaatttttaaaaatggtttgatattcacccatttgttaagaggtgaatgtgtatatccattccaacagtgaagatgtgttccgttattttcttgcattagattattagtagtgccaatactaagatataattgaaatggggcatgctgcttcagcttttgtggttgaaatgaaataaccaaagtagcaggtggttttttttatggatgataaataggactttatgcaaacaatgtaaagaattgtatttggtgtaacgacttctttgtaacatgaggttagctgcctaacattaagtcggggtgtattgagtgttggttccctagacaccagaaagatcgaagatcttttaatcagatatttgtaagaatttttggttacccacattgaatgaaggttatgattgtcttttctatctcagacaatctacttgctactccataaggggctcttcattgaagtaccatgtggactgtttgtctccttaagtaacatataattatgccgtgcatcaattttactgtgtggttatccattttcagggccttgttttcttcaactgga

SEQ ID NO: 11477 - DNA, 209 bp, Oryza sativa
  Intron number 4 from transcript LOC_Os01g42490.2 (locus LO C_Os01g42490) derived from phytozome v7.0 (chr-ID Chr1; po s 24158628 to 24158836 reverse strand)
tgcgatcttttggcgaacagctaggtgtgtcaatcctgtctttcccttcttcttcttttttttaaagaaagaaaccttttgtatgatacaaaattatttctcctgatgttatacctacattaaaaaacttctactttgacttctcatagtcatccaaaatttttcatcttgtaggtttcagttgcgctatcaagaggatatcgagttca

SEQ ID NO: 11478 - DNA, 629 bp, Oryza sativa
  Intron number 3 from transcript LOC_Os02g52290.1 (locus LO C_Os02g52290) derived from phytozome v7.0 (chr-ID Chr2; po s 32012557 to 32013185 reverse strand)
cagtttcaatataggccagggttcggtgatcaaaggtaatctcatctcaaataactattcaattcatacacaatgattctgccagttggtaatcggtgcatatgttcctagattctgtggttacatggtggaaacaaaaaaaaagttgttatctcatcaagggattaatcatctagttatcccgattgccaatttcattttatttcacgaaagtagttcctcgcattgactaatgatgaataagaacatgagatcactgctgtttgtgattttttttcaattgtacagttgagattatctaatcagatttatgatatagctagaaaggtgcactgtttgccttcactgtttatgttgcatttagtttgatcataacttgccagttgtgtcttctcgttatgatgacacactctcatgtatccttgatttattctggttgctatataaactggtgtaaggcatattcgaactgcaatactgtatttctgttgctgtataaacttgtactattattttagaagttcaccatacatttccaagaaccaatcaaagtcatatcacatcccaagcattgacaaatcaagttgactctttcgattgaggtataacactactctcttgcttatagg

SEQ ID NO: 11479 - DNA, 529 bp, Oryza sativa
  Intron number 3 from transcript LOC_Os01g01720.2 (locus LO C_Os01g01720) derived from phytozome v7.0 (chr-ID Chr1; po s 384075 to 384603 reverse strand)
ttgcagctgttgcttcacaacaaggtaccctattgctctacatgataaacatttagcactagcacagcaatgggttgcagtgatattatatcactgcgtttgtcttacttttggttgagtggattgtcctaatatagtattatgacataatagccaccaggctttgctatattgttgttggttaacttggacgcacacaacatgcagaagttttattggtttcactgagtttgctcaagtgatgatctattggcagcttcttttcttttgtttacttgattggaatgtcttattttcagctctttttcactaaattaattcaaattacatcaagattttagatctttagattggttctataaattattgtgctttgatagtagttcatatctgtgattgcaagtctgtacccaaaaatcttacaatacactgaaaaataaactctttttgttagcttgatcacttaaaggccgtgttattttctttgcttccagccggcatcgcaaatcaatctgctggagtacaacct

SEQ ID NO: 11480 - DNA, 871 bp, Oryza sativa
  Intron number 1 from transcript LOC_Os03g13000.2 (locus LO C_Os03g13000) derived from phytozome v7.0 (chr-ID Chr3; po s 7022362 to 7023232)
ccgcaaggaagccgcgctcacctccaaaaagcctggtgatttttaagcttttatctgtttctgcatatctgtttgatgatgcaatttctagtttagctctgaggtagactcccaactcccaagtgagtttaggactgtggtagcgtcaaccgtcagtgcgatgtcctagactgcaaacacattcgtttgctcgcaattcgggagctgaagttagctcagtgcttaaagcaacagaagaaattaatttagcttacggtgctacgctactgctccggttttgatggggaactttgatattgctgcaaaccttataaatctattgattatgcagttttatggaggacgagtttggtatttgtgcacccttcagaaccgaatacatggttttttcaacttgtttatctttctatcctattcgttgcttaactcttaacaaaatgccaaccttcagaactgaactgattcctttgttttatgatttgctccatctaactctatgttattttcatatcaaacttcatgaatatattggctcttggttaacaaaagttggttaaaaaataccatgtaaattgctggagaaaaggtatatgcacacaattggttttggatggttgaaactgtagaattgtagactagtgagagatattagggttattttaggtgtataagaaatgtaattgtatataatgatgtatataatgcatttagctgcgtaattgcacacgaattcagataatgtagtttggcattacaaaaccaacatgttgttatcttctgcattttgttgaaatgtgtacttctgttgttacatggaatatcttatgctttcatagggaagacccagacgattaatcatttcttggttaac

SEQ ID NO: 11481 - DNA, 973 bp, Oryza sativa
  Intron number 1 from transcript LOC_Os02g57450.2 (locus LO C_Os02g57450) derived from phytozome v7.0 (chr-ID Chr2; po s 35203999 to 35204971 reverse strand)
cctgctcgagctcgaggcccccatcaaaatctgcggtaatttccctgtttcttgtcacgcgtgagcaatatctttgatgttggctgccctcgaaaatgtcatcttggggatttgcttggttggtcaacgggtagcaagtgactgcgtcgtgctgtttggatgcacttgcttaatgtactatacccgatcttttgattgatagccagatattatccagctttttaggtgttttgtcgcttgatgatccggttatcgactcgaacagaggtttaccacatacttcctaatgaatcatgtgattcagtatttccgactatatgtttgctcatagaaagcttatactccgtgaggcagacgatggttatatctagatttctcagtggttcagtacaactgaaccataccgactatatttgctgattgaaagctgctattttgtgaggcgatttgttgatagaaagatcaaagatagactttcaagctgctactaggaaacttttgaccgctatagtttatggtgaattgatcatacctgatacaatcacatttaatgtatctcaatatctggcggtctgggtacaccagcctgatattgcaagttttttctcatctcaaaaaagggagagagagagaagtcttcaattttttccccaggtttcttgctgggtcctgttgatagaaatatgccaatatctttaggttgtgttccattcaggattttgtgttagtatgaattaagaggaatctttgatcatagatgttaaggctgtattctttttcctcatggcatcttgccattatattccatgagaaacaatagttctcacaaatcaataacatttgagcaaaatgtggcagcagttgacattcattttttttatgaattccaatatttgttgtgagcaaaccttaagcagctttaataacacgtcatcaaatttattaatcttgcataatttcttctgatcaggtg

SEQ ID NO: 11482 - DNA, 823 bp, Oryza sativa
  Intron number 1 from transcript LOC_Os03g08430.1 (locus LO C_Os03g08430) derived from phytozome v7.0 (chr-ID Chr3; po s 4327367 to 4328189)
tccttcagaagttccggctctacgagaccagatcggtagggatcctcttgcaaaattttgttttctcatcgttttgatttggtttgaattgggttgtaggtttcatatatatggagagatctttgtgtcagcaattgaagctcacgcgctttactttgttataatggctgtgtttttgttcgtttatggttgattagattcttgagtgatttaatgtcctcactgtctgtgtgagggatctcctttatgattggttcgcttcgtttttgttatagggtaaaaggctgcaaaaaggtgagggaagatccctccttttgttttcttttgcaggggagaagagagtttaaaaaaagaacttataaaggggggattttttcttaaagggggctatcgtttttcaggcagattaaacatttgctttctgatgatcttgtttaatcatcattatctaaaaaagattttgtttattgatggatgctgaaccgccgtgttgtttgcccacgaatgtgtaattgaatcctgctatgctagtgccaaaatacattgtttgagctgatcttgtgcattactgtatatatattgggattttcaacgcgtagttagctttcagcttcgtgatgcagaaaccaaggtttctctatttgtacagcaacaatttataggagctatttttcttcctcaatgactgtttcattgctacaagggagtgttgatgtctaaagttgttctaaaaattatcccttgtttaacttttgttgagttgacatgagtttgatcttttgttgtagaaattttatcttatcggaagggacaagacaaggac

SEQ ID NO: 11483 - DNA, 616 bp, Oryza sativa
  Intron number 1 from transcript LOC_Os02g10300.1 (locus LO C_Os02g10300) derived from phytozome v7.0 (chr-ID Chr2; po s 5411895 to 5412510)
gcaacaagaactacaactgcaagatcctccccaatgtaagcaacccacacccccatcgtctctctctatagctacctcctcctccgtttcatatcataaagtagttctatttttctattcaaacttatttaaattcagctaaatttgtatatacaaaaaagtaacacctataacatcgaattaattagtttcgaataaatcttatactctctcgtttttcatgcgcacgctttacaaactgttaaacgttgtgtttttttataaaaaatataaaatagttgtttttttaaaaaaattatattaatatatttttaaagtttattttagctaacgtttaattaatcaaatgctaatagatcactccattttgcctttgggaaggtggagtttccaacctccacatctgaatatagcctaagctggtcttttaaccagcaaacactattgagtatcacagtccatttataattaattgacatgggcaaaataaccaatgctgtgatagtaatttgtattgttatcttcttgcttctctgtatgactaataatgggcaattaattaaaacaatggatggatgcagagcttggtgatcgactactcgacgaacgtgacagt

SEQ ID NO: 11484 - DNA, 879 bp, Oryza sativa
  Intron number 1 from transcript LOC_Os02g54930.1 (locus LO C_Os02g54930) derived from phytozome v7.0 (chr-ID Chr2; po s 33635759 to 33636637)
gggaaatacaaaaagtcccaacatcgacagctgtggtaagtatctaaactccttgctccttacggtgttcgtcttggtaaagcatgtacgatgtacaggaaccacggcttcacctagtgctaagaagttgatttagactaaaaaggtgatcaataagttctataatggagtccttaattaagcctctcatgtaatttcagtttttgggtgggcaaatttcatttaagagcactgtaaaaagaatgcatcctatcaaaatgtaacttcaggttcattaattataaatagttacatacaattatttcaatagttatcaaagatatgtgtgataacaaatgaatttataagtggattgaaatagtattttcctccggatgcccaacgtccaactcactgaatcaattcgatggcagtggttcaccgggatataactaatactaataatttcccgaaaaaaagtaaggagtagtactagctattcatgcatttagaaaaaaaaaaggttgctcctaacattatataaatgactggtgtattgctatatttgtgtatctatatatgtttgtctaacgagcaaagctgcagcaagcaggggagtggaaacctataaaagataattctacaatgtgtttgcttaagcttaaatgaaatttgactattaaagatcaaatgtatttgactctaagtacacatttagcttccggtttgctgtgaagggtgtattcactgattaagaatgaattttgataatttatgaagcaaataataaagcaatcaaatattgtattatcaggtatttctttttcttgatgttatgagttttaaagcaatgactgtaatattgatttgcgttattggtctttgcctgaagtgacaatt

SEQ ID NO: 11485 - DNA, 735 bp, Oryza sativa
  Intron number 1 from transcript LOC_Os01g45360.1 (locus LO C_Os01g45360) derived from phytozome v7.0 (chr-ID Chr1; po s 25747767 to 25748501 reverse strand)
gccggcgaccactacggccgctacgagcagtacaggttagcgaccacttttgcctagatgctcgttttttttttctcttttgtttgtcacgttttagtcggatttgtccgggttttgacggttacgggagttggtacttgtaggagtagttagtatctgacttcttgggagttggatttatttttctgtcttgcaattatgggggttaattgaaattatagtcgttcttactaaattgattgttcgagaattttcgttactgttccccattggtttttgtcattttgctgtatacaaacgtggatactggttctgggaagctatattctgtactcttgttcaatagtacagagtagtatttcacgtgctctgcttgaaattcagattttatcgtggttgatccgttgatgttacgtatgttgtgcaccgatttttgaaaaaaaaatattgttgtacaaatagaacttgcgagtgaagattaagaaaatttaaacacctcgtgaatgcagagatacttgttttgattcaggtcgcttagaggtagaacacaatttcagttttaggttaagacaataatcaaacggttttctctgaatttctaaactagctcaactctacactaaacagaggaacatagcttcatcttttggtggtttaataactttctcttctccccattgaacaacactaaaacttgcaggtacgccgtcggagtgaacatcgtcgtctgcatct

SEQ ID NO: 11486 - DNA, 779 bp, Oryza sativa
  Intron number 1 from transcript LOC_Os03g27780.1 (locus LO C_Os03g27780) derived from phytozome v7.0 (chr-ID Chr3; po s 15931860 to 15932638)
gcgccggcgacgacgacaccatctcggtgtttgcggtaatgcctcaatggcctgcgtgctcttttttcttttcccgttattactgtctctgagaccaatagtccagtttgttgttgttgttgttgttgctgcgtgtttgttgcgataatgccattgatttgagacctataaactgaaaattcggttggaagtcagtgtttataatgcctaactaggatagttagttatcgcattatcttgttaagctttcttttttttttcctcctgcaaaataaaatgtttggtttttttttcccatcgtcaatctctgtgcctaacatggtgcgtttgtttgttgtttgtcccttgcatagagtagcatgattgatatgtcagcctgattttgcggtgtgtttgcatcaagtcacatgggggacatatgtcagctaatattttacttgccttaactgtctctgtgtcaattatttcggtggtcagaagaccagtggtttaggaatattcaaagggagttttaatgtcaatagatgatagatctttcaggcctccaacagttagcattatatattcggttctactaacttgtctatcaacttaacatggcatttttaaataaatcattgcagtgtaaatggtaatattcaggccacaatgcaatactgtgtgatagtgctgaactatgagtctcactattttgtttcgatttttaaacttgtgtgttataacaactgaagtggccactgatcttgaattatttatcctgtcttctcttcagatcttcg

SEQ ID NO: 11487 - DNA, 623 bp, Oryza sativa
  Intron number 1 from transcript LOC_Os03g36930.1 (locus LO C_Os03g36930) derived from phytozome v7.0 (chr-ID Chr3; po s 20494440 to 20495062 reverse strand)
tccgtctgccagatcgtcgacaccgccgtccgagagtacgcctcctcttactcttactacccccatctttttcactactagctgccagacattttacttgtttgcgcccttttccgaatgcgcgatttattttacttcagattagctgttaggtacagtgcagtaattaggacctaaataaatgtctggataggattcatttttattccttactgcaactctcgacgtttgtgtagatttgctatggttgtgacttggcctccgagctatttgattcagggcaccgcaatttgtattctgactttctatgtcaaggctcatgtttttatctgttttttaccttatatattgctattgctataatattttctttcctgatctttcgtcggctaataattagggctaggaatttatattttttgaaagaaaaagaaactaggtattgtataatgtagtgatggcatccatgttaattatatgaatttttctatgccttgttctacttattaatgattattccctgtcattttctatgttccattaatcgttatgtctgttggtagttaatattgtttcttcattttaaagggttcaggccttgatactctcaccaactagagaac

SEQ ID NO: 11488 - DNA, 474 bp, Oryza sativa
  Intron number 1 from transcript LOC_Os02g47780.1 (locus LO C_Os02g47780) derived from phytozome v7.0 (chr-ID Chr2; po s 29219225 to 29219698 reverse strand)
ggttcccggacaggttctacaaggactatctcaaggtaaatttaagcatgcccctgctatcatttgccatatttctaatttacttgcttgatagaaaaaaaatcttatcttaaaattgtattcatccctttttccatcccttccaaaatataatgatttctgggagttttagcatgaactaattaagattggcagagaaatggttacactcgattaagatgactaagtatatgcagaaattaaactagagatgttattattggttgagataagaaagtgagtgtacaaaatatttatattatgttataaattttgaattttaaaagtattttagaacggatggagcctggatggagcagtacagtggagtactcatgattggactagtgttcaggtgttagtttgtgtatgttttaaatttggttggttaataacatgtttttttttttggcttggtttggtgatgagtaggcg

SEQ ID NO: 11489 - DNA, 1002 bp, Oryza sativa
  Intron number 1 from transcript LOC_Os03g37790.1 (locus LO C_Os03g37790) derived from phytozome v7.0 (chr-ID Chr3; po s 20952599 to 20953600)
agaggtatgaaattcccacagtggctttttttggtggctaaaggatgttatatgagtggtttagaaataaaaagggtatttaaagaaattaaaggataattaaaatttaaaaaaaggtttttaaataaaacaagaaatttaaaattaaagggatgtaaagtaaatcaaataaatttaaaataatttttaaatgttaattaaaataatttaaaattagaaagtaaataaataaataagtaaaaggtttttttaaataaagaattttaaataaaattttaaaaataggaaatttggtatcaaaacgaagagtttgaaattatatgaatttaggtcaaagtctcactgggattggatttgtggttggaaagatatgggtgtctaaagattgaaattgaattaaaatcaaataaaagagaaaagttactgtgcaggggggcccacttgtcatatgtctcttcttcctcccgttcttctctcctttcttctgtttcttctcccgagcaacaacagagaggaagagggacagggcgccagtgcttcggtggttgaacggcctcgacggtggcggtcaagcgtgttcccgctcgctgcacatccggggaggtcggtggaaggcaaagggagaaaagaggatggccggaacagcggcaacaagagctcagctccggccggctatggtggtgccggtagtgcttgtggcagtggctaaaggagaggggaaataggaaaaatggaaccacctcggcgaggcggagttggtggcgcaagggtttggcttgcgaagctccgttgagggagatcggccggtggcaccaatggccggacatgggagagaaagagagagagcttgagcagctcggtttgtgtagggaggaagagggaacttcgtcttccttttataggcggcgagaggcggtggatagaagagaaaccggcgacggcacggcgtgcttcgatttaaatgcagagaagcggcgccgggtggcctcgtcggattggccg

SEQ ID NO: 11490 - DNA, 551 bp, Oryza sativa
  Intron number 2 from transcript LOC_Os02g56020.2 (locus LO C_Os02g56020) derived from phytozome v7.0 (chr-ID Chr2; po s 34291417 to 34291967)
ggccaggtataatatgcatcttattaatgtatggttcaagaaatttcaatctcatatgttatgtttatgctgtggtgtatgccaatactcttaaccgtaagggaaatgcttgtcttgtttatttctagtatcacacttgctctacttaataaatcataagtggcagggacatactcccttaataacactaatatttttcattacttttgctattgaccgtgaatccatgattgttctcaaaataatttctactctgaaagtaactatgagtctaggaattcaaacctttctggagagaacaagagagaattaacccaaacagttggcttctccgatagtactatgatttctgaatggctatattttttttctctgcacatggcctggcgaataatattttctgcacaatctcaccatcctttggttaacacaaatacagcaacttcttcacagttgcttcaccacaacttgtctagctttaaggtgctgcatgtgtatttatttatattcaatcctgttccagggtttaggcttgcggcctggagttattg

SEQ ID NO: 11491 - DNA, 1010 bp, Oryza sativa
  Intron number 2 from transcript LOC_Os01g42490.1 (locus LO C_Os01g42490) derived from phytozome v7.0 (chr-ID Chr1; po s 24159795 to 24160804 reverse strand)
gcgattcacgcagcatcggccaccacgccaagccggtaacatcttccagagtctgtgatatattctgtctcaatgcttagcactgcagtagtagtagaatcgcatagcaaaccatccagggagcacttctctgaagtaaaaaatagtgtaattgctttttactttttgtgtggaaaaacttttaggttattaatgatcggagtttcttaatatttgatggcttagcacttctctgaagtcaaaatggtgaaagcttttcaatttggtttgtgtactaaactagtaatggattatagtttcacttgattttagacaacagatgtgccatgtggtatgtgatatatgatatatgaaggaaaatgatttagtttatgcccctcaactcctccaaaagtttacgtgttcacacctcaattctcaaggtggatgaaaaccaccactgaaccttctataccagataaattacacccctaaccgatcaagcctgaaacagacttcagcgccacatccactgccatgctagcactgatgccacagcaaggcattggaaaagtgatacagtttctctttccctcctattacctttcccctctctcctcagctaaatcaatatcacagctaactatcttgttctgtgacaggataatgggcaaagagaatgggagagggaaacagaaaagggtccatgggcatcttatccatgagcaaacaccttatttcaagcttatgattgtaatctattcagttttacagttgaggggtgaaaactaaactttcagaagtattgaagatgtaaaagtagacactttccgtatatgaataattcagtcagataattacccatggacatggtgtgttttagaccaagagtattaaagtcgagtaatcattatgtgtgtggaattgatgttcttgttttaaaattaccacgtgttttcctttggtatattgagtagatctttttttatcatgcagagaggtttaaggttctatcatacaatatactagct

SEQ ID NO: 11492 - DNA, 462 bp, Oryza sativa
  Intron number 2 from transcript LOC_Os01g15448.1 (locus LO C_Os01g15448) derived from phytozome v7.0 (chr-ID Chr1; po s 8656659 to 8657120)
gctgcttgaggtttggataaacaaaaagatcaaaggtgcattcttgttttatttggtagcaggaggggccattcaacttaggaaaagtctatacgtactaactttttcttactaaatttttactaacactgacatgtcatgctatgagtccatctagattttttataacttccatctgcttaaatcaaacggttgatatgattgttagtacaaatttagtaagaaaaaattagtacgtgtagcagtgctcttcaacttacgttcttgcaaagtaactgttttcttgaaaacttatgatgttgtattatacaattgaaagcattactcttcttttgtcttggataatgttgggttgaacaattgaaagcatgtaacacctttttgtttgttgcctgtatatttttgtacatatacttactcttcttacttgctgatgcagaggacagtgccattgtctgggaa

SEQ ID NO: 11493 - DNA, 810 bp, Oryza sativa
  Intron number 2 from transcript LOC_Os02g40880.2 (locus LO C_Os02g40880) derived from phytozome v7.0 (chr-ID Chr2; po s 24772672 to 24773481 reverse strand)
tcgtcgaccagaaccgggtaagcatcgtcttctctcgtacgccttgaactgtttccatttgtacccgctttataatttggatctatagaaattatactagtactagctggtgtgataaactcttgctgctattgtaatttgtttctagtgagaaatgtaagaattgttaacgtagtagaatataatggaacgccaaaaatgaatcctttgagagtagcaagtctcttctgtttccgcacagccttaaatggaagaatattctgcatttgctgtggtgtactccctccgtactcgtaaaggaagtcgtttaggacaatgtttaagtcaaacctcgggaatataaatcatgaataactctcaagttgttgagtttgaagatgtaaaaattatatgaatagatttgtcttgaaaaatattttcataaaagtatacatatatcacttttcaataaatatttttatagaaacaagtagtcaaagttgtgttttggagaccgtgtcgctgtcctaaatgacttcctttacgagtacggagggagtacttgatctgaaaaaatgtgcgtcaagtctagaagtttatcagcattagctcggactacttggcaatttacaataatgaactatttattgacaatgaggttttggtttacctatgattgatagtgttgatggtgcctccattggcggatgcattagtgccactattatgttatcgctgctcatttttctaatcggagttaattatattgtagtgctttgattattggatatcacataactctgttttctgtgaatcaccaggcacttgtgg

SEQ ID NO: 11494 - DNA, 763 bp, Oryza sativa
  Intron number 2 from transcript LOC_Os01g01380.1 (locus LO C_Os01g01380) derived from phytozome v7.0 (chr-ID Chr1; po s 190671 to 191433)
gatttctcttacattacacttgaagcacttccaaggttaataattgcttcaccaacaacacaagctcaaattatcatggcagcaattaagattttccccaagcttgactgtactgtacgttgcctgttatccatagagttcatgaggtgttaatggatatatgtgtgcttcttggttaaattcgatttttttttactcttaagttggccaacatttgcattgcttgttcacttcttacatacgaggcatcattcattggtttaacaatagatacctatcaatcatgtgcacatactccagtccaaggaatcataaagtcaaagaaagaaatttaaaattacacactgctctgatttacagtgatagtagtataatctagtccttgaacacctaagctgttagttattacaagtgtgaagttagtttttgcattacgggttaatgtgaagaccaaagctctgaaaacatcctatgaaaaaaataaggcatctatgaaataggtaaaaatgtgatgatactctcgatgctatctgtcgactttatgttgtgaaattggacttaccaataaaactggctagtgttctgaaatggagtagtagaacataagggactaatgatatatttttctttatacatcgaccttaggtggatgctctgcattgttttttttttcttgcagttgttttcaccacattttaaggaagcatttttcactcttgatgtcacaggttggaaagcagatcgttctgggcacgttggaaga

SEQ ID NO: 11495 - DNA, 514 bp, Oryza sativa
  Intron number 3 from transcript LOC_Os01g01380.1 (locus LO C_Os01g01380) derived from phytozome v7.0 (chr-ID Chr1; po s 191472 to 191985)
tggcatccaagtcagttcttctgtttggcgatcaggtagtgtaatccactagttggtagcatatgtatttgacttaatttgttctaaaccatcactgcaattatgttctgtgttacataatttagttcactttgcaataatcatgtgtctgtgtttactgtttatattatactctctttgtttgtgaatgcttggcactttataacctgattcatgttttctcaaacctctgaagaaacaattaatggcatcccatttcctcatgtcatttcctgtgattgacatgctactgaaagataccttagtgacattataaaaattagatatgacaatcaagaatcaggtgattcaaatttctttttgagttactagctatctgtatttgtttaccctcttgctgacaagctggggtcattaataccaatgttctctgttccctttgtgaattgatttcgaagtaaactttatttcgatttactatttcaggtggaattgctgttattgttcctggagc

SEQ ID NO: 11496 - DNA, 593 bp, Oryza sativa
  Intron number 3 from transcript LOC_Os01g16000.2 (locus LO C_Os01g16000) derived from phytozome v7.0 (chr-ID Chr1; po s 9004649 to 9005241 reverse strand)
gaagaactgttcttgtcctgaggccaggcttagaggttagtgcactttcggcaggaagaaaggaatacattaacatcataacagtcttgttttgatatagctcgtgctttctgtttactttgtatgtatctactcatctgcattagttgtacatctgccaaccatctagtatgctctgaaatcagattgggattataccttccagataaaagggacataattacttctccatacaatgtgtgcaatgctatcatgttatccttcctgctatgaatcaaatcgaccatgtggataacggagggatacatacatctttacaattttagcttgaagtcaatcagcatttggaaaaaccaaaaggagaatctcactctttggttataattttattattccggatttttcttattgtttctcaaatcaattgggtgtgtgcatgtgtgcattgttagatcatttgttatgaaccaatattttgtgacagctatgccacaacagtttctggtttgattgcatgctatgtgctgattttacatgtttaactttgaaacacaacagaacactacttcaggaaagggacagatcaaatatct

SEQ ID NO: 11497 - DNA, 699 bp, Oryza sativa
  Intron number 4 from transcript LOC_Os02g38250.1 (locus LO C_Os02g38250) derived from phytozome v7.0 (chr-ID Chr2; po s 23132652 to 23133350 reverse strand)
ttgagctggaacgtgagcatcatctgaaagttcaagtgtgtattcatcaatctatactgttatatctttcttactgaatgcagtacttatgggctgatttttctttgatgtgttggcaatagaccattgaattattttcattaccattaatcctcattctagtttagggttaccatggcattaggttacactttacggatcaactttatatctttttcctcacctttatgtaggtattttaagctatccaggcatgtggatgcttccattatctttcatctttctaaggttatactgtatatgaattcctgaatgaagcttttgtttgttccctttaaggttagtgtagtgccacactgatatggttggataatgacatgatgaaatttcaagaaaaacaatacatcacttctgttagttgctacttgaagaagatttttcaaatacaatactgcatttacttcaaattggatattgtgatccaagaagtttaacatagaaagccaacagggatgtcatatgactaaatttctaagtattgggtatcatagtactaattatctttttggctgatgttgcatgcctttattttttaccatgatggatttattaaatctgctgaatcctttttgttcattttcttcatatgattttttttcttcaggaggaagtcagaagtaaactatctgcattggaggt

SEQ ID NO: 11498 - DNA, 630 bp, Oryza sativa
  Intron number 3 from transcript LOC_Os03g25770.1 (locus LO C_Os03g25770) derived from phytozome v7.0 (chr-ID Chr3; po s 14751101 to 14751730 reverse strand)
aaagatatatatcttccaagagattattacactgggtaaggcacctcaactcaaatagagccagtgttcattttcaactggaggcctacatgctgtttagggatcaaaccatgagatgtttaggatgctgtgatattttttcaatccagtaatatgctatttttggattcatttgcaattggcttaaacatgtgctttggaaatgtttgtttgtgctttagtacatttggtacacctaaattgaatgatttttgcccacctcttaagattaactgtgaaaataattttttgaagacacaagccttaagagtactctgttgaagagaagggaagaaatagagtataagagatatgcaagttatgaagagtttcaagtctatctttaaactctgatgagtacaaggtcagcagcctagtgcttgctttatctgttgaaaaatttgtgtatcaacatccagggaaaggaatcaaggttcaaggatatgaataatcaattgttcctttacttgactaaagtcaagtatccttttcaggattttcttgtatactgttcagaattgtgcaattaattaaagctaaatcttgttatctgtaacagggagcctcgaggatttgggttcatccaatatt

SEQ ID NO: 11499 - DNA, 590 bp, Oryza sativa
  Intron number 2 from transcript LOC_Os03g25770.1 (locus LO C_Os03g25770) derived from phytozome v7.0 (chr-ID Chr3; po s 14751769 to 14752358 reverse strand)
agtcttttggtgaggaatcttcgccgtgactgtaggtaagtttctttgcaccttggtcagtaactgaatgagtgttttcttgttaagtaacacatgcaatcacacattccggttacactagttgtagttgagttggtgcaattcatcatcatttgggccaagataatgtctctttataaaattataatactactgatgtgcattttttaaatccgtaaattatttttcatcttgagcttctattgcatacagctcatgagcttggtttgcaatgccaaaattcatttagtcatcacttataaaccaaagaagcattgctttggcgcaaaacagattggagtgtaaatctaaacattgttcttctgttgtaatgacataaggcaaatgagtaaatgtttgttgttttcctaaggattttttttgtaacctgtgttattattgtcatctgttggatattatatatttgatttacagaagttcgtaactgtaaggatttctcgccttttcatgtcttttaatttcaatgctattttaccactttctccatgttgcatgtctttaccttagacataattatgaatacaggcctg

SEQ ID NO: 11500 - DNA, 401 bp, Oryza sativa
  Intron number 1 from transcript LOC_Os03g08740.2 (locus LO C_Os03g08740) derived from phytozome v7.0 (chr-ID Chr3; po s 4512607 to 4513007)
gcggcgaaggcttcggtgttcttgtccgctcctcggttagtctacccactctatccttgtttcttgcttctggttatccccggagcaaataatgaaaccgttttacccccatcttgtttgatgttgctcttcacctcgagcttgatccatggtgagagcgcggagagataggaaagctttgaattatttttttggggttttgttttttttttttttgttttttggttcttgtggttgtttttgtggaggtttattgggtgctttagtggtgagtagtaaccacttttggctatttggcgatcaacctggagttgttcctgattcttttctgtgtttttttttcttctttctttggatttcttgcagggagttgctgcttgttctttgcagcctcttggtgg

SEQ ID NO: 11501 - DNA, 1051 bp, Oryza sativa
  Intron number 1 from transcript LOC_Os03g12270.1 (locus LO C_Os03g12270) derived from phytozome v7.0 (chr-ID Chr3; po s 6452130 to 6453180)
aacgggctgctctctcctttctcttaccccctcaggtgatctctagctctcttgctctatctttttcctgtgtgttcagatgttcctgggtcttgaaatattcaaagagaagttcacacaaaattcttgagttataccgttttctttttatgaaagcaaagttactgataaatagtcaatagtcatctccattacttcgttaattaattgtagtcaggaattctagttttgaacgggtaccatcaaactgtatcgatcgagatttatgaggaatatggaattgcctttgacaattgacgcaccaagcacataaacgctgccgtctacgttttctaccggtctccggtgatattttctttgtgtaatgaccgatgagaagtactgcatggctcattggttctgtaactctgttaattattgaaaaataactaaattgcttcagtcagtcagtagtaaccaatcgttgggttgccactctaacgaaaacatcactggtgtactgctatatagaaattagaacactgagaactaaagaggtagtattgtctgttgagttttgagcatttttcaagaaatttgcagctacacaatgcgttctgaattacattttttgattaaaaagaaacttatgcttggattgcaaagatatatcatttactgcaggaaagtaaaggctacacgggtgatgaccaattatgcactatacattcatcatgaagcctcgattgccatcttttagaaagaatgaatgatagccattcagtaggtagtagtggcgacgcactcatacccaacttccacggctgaaaggaatcaaaccattttggcaccgatggcttgtttgcacgccattgggcgagttcgagtcgttgcaacagcatttcttccattattcacctgctgatttatgtttatgcattgtcaaactatatgcattctccccaattgttttctttttcgtgagtacagaaaagggttaattaatcgtcatttccaccgtgcatttcatatttcagagctaagggagacgaagacgtcgttgtcaagatac

SEQ ID NO: 11502 - DNA, 699 bp, Oryza sativa
  Intron number 1 from transcript LOC_Os03g37360.1 (locus LO C_Os03g37360) derived from phytozome v7.0 (chr-ID Chr3; po s 20705629 to 20706327)
gcgcctttcttgcttggtggtacgacatcatgttgtcgtctctctcacggcctcactgcgttgccggccagcgcccatggcctcagtgcttgcttgcttgctaaacaaaagaagacattaagctgctgcttgctttttgcttgtactacttcttgttgtgcttgaagcctggttgtttcttgttgttgtgtgatgttgtccttgaatctgtaaaaatttgtttgatgatttgaatctgccaaaatttcgaatgtgtatagcaaagggtatggatgtcttttcgtcgaagatttaacactgtcaatgtaaccatccaaagtaagggtaaaatttagtttgtttcaaaaaaacaagggcaaaaccgaaaactctaaaaaacagggacaaaagcaatattagacatcaaagcaggggcaagaacaaaattgcccctttattatattacagcacgatttcatacgatgcagcagtgcatcacctacacaaacctcctaaatcgacttctgtagaatcaataagcacctaaatgtactgtctgtaagacaactccagaatcactaatagtagcagaaaatcaccatatctccattgtgtgccaataaatgaaaaaaaacaaacacatgccagccttatatcctcttttgttgagtagtacattttcctcttggcatcaacaacagcttctggggaagcagtcat

SEQ ID NO: 11503 - DNA, 497 bp, Oryza sativa
  Intron number 1 from transcript LOC_Os02g43930.3 (locus LO C_Os02g43930) derived from phytozome v7.0 (chr-ID Chr2; po s 26513641 to 26514137)
atctgatctaggagcggtcgcttcttcctcttccggtgaggaagccagcctttgccctagctatgtagctcgtgttttcgttgggtttcctgtgcttttttttttttaatttgtggccgcaaacggtgggatccatccagatctgtgatgtttgttcgtggagagtggtctcggttgatcccgtctgatacgggttgttttgatctgtagttgtttattaccctgagttaatactagcaataacaacttgttaatttggcgattgggatgaaccctaatggttctcgctgagtccgcccctatgtagtattgcaatatgtatatcattcgagctctattagaagattggttcttcttattgcaagaattgtgtggtatattttttctttgtttgcaggatattagtttgtactaatgctactcattgtagttattgcttcatgatttgttgatctgattccaagttttacgtttgtaggaagccctttttatcagtc

SEQ ID NO: 11504 - DNA, 1010 bp, Oryza sativa
  Intron number 1 from transcript LOC_Os01g08610.1 (locus LO C_Os01g08610) derived from phytozome v7.0 (chr-ID Chr1; po s 4283717 to 4284726)
taggcctaacaggtgtcaccggacaccgggtaattttttgtgtcaagttatagtatataggtatatacagcatgggacacccaaaaaaaaattggattggaccccggcctgtccagataacttactaaagcccaactaaagaaacaatccatcaaagctcacgttagcccaactagagcccaactattcgtgggaaggtgaaacgacgccgtgtatctcgagactgaattaactgcgtctccggctctccgctccttttcctcgtcagtcgtcggtactcttcgagactcgagacactgaggggctgtttggttcccagccacactttaccattacttgccaacaaaagttcccacatcttgtctaaggtgaggtgatcaaattgttagccacaacttactaagcctaagggaatcttgccacacttttttgagccattgacacgtgggacccaatttgttggaggagaatcttgccacaactgtggctacaaccaaacacctgtcaaatttgcctaaccttaggcgtggcaaactgtggcaaagtgtggcttgcaaccaaacacaccctgaatcgctgctcttgctcgatccttcttttcgctcaatcgctgctctactcagatcaagatcaagatcaagcaccgcgcccgcgcggccgacgacacgctgcgtgtaggccacggcgagcggcaacagcatgcattcgcgtacgctcgacttccagtcttccaccagttgcaacttgcaaggtttgttttctaccattagtccagaattcagattattggattaggacattagttcattcaatattctttagtgctgtcagagtaggagcatcaaaacattttaatttattcaatcattttttagttgtccacattctgtatcgctgcttactgattggtgcttgcactagaataactggttggcagtgagctaagtggttagctaactgattgacatgggaatttatggaaaagtattacaagagaaaatctccatcac

SEQ ID NO: 11505 - DNA, 1063 bp, Oryza sativa
  Intron number 1 from transcript LOC_Os01g62440.3 (locus LO C_Os01g62440) derived from phytozome v7.0 (chr-ID Chr1; po s 36143894 to 36144956 reverse strand)
ctccgatcacagaggcgtggtcgggtttcggcaaagtaacgcgcccttgtcattctctagactgaattgcctatgcattttgaacccataatttgcatgcttgagttgtaatggttggtgtatgcgtgtgcacttggagctgattggcagtagctaccaagttatacattacactgagttactaatccgcatgtatttcctcattaaattgtgcacaagggagttttgattccttagtaaaacttcatcggttggtgcctagtgagtaagccccagaggtgtttggtttggtagtttgtgccaaattttccatagcactccttgccaaagtttggtaaggaatgaactagggagctaatggaaggaatcctccgaacacttttagcaaaccaaatgctggccaaatccagtcaatggtaccaaaagttggtaagacaaacaatggcaatcatcagtatcaaaccaaacagactatagggttatgataaacttcttaggaattgacatttctaccgttgagcggtgaccagtggccatagtatattctttattgatgcaagtaggtgagcatagttttcttatgagctgttgctgtgaactatttatgtaccaacaaaagtaatcaaataatttactcaaggagctgtttctatataatgtgcttctgggaaggtgaaataatgtttgcacgattttttattggtaaatgtgttgagtgaaatttatactgtaatgcggaaaatccgttaacatatatacttgtagatattcagccatttattgtccaaatttacaaccatttagtatattgtgattgtgatgtctatattagtgtgacactgctgcactggccttttctgataaatgagtgtttcctttttttctttcttcctttcttttagcttatcacaaggtgttaatggctagttctgaaaattttgcatacagatgtttagttttaataattaattgtttgatttaaccatttgacaatatactaaagattgctgttggaatccctttttcaggataggattgcaggggacaaaggaactgtctgaca

SEQ ID NO: 11506 - DNA, 833 bp, Oryza sativa
  Intron number 2 from transcript LOC_Os01g35789.3 (locus LO C_Os01g35789) derived from phytozome v7.0 (chr-ID Chr1; po s 19824564 to 19825396)
cagtttggcaaagaagggagaaaagaagaggaagagtatgtattgctagagttggatgattgtctttattctgacataaaaccaaatactccatatgtgatctctgtaagttggtcctccattttttaaatcagtggcttaagggtacggatgagcacgctttgagtgtacaaaatctgtttctctgaatgttagattttagttgtgcaatgtagtacccagaagtagctctatgatttcctttgcagcagaacgaccaacattaataatgccatatgcgcatagaaatatagcagtgagctctgtgctgattatctaggagagctcttgccatcagcatttaaaatcgcctaatagaattacaaaaggacaaagacatatatgttccatttatttgaaaataggaactgaacttagctcagttggttgacttgaacttggatgcctatttcttgtctataaattgatactgagtttctccttgtcatccatcaccttttttatatatattttgagcagcctttgttgctacaaagtgctaccagtgtgtgttatgtggtagctttggggagaaaatatataatctaccatgtgatgtgagaaaatggtatgccagcacatattctgcttattaatctgtttggtgccatgatttatggacgtgaaaataacaaagttaagtttttctcccacatccttcgatcacggagacgttggctcatatctgtttcaaaaagtttgttaactgtctttatcttatactgaacactactgagtttttcttgtcatgttttccagggtatctgattccttctggtcgtcgtcgtcttgat

SEQ ID NO: 11507 - DNA, 898 bp, Oryza sativa
  Intron number 1 from transcript LOC_Os01g22510.1 (locus LO C_Os01g22510) derived from phytozome v7.0 (chr-ID Chr1; po s 12649830 to 12650727)
gagtggcaggagtgcaggtgtgtgagtgacctcctgcccttctccctctttctccttgattgggctcatttcctgaatccatgtcaacgttggtgttcaagacttaggaaagaattttatttcatctcgattattttcggtagctgattaggcttattctgcttcctgattgatgtcatcagaaaacaaaatttgaagaggggcatggcatcttggtgtaggatgaatcttaggtttgggctaagattgctattaggatgaaatatagtagaattaatattaataaggatattccatgctgacagcaatggccaatggtgccttgtggaatcatgattcatgacagaaatttctcttttctaggcagcctcacaaggagctctctctctgtttttttttttttggggggggggggggggtgataaggctattttatcagccccagcttgtagtcatgggcatatcatgtatgccaagtctaaaactgtatggccatgtgtttgagggaagatcgttttatcgtgactctgagacaggctctttactatggccttttggccaattgcaatatgacctcagctgaacgcaaaattccgtgttataattgcacttgcaaatatttaaaaaatatatatacccattttaaatatctgattctctacgtatttgatatgtgtgtgctgaggtcctaagaaataagtaaaaccatgctgtattctttcaggcatttgggcagtgggtgttttgtaggaaattagtctaaaataaccttatttctgaatttaattgcaatagctgttcaacagagatttgttagttttcctacaattttcatattttctacattattaattaatgattgaacattgtcatggatatagcaccgagattgaagtcg

SEQ ID NO: 11508 - DNA, 1004 bp, Oryza sativa
  Intron number 2 from transcript LOC_Os01g13720.1 (locus LO C_Os01g13720) derived from phytozome v7.0 (chr-ID Chr1; po s 7676525 to 7677528 reverse strand)
cgttcccgggcaaggcctcgggtggctcacggaaggtaaaaactgaagttactcttctcatcttcagatgtatgatggttcataagtttcgatagtcattctgttgatgtgaatcattggccaattctgtgctcattgtcactgataacccggctcaaagctaacatcatgctactggtagtagtgacctgtcatagttgatcccaatgcgcagaataaacattggcccaaatgtgcgtaaccatttgggtgtatcatttgtttcattccctccacttctgtaccctagcattagcacttcaactctgctagcgtagatgcaagtcatgctttcatcgtttagtttgacgccagtcatcttttgttgacataattctccagttctgtttgttgaaatagagtcgttttttattcttcttttcatttcttgttgtaggacaagatgaaactagatgaataccaactgggaaaggtgaacactaaaatgtccccaccgttattgagatatttgtggatgctatgctatttagtaatttatagttgtagattatcaccaaacctagttccgatttatgaataccacttgtatttttacggagaagatgaagagttatcaggttaaaaattgtccaatggaaacattgaagaaaatgtactgatgattttttttaacttctatgcaatctaaaactctacttagtgaataagcaacactgaatcttttggtgagatgtactgacatttcacccaaagatcagtgttatctgcacacgatgttaaatgaggaaaaacattagttgcatcttgtcctacaggggtaccaacattttttttttgtttttagcttttctttactctacttgcttccattcatggcggaacttatgacttggcatttgattgtgaagtaagctaaaagtaacagcagtagttttagatttcttttgcttcaattcgttgaacaattatgttgacttaatactgttggacaacagctgaaactg

SEQ ID NO: 11509 - DNA, 917 bp, Oryza sativa
  Intron number 1 from transcript LOC_Os03g10780.1 (locus LO C_Os03g10780) derived from phytozome v7.0 (chr-ID Chr3; po s 5508096 to 5509012)
tccggaagaccgccgagaagctcctgctctcccatgtacgtggcctctctccccccattcctcttattggcgcagcgtattttaggtatcctcccaattgatactgtagggatgatggctgatttgtaggaaattttattcctaatccagtactagtagtgagtgatgaccagagaatttgcactatacactctattttagtaccagtacaacactacaatgacaaccaaatatgctatgatcatgtgaacaagagaatgatctacccaaggcccatgtattacttctctggggaaaaactactactgatttctgaaggatgatgccttgcatttctatgggaaaaaacgtgtcataaacatgtttctcagggttaatttacattccccacaaaaaaaattacaagcaaagggagcaatttatcccaccagcttcttttgtattggactctacccttgtgatcatcctgttatttgattgatctctttccactggaattccactattcagtttcttcaggaactgggagatttccctaggtcccaaatgtgtcctaaccacccaaaagtgtttgtagtggacataaaggagagttgtctaggctattaaatttgttctgatattttctcttaatttcctctagtttcttttcccaagagttgtctaggctattaaatttgttctgatattttctcttaatttcctctagtttcttttcccgagtagtccacactccattaccatactatatcatattgaaaaaaaaaattcaaatgaccattcgtttagcaatgatggtatggcattttaattttactagtattttaagtttgttggaaaggcaaaatcaatatctttatggttttgggcatgtggttccagctcaaggctaggaagcttgaagaattggcagctca

SEQ ID NO: 11510 - DNA, 980 bp, Oryza sativa
  Intron number 1 from transcript LOC_Os01g27330.1 (locus LO C_Os01g27330) derived from phytozome v7.0 (chr-ID Chr1; po s 15252717 to 15253696 reverse strand)
ggggcccaaggagctgtcgaggaagtcggctccaggttggagggagcaggagataggttggttgttgactatcctttttggctccatgaaagcattatcaatgctgattcttttaattttccttcatgaatcaaatacgagaataatttttgatatccacatagcaaaaatgtataaaaattttggccatttttaagtctgtcacaccaccctatgccaatatcttgatcttcgattgtcacatctttttcctctccatcacttcatcttggccagaagaaccccatgtgtgcttctccgtcaccatatgcaaccgctactagaatccactatcctttctttaggtcataacatgttgaatctcttcaccgcagtcacctacatctcctactaacctcctagctttgaccccacgattcctatggcactattgtttcctagccatgctgccacctccacctcccatgatagggtcactcacaccctctgcttcctactaagcccatgatctccgacccttatgtagcactaccgctggctcactagaaaagtagaagaagtgatctaatggtacaaaattcgagtcaaatcataatgacaacaacaatcttttgaatagtgtttactgacaacatgtactgtacttaaaaacaccacaatccttaccatcaaggctgcatatcatctgcacttacaaacattaaaatggtattatttaggagaaacaggaaatgatcaaacaatatataagcttcctaaatgcaataacttcttctacggagaagcccctgagagaagcacattggcgcggttgtgaattccacgatggcacatacacaacacccattctagattgtcaattatcttgggagcaagatcatccaagttcttttggtgcatcattcattatcacattgatctaaagctgatagttttggtattcagccggaggagtctctcagagtccaacattcttttgt

SEQ ID NO: 11511 - DNA, 1041 bp, Oryza sativa
  Intron number 3 from transcript LOC_Os03g22690.1 (locus LO C_Os03g22690) derived from phytozome v7.0 (chr-ID Chr3; po s 13106430 to 13107470 reverse strand)
agctcgccagggacctcaaatccttcgaacttaaggtgatggccggcgagggatatcccatttcatagagtgatattatactaatctcatttgctgattatcagatcgagcagtttgtccggtttgagattagacattttactgtactgctggttaaaacctagggttatcacaaagtagggttaaaacgtaataaaattataacaagtcataagcattgccatgttttattccttgcaccaaattgttgaaaaacatcctttacaatttcaaatgaagaagtgaagatgatagtttggtgtttgttaccaatacatcatgtcttcttaaattggaagagcagtttaacttactagtaaatagtttagttcagtagttttgacgaaatgtttagttagtatctgtgagctagctttggtgaaatagttacccatgaactatgttgaaacaagaaacgactctagagttcgaggtgcagcaagatctcgttggtcctatactttcaattatactgctccagattagcgttcaattttctacttaaattgtagaagaaacttaacatacagttatctacttgagtaagaaattgatagctcatatttctatgctttatctatgcaatgttctctttgtgtatttaaatgcagctaatataacgatagcatgtattcattataataatagtgtaagaatcagtcctttcctattgggtaaatgctactattttttgcttggatcagcgggctcttgatataaaaaacttgaccggaaatcattactcaataacagcgcacgatttttcgcacttcaccttatatatccaccataactttactgttcactatgtatgccccatgtcccattctctaaaattcactcctaattcatcagtataccttaatacatttacaactctgttgctgtatgtgaatctgcagcttcttattgtatattttctgttttctactctatcttgctagactacttgaatatacatcatagtgattaaaattgaggttttgtagaccacatttgagg

SEQ ID NO: 11512 - DNA, 575 bp, Oryza sativa; identical to SEQ ID NO: 11373
  Intron number 1 from transcript LOC_Os01g59130.3 (locus LO C_Os01g59130) derived from phytozome v7.0 (chr-ID Chr1; po s 34158013 to 34158587 reverse strand)

SEQ ID NO: 11513 - DNA, 846 bp, Oryza sativa
  Intron number 1 from transcript LOC_Os02g54080.1 (locus LO C_Os02g54080) derived from phytozome v7.0 (chr-ID Chr2; po s 33120470 to 33121315 reverse strand)
ctccgccgtcggaggccgactacgagacggacgaggtgaggaggggggagagagctgtgcctctcaattttgtgatccggggggtttgtaggtgattcggtaatccaggtaacgtcgatggctcgattgattgatgatcggtaattcatgacatttaggcgtttgtgaatgtcatatgctccaaatgttcgcggattagctggattagaattggtagcctactggaattagctgaaatttacacggaattagccttgtatgaatgacatgatggcgccataatttggctctcccttgttgctatgatgtttctctggtgtcgtaacgtgtcgtgtgttgagtccactatttagctaagctaattatggctgcttgctgtatataattgcggtaaaatgtgattgtggaagaagaaaagtgtgttttgtattggccaatcaaaacgtgcagctatgttgtttagcaaaaaaaaaaaaaaaggtgagaaagctatggatcgtcaaatcaattgtgtcacaggggggaacttgacagtttgcaaatataatgaactatggatcttcgaatagtttgattagtggctcttagtcttcatagtgtcttgaatgacaggtatcttgtttaccatggttgactggacgtaggtgtttgtgttgtcatatccttttgaattcagtttcttgatgaactgtcctaaactgttttctggcggtctggcctatcatataaaaataggtgctaggttttattatacctatttcttttgttctataagtatactaaagtttttagttcactctttactttgcagttgtgcgatcttctcaaatcgagggttgcatcgcc

SEQ ID NO: 11514 - DNA, 893 bp, Oryza sativa
  Intron number 1 from transcript LOC_Os02g39650.1 (locus LO C_Os02g39650) derived from phytozome v7.0 (chr-ID Chr2; po s 23939692 to 23940584 reverse strand)
gcggttctagccgctaggtgaggatctattcctaaatcctaaccctcccaccatgttcgtgaaagggtttttgggaaatgagcgtttaggatggtcgaattagagtactcgatttgactctggtagaaaaccctagaaagtttgcttccaaatttgctcttattttttcttgtgtgtgtgcgtgtgtgcatgtggcagaggaaatttaggaggttggatgtacccagatttggtattttctggtgctttacctacatcggtgccaaagttgtaatccaattttgaggccttcaggtgttgtggtatgctaggagcttaataaggtatctccatgtaacaggaatcatctatatgtggaatcatttgcatactgctctagcttttatgcgtcgatttaggttctgtggactagatttgaatatttgatagagtaatgtttctcttcttaaaattgtgggttcttcattgacttgattctctgccatgttagctactatttttaagtggatcagtgtgctggcctcatttgatgctctcaaagtgaatggataatacatcatatagtactaaagtcatgggcattggattggttgaagaaaataggattgtttctatgtcagagtacaaggttgcatcaattgtggtgctgtagtaatatcgagtagaaggggcttcgatagccatcatcagtgatgtgcttccaaaatggatatttcataatcttgaattctaaattgaaaattggaagtaccttatcgaaatgttaattggtcatgtcatcatagttccacaatgtttcttattatccttcttgtgcctgtgatgagactttgttctgttcattaatgtcggtggcagtgcaattgagggttgtgaaccctcttcaaagcttt

SEQ ID NO: 11515 - DNA, 909 bp, Oryza sativa
  Intron number 3 from transcript LOC_Os02g32710.1 (locus LO C_Os02g32710) derived from phytozome v7.0 (chr-ID Chr2; po s 19425081 to 19425989 reverse strand)
cattggtgtgttagagtagagtcagttatttagctgagtgtggcaagctcgacaatgataaccctcaattattctagttttggggacgctaagaagttgcggtgcaagtggtttcttcggtggctgtgcactgacttgttatggtggagtcggagctacttaccggggatggcaatgacaagtaacaataaccttcaactacttttatcttggcaatggttgtcaagatctgtagtaggcatgtagtaggagttttggccaaaaaccttgcttagtctaggactggtgtcgacgatgtcaacgtctatgggcatcgtttcccttctcaaagtcgttatttttttgcttttcacttttctttaggtgaaaatttagttccggtgttcagacgggctttgtaagtatcttagaagatactttcctcctcggagtgttcgcccaaaaagccctgcctcgtgtgttcgggtttttaagactgttgttcgttatgaaaagttggagctacttgtttagctaggcaatgatgacttgttctctgcatgggtttttgtcggtttttctcgattaaccgtgtgggtataagatttttgagcctagtgctcctcataaactgagcaagtctctttttcttaatgaacacatgaacttcctaacctcttttgaggttttccttaaaaaaatatatagtcaaattattgattattagctgttaatcattgaacatataagccactatacgatttgtttatatgtataaataacgtgaaaagaacatacagatcagtcatctaaatttctgtttaagcgcttagatagtacaaaaatgacaggaaaaacaaaagaatgaccccaggcactactagaaaaagcattttcgctgatgttgggtatttattttcgcaggtggac

SEQ ID NO: 11516 - DNA, 284 bp, Oryza sativa
  Intron number 2 from transcript LOC_Os01g56860.1 (locus LO C_Os01g56860) derived from phytozome v7.0 (chr-ID Chr1; po s 32840675 to 32840958 reverse strand)
gccgcctccagctgcgccagcacgtccagcaacaggtgcgtcttgattttgtttcgttttttttttcttccgcacctcgtcgccctgcccttacctaacgaaacgagaacaaaaaaaatgtagccaggctcgctacctttgtgtgtctctgagcttttcttatgctcatccactagttttctcttaagattaatcatttgaatatgtagtatgattttggaggtgaattctaacactgtggatattgcaatttaccagtggaaggtgggctccttctcctgcct

SEQ ID NO: 11517 - DNA, 1013 bp, Oryza sativa
  Intron number 1 from transcript LOC_Os03g05420.1 (locus LO C_Os03g05420) derived from phytozome v7.0 (chr-ID Chr3; po s 2680023 to 2681035 reverse strand)
cgtctacttgaagcgaaccctcacctcccatcctggtaagccctagtactcctttctccccgccttcagttcccacgctcgaagtctcgattgaacaaaggcttcgcgcggagagtctgtcctaggcttttgctgttggatcggagtgtttagttcctttcgattctgctgcggttgagttcaagcgcgatgctatcatggatttttgctaatgattttaggggtttagggttggtgagcggtgaaatcgcgctccgtgttgaggaattttggtttcctcactccgtgttgaggctagaatttcgtattttgatcaccggagatggctagggatccgtatttctagcgtttaggtgcaacctaacgatcatatggccgcggtgggtaatagataatataatgccgttgctctaggtttcccatgccctcattatgtcgtgttttgtgtgtatttgctctaggagttttgttcgatttgaggcagtggaaaaattataggcttttgggaagcttctgcttaacttgacctttgcaattactagtagcgcatgatctgggggtagatattgtcttcttaacttatcttttgattatattctgtacaatcagttaattacttgttaatcacttatacaatgtgttgtgttagccaatctattatacaatgtgcagccttttccaatttattttaggtcttgctccagttttgcaccttatttgacctatgcagtgttgtatataacccaacccgttgtactatgaggagcatagtagatgtgtttatcacagtatgactatattttggtgtttgaaatgccttcttttcctgaaaaataatgtttggatatccttcctttgcatgaaaagcattgttcatttaattcttctctatcacaagctcacttgtctggttcaaatatactgtaatgctatttatatgctgtaaatatgatacgttttaccattttttttatgtagtgaaacctgaagtttctagccaaggtttttgagct

SEQ ID NO: 11518 - DNA, 852 bp, Oryza sativa
  Intron number 1 from transcript LOC_Os01g73690.1 (locus LO C_Os01g73690) derived from phytozome v7.0 (chr-ID Chr1; po s 42696157 to 42697008 reverse strand)
agagggagaccaaaataaatttcagccagtttcaggtgcatatcctctgcccttctgtagtgttaacctgtatccatatctaacttggtatatgtaaccagttgattttactgactgcaattgatttactattaagtgtgataggaagatcactcgttttgcttggtctattcaatctaacatggccttgtgggctcagtgatcataacaacatagaaaaattgtagtcagagatgtaagcccatcggtctgtctccctgctttgttcaaaaaaccatttgatgcttcattgtggcctaacctaatagtgctcagctgatttatctatattgggtttcaccccttttagagatttaaatgctgctgtgtatttgagcaatgtctgctcagtagttccttgcccaggtaacttgttctatgtttagataaatcattatttggaacttcccttatgagttaagcattgaatttaccttcctaagaacgtaagatacctcatgcatgtgtttctcgatgcaagtcagaatatgattcagatacttattttttcttcgcgtgcctctagcgcctaggcagttcgcatacaagaaatccaagaaattagctggcatattgcatacaaattatactatgtaaccctaaaatagcaataaagcaccacccaagttagttcagccgcctaatgcagcatctaatgcctaattgtggctgctacccagtgcctaggcggcgcctagagccgacttttagaacactgcctctaggtgataatccatttataaatttggaacacatgttttttcttccttacaagtttgagtgctatgactttataggagtggttggaagaac

SEQ ID NO: 11519 - DNA, 989 bp, Oryza sativa
  Intron number 4 from transcript LOC_Os02g03060.3 (locus LO C_Os02g03060) derived from phytozome v7.0 (chr-ID Chr2; po s 1208634 to 1209622)
catttggcattcctgtccggacatttactcacgaggtacattttacagcccgacacgtttttcgtttggtacactgtgatttatagtccttgcacatcacactacagaagaggggaactgtctaatggtgaaaacgtgcagttaatttagatgagtacatcaaaaaattaactttgcctccttcactgcaatgcattttgtaggtgctctattaagtaggccacatgtgtactctttttgctacatgttgtgctactgtctgtttcattgaatatcacgcatgtattcacggagatatggtacaaattgtggactatgaccctatgtcatggctgccaactgaagattaatgtcacccattagtgctcactgtttttatggtacatcttaagactgcttgtatctctcttccctctactgccttttataactgttaagaatcaatggtagataattttccaagcctactgtcatagtgcttctttgtcagtttgaattttactctcatggcaatatctggtgaaacctataaaccagcacaaatacctggacctttttctgtactgtacaccatccatttctacctaactacctttacgacaactcctgcaaaaagaaaaaaaaaagcaattgatgaacttagaaaggtggactacgaaaatgaatgcatgcatacagaacataggcatttgtaagaaccgaattagttaaccagaataggtacagagcaatttctacatctcctgaatctggaatgctgcacacgtagtttaaactgttgttaatctagataatggagaacaaaatgagaacccctctgtcttaaggcaaacctagagccaggtttgactggagcaggcataagtatcaacgaggtcttcttgtgatatacaccttttgcccctccatgtttacatcatttcatctttaacataacccactttggtttgttaggtggtgacattgtggtatagagcacctgaaattct

SEQ ID NO: 11520 - DNA, 897 bp, Oryza sativa
  Intron number 1 from transcript LOC_Os03g15240.1 (locus LO C_Os03g15240) derived from phytozome v7.0 (chr-ID Chr3; po s 8336551 to 8337447)
cagggagaatcacgtcaagaagaaggtcgaggaaggtgagcccccgcatcctttgcctgttcaagcttccgaattcgttgatttggggggtcttgaggtctgcaaaatcgcctgatagttgcgtaacgggtgaggtactgacgaaaaattgcgctccgctggtgttgcttgttgaaatgggaacacaatcctgtgtgaaatgagtcgtcaaacgaggaggttaaggaggttggctgccgtttggctggccgaaccttgtagactttagttgagaagttatgtgatctagtgcttgccggtatggaagctgaatcattagttgattaagcatgccattcagatttcatagttcatgtacatctctcccaactggttaacactatctgatgatggtaaccggtatatgctgtagttaatttgtttacagaatgttggatcttgtgtgatgttatttattcgtgtatcattatatagctcggtttactaaatattatattatgagcactcaagtacattcaaacttgtgagacagccctgtaaagaatttgttgcactgagcatcagtcctttgatttttttgaatctttaggagaactttcttgtgaaagacaaactatatgcacagactgattgactgaacgaactttccttataatgttaggagctgctgaagactgctgtacagaataataaaggaagaacattcagaaaatttgaacatgtgccttttgtatttcaaaagagttttctcaattagttgttctctagtgttaggttagaatattgtacttaaggggaaattttgtgctttgcttgacaatatccaagtttcttgtacttcacatcagagagttaatttagcccattctatttcacttttcagctttgcggagcaaa

SEQ ID NO: 11521 - DNA, 851 bp, Oryza sativa
  Intron number 4 from transcript LOC_Os03g27320.5 (locus LO C_Os03g27320) derived from phytozome v7.0 (chr-ID Chr3; po s 15649223 to 15650073)
tggaggtcctactagccaatcggataaagcagcaggtactgaaacagttttatctgctgttaataaatgcatgctctttattcaacatattcgaggattttccgtgtacctatccaatatacttatcccaatggtcctcattaagtttcttggattggtagttcccatgcccacatttattttttgactgagcagctgtgctgtgcatttttgggcttttcgcatatagtcttttccatgacgaaggctacactttgatgttttccatggtcatggttgcacctcataggttagtacatcattttttttctcagaaataagtcctgatatccaatactaaaggaactatattttttctgactctaaaaaagtaaaaaagaaatgcagttcacctagtattttggttcacttaatttgcagaaaaacgcactgtagtactgtatagattagtagttgcaaacttttttttctgatgttaatgagcaacctagtgttgacatgattacacgcagcaactttgcttactattgacctccgatccattttcttatctatatgtattatctcttggcatataaaactgtaactgaaaacaagaaatgaagtaattcatatgtggagtaaataagtaatgaactaactttacggaatgagcatatcctggaaaggcatctcctgggcatcgcttatcatcaatatttgaaagttgaactagctgcgacaattaacctgtacgttataattaacatcactttattttccttcgcatgttgtgttgtggaagtgtagcatactactaatggttttataattattctgctttcttaccattttattgttcaaaagaccgc

SEQ ID NO: 11522 - DNA, 811 bp, Oryza sativa
  Intron number 1 from transcript LOC_Os01g09000.1 (locus LO C_Os01g09000) derived from phytozome v7.0 (chr-ID Chr1; po s 4518533 to 4519343 reverse strand)
aggtcaccgccaacctcgccgccgtcatagccgaggtgacgcgctgacgcttgctaccatcgctcgtgcgcttccaattcgattcgatgatgtgtggggtttttttcgcgtttgatatggcgtctatgagtatgggagtgggatttaagtgacttgatggttggaattatgctgaagcctgaagagatgtgcacaatctcgactaaaattatcttaaaagcacagttgtttagtcaatttccattccaattgggacattttgaggttaattttgttctggaggcgcccaaatctagtaatctactttctacaacattataatttgtttgcgctgacaaaatttaactgtctatatttacaccaaagagctgaagttccctggttccattctcatcgatgagtttacctgtgggcatcatttccatgatctcctatgttgctgaaagcctgaaaatttgtcctgcgttggtgcaccgagcggcgagcgtcagagcgcttcaattttagttcccttttttcacctgaaaaatatgcttggatgatgttgcactagttgcaatcttttatcatgtgatgctttgcatggcattgaatttcaagtttgacggaagggtaactgcccatgtcagaattgtgtttacttgccttcttatcgagatcttcaaacctcgatgtcattgtgcttttttttttgcatctgtaatattggcattgtggcacagcttgcattggcttatagtgcccaagctgtggcatgctatgttcttctttcaactaatggacttgccaatgaacaggctggtataagtgg

SEQ ID NO: 11523 - DNA, 724 bp, Oryza sativa
  Intron number 2 from transcript LOC_Os02g03040.3 (locus LO C_Os02g03040) derived from phytozome v7.0 (chr-ID Chr2; po s 1195246 to 1195969 reverse strand)
aagtcgggtaaggcagttgctctcaattgttttttcttaaatttaagctgcactgttttcaaatttgtttatccatattgcacctatctggtgtttcgcatcaaaagaattcgactggtcaagccagcaacagaggcttttaaaagagtcagctgacaagtggctgctgatgaatttcacactaaaatgaaaatttccatattaacttttcctattttgtttgctaaactgttaatccaggtagattcatacgataattcttgtggaatcgtattgttgcaaacactcatgggttcaaatggtgtacagattaaaaattgatatgttttttcctcctttttttcactgtttgattattaacctgaaactgtttgtagtatgtactgcaccgtaagtacatgagtctcaaaagcgagtgggtactccatttgatatagcaggggctagcatgtttcactgctatatccttgatgcgagactctgacttatttcgttcaacacgctccctggtgcagcagccagcagcttgttgtaagatgtgaaatgcatgaggttattttgcattcactgtgaagcaaaagaagtttcagcaggaccagattatcttaatgttaattatcaaaacattggacaagtgcacatcagggtacatttagaaaaaaaaaagaagttatttctttaagtttaggtccagtactcaattatttctttgccgcaggatatc

SEQ ID NO: 11524 - DNA, 807 bp, Oryza sativa
  Intron number 1 from transcript LOC_Os01g54920.1 (locus LO C_Os01g54920) derived from phytozome v7.0 (chr-ID Chr1; po s 31586968 to 31587774 reverse strand)
cggccgccgcaacttctccacccccgaggagatcggtaccgacgtcgcgccctttcctattttcgattcggccctgtttcgttttcactgagaaatctggtgccagccgtcagccgccgccgccgccggcatgggcgggctgctcgatctgatgctgcggcgggggggttcgggtttcgctaggctgggatgtgctcgtagaacacgagcggctgtgaatttgacttgaacgcgatgcatagagcgctttttttttgtgatgctgtacgggttagcatacaattcgatggtgtttgatggtttgggtcgtggaggagggagtgactcgttgatctaacatgggtcttagcttcggtgtttatgttgcctgattttgatgctcatgtagtcaggcacttatctgcatctttagatgcttggctctatcccatgatgcagtagtacagctcgattctgtttcttcgttttgatttattagttttataaattccagttcactgtttcagatcttcacggaataagggtttgtgtggagtttaaacgcagtgagaaatcgattgcacctctgtctttatctagtctcagacaaaggaactctgttgagactgtatacaggagtgcaataatatttttaagttcttgatgtacaattgaagaccatttctttttagtttgtgcttctggattttgatttcgtttttgatatcctgctaagtgcaatatatatatttttacttgcttctgatcatcttttccattcaaataactgcagctgctggtacttcaggtcgtccacgcacatttaag

SEQ ID NO: 11525 - DNA, 998 bp, Oryza sativa
  Intron number 3 from transcript LOC_Os01g49219.1 (locus LO C_Os01g49219) derived from phytozome v7.0 (chr-ID Chr1; po s 28294784 to 28295781)
gaggcaagcctatacctccccatctcttctatatcattatatatgtgtatgttagagtgtacattagattagtcctatacctccccgtctcttttatatcattatatatgtgtccgttagagtgtacgttagattcatctacatctcgcacatagggaggaatcatttgatctccatgttggtaattttgtttttatttgattctattgtcaagatggattagggcatggtaggattattgtatataaaatatgtagtaatccatggtcaactctaggtctgcaacttatttttatgcatgacaaacacaggagtttctctgccttttctgatccgatatttgcatctgtttatctttacataaagatattcgaatatctttacataaatttatcgtactttacataaatttacataaattcatcgtactttacataaattcatcgtactttatctttacataaattaatttgccttttatgtaaagtacgataaatttcttggttggtgtgtatgttagtaatcatcgtactttacatgtgaaagtactaatgttcaggttcgttcaaaataagatagtactaatttcaccatgaatcagaaaattaatgtttggcgtttgtttgttaatggctatgtaggtttaatggactaatgatatctctattagaattattcagaagagtaaatcttttggtggtaaaattcaggctaattgcaatgtactgctttttgacctctaataatatttcatcccagttccacctcaactgttgcatatttacttacttaggttcttatcctaaatggatgttttggtttttaggtagcaacatatgttcttcctacaattggatcttcaaaaggaattgttaggagaataaatacccagacctttctcggctttgtaatggtctaagtactcaatttgttgttttttggttcctctgtttcatattgcagactatttcattgctgcagcccactgctcttccagc

SEQ ID NO: 11526 - DNA, 1043 bp, Oryza sativa
  Intron number 4 from transcript LOC_Os02g39390.1 (locus LO C_Os02g39390) derived from phytozome v7.0 (chr-ID Chr2; po s 23765217 to 23766259)
tgctttttccatctgaggtatgtatttcaaagagcacagtgttcagacttttccagattgcttttacttttgaaatatttctgtggatttgaatttcaaggtcgaagaagaaagcttttgattttttctatgtacaaatacactacctaacttggctaactagcttggctgataatttattgaatctagaagagcctcaagtattgcttgatctctacataccttttgcgtgaacagtagctgatgcctggtggtatcatttgacacaagaagataactaatgggtacatagtaaattaatgactaggccagtattttatgttttctgtcgcaaaacaatagtggtggtatcatttgacaagcttattcttgttattttatctgtcatttgacaagcttaattgggctatttccctgtaatattctcttatattaagagaaaaaaaagtctattctgaattatactattccctgaatgaaactgttatctggatattgatggattcccttttgctaccagtagtgcttgtctttatttatttccaagctggctgacttatttcattgtggttcctctatttatatttatgcttaataatagtattcactggcatcagaagaagccagaaaggggacttctatgattcggtatgacattggtttcgctaaaagttaactcatggatgagaaaaccttacatgtattttaatagctaacaacagagaacatccatgataccgtcatgggtcagtaacagttaaaatgtttgatggttattaattgtggtatgttcttctgtctgtacatggttctgtttgatgaactgctcggtcattcattcatgctctgaagtctgaagcaacatgttattctagggataaattatgtcttgctctatgtcgataacatttcttgctttcttgtatcttttcttcttgatctccaatatgttatgtgattatctcaagcaacgcagatgcaatgctaattgtttttcaatgtatataggtggtagcagcgttttttgaagaagtaaaagagat

SEQ ID NO: 11527 - DNA, 991 bp, Oryza sativa
  Intron number 1 from transcript LOC_Os03g19810.1 (locus LO C_Os03g19810) derived from phytozome v7.0 (chr-ID Chr3; po s 11153038 to 11154028 reverse strand)
gaggtagtattgatgaggatgacttaaaggtgggtgctggtttaagaaccgatacctttgagttatatggtttgcaaataaaaaaaagccagctcggctcaattcgagccgaaccgatgcttcaaagcaaaaaaaaaaataaatcaaaaaatctaacaaaaaaaatacaagacacataaaagaatcaacatttcatagatcacataatcaaatattcacatcagagaatcaacaagtttgtggaggaagataacaaaatcaaatattcacatcaaagaatcaacaaatttgcggcggaggagccccagcggtccgccgtggcaacgtcacggggtagcaggagcgccttgaggagcagtggcgacgagcgaggcgaggacggcgacggccccgtatggccggtcctggggttttggggccctaggacaaaaacttatatagaggcccctatatatatatatataaacataactaatatatgtatatttatatagtcttataaacacacaacattcgatgtgataaaattatctatatataacattttaaaaaaagaaataaatagcagtaccgagctgagaagacgaccggcgaacgatcgacacgagcgtggctactggtgaaccgtgattctccgacttgctgtttccgtttgtgagacaccgagaagtcgagaagtcaccgagagcgcaggagcaacgagcggcgtgatgtgatcaaggcgacatggcgagtggcgtgatgtgatcgaggcgaagcgactggagtcagatgaagagatcgaggcgaagcgactggagtcagatgaagatcgcttcggctttgctaaaataggcctgacgatggactaaaatttattttctgtattggactattcagttgtctagcttaatatagacctatgacccatggactagaattatccaatacgtagtatatatactatatgtgtataggggccccctagattttgggggccttgggcggccgc

SEQ ID NO: 11528 - DNA, 758 bp, Oryza sativa
  Intron number 2 from transcript LOC_Os03g05840.1 (locus LO C_Os03g05840) derived from phytozome v7.0 (chr-ID Chr3; po s 2934203 to 2934960)
gacaagatcaggaagtgtcatcttcatcttcaggagtaagtactagtgtactttcttcgtccactcactaaagtgcggttaaacttggcgcaatttttaaaactaatttgtaactttaaatttctcatatattataatgtttgtcgcaataaaattataattatatgaaagtaaatttaaataacaatccaataatattattttcatcgaataaaatttaatttatagtttattggtcaaatatttaaagagttaaatattaaaaaacgtgcgcatttaaagagttaaatattaaaaaacgtgcgcgccttaatgagtggacgaagtcgcacaagacttaacaaagacctaaacactgcaggagatacacctttgttatttcgtttttgcatgtcactcaaacatgcataatttatttttagatgaaacaaaataaattcatgtgtatactttattaccatgtatgtctaattcgagctctacaagttgcaaaaaaaaaagaatatacggccgtacgtgaatatatgaatattatgtacattttaatttgttagtagttaattcttaattgagaaattgtagtagttaatttaattttgtactttttgagtgatatactgtatattaattattttttgaaaaaaatataaatgcaagaaacaagtggacatttcctagagcaaaattccatctctatgttttgatctgaatcgttcacatcacacaggttgcaggtcttctcttcgtccacgggagag

SEQ ID NO: 11529 - DNA, 700 bp, Oryza sativa
  Intron number 1 from transcript LOC_Os02g06840.1 (locus LO C_Os02g06840) derived from phytozome v7.0 (chr-ID Chr2; po s 3454058 to 3454757)
gggagcttctgcctcggcctgctcttcaccaacaggtaatcaatcaagagaatcccccctgctctccgattcttgctctcttcaattttcgaggatttgagctcagcttcgctagtgctgggtcgttgatttgagctgcgccgagctcaaagatctgtgccatttgacgcgcctctgcatctggggtgattggggggtctggattactgtgtggccatgaattcgtgttcttgatttttgcagcggaatactgtaaattggtaggagtgttcgtgttcttgctttcacgggggttgtttggtgatttggtttacctcgattacatcgaattggagtgtcaacgctctctgaacctcgaatttattacttaccgcattagattattggcttcacaagctgtgcaaatgatcccatttgaaatatgcacataatttgcttcctagacgagtttctgctaactggtgtatcctcacccaacattttagctttagcactccactcttcagtcacttccttctgcagaagcatgaccacattttgtggatgtctagttccattttcgcaaattcagctagtcttttcgcccattatgatgttattattacaatgatggtaggttaaaaagctgggccgaaagacctcccccgaggtatttcgtttaccaaatgtttcttacctattccccatcaattgtttcaga

SEQ ID NO: 11530 - DNA, 964 bp, Oryza sativa
  Intron number 1 from transcript LOC_Os01g71190.1 (locus LO C_Os01g71190) derived from phytozome v7.0 (chr-ID Chr1; po s 41186124 to 41187087)
ccccgcaggtatggctctctgtgaagctgcattttaatttcttcgaagtagttattatattcctgggctttgttcttgctttgataggtcagaattgattgtttgaagttatgtttgttttgttgcatcatgcttgttatactttgctaagaatgtaattttccttggattaacatgatataaagctaagttgtttttcttaatgtaatatacctctgtctactgagcacatagctagttagccacatattatttgatcactaaactgtggttcaaggtttcaggccttggatgctcagaaaatggactgtactctcaactctgtagtcgtagagctacacagattacttggcttatatctcacattcatagtagttgacttatctgacgaacttttcttctctgaatgaaagctatgtggaaagaaaaaaacatatgcgtagtataaatttttagtgattactggctcagagatatctggaaaagaattaacctgatacacagaaatcaggattgagacatggaattttcttacatttttgaggactgaaatgaagataaattggtccatacacaatatattttacttgtagcataatcaacacacctttgctcatataaacatcgtgtatcttaatagaaacgtttcagaaaaaaatggcattatctgacctggatgttgagaaatgcagtcagaaacatttttttttactcagagattgtcccattgaaatcacccatattaagcaagaagatccaaaggagctcaacagctcaagcctcaagccatgatcaaacatatctggtgtagcatttgattgttaaacagcaaaataacccatgcaccatgttaatttacctgtgaaactatcaaggtaatactactaaacatcagtctatttactgctatgcattttggcatttttcaggttcgtcaggcggccctagccaaagcctgcattca

SEQ ID NO: 11531 - DNA, 767 bp, Oryza sativa
  Intron number 2 from transcript LOC_Os01g11980.1 (locus LO C_Os01g11980) derived from phytozome v7.0 (chr-ID Chr1; po s 6524796 to 6525562)
atcctggtacgcacgcacgacgctgcaatttggtgcctgaaatgcaattcgttgtccgtacgggcttgcggctgctagttcctcatgtggatgtcgaattagctttgtaggtgttgctgtttccaccaacaggatcgtatacacaatgtatttaagcaaaaatagtagtatccgctatccaatgcctcttgggtggttatacggaaatatgtgatttgaaatttaggtttaccaaaatatcagcaagtttaaagtcctcaccagaaggggaaagaaacaaaaccaagtttcaagtgttctgacatatggtcactccgcagtctactctttaagaaaattggtttagctgcaattgtaaattattaaagttgcctgtctcaggaggcaggagcacatgatatgttttattgtctcagtcctagagaagtagtgctattgttttctcttaggtgcactgtagatcttcattgctaattgctatgctcacgagtactaatttgttggtttgatctaagataaataagacgatttgttaattgactgaattccacaggggcaaagaaatcacattattaggaaattaaaaccagatgctttactgttatagctaaaacttatagattctgtaagataatttagtggtagcaaacatgcctgcacttcaaattgttgattttgttgtgattactttgaaaattttctgagaagttacttttcatttttcctgtgcagtcacttgtagttttcgtcagacccatcaaatttgc

SEQ ID NO: 11532 - DNA, 706 bp, Oryza sativa
  Intron number 1 from transcript LOC_Os01g47390.1 (locus LO C_Os01g47390) derived from phytozome v7.0 (chr-ID Chr1; po s 27075791 to 27076496)
gtagaggtactaacagaaatggtgacggagtggcatagtttaaattttataaagtttcagtggtatatacctaatatcatgaatgtggtatttttttcgaaccaacaaatttgcagtggcatatgggtccaattagcaaagagaaaaaaaagagaaacttgtcctcccagccagatcagcgaatgcggcctgcgaggcggcctgtttctgggctggatggaattctggttcgggctttcggccgtgcaacgtcggctcgtatttttccttcaggcgcttgggcactccggttgggcgatggcaattactaccgtctgtcatttttcaggcgcttgattcttcagcttggcgttcggaaacagtcgtctgttatttttcctgtgttttcttccagtggtgattttgcatttagggtgaatattggcatttgatgttttatagtgatctgcgccttttaaagaagagtaaatttcctgtgtaccctgaaaacttactcaatccctttcgtaaccctgaaatttacctgatcccttttataccccctaaaatttcaatttgatcacttccatgtccctaccgttatatttttcatcatttcactattacatttggttgcaaatgtcttttttttttttgcacttgatgctttaggtttgaatataagcttaaaaaacgattgaaatttttgtttgcgtgcacagattga

SEQ ID NO: 11533 - DNA, 750 bp, Oryza sativa
  Intron number 1 from transcript LOC_Os01g25290.1 (locus LO C_Os01g25290) derived from phytozome v7.0 (chr-ID Chr1; po s 14284953 to 14285702)
gtgctgggctgggccgcccatttgacctactataggtagaggagggagcggtgcccggcgcgcggtggccagcgggagaggcggagcgcgacgttggagtcacggctccggcggttgtgggcttcgaagcgtaactataaatctggccatacttttcatactttgcttatttgaccctattttcaaaatcaaatatgccgtctgaaagtattatctccgttttttaatagatgacaccgttgactttttctctcatgtttgaccattcgtcttattcaaaaaatttatgtaattataatttattttgttatgagttattttatcactcatagtactttaagtgtgatttatatattatacatttgtataaaatttttgaataagacgaatggtcaaatatgtgagaaaaagtcaatgacgtcttctattaaaaaacggagggagtattccgttaagacgagttaatagcgttaagggggcaaatagtaccttttgccctttattcgatcctgttatgttctgcttatttgaccttgttaattcaaaacatgcatatattcggatattttgacatatttgtaataaatttaacacatctttcacattcgagacaagtttgatagatttggcttacatttaaaaactttgactaatttggttgatttttgacaaaatcaagtaaacaaaatttgataaaattatggtagatttttttacagccgctacccttcctccaacgctggtgccacc

SEQ ID NO: 11534 - DNA, 784 bp, Oryza sativa
  Intron number 2 from transcript LOC_Os03g32499.2 (locus LO C_Os03g32499) derived from phytozome v7.0 (chr-ID Chr3; po s 18578880 to 18579663)
aacatccaggtatgccctccagatccgttctctttgatctatgtgtatagtcttcctgattcactctacttaggttgggtcatgctagtttcttggcttgatggatgcatgttgttttaacttcaattggttccttccctccatgtaggatgaatgtgcgtatgattgtttggctatttaagatgccttttcttttccttttgtagtagcaagataaatacgagtataactttactttgtccgatctacattctttagttgtcagttctaatcttcaattggcatgtaaaaattggatgaactgtaaagtatgttgacaacgaacacccttgaatgtgacttggtgaaacaggttgccttcgccattctagtagtttacaactgactgtgtcactagtaacttattgacgcatcacactatcttcgtgttagtattgacattagcttcaacatgcctaaaaagaagcttcagcgggtttctgttttcctgctgaagcgtgtagttcattatccttgtcggtaactgcttgttggagacttgtgagtgcgtaagtgagctttttcctactcctactagatatgtataattgaattaaactaatcccactgaattaatctagaaaatttgtttagcatcagttgcgtgttatggcaagctagttctggtttactgtttaagatgttgttttgccccttttgctacaagatagagataaccttactttgttcagtctacattctttggttgtcaggttttagtttttgattggcatataaaaatctg

SEQ ID NO: 11535 - DNA, 672 bp, Oryza sativa
  Intron number 1 from transcript LOC_Os03g16700.2 (locus LO C_Os03g16700) derived from phytozome v7.0 (chr-ID Chr3; po s 9246785 to 9247456)
gtccgccaattcttggtttgttctgcgcctgtggggtttgtacttcttccccccccccccccccctctctcttttttttttaaccgacgggctcgctttccttttggcagttgcttaatcctcacggattccgatgcatgtgagttttttaaagcctttttccccttctctctttgatcgcttggcgtgctggtttacctggcgaatttatttttctttggatgcatttaatacggctgggggaatccatttcctcccccaaaacccaattccttttcttctcttaatttggatcacgggtggtgtacgaattcttcccgtttgcttcgttcttcaggttttgatttgatgcaattaattcgctcttttgatatgctttcgagcgctggtgatttgaaattctaattcgtttcgggcgcccaagcccggatctccagtccagggttttttgggattctcaatttttttgctaattaattgcactgttaaccacgatcgttctctgtttaattaatctcggaagggtttatccgagatttatcccaaagttcttcttgcggagatcccaatgaaatgatttccttccttctttgtaccaactggtttccttcttgccaattgctgatgtggttttcaacaattcctgcgcagatttgtgttccgggacaagcc

SEQ ID NO: 11536 - DNA, 737 bp, Oryza sativa
  Intron number 2 from transcript LOC_Os01g51200.1 (locus LO C_Os01g51200) derived from phytozome v7.0 (chr-ID Chr1; po s 29431093 to 29431829)
atatccagacgaacgaggaggtcgcgattaagctggtctgtgctcttctgctggggattagctgcttagatctttgttaaaaaaatatattcttgatatgctgctttctgatgcttcgaagcagtggttctgctgttttagcctgctgtttgtgcttatccgatgttttggccactgcaactgctgttgttccagctcctgtcagctcgtgtttttgtatctatagcatagttagtactattatgccgctttcctcgaaacaattcaaacttttcagttggatttctattcagttcctcatcccttagcagctctagtacctactagtaggtgaatcctttggtagtttggtgtagtcacttcattaaattggcatgtcttgatgcgcccacctaatattggtaaaccggtgactgataaagtgatattcagctattagtagaatactgcttgatactcgatagctaaaatgagcaaacagagaaatgaggaccagtagcatgatttccaccagtagagtgctaatatttgtagtgatgaaatgatgagaaatagatcggccttgtcacatgatattaatatccatatagcttgttgccttttatattattaatttgagaatgcaaggtaatttatcttagttgctacttgctaccattgtttcaaagaagtttgcatgtgattgctttgtttcttatacaggaaaacgtgaagacaaagcatccccagttgctcta

SEQ ID NO: 11537 - DNA, 768 bp, Oryza sativa
  Intron number 1 from transcript LOC_Os01g02360.1 (locus LO C_Os01g02360) derived from phytozome v7.0 (chr-ID Chr1; po s 745374 to 746141)
catcacggtaccattctaacaataaccacccacaaacatatagctttatttcctacaatagttaagctcttgcatttgatccacccatacagtactaccttttgaaacttctaggagatgagttgcaaaattattttgcaaactagtagtacaaaccatttgaatatgtgactgtaactatttaatcattctttacaattctcatagatatctcaaaaaagaagtggccaatggagaataatgtttgctcaactagcaacaatcagacacaatgattataaatttacatcttaacatagatatgcagctacaaacaacaccattgtactgctaatgaaaaggacccgaaagcaaaagtaacttaagtaacaaaagactcctacaattagaaaatctaaaagttaagtaagcatacaacacaactaatcttacatgttctgatgataatcatgattctgctgtcttgagtacagaagactgcagttgatgatactgtgctgagcttttgcacaatcagatatacacacactaggagaagttatctatcacatatatatttgcataatcaaagtacaattgtaaccccaaaactaaaactctatgatatcccacagggtccatatttttctgcaatgtcgtaggtctatgctgggtttacattttttcaagagtaaatttccattttacctgtaaaccatcaaatagatcttattgtctgctttggtatttgcaggttcacgcgtcaaagtcattgcaggtactattgca

SEQ ID NO: 11538 - DNA, 547 bp, Oryza sativa
  Intron number 1 from transcript LOC_Os02g09640.1 (locus LO C_Os02g09640) derived from phytozome v7.0 (chr-ID Chr2; po s 4954969 to 4955515 reverse strand)
ggcaaggacaaggtgaggcgaaacagaagaaaacaccccctgtactaaggactggtgcaaagatgtaatataccttacggttatgagttatgacttaagttgtttgacatgttgggcccctatttatatttgtctggctaaaatgctaaatatacttgattgcctcccattgtatgaattgttagtcacattttctttggcctcttattgcagcatgactgattaaagaaatagctcgatgactattttctgccataatattcccagctatgctcatcatggagtaaattcatcactgcatttgctgatttcatttctaaccctgactggtttgattttgcttggtgactctgggatccatacggagttacagtgatattagtgcatcagttttgcatgccttctcttatttctcttgttgagatctgcttttctccttttcacaatctaaatctattggggcattcaatgattgttggtttcacatgcccctggtttctttatcattttaggtattattggtggcactagttccaacagacccggc

SEQ ID NO: 11539 - DNA, 1056 bp, Oryza sativa
  Intron number 1 from transcript LOC_Os01g18360.1 (locus LO C_Os01g18360) derived from phytozome v7.0 (chr-ID Chr1; po s 10311593 to 10312648)
atagcatcccttctactccaaggttattagatttctttctttcttagtttcttgccgcgaagcctgctttttgattaattacctctccctagctacaaagattcatgctgtttagtttgataagttttgtttcgtttcttctttcgattcaatattgaaacacatatagctttgttcttcatttaaaatatattcgaacatatatacatactccgatatgtaattatactagtttttgatgttctatgttcttctatctatcgatcttgttttgttttagggaaaaatctccgtttctttatacgaatccatcgtgcatgcttctcatgtatatgtagtctgatggggcttatgtaagttttttaagtttaagggaaaaaaaaactttatctgagtttttacctgttgtgaaacacacgattgatttgatcaaactgttcccacatgcatatgtaaatctttcagatcttactatgcgctttctcgcttatcccttcacataagtagatcttgatcacttgcatcgatcatttcgacagtgcatagctgcatatttacctagactactatagtacaaaccaaaacttgtaatctacataaaagaaaataagagaaatgcttcaagttcactgcagtttaattagatcagacaatgagacaaaccgttctatcacacgcaccaatctgttgatatgtcaatgacccatcgtacgcttttatttctgataagggacttgatcatcatcagtacaaatacacacatcaacagctacagtcagatttctcacatgagccaaacttgtagaccaattcgattattcctgtctctacaaaaccacttcaagattcctgttgccattactgtttcttggagatacagtgcacccgaaaattaattgcgcaacagtactccatcccattggccaattgggtcgcttgtacccatcatctccatcaattagttgattaattaacagacctttcaacatgaatgggcgcccggtgatcgcggcgtatgcaggaacagccaagtgcacgccgattggccgccgatca

SEQ ID NO: 11540 - DNA, 743 bp, Oryza sativa
  Intron number 1 from transcript LOC_Os03g03440.1 (locus LO C_Os03g03440) derived from phytozome v7.0 (chr-ID Chr3; po s 1483907 to 1484649)
cggaccgccagtgtctgctccgatcgcaacaagaggtaatcaatcaattctgactccaactaacactccatctctatgttctccatcagtttgattgcaaattaaggagattaattagtactagatcacgaagaacacacagaaattcgttagaagaaccaactttttcaacacaaatattgtactatttagtaaattcgtttttattcagctagcgataatatagtactcccacagcataggaccaatcaaacccgtacatagacagtcaacaaaagcaaaacgtataagcatcaaagccggcacggcaattccaaaggtaaagtaaaacgagtctacatagaaatggtcctactctagatgccgcctgctgatccgcgcaatctgtaaaacgaagatcaacctgcttgactgcttgtacgttccccacatcattccacctgttactgtttggtatatccagtagtacatgctacagattactgttttacacgagtagtacgagttactgtaaatgcgacgacctactccgatggagaaagcaagggaagcgagtgtcgtacaaacggatagatggttaccacgcaaccacatgagtcgggacaaggggacgcgtccttgtctcactgaattcgtggaccagatagcgtgcgcagcgtctggtttaatgccggcaattctgagatcgacttgctaatcgcgacgtgaaacgaactgatgatgacgatgatgcagggagagag

SEQ ID NO: 11541 - DNA, 713 bp, Oryza sativa
  Intron number 3 from transcript LOC_Os02g55770.4 (locus LO C_Os02g55770) derived from phytozome v7.0 (chr-ID Chr2; po s 34147818 to 34148530 reverse strand)
attttgggtttgaagattatcttaactgtaaggattgctgtcctttgatttcccctgaatcttattgcttgcttttcacatttctttgcaactatttgggaaccaacttttgcttatttattatattcatgtttatgttctttattggagtcagggagtgccaccaaagttctatttaccttcatatgaattcttgtttgtttacttttaacagggcaaaattgtgtagtcgtttttctcgaacataaaactatgtagtcttgtggcatcttggtattggtagtttagaagttcttggaaaacaaagggtcatcttgatagatttttggtgttaggatgtactacctctagactctagtcaaatttattcggcgttagaaacaatgccaaataaatttggctggagggagtacttgaaataataataattatctcaaattggttgttttattccgtcatcatgatatccacaaattatatattttgcttctgtcggtgctttgagcttggtttggctttactttccatgcagaacttacatctcatcaccattcattaatgctgatttatactaatcaccacaaaatacagccgatatagactatatttcagttccaccgcccttgcgacaacttttttcttgtcaagtatttactcgtcctattgttacttataaagaagaagaaaaataaggattcaagcaccaagaagca

SEQ ID NO: 11542 - DNA, 773 bp, Oryza sativa
  Intron number 7 from transcript LOC_Os01g50470.1 (locus LO C_Os01g50470) derived from phytozome v7.0 (chr-ID Chr1; po s 28978541 to 28979313)
ttaacgaacacaaggatagagtatcattttctgaagtgagttatgctcgaccttcctacaggaatttctgtgcctctgtacgcaactatattcatggttcagttttgctatacagttaccattttagaaggaaaaaatgactcaagcatcgtagatatgcatataacgcacaaataccataataccgtaagttttttcgagaaaagaaatttagttcaatttataatgaaagttataggtttatacagcaaaagtaaaagtaggggttactagcttacaataatgtacatgaaacaaaagcacctaaactttaggagtgcagaccctctagacaagatggaacataaacttttccaggatgatgagtccaggctaagactgcctcagctccctaccttttgttttgctctgaacaattaactcatccaccaaaattctatgattgttactgaaaaaaatatatgtacatactaaaagcatacatcattaaaatgttactttgatcaatctagtttttagttatgtactctactccgctctgtaacatgtgggagctaggtatccactttgaatcttttatctatctagattttggttaccaactcttctcctctttctatcaactaactctgctcctcttcgagaattataagcccctatataattaggatgtatagtatattctgagacagcaagtctttacaaatattctaatatagtgcgccttccttcttttttccaggaagtaacttattatcaagatcgccattcct

SEQ ID NO: 11543 - DNA, 1014 bp, Oryza sativa
  Intron number 2 from transcript LOC_Os02g32760.1 (locus LO C_Os02g32760) derived from phytozome v7.0 (chr-ID Chr2; po s 19450121 to 19451134 reverse strand)
atctgcggaggatcttacaactattctggagtcaggtagttttactggataatcccctcaattgtcacatgttgtcatgatcgttattttcaaatgatggtaatgcccccatgaatatttagcctgcttgcaaaagtggtttggggttttagatggtgcttccgtgatgtcaagggattcattactccttgtcatatgttaagaggctaagatttgcttgcttatgaaaggttgttgtcttcgttttccagataatgtttagtgttaatgttgaacattttgaggtttgtaacaccctttttcgaactaaagaaactacgtatttcagaaagggtaaaaaaatattgcagcaggtataaaactgtaatgcagtagaaaattctatgtaagaaccacatgctgtcctgtccttgcagcagtaagggcatgcaatcaatgatattagtgaaatagaactggctgctctgagatgtctgaaaaataagtgggttctgccttgatatgagtattatctaagtgttcatgtgttttgtggcattgttcgaattttattttgtttcctatgatatgatacaatcataagtatgaattctaagttctaaccattctacatggggattttgtatcttttgttatggccttacattttcatgtagttttgccatttggacgtttctttcaacaatttatatctttcagtagcgtcctatgaaggatgcattgtctgaaatttatttgctcttctgacatgatcatgtaacaatagctttttttttggaatgctagaaaatttgctgatactaattatccaatgtgtgtatgttagggccttttcttggagaatttcagtggtctaatatgcatttcacattctataggttatactatgtgtttgtcatgttaggcatgccagtttatgtgcataaaagataaagttaggtagctgcatgcctgcatgtacaatcatgattatttcttcttttctgatgttaacagttggagctgaagttgacc

SEQ ID NO: 11544 - DNA, 752 bp, Oryza sativa
  Intron number 1 from transcript LOC_Os03g09290.1 (locus LO C_Os03g09290) derived from phytozome v7.0 (chr-ID Chr3; po s 4854360 to 4855111)
tgtgcgtccccttccgatcccctgctctctctctctccttaatctcttcgctgtgtttgcgtcgtcgagtgtgccagttacgtggatcaaaatgatctgctgtggttgtggttggaggctgacccgcttcggaattccttgtgaattaggagtctctgcgttgcaatagacgggccaagatttggcaatgctgctctgcagtccaagaattttcagtcgtttgttcatgatatctgctttccagcgagttgagtgtgtgatggagaaatgttaacgatacagtttttatcgtcgacaaaattgacaattgctatgaaatattatgttcctatcgatgttatggtacaagaaacactcgcatggttcaacgaatcaatcagatgtaaataagctggaatgccaattcatttagaatacattcaattgcagtagtttgtttaatatgatacatcccttctgtcatcagtatggacctttgtgttggcagttaattagcatacaaaatgttgtatcttgtataattgttcttttcagacgtttttccgatcttgccaacatatttgctcgtcataccattgcatgatttacttgtcattaccattcaaaatacctttttttttttacttcaataacatgtagcaataacagacaaaaacatgtcttcagggttcaggctatattcttttgattcatatactctttttcacatatgcttattattttgtttacttgtgacatttcagagtgaacat

SEQ ID NO: 11545 - DNA, 647 bp, Oryza sativa
  Intron number 1 from transcript LOC_Os01g46670.1 (locus LO C_Os01g46670) derived from phytozome v7.0 (chr-ID Chr1; po s 26575798 to 26576444 reverse strand)
aggtgatttaagctttagagtttcctccattgaaggtgcgtaagatcatcgaaagataagttgttttagggtgttgctaattaatcatatatacaccctacatccattgtacaatatttttttagaagaatattttttgaagaagttagaaacgcctagagatttttcggctagttccacaagatggtggattagctggtcttgagtttaaagtctcattccttttatttatttgatattagatcatttcctaatatttatattttttaaatatttttctagaagaagtataatatagctgttctctttttagcctttggctctaatgaacaatgcaaccacggtcgtaagcacacgtggagattgaatatgtataactttaactcggtgttaattttaaactctatgtatgtgaataaatgaatggatagaattgtgatgcacacatatatatccgagtgaatgtggtgtggatgtggatgggaataaaaatgaaaatgtatctctatgattgtggtgtagtgcatctgaacttttctttttaacctcttacatctactaggcaggcggttgttgcatttacacataccggtttcttataataactgtttgtgtaaatcgtttttcacatgcagttaattttgcgc

SEQ ID NO: 11546 - DNA, 984 bp, Oryza sativa
  Intron number 1 from transcript LOC_Os02g53230.1 (locus LO C_Os02g53230) derived from phytozome v7.0 (chr-ID Chr2; po s 32579011 to 32579994)
gcgagttcgaggacggtgagtgcttcctggtggtctcactggtgtttgaactgtgaatccgtgatagaatcgttagattgatttcccaaatccgaaattacgaagcacagcgaaatcagcaatttcgtttcggtttctgctagctgagtcattggacgtagaatttgtgtttgttaattaagcgctaagttgagcgaaccaacaatttcaatgctagttccttcccggttaccctggataatcaactctgttcgaaatggtccaggtgtagattcattaaatttggtggtcaatttcgtattgattccatgttgttgcagttctatggttgtttgtggtggtttagtctcatctaatggcaataagaatcgagatttctgtttagcgatatgtgaaaacttcagttggaggcaaaagtttatattcattccgggatttttgtcataaattgggcagatttgctaggacaaaagtagttccgtcaaactaactcgacaccaattaggccttcaccaaccaagaagttaactgggcgagtgggcgtagttcattcaatcatctctatttaaagccacgttgccttgaatggcaggactctgcgacatgccaatatgatggactgaatttgctgctactacctattatcaatgttcaaagttgtctgaatacgctgatggcctgatggctgttctatgttattgtgatagatctgttaaaaaatcttcgtttcaaatgtgaaacctaattggaagatgctcctactctttgtttcgaatgcggcacagggaagatgctccaattaattcataaactaactaagctgtttacttgtgctgactactaacatgtgttaccttccttttggtattatcagattcacattgtcaaaatatatcttgtgttgaattatataatatccaaaagcaagttcaagtgttttaatgctgtcagctatggtccttcatgttttggtaggctttattg

SEQ ID NO: 11547 - DNA, 676 bp, Oryza sativa
  Intron number 1 from transcript LOC_Os02g46120.1 (locus LO C_Os02g46120) derived from phytozome v7.0 (chr-ID Chr2; po s 28106454 to 28107129 reverse strand)
acggcgacgtcgatcccgctgcggccgacgatctggtgcgctttgcttccacctcctcctccccgtcgtttctgctgtttaattttgtccccctgagtttttctgtagcggttctagttatctgaggtgcgaattgctgtgcttagcatatatatatatataggttttctgcgtgccgttgttagtgaatcgcgtggtttatacctcacttctactcatttcgcttttgaggttatttttagtcatcgatcctgtttgacactccattaactgattcaatcgactatgacttacagatacgcattgcagtaatgaacaataatcaaatgaccgtcattgtgatttacgggtcaagattccttatatttgtttcacgggtcaaaatttcatgctgttcgtcatatcaattctgcaatgaatgcttatcatacatagcatccaataatttgttctcccattaaaatctgaaaactaatagattcgtgaacaataagccatagtatattgctgctttcctttgcggatgcaatttcttccaatttcactgctgtctgatatgtcattgaattcgagagatcatcagatcaagtagagctaatagacctgcattttgattattggcttattgcattttcttttaggacagtgacgacctcaaacttgagcaagttctgca

SEQ ID NO: 11548 - DNA, 732 bp, Oryza sativa
  Intron number 4 from transcript LOC_Os01g10820.1 (locus LO C_Os01g10820) derived from phytozome v7.0 (chr-ID Chr1; po s 5770106 to 5770837)
tttggtatccaggagcacattgatcttggcatcaagtaagattatataatcccataatcttgtattatttcaatgtagagcatttgttactaaacttccttttcaacgcccaaatgtagttacttttcttcatgcgtagatttttatttgggtgaaatgtagtttttaaaatcagtttgatctgtgtatttactacatttgttgtttctgtatcaaaatcctcacttcaaatctcaaatgctactcatctttcaacatttgtaatgtttgatgtataacagaaacagtcgtgctatgcattggttcctaaattttgttcagtgtatgtttcatgcgacgtagttgatcatccaatgttgcactagtgtgctagcctcttggactcgtagcaggttattgagtatcttcttttactacgatatgctcttgcttttagtacgatatgctctcgtgcactgttgcaaaatgtttgctagtgttttccagctaatgtatcattgtattgttattgtttgatatgttcttggaatcccatgttaactaattatattcacagtatttgtcaaggcacattgttctattgatagtagttccttgatgtacatagacctgctgacacattgtctgttttttttgttgactgcacactaacccctcaatatcaccccatcatcatcattgaatgaagttatgtattcacaagtaaattgacctatctgttgcctttcaggt

SEQ ID NO: 11549 - DNA, 698 bp, Oryza sativa
  Intron number 1 from transcript LOC_Os02g02040.2 (locus LO C_Os02g02040) derived from phytozome v7.0 (chr-ID Chr2; po s 568954 to 569651 reverse strand)
gccagacttgccctccatcacattcgagatcttaggtcagatgtcatttcaagttttaatccatagtttgaaatgaatctctctattcaaacaccacacctaagttcaggcaatctcgagtctttgtagcatggaaaaagatggctgctgttttgctcgttccaggcctgttacttctttttcctactgtgcatagtggtgctgtaggttgagatgtctcctgtcttggaaggtgctgcagtgaatgtgttataataatgctatgattgaaaaattccatttttttggaagcacacatttgaaaaactattgttgatagattctgtctctttcttggaatgccttgcctgcatataagcagccttctttgttagtccagactttagtctgaactctcaagttagaacttcatctctcgctctctccctgccttccctgtttgctctctcgtgttctactcctggaccaggacacagtttgaagaaactcaaattagtcctttcttgtacatttggctggtttctttggccgtgtttagttccaaagtttttcttcaaacttccaaattttccgtcacatcaaaacttatctacacacacaaacttctaacttttccgtcacatcattccaatttcaaccaaacttccaattttggtgtaaactaaacacagcctttcttgtgaacctttagagagatc

SEQ ID NO: 11550 - DNA, 474 bp, Oryza sativa
  Intron number 2 from transcript LOC_Os01g33290.1 (locus LO C_Os01g33290) derived from phytozome v7.0 (chr-ID Chr1; po s 18349846 to 18350319 reverse strand)
agttgctggaagaacaggaatcgttcatcgtacaggttgtcatgacaaaccatcagaacatatatcaaggaagtttaccaatagaaaattatattcagaagccttgcagggaagacaagacattatattcacggacattattcatcatgataacaaaacctgatcagctaaaatattcaaaattgacaaaataaaaatctattttcttgtcttccctaacctgatcgttagttttaggcaaatggaattgaaaacataaatattcctactcaaaggagcctttatatttctctgcatgtgtgtttaattgttgtggagtgtggacgaatataaagagctgttaggtttctcggaactggtatttgggaaaaaaaaatcttagctatatgattagcaagacaccgagaaaatggaaaacaaaaaacaaagcactatggtcatgatctatggtagcagctaagaaccctagatatc

SEQ ID NO: 11551 - DNA, 488 bp, Oryza sativa
  Intron number 1 from transcript LOC_Os01g33290.1 (locus LO C_Os01g33290) derived from phytozome v7.0 (chr-ID Chr1; po s 18350334 to 18350821 reverse strand)
aggcaagagaaatctttgttactgccttactagtagtaaggaatattttctgcaggcagttgtgcaaaattgtagtgctgattttctgcaccgatgagattctcttttttttctgagttgctaaataaacatgttttcatctagaccagcatggttcatgctagcatattataagggatatgtttctcaagttgcagttgttatgtaccatgcaaaattaatttcactcaatcaaacaaccctaagggacactgatttaattaaggtaatgaacaactaaaattgtgcgtggatcggagaagaggacgatcaattttaattaccttgaggttggaagaatctgagtgtgaacttgccgcgctccaagaccggcttctggtcatcgatgagcggccagcccaccgtgagtgtgtcagtggcatgcaagtgcagtcatacagagataaagtacatatacttctttttcagaaccaaattcgcgttcttga

SEQ ID NO: 11552 - DNA, 662 bp, Oryza sativa
  Intron number 3 from transcript LOC_Os02g43050.1 (locus LO C_Os02g43050) derived from phytozome v7.0 (chr-ID Chr2; po s 25920057 to 25920718 reverse strand)
aggagtggtctggcaggctagtaaacagtgcaaaggtaaaagacctcgtgaagaaaaattgaattattccaatcagatctcgttgccatggagagaaaaattggtaacaggggaataaatttagatatatatatatcaagtgatcaaaaatcctgaattacatgagagcaatacaaaaaaaaagtttgtgtcatacttcgattataagctgctggcgcagacgagaatattctatacctcctcaagcaaattttggggagaccttcttaaacgaaaaaagttctagatcccatcagatacttcgattggtttgttctttactcaaatctatgaattactccctccgtcccaaaataagtgcagccatggttttctgtgcctcttatttgaaaacttttttaaaaaaaattaaaaacagaagtcacgagtaaagtactatttatgttttatcatctcataacaataaaaatgctaattataaaaaaatttcaaataagacggacgatcaaaattgggcgcagaaactcatggctgcgcttattttgggacggaggtagtactttggtataaattgttatctttgagtctatgcttcattttggctgatgtatttgtcaagcaattcagacagttgaaagctctgctcgcgagttcttaggaaa

SEQ ID NO: 11553 - DNA, 626 bp, Oryza sativa
  Intron number 2 from transcript LOC_Os01g24780.1 (locus LO C_Os01g24780) derived from phytozome v7.0 (chr-ID Chr1; po s 13940954 to 13941579)
ttgtgcacccagcgttcaaccacgacaagctcaaggttaattagttactccctccatccaaaaatataatcatttttagcataataacaagtcaaatatttttaattttgaccattaatagtaaaaaaacttaaaaagatcaatcatataaaataatcatataaaattgatatttactagatttatcattaaacaacctatcataatatgaaactctttttatttaaaacatcataattttatagatattattagtcaaagtagcatctcggagactgtgtcagaatccaaaaatacttatattttaggacagataaagtaattctagctcgatcaactgcgtgttgtgtgttactgtcttcttcaaaccacgtaattagtcttctttctttttcaccgctttccttttttttttcatcaatatacacctaaaactaatagcacaaaaggttatatatagccgatttaaatttagatttaaatatttttatacaaagagagtgtttctatacataatatgcgtgtcgagtttacaatatatatatttattatatttctatatctgacatgttaattagccctgaattagaggatcatatatatcttttgtgtcgatctctcagttc

SEQ ID NO: 11554 - DNA, 804 bp, Oryza sativa
  Intron number 1 from transcript LOC_Os03g07100.1 (locus LO C_Os03g07100) derived from phytozome v7.0 (chr-ID Chr3; po s 3625716 to 3626519)
cggcgccacccacgccaacgtctcccactgcccccgtacgcccatcttactcttacacacctctctcacctcgccgccgcctcggacgctctcgctttgttttcttttgctttcttgcggtccgtgaccacgccatctcgttgtcgacgtttctgtccagcgtccaccgtcgacacgggcaagaacttatacggtacaatatactgctagtatatactgtaaatatatatatatatatatatatatatatatatatatatatatatatatatgatctaacggtgtagattaatttgattttttagttaattagattgtagtataaaatttgaaagggtaattttgtcttttcttcgttattttattatcaaattgtgctatcatgctccgtcatcggatggcgcttggaatgcttatcccctagtgcacgataagatccaggaccgggcactcccaaataggtcaaatctgaaccaaaaattattaaaatgttattttattttctatcaaattcctaacatacccttctatatactaccagtatatagtatatactggtatagtatattgtaccgtaaaagtacttttcttaatgttttttgtgtgattttttcgactttcaagtttcagttcaactgaagctgcaaataattgaaagtcgaactcctccacattctcccgcattattcaaacatgccacaataatgctctgcaacaatgatttttctttttttacatgatccgcatgaattattgtggcatgttgcagagctccttcacattcctccgaactcgaaagacgcc

SEQ ID NO: 11555 - DNA, 801 bp, Oryza sativa
  Intron number 3 from transcript LOC_Os01g70330.2 (locus LO C_Os01g70330) derived from phytozome v7.0 (chr-ID Chr1; po s 40738723 to 40739523)
cgaagttcttcgaatcaactgccgccgaggcttctgtaaggctttcttttcttgtgttgtatgtttcgggcaggcagtggtatgttagtgtttaaataagttaaggtggctataaatctgcaatttcattcaatttgcttgaggtcacttgtaagagaaaaaaatgaatagtgttttgcaacaggccatcattgatatctatgaattcctcatttgcagcaccaatattgtactttgccagctaagctgtcacctcaggcttatcttaggtctttggtatcatgtttggatggtcaaactaaaacgcactaggcaagcagtcaagtggtgcttagcgcctgtatactgcataggcagcccaattgcaatcaggaagaatttggcatgtattcagacataccgtgacagatattaaaatagatgctcaatacacactttaattaatccccatttagttcaacagggaacatgaactattactaacccaaaatcaagcaaggtacttatcctgtaagctgtctagtgccctgtgcagcctgcctaggatcacctagcactgccaagggccacctagttcagccattttggcaaaaaaaaaaaaaaaaaggttctgcaggagggggcccttgctcacagagaacttaacatagtattttctggtgttatgtcttatggaattgtgaattgttcacaaattggcgttctctcttcattcttccgttttgagctttgtttctataaagatacttaatctcttttgcttatactggcaggaaggtcttattgaaataagggaagaat

SEQ ID NO: 11556 - DNA, 743 bp, Oryza sativa
  Intron number 1 from transcript LOC_Os01g70200.1 (locus LO C_Os01g70200) derived from phytozome v7.0 (chr-ID Chr1; po s 40634009 to 40634751 reverse strand)
ggtgcggcagggccaccagacagagaggatctcaggtggggggcctttgtttttcttgtgttattctcttcttggttttgatcttgatggatacattcttgtcagttagtagaactcaacccaagctgcttatttgtgcatctaagaaactgttaaagcaaagcattttgaaatcatttagcctgtcaatttgatttgtttgtggtcagacctctccaccctaaatatataggatctatttcagatcagacgcaaatggaggttgtttatgttggtgtattattctaaatgatttggttgagttatggttcaatgcttggattcagtttaaaccttgttttattgaacatctactggtattgatacacctgttgatggtaggcattctttcttattggattttgtggtcctcgagacatctgctgccaaaaaacttgaatgccattctgtcctctgaaccttcaaatatttttcctcctcttcatcttctttatgatatgcagtatcatgttcctaggcaccaatatgataagaacatagccattagcctaattatgtttcatttaatctagcataggaacacacttactttatccctgtaggttgcttaggtatcataccttgatcccaagctatgcttctaaaatttagaatattcttttccctaattctgtgcaaggtctatagatactccatagcttttgcttaatattgtggcgaaacaaatgcaggaagtgctggtg

SEQ ID NO: 11557 - DNA, 671 bp, Oryza sativa
  Intron number 1 from transcript LOC_Os01g51000.1 (locus LO C_Os01g51000) derived from phytozome v7.0 (chr-ID Chr1; po s 29300300 to 29300970)
cctccttcctctcaattcaaatattttttagggtagtaaatgatttcaaatgaaaaaattgtcaataataaaattgtataacttatcaagatcaacaacttttgtttttgtcattttgctgtatgactttgtttgaataatttgaatttgaatttcaaattatgacaacttcaaacaacattttcaaatactaaatgatttcaaatgaaaaagtcatcaacaacaaagttgtataactcatcaatatctataaattttgttttgatcattttgctatatgactttgtttttataatttgaatttgaatttcaaatagtgacaactttagacaatattttcaagtactaaatgatttcaactgaaaaagtcatcaacaataaagttgtataactcatcaatatctataaattttattttggtcatttcttcatccgataacaatatatataacaatgttactatcccttcatccgataacaatatctataacaaaagactatgaagagtagagagaaaaaggatggtctgaacaggactacacatcccatggtttcaaacaggatgcattcttctgtgatgaaggtcaaatagtacagttcgattcttgtttatgcaactaactagtgattcttattcaatcatattgtaggcaggtaccacagtaattttg

SEQ ID NO: 11558 - DNA, 932 bp, Oryza sativa
  Intron number 1 from transcript LOC_Os01g47420.3 (locus LO C_Os01g47420) derived from phytozome v7.0 (chr-ID Chr1; po s 27096256 to 27097187)
tcgtcgtctacggctgcgatcggcgatccaggtcatctttcgaccgcctttaattgttcccccccccctcccccccgtcctctaatctcttcccgtcgcaccatgcgtacgggtcgtcgtcgcgcaccagaccgcggccatgtgtccatggtgtccttctcctcccctcctgcttgagttgtcatcggcggcgctctaatgtcttgcttgatgccgtggccgtgggtgctctgtcaacaccatcttgctgcaatcgtatgaatcgtctgcccatacccgtagttggggtgaaagaaggccaggaggaaaaaacttctctcatttaaacggacaccggcagatttggtgaatggaaaacgtgatgtcgattctattctccagaatttatgcgtttgcagtaatactttacattcgacctttctgttgatattttgcaaaactttgctacgggtgcaatggcatgagccaatcttttaaaattttagctgggtattcaaatatatgaacatgttgttcttatttgattttttttataatgtaaaagaaatggacagcaacaggtagaaagaaagcaatccacctaagtaagaaggataaaaagaactaggaataaccaaataaaggatatcttaaccatgtagtcactagtcaggattcaggaacccctggtttgctcctctagctttttgaatgatattcagaatactattcttatcatcttatttgagggaatagtgatgtcttgatagcatgcagtacaggagctgtgatactcccatcaccatattgtggttctccagtagcaatatcgatccccattcttctgttcttgactttctcttgccttgttaatccatactgtcatttactgtataatctcacagatctgcttctcctattatttcagagctggcaaagaagatttgtgttcc

SEQ ID NO: 11559 - DNA, 922 bp, Oryza sativa
  Intron number 1 from transcript LOC_Os02g35630.1 (locus LO C_Os02g35630) derived from phytozome v7.0 (chr-ID Chr2; po s 21420578 to 21421499)
tgattgggcaggacagagccaagaaggtgaggaaattttcttccaattttgttgaatttgttccagtgcacttatctcggttattattacacatcctgattaaaatcggttagttcgtgtaattaaaaacgtgaggtctttgttgaattacatcgtatctagttcttcgcttgagacactcctacgccgcatttggttgtttacgagtcgcgatggcggcgagatttagcaacaaagttattgagctagctgtgttgattgtgatgatgctttggggctttgctttcagtaaggaacaatatttacttattggcctgttaagctatctcataaaattgatatctttgcaaactggtttttaaatcaggggctcaagtgagcttctactgttttgacactatcaaggaatgattcagaacttgatttatttctttagtcaaatttgttctaatttgcaatggatgaatcacttctacatgtctacttgatagctgataacaaacacgtagttttgtacaaaatgtatatagaacattgatttggactgctgatggtgttcgcattcaaataaacccttatttccacacacttatccttggtcttcattgtccaacctaatacacttcagattccgtacataattttagtacatatagtgttaatgagagtgataaatcaagtgttggtattttctaaatatcactttctttctcaatttaatatatatttgtcatgagttgcgaaaagcttcacctcgatatatgttcttgttcatcaaactcagatgataagtcaacttcaagtcttttgcttagtgttgcattaatcaacagtaacgcctctatacttttgatatgctgatctctcacagcctgttaaatctacaggtgctatctgttgcagtgtacaatcattataaacg

SEQ ID NO: 11560 - DNA, 581 bp, Oryza sativa
  Intron number 2 from transcript LOC_Os03g22310.1 (locus LO C_Os03g22310) derived from phytozome v7.0 (chr-ID Chr3; po s 12785801 to 12786381)
ttattcaaaggtacgcgattgtgggttttgtttttttgctaatggcaggcatgatggtttcttattttcccgcagctgacagaaaatatcaacaaatatattggtggtccaaaaattaaagtgctatagtcgagacagataggccttgaaagacacataatatccaaagccaataccgtttttcacagtgcaaaagtagttggaaataagtctatttctcatccctcatattctaaagtttgatctaatcgtctccctctaccataaaaccaggtataacacatcctctatttttgaaaaaggtgcaaatcgactacttcggtagtttgggaagcgtttttgcaggtgggcccacatgtcagtgagatatggccaaacatatgcggcgggtaccacgtgacaattccttttatcgttcccccaattaacattatttcttcagataggtgcagcgtagctcaaaggtcactattacttgcaaaacctaaaaccagcgtgcaaaatcacatccgaccaaacactactctcttgcatcaattcgaacagctcgaaggccctcatccaactcctcaacgttggca

SEQ ID NO: 11561 - DNA, 812 bp, Oryza sativa
  Intron number 3 from transcript LOC_Os03g05660.1 (locus LO C_Os03g05660) derived from phytozome v7.0 (chr-ID Chr3; po s 2825470 to 2826281 reverse strand)
atctgcctgctcggttggtgatctgattttgtttgtacggtcgctttctaatgtgtggtgcatatgtatttacagtattagcattttttattttcaaaaaaaaagtgaggataatggcatggaactcttgaatcatgataatatctcacaatatacccaaatcactatgttatctgcatgcattgctaaacacagggtcctgaatcccattagatctgtgaacattattatctaaataagagaagcacacatgatcattcatcattgtaaacctgttctttgaatataacacaaacatatgttcttctgctgttaatgatttgtactttcttaaataaatatcaaaaggaataataggtttgtatggcgtgtttcatgggttgattcatattgcgatgtttctatggcagttatattcttatcatactaacctcctgttttgtctgcaaatggctgagctattacattcaaagctttcacatcacatagattgtccataatgtgctcagaatctcagactagatttcttcttaagtgctatatattccacttcattacttcaaaaccctattgcaggttgactgtaatttgttggagcaatgcagctttagctctacgatatttcatttgaagaaatgtgaaaaaaagtgacaatgtttaccagattaaaacctacttgttttctacctgaggatgttagtttatttcatgatatggttttgagatgatacactgatatacatgctcttcactgacctataatgcttatgaatggtctggcaggaaggtaattcatactgtgggccctaaat

SEQ ID NO: 11562 - DNA, 796 bp, Oryza sativa
  Intron number 1 from transcript LOC_Os02g32050.1 (locus LO C_Os02g32050) derived from phytozome v7.0 (chr-ID Chr2; po s 18925916 to 18926711 reverse strand)
agattgttattcaaaaatcccccgtagtcaaaattgtgagtacgtgtagcaaatagagtactgataaatgtactcaacacatatattttagcaaacagagctagatgtgaggaggagtctaatttttggctagaggatggttgtccttccgtatcacatattgtaagagaggaagctaattctaagtaatatttggctgtgtatatccttcgtggatatagaggccggattaatgaaaatccattatctaaaaaaaatctaaataatatatcttcttttccccaaaaaaaatgcaagttcaaatttaacagaaaaaacaaatttgactgcaaatagtatgtgttagagtacgtgtagcagtgctctttccatattaacttttatgaggtttacagatttttgtttgtcctttgttggttgaattgtcatgctgagaggggcacacctctgctcttctattcaaaaatattgattttaaacccaacctaacttttgatttttcacaacacttgaaggtctcgaacagtggtatcctaaagtttttgttatgtttgttttttttaaaaaaaaaaagttttttgttataagaaaattaaatgcacggtaagtcactcctctccccctccccctaaaaagaaaacctaatttggtggcaaataaaaatattttgtaaataaaacaataaccatcaagctaaacaggttctcaaatttgagttatgcttgaagtttaggagataaattcaaaccaaataacacggaaattaagctattgtttgtttttactatcctaggcc

SEQ ID NO: 11563 - DNA, 889 bp, Oryza sativa
  Intron number 1 from transcript LOC_Os01g58890.4 (locus LO C_Os01g58890) derived from phytozome v7.0 (chr-ID Chr1; po s 34032499 to 34033387)
acttctcctcttcgcaaggccggtcgtccaactagatctgtgttctatggactaattatgcaacgcatgacacacggctctatttaatttttaaattgattctcgccaaggaagtaattttgattcctagtcatgtaaacctgctcgagtcggtgagaaaaaaaaagatgcggtgttgcgtatgtttgttaaaagtgcaattaggcaattttttgtgttcaaagattgtgctgtgttctcttttatgacaatatggaacaggaggttctggactgattagcatttaatcttgatactaccatgcgcagaattctctgctggagttcgagaagcttgtgagtgtgaagcagcaagttgtcgctggcactttgtactatttcacaattgaggtgaaggaaggggatgccaagaagctctatgaagctaaggtctgggagaaaccatggatggacttcaaggagctccaggagttcaagcctgtcgatgccagtgcaaatgcctaaggtctagacatgtttggtttagatacccgccaaacaaaattttcacctgttccatgcattaccatgtataatatatatatatatatatatatatatatatatatatatatatatatatatatatatatatatatatatatatatatgtcccttttctcattagaaaaccagagcttgtgccccatcctacttggttaaggccattgatgaatatgtttgttattctcttagtaagaatacaccttttaagtttttcgatcaaataattaagatattcaacttctaaataacttttttcttttctctagatattatatcactgaatcatttattgcatattgaattgacatgtcaaatctactaatttcaggcccatctcgtatcct

SEQ ID NO: 11564 - DNA, 595 bp, Oryza sativa
  Intron number 4 from transcript LOC_Os02g11830.2 (locus LO C_Os02g11830) derived from phytozome v7.0 (chr-ID Chr2; po s 6127840 to 6128434 reverse strand)
cagggagcgtttgcatctggaactaccagacgcaggtacatgactgttcacagtagcttaattcgtcattttctgctggtttcatggattttatgaaatgatgattatctactaccagcacgctgagcttttgtactgcaaaatggatattcccatccatatgtaaaattcaagatacattggatttagtgtgcttgtagtagtaaactttgacgatatgcgctcatagtaagttgtaccagagcccggaaagaaaacaaagaaaaagaggggggggggggtcaaacatagcgatgaatgatgaattcttaaaacctagcgaggaagtcttcgatgcattgtagaaaggaatatggtcaaaatagaagtaacaaggagtcaatgaacttctagatggttgtttcagatgtgtgagtgttagctacataattgggacttcttaataggtttgcaaactatttagagcaaaacaggaggaggtaaaacataaaagtaaaatctagaaatcgatggacggaaaaagaaacatacatattttcagcatagttactcttaaagttaaactgattataatatattcatctatcctcagacg

SEQ ID NO: 11565 - DNA, 926 bp, Oryza sativa
  Intron number 2 from transcript LOC_Os03g25790.1 (locus LO C_Os03g25790) derived from phytozome v7.0 (chr-ID Chr3; po s 14763452 to 14764377)
catcaggtatgtgcactctgtagtagcaaaagtagcattatcatttactaattagtactccgtatcagttgttctcttgttagtttttgcttcagtttcagttaacaacagaaccaggttcctttctcactttctttttcatcactgagattctttacaaaaaaaatgaacatacatgcctaaagtgcagaacattataggagacttttaagctagtacaaagttttctgatatgcttgtgcttttccccactttgcatgccttatcttcagtcacaaaaagcatacgccatacatgtgacatctagaaacttatcagttatctcatgcttaagaaatagtagaatggtgcgaataatatatacttagccaatgatttgtttgatacaacccaaatcatatcagtcagctgtgagaaaacaaacattcaaatactgaacactctgaaacctgaactgtagccagttctgatctttcatgcagcaggtcatgttttctttccctgatgacagcaaatgattccagggcttcatgatctaacactcttaatctaacaagagtactatcattctatgcattatttgtatgaactatgaagtgcacaaccatcatgtactacaaccaagtaccaacatggattaacaggattaagtactagtctgaaccaactgtactttcatatctttctgcacttcgtcagtaatcagatattcagaattcaaaaccatctgttgtgtttgcctgtcttacactaaaattttctgctccaatcaattactaacatggattaacaggataagtagactagactgaaccaactgaacttttatctttctgcacttcgtcactaatcagaaattcagaaatcacctgttgtgtttgcctgttctacactaaattttctgctccaatgatgagcagggactt

SEQ ID NO: 11566 - DNA, 1057 bp, Oryza sativa
  Intron number 1 from transcript LOC_Os01g47430.2 (locus LO C_Os01g47430) derived from phytozome v7.0 (chr-ID Chr1; po s 27107546 to 27108602 reverse strand)
ccccgacgaggcggtcagccgcctcctctcccaaggtctctcacctcgccgccgtttttcaagtttttgtagctgctttggttgcgcttggattgtttcgtggcgactggattggattggattggattgaagtgttggggagttctgttccggttttggatgttaggagacgtgctttggtgggtttgctttggggatttattttgatttattaccgtgatggctgtgtacagcaagagagtggcaggaatagctggtgtttttttttttgggggtttggtttgatcttacctagatttgtttgtctgatgtgttattttgcatttggcttagattggggctgtaagactgtaactctccggtttaaacttttactatacttagtctttatttcgaatattctcaattcaaccgatgctaacatttgggggcataatatagattagctttgtgaacattgattttcttctcttggaattaggtcttttcgatctgctcggacagtgtttcgatttattcagtttggatagggcatctgatttttccctgttgggctgcctctttctttacattaacctgtgtctgaacatttatcttctgcacacctttcctacagttcattcaaagtaagagtcaactgatcataggcaatcaagttgtgcatctctcgtagtctttgttgtaggaaactaacatattctataacttctttctgtaatttgagtaaataaccttcattgcttgataatagaaatattctaaaggaagttggaaatgaattgagattgacttgggtatcatctgtaaaacatttgaattacatcgatatatttctacaatttattcagcatgctttggatggtataatcttgggatgctggtcttcatttcaaaaaaaaacatgtccaattgttcattttagtgcatttttttcttgtgaatagcacgctaagcttgatgttctgcatggttccagtagtgccctgataatgatatctgacattttgtcaatctttctctagatacgtttcaagaggtaaagagcaagcgcgacaag

SEQ ID NO: 11567 - DNA, 527 bp, Oryza sativa
  Intron number 1 from transcript LOC_Os02g15900.1 (locus LO C_Os02g15900) derived from phytozome v7.0 (chr-ID Chr2; po s 9006638 to 9007164 reverse strand)
ccgggaaggacgccgacatcttcgccgttgtcgtggggctagcttgcccttgccgccaatatttcagatttagtcctgctcggctcactgcaaacaaacaaaaaaagaatcacatttgttcatgctacattacctcgaattctttaaataatatcattacacaggcatttggcgctagttgcgttgcttcttgcggtgaagtgagcatttgatttcaggcttgtgttgcttactctatgctgcataagaagcttaggattcacgcgccaataggaatgcgcgcacgccgattattagtatgtacaggacacaccattaagaaaacggcgcagagaattacagtgttttcgaatgatacaatactagtcttacagagaattgttcggatgcatttctgaaatatgcaggagtgcatctgaggagggtttctctgtgttttgttttgtatgagcgctgtgaataataacgagggagctattttgattatttttcttctgtcgcagattgggtcgagacagtacattgtg

SEQ ID NO: 11568 - DNA, 719 bp, Oryza sativa
  Intron number 1 from transcript LOC_Os01g38620.1 (locus LO C_Os01g38620) derived from phytozome v7.0 (chr-ID Chr1; po s 21702322 to 21703040 reverse strand)
gagcagagcaggggaggggaggggaggggatcctggtgagcatccatccacatcctctttctgattcatctctctcccccaccgccactacttttgtctggaatttgctcgcgttcgttcgtttcgttaaccctagcttctcttctagatctggatgaagctcttctcttaatttcagagccttaaaccttagtactacaagtaacagtttgtttgttcccccaaacccccatgtcccaagttggatccgcccctgttaagactattctgatgttcttgagccgcttactggcttatgcatgatccttatgttattagtcactccatctagcttgctatgtgctgctcagtgtcttttacctcatgcgaaatgtggtcagaattgctttttattttgagatagttcagtcccggatttggactgtaaccctaacatcaaagggtcttgattttcagtattttccactttttttagcttttgttcaccatgtaaattgaggcgtgtcatcatctagcatgatattaaccattttctagcatgccctgtactgattggagtctttcaactcatgaaaagaattatttcagttctatttcctcttattatatggttcttttggttaagatgtaccgattaagagaaactagcttgcttaccttgtcctaactgagtgagttcttctggtaatgattcagagctgctatcccctcccctgccc

SEQ ID NO: 11569 - DNA, 461 bp, Oryza sativa
  Intron number 1 from transcript LOC_Os02g18490.1 (locus LO C_Os02g18490) derived from phytozome v7.0 (chr-ID Chr2; po s 10764529 to 10764989)
cgagagcggcagcggcggcggcggcgtggtacgaggtcaggctgcgacggtgctcggggacaaatttcagttagtgggatccaaactgaggataattaggcattgaatcctttatttgatcatttacatcaaaattcaaatcagatcgacaagaacaatcagacaaggattcaggattttgctttacctcccgtaggagaggcgccgggaaatttctctgccaaggaaaaagagatcgaattatatacatagacaaactataaaattgatctataactaggtactactatataaagggaaatgtaaaaggtttactaaccatagtcacccaaaaagaagaacaaagcgaaaaaatttttgaagaaaaacagagacgaagaaacaaatcggagtgagttggttgtactgactgttgcacttgctcagggcggagaagttgccgccgcaggcggcagggaggg

SEQ ID NO: 11570 - DNA, 626 bp, Oryza sativa
  Intron number 1 from transcript LOC_Os03g12064.1 (locus LO C_Os03g12064) derived from phytozome v7.0 (chr-ID Chr3; po s 6326754 to 6327379)
gagatctgtgctgaagctttccctctctcaaggtaggttatcaagtttgtttgcatatctcggagctgatccctatcaacggaatggatttttgtgtacaacgacgagggagaagagaatcagatatccagttccggtggcgttcatggccgcgagatccggatccggactccccattccacagtagccctaactagttgttcaatactctagatctgaatcttattatcacccttagcatgtttccattaaattttagcatctccatgagtccatgaccatgccggtacgtgcatgcagtagagtgccgccgccggtgtactgcatgcgcagtcgtgttcccaatttgctccacatgtgccttgctgccattgatgacctcgaccaccactgtgagctagtaattcaaaaggcatcagcagtgccgtggtggtgggtggtgtgagcttgaaaaggcaaatctcttcgttagaggtgggcagcatgcgtggtgggggatgggacaggggttcagcaatctttgtcctcttcatttaatttcttactcctagctgttagtagaaattttctttaccaaatttgtttttgcagattcccaacgctggagaaatcttactgcgcagact

SEQ ID NO: 11571 - DNA, 1041 bp, Oryza sativa
  Intron number 1 from transcript LOC_Os01g48700.1 (locus LO C_Os01g48700) derived from phytozome v7.0 (chr-ID Chr1; po s 27926050 to 27927090 reverse strand)
caccgggtgggggctccgtgagttcagcaagataggtcagatgatgcgccatgccgaaaaaagcgattttttttttttactcgtgaacctgatgtggtcaattgagttcatattactacctgtgtgtggatcagggtttaccaaactgccagggccggggttatcgcgccccggcggtaagcacagttactgcgcggtaaccgtgaaaaactgtacaaaaccgtgcaaaattcatcaaaaattcaaattattttttaaatttatttgaatttaaggaggttaccgcggtatttacattaccgtaccccggcggtaagcccggtaaccgcggtaaccgcgcggttaccggcggtatggtgaaccctggtgtggattgctttggtgaggaatctgtacagtactactgtttcacgcacgaaacagattgaacgattcgagcgtttaggatgatgctcttggatttaatgagtgggtttcgtcttgagccataggggagttaacgatgccctgtttggtgtgggggaactcctgcggttttcatttgttgagggatagctctggtgactgttgctatccgtactgttttgaattttagacagtgcaattaggctatacagtgaaggaatgagtgactgtgtctgagtgggcacttgtggaaaacattgtctgttcttgtgtggcttgcattgtttacactactggagcacactgtgtcaccactgatcaacttgatgttatgtcagcattttgattttgagtacaccatgtagatacgatatgcacatctgttgtacagatcatgtttacacgatggtcattacccactgcagttggtctgtaaaattgctaggacatctgaggttgtgtcagtagaaattttgtgagggtgcagatgtgtaataatggatctgttttaccagttaaaagtagatgttttcttgtcatgatgtgaacgaaaatgctgaccttgtatgtgatttcatgagcatttgactttattttgcagtttctaagaaagttgaggccaaaggaagaaccaca

SEQ ID NO: 11572 - DNA, 642 bp, Oryza sativa
  Intron number 1 from transcript LOC_Os01g03850.1 (locus LO C_Os01g03850) derived from phytozome v7.0 (chr-ID Chr1; po s 1631304 to 1631945 reverse strand)
atcgatctagaggtcaccaccgccattgagctcctggccacattcccctaccacggtgctatgtccattggcactgaggttccatggttagcaccatagcacttggaactcggtctgccatctcggacccagtgtcatagagacaattaggttgctgagatgttggactttagtgtcacaattcaattttgaaataagtttttagcagggtttattctcaaaataagcttttcaagagggttagttttttttccgtaatttcattggtcaaactttaaattgcttgcattctctcctaagcaactgattggttgaaaatgcttgccttcctgtgcatttgaaatgtgccagaaatgcttatattttgtataaaatttgaattatagaaacacttacacttggaaatggagagagtatgaacttgtcattgatattgtttatgttttcctgaatctttttttcttcgaaatagcatatttcctaataacttctattattaggaggaatcaaaatgttatttcagagtttagcacataagtctagcacctagcattacgttcaagtatctacgtacattgtttgctgcctctcacttaatccttgatttcttctctttcccttttctctcgatcggccaggcat

SEQ ID NO: 11573 - DNA, 613 bp, Oryza sativa
  Intron number 2 from transcript LOC_Os02g08250.1 (locus LO C_Os02g08250) derived from phytozome v7.0 (chr-ID Chr2; po s 4380963 to 4381575)
ttaaagtgacggtagaaggtgctgaggttgagaaggtaagtcttttattatacgaaaattttctatatgtgatcaagtttttaaagcattacttttgacttgtttattgcatgatattttctctaactataagtaggggtaaaacaagttatatgtgacatggtactcattttgaattagtttatatcataattactagtttatgtgcttatttttgttcaattcatttgtccttctcttgcaatttacatgttttggtagagtatattcgccgagtaaaaaaaaagaactatcagacgaacatcatatttgatatatatcatttcatatatagggtataaagtcattttgcatgcaccctaagttatgtaatgccataatcttcaatttagtttatcttggtcatatgattatctatattatgtatgtttcttaatttgtagcttcaacatatctagttttagttgttaacaaattgcaatccaataggcttatgaactagttaacgtataaatgctattgttaaacattgataggaacatttttaaagtaaccatttgaaatcttctttgtggcagttggaagtggctacaccacgagaaaaggaattatt

SEQ ID NO: 11574 - DNA, 607 bp, Oryza sativa
  Intron number 3 from transcript LOC_Os01g50690.1 (locus LO C_Os01g50690) derived from phytozome v7.0 (chr-ID Chr1; po s 29109676 to 29110282)
cgacccatttcccataggagtggttaacagagaaggtacggtttccagtgaaacacatgaatttgtgctgcattccttttgcttttcacgtgttatcagtttagacggataatatgattgccgaagtggagtggaagagatgctcggtgttaagtttctttatgttagcactgcatagtaagaaaaaatgattgggacagcttgagtttagcagttactttagagttctgtcaacaacttaaatgttatgggtggctgttgtgcttgagatcacggtggacaactccaaatgatgataaatatcatcaatatgtacactttgctttctttaaaaattattaagcaatgccttaggctaattgcatgtgaagatgcaattcaacaatatgcatccagaagttacgctttcttaaacatcaattcagcagtgtggatttgagttcctacaaaaataaaattgtaattttaatatgtaattatcttgattacatgaaatttttggcagtcaacttctcttgtgacaaactgaaaagtaacactggacatcgatagaaggtgcgcaccaggaatcagtttttattgcttattttgcagatctctttgaacc

SEQ ID NO: 11575 - DNA, 951 bp, Oryza sativa
  Intron number 2 from transcript LOC_Os02g55800.1 (locus LO C_Os02g55800) derived from phytozome v7.0 (chr-ID Chr2; po s 34158905 to 34159855 reverse strand)
tccgcgctcggccgcaagtgagtggagatggcatcaaatcacaggcgggagtagaggaggaggcgacagcaacgagcggaaggggacagttggcggagttgctgttggctatatttggcaggagaagaaagggggaagcggcgagcaaactcaacgaacccacgagggatagaggaaggcggggagtttcgttggcctggatcgagagaaagggttgatgcgaaagtacaatactaccctcacaccaccatatctcagttggtacctcctcctgtgggggcacaataccacccggtaccgagcaatttagccgtccgatttagccagatcaggatatggtaactcctcccctcaaggacaggaaaaaggctctaagttccaacatgacagcattaaattcgattttagaacgactcaaaaagatgcggtatcggtattacacacacatcctaccatttctttaaattatgataccattttctgcttaataaaaaagtaaatcactacttggtgacatgattccttttccaacatccatttaaaaaaaatattcttccttaggtagagcaccaacactaatttattcttatgtttcttggtattttctatatatagcctcaatatgtgtttcgcaccttccctgaaaaaaatattatgtttcgcaacagggcctttaatttttcttacgtatggcccaagccaggaagtagcggcgatggaggttgtacgggtccccctccagatattggctatcatgtgatggcctgatgggtgtcatgagatctcgtaccagggtcgccctcttgacgatgtcgccgtacaggccacataggtttccccgagagacagtaacggttactatttggttattactccacttgattgacttgatgatatacttatggacccctgacaggatattccgaaattgaattctatttctgaagaaaa

SEQ ID NO: 11576 - DNA, 483 bp, Oryza sativa
  Intron number 2 from transcript LOC_Os03g16470.1 (locus LO C_Os03g16470) derived from phytozome v7.0 (chr-ID Chr3; po s 9079151 to 9079633)
ggaaggaaaagaaagttctgaacttctgattgctggtacagcacttcgtcttccttttccagtgtgagcacatcttccactgtctaacttagggcttgtttgatttaccagtactcgtacttttttttttttggaaaccaagtttgatagcagtaaaaatgtcaaattgggtctaacttcagaacactctaccattttgtttccattactactgaatatgtggttgcttggaccttggagtattcaaccttgtgacattctacattagggaatgctagaataggaattgattaagtaaatatagcaattagttgcataagatactaaacctctcttttctttaacaagtgtggggaatacatcttcgttggatgttctttagatgaatgagggcacgtgcataaatgaatccattgtaattagtttcattaggttatttgtgcactcacagggttcctctgttactgcagatcgatattcgac

SEQ ID NO: 11577 - DNA, 911 bp, Oryza sativa
  Intron number 2 from transcript LOC_Os03g12670.3 (locus LO C_Os03g12670) derived from phytozome v7.0 (chr-ID Chr3; po s 6754199 to 6755109)
gaatctaaacgtggagctacagcgcaacaaccaaggtacaaaagataatctacatgtgcaatattagtcgtaatcaaatttccatatcattcagcgtttcataattatcactgccttaaaatatccctagtcacataatattcctggatttactttaaattgcttgaattacttaattattattatcattgccaattaatatccctgataaacagcagtattatcatccctagaagtgcatctcacatattgactcaagttgattaaagttacgcttggtaattggtttaagagcagctggaatactacgcaattgttctaacgaatatctagtacttgctttgtatacttaaatatatccataagtcggtgtagtggtaatatttgcttccgagattatgtgctcagctatactccgaactgtcaactatcagtttggaagtatgttatgttggtcaaatactattatgatgtttccagcatacgattggagaactcttgtccaatttaagtgaaataagctcttgttcttgcccagaatttacagcgctcctgcgccttaatatcaactaattgtgtatgatttaaccgctcagctctttcactttgccctttctgtatttatgcatgtacgagaaggctagtaatgttttatatatttgcactgtgagaatttcttttcttggatagtcagcaatgtaacctcttttgcaagctgtagaatatgatcatatgttgtcctccttagcattatgttagtttctgtacgttgaagtacgagaatttatgttcttgaagcaaaaagttatttagcatttgtctattcatcatagtttgtactatgtagaaattgtagcattctctcgtcgttttaaggtgacctgaagacaagttcaacctgaagtcacccg

SEQ ID NO: 11578 - DNA, 577 bp, Oryza sativa
  Intron number 2 from transcript LOC_Os03g22740.1 (locus LO C_Os03g22740) derived from phytozome v7.0 (chr-ID Chr3; po s 13135123 to 13135699 reverse strand)
ggaaggagttcacgacgtctgactcggcgagaaaggtttgtgttttttcttttcacgttactcccaggacaaaatattcttcttctttttttatttaataatctcgttattgcacaagatatctcatatttatggagttaaataagccaggacccatggcttcagtaggttgattcaacataggtgattacaaccttctttctttttggggttttgtgactttgagagaagcaaagtgattttcaggaataaaaaaatacaactgagtaataattctctgatgctctgaaccgcagttttgttttggatgtgtaatttgtatggtgagagaagagggtaatggttagttcagtctcctataatataaatgccctgatgcacattggaatgacatggtgtggagaacagtattatatacataagctgtgttacttttctactttgaattgtgatgagcatctccatatcttcctcttactactgtttattttattattttgagttgattttctttcctgaccaaacaaattaactatattcaggtggtcgagctgaaggctttcaacaagtttgagaa

SEQ ID NO: 11579 - DNA, 780 bp, Oryza sativa
  Intron number 2 from transcript LOC_Os03g12550.1 (locus LO C_Os03g12550) derived from phytozome v7.0 (chr-ID Chr3; po s 6649668 to 6650447)
ccgcggcagttatatttaaagaacaggtaatttgtaatcaaagtatagaaaagaaatgttggaagcaatacttgttgtaatgattgtggctgtacaaagaaagaaaaaaaacttgattttctaaaccacagctcccaaatttgggtgcacaacctgcatatcatacattccatttcaataagatatattttccttcaattgctacttcataatgaaggaacagtaacttaccagtgtttgtgattgctatatgaagtcctccacccacatacaccgtgtgatttgtctatcttatcaaatggcaactgagtggtatgttatttccagcagcactactcctttacctaaggttcatgaataaaagttgttttttgttgttcttgtttctacccgtcttgcccccatcatagcattgtcagtcactttagtcacttctgaggttgtgttttctagccactgttgtagccattaagtacatgccaatctagttctggacctccacatatcaaagtcaattttctttttttattattcaagatatttaatgcaataaaaaaattaaagaacgattctccacagagatatgtacataaggggatccatattcttttatcctgtaatattactagtagtggttactgtagttactaagatcaaatcaagatttatttattgagggttttgctaaaatttcagatgcttatgttacaagcttaagcatatgctaaatatgggttaattgcaggtcgagaaggcattcagagaaggtacagctcggca

SEQ ID NO: 11580 - DNA, 592 bp, Oryza sativa
  Intron number 1 from transcript LOC_Os01g44020.1 (locus LO C_Os01g44020) derived from phytozome v7.0 (chr-ID Chr1; po s 25219482 to 25220073)
caccttctacgccgcttgtgcttccagatacaaaggtataatctaattttgttgtcttataaggatatgtgacctgttacatctaagttaccataatttcttagattatatcctttttgtatatgacacaagggatagccatggtgatcagcatgaggcaacaccacctactccacaggctagcaatatattttatactcacatcaattatatgcatatgtctttgtcagaccttcctgaccattattactttatcaggtcatagctatagcacagctagataaaaaacataaatcttctacggctgatgagaatcttggccatggagggttagtgccaatggaaaatttcatgttttactttgatttcttctctttttcctcatgactcaaacaacttccatttgtagctcatctcctgatgaacatgattgtcgcaagccttctgttgtgcgcacactgttcgtacacaagctgccaccggagccgccaaaatgtgaccaactatactcaagcaacttcttgcctcctcatttgttatagcaaaaatgtgactctgctttacattcttcatttcaggacttgagcctccc

SEQ ID NO: 11581 - DNA, 878 bp, Oryza sativa
  Intron number 2 from transcript LOC_Os02g05130.1 (locus LO C_Os02g05130) derived from phytozome v7.0 (chr-ID Chr2; po s 2451696 to 2452573)
accatattgaagacagtgcgttcgtctaccacgaggtacacgcttataaagacatattcatcacttagtattagtaatttaactctcaacatatttggtaaaatatcctggtttctactgaggcaaaaatatgtagcaaagcaaatatataggcattaagcatttaatagcaaatgataataaattatttatttgaactgaaagcgctaggcttttacatggctgcaattttgtttatgtaaatgagttaggtccatctcacagaacctcaatccctattgacccatattagaaaaccctgaatttgagtacaaccgttatatatataacacattaagatgtagaagacactaatttttatatcagtttttataataaactgattcgacaaagctaaccgggtccatttaccatttcataccattttaaacaaactgagagattagctcggagtcatctttgttcagatgcaaggaaagaataaaaataaatactgcaatgttaaacaaaccgagagatcaaaggccaaatagagccagcagcatctcttaatacagaaatatatgatcaaaccccaaagaaagcatgcaccatttaatttctaatttggatgaatggcaatcgagcccattgcctctacatataactttgactgtacattaagagaataggcaagcatgcataggtggtacagtggcaaacagcagaaacggatcaataataatataattctcactcatattcttgtaaactatttaattctgatatataataaaatccagtatcaaccaaaacttttgaaagtgcagtgtgacagtagaattcttctgtttgactttttttgttgaatagtttcagcatatttggttctattttaa

SEQ ID NO: 11582 - DNA, 456 bp, Oryza sativa
  Intron number 1 from transcript LOC_Os03g07310.1 (locus LO C_Os03g07310) derived from phytozome v7.0 (chr-ID Chr3; po s 3719348 to 3719803 reverse strand)
gccctcgcctccgcccaccgcgcttccgcctcgaagtgcgtgatctcctccgtgtcttatttatttgtttatttgtttagttatttcttcgcggagtttgatttaagttttgttcagttttgaattttgatgtgtatggatttggtggcattctgtagggatgagtagaattgtacaaatgaaagtgtattggattcaaatgtggatgaacttgttattgccctttcccaaatcgatagtaagttagtgaagttgtagaagcggctgcttcaagtacagttgcgattgatgagaaaaatggttttcactctagaagtcacggcagaacataaatggatgcactagctgattgacatcctcatttttttgaatgtttacttaagaagcagcattaatcatcacttgggcatatcagttttaacttgatttttttgtttttaggagtctataagagta

SEQ ID NO: 11583 - DNA, 978 bp, Oryza sativa
  Intron number 1 from transcript LOC_Os01g16870.4 (locus LO C_Os01g16870) derived from phytozome v7.0 (chr-ID Chr1; po s 9636806 to 9637783 reverse strand)
gagaggtcgcctccgttcttgcatcgttttctttggtaaggcgaggagtcccgcttttcattttgggtggagggaaatctagggttcttggcgggggggtttttgcagattggattgttgtgtatgcgggagcggttgggcttgtgttgtttggtgcggttcttggtggtggtggggtttttcggggaggagaggagggcggattccgtggggttttaccgtggaagtttctgttcttttgtgttcttttgcggttttcctctgttcttggtttaaagatcgctgcattttgatgcattctattaaggagtttgatttggggttttctttctttttttcccctgatttcgttcgttcttcgttgcgttgttctcggggctttttcgtcttttgccgtttatggtggtttgttttagatgttttttttgaagatttatccgaaacagtgtttgtgcgattctttttcatttttgcgttctttcttcgtttgatatttctggtccttgttgttttaaacctttattttttttgtttgggagcacctccttttgatgcttgttttggtggatatctgcctgtgtagttttgttagggtttaggggtttttgggaaggtttatgatactgatcttgactgggaaaagaagatttgctgattaagaaaatggctaagtttcttgtacttaaaaatgggtaggttgtgtttgttgtagttttgaaagtctgtaggctggatagactcttctcctatctttttggaagaaaaattaagaaaatagttttctaattttgcttttcttttctttttctggaggaaaaactcttgacccagagcattttcattgtctggtatctgttagcatgggttttagtttcctttccttttctgttttgatttaccttgttaattgttgaatgagttatgtattttgtgtgcaggatagggcagcgctttgacagctttggggagttagtcggt

SEQ ID NO: 11584 - DNA, 930 bp, Oryza sativa
  Intron number 1 from transcript LOC_Os01g34950.1 (locus LO C_Os01g34950) derived from phytozome v7.0 (chr-ID Chr1; po s 19338020 to 19338949 reverse strand)
gtaccaatgtaagtgatcatgagaatatatttaattcacctgctacagagtctgcttgtgttgatgaacaactagtttttactaccgatatttatgatcgaagaaattgggacaaacttgacaataaagctaggtatatattagtggagaaagggtctataagagaagaaaatattgaattccctttggatgacaacttaacacatttctcatactctcttttttctagaaaaatgagcaacggggaggttcatgatagaaaatgcttggtttactcaaagcatgttgatagagttttgcttttcttgtaagaatttcaactctagaaattgcaagagttcacctactcatgatgggtttagagattggaggcatatcagtgaaaggctaaaagaacatgtagctagtatctagcatatcaccaacatgacctcttggaatgaattaagagctagattgataaaaaaatgaaacaattgacaaagatttgcaacattaattgctaaggagaaaaaacgtatacgataagttttataagaataattgctattgtcaaatttcttagtaaacataatttggcttttaaaggatccaatgagcaactttacaatgatcagaatggcaatttcttagctagtgctgagatggttgcagagtttgacttggtgatgcaagatcatcttagacgtattcagaacaacgagatacattatcattattatcttagtcacaaaatacagaatgagttggttttctctcttggcttctaatatcacaaaatctatcatagaggcaaaatattttctattatcattgattccaccccaaatgtgagtcatcaagaacaaatgactttgttggtccgatgtgttaatatgtcctatggcaaaataaaattagaggagtattttatgggttttttgaaggtgg

SEQ ID NO: 11585 - DNA, 824 bp, Oryza sativa
  Intron number 2 from transcript LOC_Os01g36229.1 (locus LO C_Os01g36229) derived from phytozome v7.0 (chr-ID Chr1; po s 20041729 to 20042552)
gacgtcctaattttgtggcttggttctaccagcaggtaatttcacacttcttaattgccctcctgcattatgtttgttgatcactgcatgcttaatgcatatgctatatcttgacatgtaaagtcgcatggacacgactatatatgtgtgctaatttgaagcaagtagctaaagggtcacgtttatagtacatatgacataaatgggtaacgtttctgaacagataaacatgagaaggagaggcgaagtaagaccaatcttattagttacacaaactaaatagtggctttagtgacaatagaacagggagaaaacaacgatacaactgagttctacagatgtatcaaagaaatattcaaacttagatttgaaggaagcataactcttttacttgttctattcattttctactgatttgatccaagacagttgaggtacaccccaaattttggttcagtagaggtagatgtcttacagatgtgtgaaccatttcattgtaaaatatcatgtcttgttttctgtatatatgcatatacaagtacaggttcaatattggagagtgatgaggtaggccatcattgtttatgcccctgctatgccaactgccactaggttaatcttaaatgtcccccctgaagttgtaaacttatttttttaggagtatcatgtaataataatggcaaatgaagattgcattcttctgctagttataggattttttaaacaaaaaggtgcttcctagtgtccaatggatttgtgtttctaaatcagacctcatcatttctgtagatattcttttaatttgctagcagctagagggagct

SEQ ID NO: 11586 - DNA, 518 bp, Oryza sativa
  Intron number 1 from transcript LOC_Os03g22634.1 (locus LO C_Os03g22634) derived from phytozome v7.0 (chr-ID Chr3; po s 13069574 to 13070091 reverse strand)
cttacgattgtggcaagtgagtaaataaattgatttcagctctacaatgtggtattttttcttcacaaaagccagattctacttctcatcggtcttcacaaaccaatgtagtgacacgtgccaaaagcgagatgaaaagatagcttgtgtcttttaccgttgcaaggcataactgaaccatgctatacaccatacattgacctatcaatcactttcggagattaattagtagttggtaatatatatttatttgtaaaagatggaaacctttgagtttggaaaaacaaaaagagaatcctcgccgaaaacaaaaaacaaaaaaaaagaaaagaaaagaagagaacgaaagatgcatgtctcataacaagacataacctttttttttttgggaaaatcccagacataacctgtgtccatcgtgattctcatttaacttagcttctctggtgcctatataaacctctccatggtgtccatctgcagtgcacacacagtttctgtagttgcaggtcagtcac

SEQ ID NO: 11587 - DNA, 889 bp, Oryza sativa
  Intron number 2 from transcript LOC_Os01g50100.1 (locus LO C_Os01g50100) derived from phytozome v7.0 (chr-ID Chr1; po s 28790991 to 28791879 reverse strand)
tctgggaattggaacttcagtagcttcctttcttcgtaagtaaaagtcctttctctgattggaacacctctttagtgaagtagagagaagctcctgcccttttcgctgaaaaaaacaaagaaaaaaaaagaattagtggaacctgtagcttcaaattatggatgtgaaacatataaatagtattcagcaagggaatttgtagtaaacagtattagaaattctttcaatatctaatttgttcctattattcaatgagtctccgggtatccataagtcaataagaaatttcatttaaagggtctcagagtatccatcagattccaaagcaaaattaacactttttattcaaagggtctcagtatccataagtcagtaagaaattttgtaggatagtgtgaaattaggctttgtttggtaaatgggattgagaaataatatcccaccctccaaaaggtaatattgcatcctagctatccattcttcacacctcatttaatcctagccatttattctttacacctcatttaatcctagtcattcatccatttccatttcccaatcccacctgccatatcccatttgccaaacacacccttaggataagtaattaatttgctcttgcatggatgcgcaatcaccaatacataatattcattattaacatcatggttgtcagttgttactacatgttagaattcggttattctcaactgtgatacactaacacagtataaacatcatcatgcacttatccggtgagaagtaccaaatgcgttccctaaccatataatcctcagcatcttcgatctaatctgttcggttaaatatatcacatgctaatggtacaactgccagtaaaaaactcaccttaatttgtcccagaggtatc

SEQ ID NO: 11588 - DNA, 1056 bp, Oryza sativa
  Intron number 1 from transcript LOC_Os03g22040.1 (locus LO C_Os03g22040) derived from phytozome v7.0 (chr-ID Chr3; po s 12626263 to 12627318)
ttcgcccctcccaaccccaaggtgacgtcaccacgcgcattctttcttcttcttcttcttcttcttcttccgttcgaccagccatggcgactatggtccccgttgatggctccgctgtggcccgcagtgttgttggtggtggtggatgttggtagattgccacccctattttagcttcgcattcgtaatttcgtacagttgagtagcagcagcagtgtctggattggtagggtaggcggatagctcatggctggattaatgctagctgcattgctgcttgattattgctactcctgaactcacctgccatttatacgcctcccaagtagttaaaggcaagcatggatgatggatctgctctactatacacgtgcctgtacatttgcatcatcttgtcaatatgttcataggttcattactggataattagtttcatttgaaatggtagatacggatagtttgggatagctgctgtttttgttcttgtaaaggagccaatggagtagcacttacgaactggctgctcaaagtgatctttgcattgagtctttatcacctgctttgccaaagcatgagtggttgagtggtaagcatgttgcatcataccgaaactgatccgtgctaaacctagtaactttgaactttgaagcatatggtaggacaattggacaaagtaaaagttcagagctgcctagccgctttggtaaagcaagcaagcgctgaaagcagcaacgattgtccagagagaacaaataaaaagttgcaaaaagaaacatcaactagctgtagtttttgcttcgaaatagtttcaaattatgtgacactatagtacttgagttcacatttggcatgtcagaatttaacctgagtgttagatttgttttccccatttatatgattctagttacacttattcctctattattatcttggtgtcatgtaatttggggaccgatgtagtatgcagcttattgaatcttcaatatttgtctttccattgacgatatattctcacctgcaggagcaatctgaagaaagtaaacagcctgtcgatat

SEQ ID NO: 11589 - DNA, 569 bp, Oryza sativa
  Intron number 2 from transcript LOC_Os03g32160.1 (locus LO C_Os03g32160) derived from phytozome v7.0 (chr-ID Chr3; po s 18396197 to 18396765)
tgttcacggctatcgagcccctcatccgaagagtggtgaggcagcctatggaacctacttattttttccatttctcacccatgtgtcatgaattcatggaagttatgcctttcgagtacatgtttgatctgtatcccctttcattctgttggggttagggttatcttttgttgctaacatggcttttatattgatcattcataattctattccaagtttcatctgtatttggtgcagctagcatgattagatctgttttgaacttgtgaattacacaaaccctacttgtagttcccaacttaatgtgaggaaccctgtaaatccataaattgaaacctagcaagcatttaagccatggaagacaaatcattaattcctgacctctagtttttggactcatttgtttctatctagaagatagtattttcactcaaagctgttgaaagtttatcctaagtaggattttcttcagccatgtgttatttttggctgtccaatgatggtcttgatgttctacccaattataatttctaggtgaaagaagaaatcgagtcagcgtttgcaaatca

SEQ ID NO: 11590 - DNA, 694 bp, Oryza sativa
  Intron number 2 from transcript LOC_Os01g65070.2 (locus LO C_Os01g65070) derived from phytozome v7.0 (chr-ID Chr1; po s 37763071 to 37763764)
atctccgggaggccaccttcgttcacatacaaaaggtcagactcgattcacgtgaagctgagttgcattctagacttattgtagattggtgtatttgagtttaatgttttcacatataattcaattcggtaaattcggtatgcacaagaacgtattatgctgcactagattcatgtacctccacttaagagaaatgtcaacgtttggtcactttagtgtgggtgtacttcaactaccttccaaacatgtgtaaaacatttatagcattattaacatggcaatgcccttcttgctaaaaaaatatagaaagaattctagaattggcctttgctagagtgaaggtacctatcgtaccatccaagcactgtagaccatagaaaaagagtatcaacgtacgagaagcccttaacaacgcgtataggttttcactaatgttgctacctgatacatgcctctttcgaagaccaaagatacacaaaacctgagaatatttcataagggcgcattgtctgtccaaacctatatgttttttgatggttcgatgagaatatcatatgttcagattttactacaaagttcagcccaccagtagtctatggcaatgatgagaaaattaactgaaatatacatgaggaagacgggatgcagggtcatagcctttctcctttggcttaactgcaggtctgcagcactc

SEQ ID NO: 11591 - DNA, 1017 bp, Oryza sativa
  Intron number 1 from transcript LOC_Os03g24020.1 (locus LO C_Os03g24020) derived from phytozome v7.0 (chr-ID Chr3; po s 13627933 to 13628949 reverse strand)
gcgtccctctccccttccctccacctcccttggtaactccccctcctcctcctcctcctcctcatcctgcctcctccaccccgtcgatgctgcttcagttttttttttttgcgctgccaagaaccggcattagttgctttcttgttgctccgccaagaaatgggggatttggagatggtgcccatcatccttaattcaatgatttggatgcaattggctttaggagtatgccaataggccgtatttaattcctaggagagtttcgattgagtgcagtaagttgagtctccccgcgcctgcaatttgcagtgatacacgagtcacagacaggtcaggggcttggtcattttgtagctgaaggattgcagttttggatgtgtttggttgagggttcggaaaattttccaatcagttagtgcaatgcggcagcactttggatataatacccctttttttttcttgctttgatcactagttgagaacctggaaaagtatgcaaataccctttcaatatctgaaaccttataacttaacatcagtggtgtggtaatgattaaccatgaaattttacttgctagcattattcttcaaaaacatcatggccatgttaacgggccaataccgagggtctagatttgtttcagaaaatcagctccgaagtgctattaactgaaagatttaacttgccaaaaaactttttaaattaattagttcattatggcattatgctatcactcataaactgaacaccaaacaaagagctatgttgatacaagttcaggcaggagaaattgtaggtttctcatttggtctttgaatcctatctttctagctagtaactacttcatggatttgaattataatgttttactaatctgtcaaactaaaataatgcattggtttttgttgtaaagggcaattatttatttgcaatttaatatgaaagttttgattgagtgtttatttgtcggaattaaatcagcaattcaaggactggctttgctggaaagacacaag

SEQ ID NO: 11592 - DNA, 903 bp, Oryza sativa
  Intron number 1 from transcript LOC_Os03g10755.1 (locus LO C_Os03g10755) derived from phytozome v7.0 (chr-ID Chr3; po s 5492348 to 5493250 reverse strand)
cggccggcctccatcgctgctcgaatcgaactaaggtattattggttcttctctcgtatccctcctccctcctcggcgcccacttcatgagtcagcgtcgcgtagataggagatcgattttttttcccccagtttccctccaattagcccatccccttcatacgccgattcctgttatttagggttcatctcaaccccattgcccccatgttagtcccgccattgcccctgcagattgtattgcaactgtgcctataggatattttggacgcatgatattctcaaaataatactatactactatgatttatgaacagtggtgttaataactcgtgatgtgtccatgcccccacgaaaatttactgggcccgtgtagtatgtaaactgttctctagcacctcaacgagctttgtgttccgttgaaatatagccatgtcaaatagcagcctgccatgtccatttgattacatgttgttttttttttcatcttagctatttcttagttcttttaaatttccaataaagagagaacaaaatgtgtcttgattctagaaaaccagaatgacaagatgacatcggactatatgtgcaatgtttttagatgtcaaatcaaataatcatgtcattcatgtgtcgttcattgctgaattgagccttgcatcctagggtaccagggcagctctcctatgcgtaagaaacaaatacaattgcatatatttgtttcatttttttttgaatgagatcataatgtagcagtacgattccatcctcactgcaccctcaaggcgtgaactcagaattcctcaattaatataaaataacggtcaactttctagcttgcttttaaatgatttttaaaatgtaaagcaatttgcaggaactggtatcaggctgttggtgaga

SEQ ID NO: 11593 - DNA, 1024 bp, Oryza sativa
  Intron number 1 from transcript LOC_Os01g46020.2 (locus LO C_Os01g46020) derived from phytozome v7.0 (chr-ID Chr1; po s 26162937 to 26163960)
ccccgacgacgcctccctcgatctctccttctcaggtgattctttctgtcagtagaatttagcttccgcatgcgcgtaggcctgtcgtataacagctgcgcgtcaaaagctatggttttgttgggaattcgctagcgaggtaccgtgaccctacgctgttcggcgaaatgcgcataccgtttatgctgtgcgagtgcaagtggaaaacctccgttctgtgcttgtggaagtgcgggtacaccagggaacgcttccgatgggttgttcctcacttgagtggacatatgctggtgtgttgtcatataggtgttaggtcataagtccgcagtatagcgtgttggtagattttttttattggtactgtattttcaacgcagcaagaattatctttcctgtacacatatattaaagggcaatgctttgcaagcttgtggtttctgatgcgggttaccagttgcggggatctgatctctgtgctctttactctttacctgcagagatctgagaatgatgacatattgagtaatccatttagcagcagatgccatatttaaataatacattatgaagggaatgcagataatagcacactttacgattttggaaatcttgtttccttgtatcattctcttaacgtttcctttttccacaaatgtaatatttgctacggttactttctaagacgtccaattgcctaatcactattagcaatataaaaaatgactaaagtccagtaattatactttgaagaatttgtatcttctcatggtgtaatgcaatgttcttactcgacaggttctactctttagattctggaaatgtggtttgtgctaatattttctaaagcattctatttgtgcatgtctagtttctctactcacttctaattttggttcaaaacaatggtctatttctgtttgatggatacaacttgtattgtaatactctagtactgttatcactgaaattttcagttaatcttttttgacttgtggattggtgttcttttttcgtgctacagagg

SEQ ID NO: 11594 - DNA, 861 bp, Oryza sativa
  Intron number 3 from transcript LOC_Os01g39650.1 (locus LO C_Os01g39650) derived from phytozome v7.0 (chr-ID Chr1; po s 22366915 to 22367775 reverse strand)
agcaggggaaggatagggcaggtaatcctagaagaaggtgaagctggcataatatttttgttgttcttctacacagtgttctcacccaattctttttgggtatattctgttaacctcttctggtgagctgttgcagtgttagagttttccggtgccaacttccccaaattaattcatattattcattgaaagagcctgagggttgtattggatccatcggatcacaatgtgcagaaggtagtcttgtttgatatactttctgcttgtttggtgcttgcagtgtggtgtcctctgtatggcaattttgggacatgctcacaagaataccccttgtcactgttctatattactccctccagttttttttatatgacgttggctagttcaaatttttagaggaaactagttcaaatttatactagccaacgtcatacatatatgtatggaggtagtatttgttattgcataaatggttgttcgataaaggaaggtcagatgaattttgtgcgttaatcataagctgaattccaggaattatcaccgtctattttgtgaaactttcacaagcttgttgaaacaatcttttaaagttgtgtagaaaatgcactttttattctcacatttcctcttgaaaacactatgcttttgataattttatggacagctttacgtccaggaaacactttgctttgatatgatatattgcttaaataatccattatgcatgctgtgtataaatcatgaacacaaacttatgctttttgtcttcaaatgtttctattaggatcccaaacttggttttgttgttggtgtggcacatggaaaggggaaaaagtttgtagtcgttgtaggaaatccagt

SEQ ID NO: 11595 - DNA, 813 bp, Oryza sativa
  Intron number 2 from transcript LOC_Os03g14110.1 (locus LO C_Os03g14110) derived from phytozome v7.0 (chr-ID Chr3; po s 7667593 to 7668405)
gcccaaaggtatctttttgtcatcgtcatcgaccggtacgtttatacaaaaaagttcattagtgtttttaattggttacttggagagacacttatatttgtgggatccagttgccattacaaaaataatctggatttctttttgtgctccagaaacttttctagaaccccttttcctgaaacctgaattcttctacaaaatgatgaagtggctctgagtggacgcgaaactagaacaattttgataccttggatattttgggtgagggacacagacaaccaccatatcttttgctaaagaattttgtttctgaaagggtatcagaagcaatactgacaaatcagtgcagagaagcaattagaatgttggtactagcagagaagctgatgtcatgcaaaaaaaaaaaaacactgaacaccgataagttatactccctctatttaggccgtgtttagttttccctattcccaactttccatcacattatatcacatcaaaactttcttacacatatataaactttcaacttttttttcaaactcccaactttctttaaacttcaactttttttagaaactaaacacacccttagataactaaccgtcaaataaaaaagaaccgaggtagtactgaacacttatcaacaaccacaactaaaagaaatacacaaaggaagaatcaacttctagcatgttcatatatatattaaagtctggtatgacgacttagaaatgggataatctggtgccttcctctcaaagaaaaactccaactatagaaccattcagagtccacaaactgcccacaccatct

SEQ ID NO: 11596 - DNA, 877 bp, Oryza sativa
  Intron number 1 from transcript LOC_Os02g39160.1 (locus LO C_Os02g39160) derived from phytozome v7.0 (chr-ID Chr2; po s 23652340 to 23653216 reverse strand)
tgatctcgtcgcggtcgccggaggggagctacgaggttggggagccttatctctacttcctgagatttctagtagctttgtgtatgtgtgtgtgtttgtgtgttggggggacgccgatcgggtggatcctcctgtggtggttggttgggcgcaattcgtgcttggtttatttgctggaattctagcgggggagctggcgttgtcggtgctaattgctgcgggggagctgctggaattcgtgcttctgcttgggaattagaaggtttgggtttttatgattcagagggctgtagagctcttgagattggctgcgaaaattcgggatttgatcaacttagagagcattatctttggattaggagggatttttcttaatttttcttagttttttttgagctatcaagagttcatgccatcttatttctccctttgttcttagccggaaggatacacgaatcagtttttttttttttaaaaaaaatatttatctcaattttctgcaagcatgttcaatttctaagtggaaatgctatttaaaagaccaggcttattgattggtgctatactttgattttctttggaattgtagtagaagcatcagtttcttcatgctgtcctaccaacctctcttattattagcaaagtaaagttattaaatttgctaattgttgatatgtcagtattttgtacgaattgtgaaatagttaattttcaataactacacaccatggttgtcctgttgttggactggaagcaataagggaatattccatttctgtccattaaaacccacaaagatgaccctgtgctcatctctaccattgccatgcacctgtttgtaggattgcctaacccagaagttggtgcttcgagatag

SEQ ID NO: 11597 - DNA, 828 bp, Oryza sativa
  Intron number 1 from transcript LOC_Os01g59630.1 (locus LO C_Os01g59630) derived from phytozome v7.0 (chr-ID Chr1; po s 34487491 to 34488318 reverse strand)
ggagccccgtgcaccggctcgtcgagcaggtcagatcgaactgctttctgcatagtcgtggagagtggagcgtgcttgggtttgaattttttttgttcgcaaatggtgacaagattgagaaaattgatgtggattgcttgctgttttggggtgagaagcattgtgctactgtatgatgcgacattgcaagtattctctgatgctttggaaggtttggagatgttactgctacaagcttgtgtatacattagatcttagtgggttgatatattctgatcccattaaggacttgttaccatagtttttcttttctaaaaaaattggcgattgattagatacgaccgtgtgatgtatttgggatccgatgctatcttgtgaggtgcatgtgcttctgggttggatccaattcatagagtagttttagattttgatttttgtggcaagttttgtgagaagtgagctctggatattcctgaccagtgaccacatgtagtttttgatgctagacatctttgtgattcctgttacatttgctatttagtctgtacaaattggtagtcatttgtgtttcaagacagcggttgaagtttgaacaatgctcaattttgttttaacattacagattccgtacttagtgatgtacatcatgtgtcaatcgagcttctgatgttctctttaagatcctggaataactatctcaatttggaaggatataattaaccaggtttcacttgtcggcagtatgtttttctttttttccaatctctgatttgttatctgctcacatatgcagcattctattgactattggctgtgggctgatctcat

SEQ ID NO: 11598 - DNA, 238 bp, Oryza sativa
  Intron number 1 from transcript LOC_Os03g28300.1 (locus LO C_Os03g28300) derived from phytozome v7.0 (chr-ID Chr3; po s 16281459 to 16281696)
ctccagtagtagctcagaagctgaaacccccagaggtcagtaactctttcctgctttctacacttgttcccttttgattcagcttctgtgatgcttatattattattgtttaaattttagcaacccaaaactcatgaaaagaaaaacagaaggcctttagtcatttattgatctttgttacctttttgtatttctaagaattgattattcattgccatgttcttgtagtaaagtacat

SEQ ID NO: 11599 - DNA, 708 bp, Oryza sativa
  Intron number 1 from transcript LOC_Os03g20520.1 (locus LO C_Os03g20520) derived from phytozome v7.0 (chr-ID Chr3; po s 11625638 to 11626345 reverse strand)
gctcgccatcctcctcctcttcctctccgagatccgtacgtcacgcgccacctccctgatccctccctctccgcctcagatcccccttccgatttttcgggtttccgcctgccttgggtgtgggggcgcggtggctttttttgcggattggttccgtttgttcacgtgtgttagggcgggtgcgaaacgggaggagtctgtggttggttggccgtccgatcgagtgggaattggaaataacgggcggataattaacagtccaatttaacatgcatttgaatcgtgtattcgtattggttagaaggtggcgtgaggaattaattacatgaaggtaagaggcgcttggtgtggagggtacggtagattagtaggatgtatgatctagaatgctgttgatttcaattgccatgctatggatcagttggtgttatcacttgtcagagtgttggtatttgtttcattttgcaaggatgtttttgtgtggatttagtgagtcatatgtaaattgttctgttatgctaatatcattaatgtgaagagccatggtttgattaatttgagagcatttcatgttaccatttctagttctttttttctgatgggtagattaattgttatttgccaatactttactagttatttcctgcactgaacattcttaacttttctgcagggctgtatctatattctgctacagatagtaagctc

SEQ ID NO: 11600 - DNA, 800 bp, Oryza sativa
  Intron number 1 from transcript LOC_Os03g03410.1 (locus LO C_Os03g03410) derived from phytozome v7.0 (chr-ID Chr3; po s 1457304 to 1458103)
gtcgccgtcaagaatctactcaataataggtactaatcctgtgccttctcttggagcttttcgatttgatttggacatctccagcctttccatccttgtatagcctagaattcgtccttgggtgagtagaaaggatggagaatatagttaggaatacccgtttttattttttattttttaaagaaatcaattttccctttctgtttaaactggggtgtgtgatttcgtttgttcgtaaaaatgccactgatttcgtctgtttaaccgtgtttgtgttcttgttcatcggtttctttggctgtttgctccggttgtattcttgttcatcgaattgatacgcagatctctaatcttatcttcttctgcgataatgggttgttggacttggatatgatcagtctgatggaccaggaagtgagctgtcaaaaactgtgaatttccatttgaagaagggaaagatccttttttttttctagtgtatttgatcggattttttgtgcatagaggtgcaacttgtttcagtttattcatgaagcagtggtctgctggtgaacggttgggtcgtggggctcaagaagtttcaaattgctgtcatcatttacctcttctgtgcgcccatctccattccccattcgcctcgatatctgtgacgcaatttaatcctacacggctttctagggactggattaccgtttcattttctcacacattttcttgttctgttttatgacaacaaaaaatcaaattgttttcctgctttgccaggggccaggctgagaaggagttcaaggtggaggttg

SEQ ID NO: 11601 - DNA, 882 bp, Oryza sativa
  Intron number 2 from transcript LOC_Os01g38840.1 (locus LO C_Os01g38840) derived from phytozome v7.0 (chr-ID Chr1; po s 21788442 to 21789323 reverse strand)
acagaaccatacgtgactcatccagtaggaacaccgtaagtagtcaagagcctgttatatgcagagaagaaactggagtgaagtccatttaactcacaccccaatcgaccttcagctatggaacctgaaattttacacacccttccattatcaaaaccggtgaaaatatttttgatgtctagctagtaattaaataatctgttctttactgatatctatttctaattgagtgccatgtcaacgaaaaaataaaatgatttaacttgaatattaaacttagcaatactagattggattacccgtgaaggggatattttaaccagttttgatatgtatagttgatgggtgtaattatcagtaatactatcagaattttgaattttcatagcgaccaattaattttttttttgccaaaataaaacctccaaaatgtaccggtgattttgatgttttccttgatggttcgtgcctgtcaagaaatatctatttccttttagtggtttcatggttgagagtggatttataaatttatatgatagtcgaaggggtagctagactttactctaaaaactaattaagtcaaactgaagattcgatatatatgatcaatatgaatctcatattgggtgggaagctaaatattacattttttccttatgttttggattaacagagacttaccaacccaaccccaccccaccccaaccaaaacacgggcgtacactgcgcactcacacaaaattaaatgaacaatctctactttatatctatatccataaattatattgtaatgagcaatgtttgaacagatttcgctaacatatcaagcactaatttatttatatattgacatgattatacttgctgttgtctagtggttac

SEQ ID NO: 11602 - DNA, 1029 bp, Oryza sativa
  Intron number 1 from transcript LOC_Os02g57600.1 (locus LO C_Os02g57600) derived from phytozome v7.0 (chr-ID Chr2; po s 35269436 to 35270464)
actcgcgatcgcgactccccccctcctcgtcgccggtaaggccgatcttcctctcccctctgccgatctgcgattccgggtttctcctcgcgtttctcggcaaccgctggcgactagctttttgggagttgggacgatcagttcttaatccctatgtgattgttgttgtggttgcgatttcttaattcaccgtgctgttattcgggtagcgatttcttcatcagtcaagtttgattagttgctctctactagtaggctagtagcaagtacttagacttggcaagactcgtattattacatctactgtggtgtaatataggcttgcttcagttggtgtatatacttcagtcgggcttcgatcaccccaacagttttatccctgtgtctctaggtataagtggctctgtcgttagtatggctagtgaaattctggttaacagttgctagcttctttgtcgaattgtaaacactttccattatatgagttgcttgtttacctacatcgatggcttgtttgctgcctagtctcttctgtatattatacacctcacagtttggaaatataagtagcgattaattctgtattgttttagttgcttgaattcacatactgtatgcccatctcggaactattcgagtacacctgccatgttgggctggtttggttttatgccctaccaaaagcttgggggcgagttttgtcactaccaaaatttttggtagggtagagttagaatgatttgtttggattgatgccaaaatgtgactgtgagaaacaaatatgcgggcgatgccaaaatcttgttagggttcaattttgaaattttgatgggggtgtttggtttgctacccaccagatatcaaaccaaactagcacattcttttgccttgtcctttgctttgagtttttttttctttctaatacttgccttcgtaggttatcaaatctaaagacatcaccccatctaaattaactttcttgttatatggtcttcaataatggagtcttctgactttgattacaggaag

SEQ ID NO: 11603 - DNA, 583 bp, Oryza sativa
  Intron number 1 from transcript LOC_Os01g36830.1 (locus LO C_Os01g36830) derived from phytozome v7.0 (chr-ID Chr1; po s 20485441 to 20486023)
attcagaggtaaacagagcaaccggcaaagctctttgcatggacactggcattcatgatcttgatcaattcttgactcgtatttttttgatttgtcgcaatatttttaatgaaatatagtcaacatatatttatatattttaaatccctaaattaaatttgtagttttaatgtatttataatgtaagtttctgaatcacatacgtaagttctaaaaccacgtatgtaattacactatatttatacttttttttttctttctggcaattcggttgcctgcatacgcaggcgcttgtaaaagcatggaaattcgcttgccgaatccctcgttcaaccgtgttgctcccatcaggacacaggtttctgatctcgccggtcactctccagggcccctgcaacacaaggctcacactccaggttgctacccctctctctctcacacacacacctcaaaatcctgcatttttactcttaaaatcatgcactttttactcttcatttttcacttggaaaattctgttatcttgtggtcaaatgctaattgggaagttgtgtttttttttttaataatcctttgcagatag

SEQ ID NO: 11604 - DNA, 597 bp, Oryza sativa
  Intron number 1 from transcript LOC_Os01g45430.1 (locus LO C_Os01g45430) derived from phytozome v7.0 (chr-ID Chr1; po s 25772949 to 25773545)
tcaaaaacgcggagccattggcaggtgcgataggggtcagcgccatgcattttggcgctgaccccatatatatgttacatgcaaaacatggctaatactgttatgaaccgaagtatagcacaacggtgaatgtgtccactgtcaggcagaagactagggttcgatccctacgtcctgctttttttttgtttcttttcgtgtgattaaagcaagcaaaaaaatgagcaatgaggggtcgaacctgggatcataggaagttaaaccaccaaggcacatcatagaaagtgacaagaattaacacaaacccactttatcactacataaggggtcagcgccaaaacccatggctgatcccatccaaccctccatagtgccccgccaaggtgtgcttagcgtcatgatcgttggcgtttaatcgttaacctcagcgtcaatgacgctgaggtcacggtttatttttgaaataagtttttgacacggtttacttttcaaataaattttctaaaagagttaaattatcaaaatttcggcatctatatacctaatactgatagtgccactaacattttctgatggcgtaatgtgcagttcaagaaa

SEQ ID NO: 11605 - DNA, 956 bp, Oryza sativa
  Intron number 4 from transcript LOC_Os02g50790.1 (locus LO C_Os02g50790) derived from phytozome v7.0 (chr-ID Chr2; po s 31015139 to 31016094 reverse strand)
cttcaggtcagtttgccccatcaccttgaaaggctaaattgtttaattacattgtggagtcatcaagctcttttaccattagaaacattgtcactagctacatttattagtttatcatttgacatcaccaaggagtaatattctgaatttcctcaacaactatctatcgctgtgcacaagagatattttaggtttggcactcccattagagaaagattacccctttacttataggaagttattgttcatggtgatagtgacatcaccattagggagcagatgctgacccttgagaagttgaggttgtagccatcccatccctcttgcttaatacatatcttgtaagcctgacgaggttatgatcaatcattctgaggtcaagtcgatgccatgctggatgcaactttgataattttgttcccctaattgatcaccttagctcataatatgcaacagttttctagttatctatgatcggtgtggtccatggagctggtttgaagtggattaattattttgtcattctttgctcctttttcactcaatgattctatgcattacaccaatttctgaaatgctagtgatatacagatcatatccatatctggtattctggttccaagcatgagaggaccgtgcaacataaacaacaatggattgttatgataatgaagatgtgatgtaatagagttattttcctctcttgaaggcccatgcatgaataatatatctagcatagccacctttgtcataatcagaaagcacaccatatttccttttgaaaggtcattataatggcttagttgttctgtagagtaggtgaactgaattcattggtgcttgcgtagtgtggcctgtgtttctattttgccttgtagaagtcaattatttgctgacctctttaagtcatattataactctaattacttgacagtacaaagaaattgcaaactcaa

SEQ ID NO: 11606 - DNA, 886 bp, Oryza sativa
  Intron number 2 from transcript LOC_Os02g50790.1 (locus LO C_Os02g50790) derived from phytozome v7.0 (chr-ID Chr2; po s 31016334 to 31017219 reverse strand)
gttctgatttggagacaaaactaaaatcaagaaaggtagatacttataaaactaatacactgttatattgtatatctaatacaatgatgttgaaagcaccatacatcataaaactgtctgtatgtaatttcctattgataatctctcgcaattcctggttttgtcatgagtaaatgattttcggtacaattatttctaagctgtttaatagtctgttctgtaaaggaagcacatgatttcagctgaattacataatcttcatatctttgtacgattgtcaaattctgctttggatgttgtctgatcattgaaatagtcatatcgtttttaattgaaatgtcattcatggatatccatgaaaaatagtggaatgatgcatcacgtttagttttagcattagtgcatgtttaaaattttctttacaaatcaacatcaaatttgttgtctatattatccgtttgtagggagctaatttcattgctcttgttaattagctataggtgtacactgcatctaaatatctctgtactttctaccttctctcctatatactgtatcacccttaattgagctggtgtaacaattctgattataattatgcattcacgcggtaacttgtaaagcatccatggatgcgtgtagttgctgtacaatttgttcattaccatgattgaattgagtagcatgtttctttgatgaaagcatggatattctggtaaatgtactttatttcttgggcattgatctgaaacaaaattaatcctacaaaagcaaatggtgggagtacaactaaaagcatgtagtattcttaataccttttcattgtattgtacatgctatttagctttcagctgactgctgttattctgctagaccatttttaggg

SEQ ID NO: 11607 - DNA, 554 bp, Oryza sativa
  Intron number 2 from transcript LOC_Os02g40410.3 (locus LO C_Os02g40410) derived from phytozome v7.0 (chr-ID Chr2; po s 24469008 to 24469561 reverse strand)
ggtcaaactcaaggaggtatgtatatttatgtgggtattttattagagggatttgagggttttccataaatttcaatatttcttgccattatatcaaattattatgcccttcagtacttattcttcttcattttctcttttttgaaacagaaatttggcacttcttgaatgtgttctacatctagttagttctatgttatgtgtgggaaattggatatgctatgcatctggaaatattagctagggccattgggccaatactttgcagtattgctctatcaaaggccatttttctctatttggggggggggggggggggggattacacaacattgtattattcttacgctcttccaagataatgagatgttttggcagttttgctattcctttttatttctcgcttcattttgcttttgtggatctttagttttttcgggtatatctctaaggtttgtgctatttgcagaacatacataattttaaattttaatcctttcaggttgtcctgtccaacagatctattcatatttggagaaagccactgactctga

SEQ ID NO: 11608 - DNA, 949 bp, Oryza sativa; identical to SEQ ID NO: 9615
  Intron number 1 from transcript LOC_Os03g11140.2 (locus LO C_Os03g11140) derived from phytozome v7.0 (chr-ID Chr3; po s 5734111 to 5735059)

SEQ ID NO: 11609 - DNA, 998 bp, Oryza sativa
  Intron number 2 from transcript LOC_Os03g11660.1 (locus LO C_Os03g11660) derived from phytozome v7.0 (chr-ID Chr3; po s 6085020 to 6086017)
tgaaggaccgtgtggcagttaagatcatcgaagaggtaatttgttcatgttggttcaaattgatccaaatttgtagatagattgaatggggtagctgagaagtacagctcacggagaaaagtttcagaattgctactttgctggagtatgatttccttaatgaaaagctgcataaaatggagtatttcttttgagtgagatacaatatgaggtatgttcagattagttccgcagatactactcttgcatagcattcaaaagtttcagcttcgttcaactgtagaatgaattgcggcaaaaccttgttcaagcgtagaatgaattgcaacagaactttcttgttatactgccttctgaggtttcgtgaccgattcatgtaatgttggctacatgtacttgccttttcttcttcttcttcttctttttttttttgagaaagtacctgtatatgcatcttttgagaatctctacctctggactttctacttcagtcattttgtgaggttgagagcaggaattagttgacttcctccttattgtaagatgtggtgataaatgcttacttgtattaactctagcctgtagttgtctatccttcaaaaagcaattgtaaggtggaagtcgataacagggtggtatcaagatttttccatcatcttttggaacctgtaaaactatgttgtcagtgacccaacaattttagaattgcagttctgaaaaaaagcactcatgggaaaaacattatgcggttttatttctagtattattggattgaaacaaacaggtaataggattttatctaaattcttttgtttcaaatttcaccagatgaatcatggattcatgagatagtttgctccgtgtcatgttgtttggtaatttcggttcctatgatgttgttatatactaacaaccgtatatcatatcctttatatttgatcctggaactcttgtcattaccaggctctggaatctggtgatcttctctgtggtggtac

SEQ ID NO: 11610 - DNA, 821 bp, Oryza sativa
  Intron number 1 from transcript LOC_Os02g45910.1 (locus LO C_Os02g45910) derived from phytozome v7.0 (chr-ID Chr2; po s 27972970 to 27973790 reverse strand)
tgctcaacaaagacttactcaagaaaaaggtaaccaagcagtagattgttacttcctccgtttcttattataagtaaacctttttaggtttgatcaaatttatataaaaatttaacatcttttacatcaaattagtttcattaaatacaacattaaatatattttattagtatatatgttttgtgttggaggtagtataagtttgatcaaacttaaaagaataaatttcacaaaactacatgttttatggttcaagttgcagaaaaccacaaacattttgacacttggcatttaagtacatatattttggtagtttagtttcacaaaaccacactatcgatgaatggattcacccgtgagatgaaatggtcgttccatttaggatgaagacgtggcatcctattaatttcgtgcgatggctgttaataggatgacatgtcctcgtcctatatgaaacagtcacgtcatctcacgggtgaatctattcattgatagtgtggttttgtgaaactacactatcaaaatatatgtacttaagtgccaagtgtcaaaatgtttgtggttttctgcaacttggactacaaaacgtgtagttttgtaaaatttactcaacttaaaaagattgcatgacctgtaatatgaaatggagggaataactatttatcccatgaactgcagtttgcacacaatctcttccactgtaatggtagcgtacatcgcattatccagcttgttctctcgctgtaatctgagtattatctcgcggatgatcttgccttgatgcaggttaagaaaatacccacaattttctcctcgctgaa

SEQ ID NO: 11611 - DNA, 979 bp, Oryza sativa
  Intron number 1 from transcript LOC_Os02g20340.1 (locus LO C_Os02g20340) derived from phytozome v7.0 (chr-ID Chr2; po s 11979219 to 11980197 reverse strand)
agaagaaaaagaagatcaagaggtctaccctgtaggccgaaaaccgtcagaataatatgaattaccgtcagaaaatacttttctgtgggtgcaccgtcagagtttgccgacagaaaaaagaccacggagaaaataaatttttctgtcgttttcctgacagaaatatcatttctgtcgggaattcctgtcggttggctcacaaaaaaaatcaactggcgtcaggtttgtgaaagcttatttttgacgtggacccatcaggaaaaaccatcatccaccgtcagaaaaaatgagttccacgcccaaaaaaaaacacatggtgatttggataaatatatgaacatcaatcacaatccatacatcaaaattcaagtctgcaaagcttacataaatagtccatctaagttcagtacatacaaattcattcaaaccggatttagtaatatacaaagggtccatagaaaagataaatgtgttcagttacaattcatcaaacatatgtaaaagaacattgtcttccagcagcagtccgtgttccgtggtgcttcaaccttgggcaaaggaagctaaaaggttttaaaaaagaggttcaatttcataattttcttcattacaaaataaataacaatgattctgaataccccagttatagagaaacaaatagattagtacaggaaaaactgaagtgagcaacataaatttgtcaactacaaagcatgaaaatgaaatatggcaactgaaatgaaaagtgaccatgaaaatacttcctgtagtactctgccaattcagataagacataaatgctaggataataggatcaaactcattttctatggatgcttaaatgacaagtttcatggtgcaaatgctaggacatcttagactaagaaagatttcatccactgaatgagaagcataccttgattttcatcatgtgcaacgttctgtagatatttaactgcagcacttaaagattcaagct

SEQ ID NO: 11612 - DNA, 772 bp, Oryza sativa
  Intron number 1 from transcript LOC_Os02g10380.1 (locus LO C_Os02g10380) derived from phytozome v7.0 (chr-ID Chr2; po s 5467060 to 5467831 reverse strand)
gaaggtcagctcggccgcgggcaccacgccccgaggtgatgatcgatctagctcatatcctcgattctcgatttctcatccacgcacaagtattcccagcgttcgaacagtttgatcctctttggggtaggaaaattctcgtattctatagtggagtggagacattataaggcacggcggtggattgtttagcctcagatcagcagcaaagtggctttcctagaccaaacaaatcagaaaccatgatctgtgcttatttagtaacaatggaccaaacaaatcagaaaccatgatatgtgcttatttagtaacaatggagtaaatgaagaagtggtataagatgggtgtaattacctgcccactacctggcgtttgcacatgcgtcctttgctggtttcagtttgatatgtgagtagatgtacaagcgtcctttgctggtttcagtttgatatgtgagtagattgaaatcaggacatggtatatcgtatatctgattcttattggttggaattcaaacctccaatactgataatatatgtatgaaacaatcgtgttttcgttttccatgctagatttgaatgaacaataagccaatgatggcatgagttaacctatagctcgaaacaattagtttttttttcttgcacatggttacttaacaaatatttgcaaatgttttaattctgagaaaataaacttcttttgggaggctgatgcaccattttgctgactgacaggaatacttggagcaagcctgaaaaagtgagaggat

SEQ ID NO: 11613 - DNA, 635 bp, Oryza sativa
  Intron number 1 from transcript LOC_Os02g36580.1 (locus LO C_Os02g36580) derived from phytozome v7.0 (chr-ID Chr2; po s 22084820 to 22085454 reverse strand)
gtggcgggactcgtcgtcgtcgtcgccggcggccggtgggacgggcggagacgcggccgccgccggtcgctttcgggggctctctccctccctcgccggaaaaatgcaagtaagataggttttctttttcccttcccttttcaccaccaaattaaaatgtttttggaatgtttttttctaaaattttttgcccttaatttcaagggttagcagttcttgtcgtctactccttctgtcccaaaaagaactaatttttttctatgaatatggacatgcaaaattgattttttttgggacggagggagtagcttgatgctcttctcgatctgaccgtacgtccaatcggagcgaggtaagttgctcgggtcaacacgtaattaggcccggaaaaaaaaatgaaaaatacaagggctaaatgctgctaaattaaaccggcgctaatgattggttcttgcttgtcagggttcagcgaggtttggtgatcgataacgaagccgtttacttgtgcgagagagcagcaacgaattcaaaggtcaccgatcgaagctgcattgcacatcaggtgaaaattaatcttttaatttcacgtgtttttgtggtttttaccagcgtgaaaagtggaaaaccctcggcca

SEQ ID NO: 11614 - DNA, 923 bp, Oryza sativa
  Intron number 1 from transcript LOC_Os01g28989.2 (locus LO C_Os01g28989) derived from phytozome v7.0 (chr-ID Chr1; po s 16231606 to 16232528)
tggggtgcttcagattgaggaaatctggggcttaaatggtcaattaggtttaggggttatgaaatatatgtaaatatacgtgcggtagtagtactgatggaataacaaaaaagattagggcattttgttcgccacagcagcatggttggtaccattaggaactagaaactgaagaatacaaatccaattgatctgttataatgatgcatgaaagatgtttttctttcttttcttctattggggtgggttcatttcagaaatacccaatttgttaggttgaccacatgtccccattttgatctgcgacgtcacagacaattctcttgtaatgtatatgtgcattgtttgtcagaaacctgtcgaatgggaggcaccatcataattatatgatccagcattatgaagtaaccatcaactgatctaagctgggaggtaatttctaaacctcacctctgatgtttgatgaatttcattttcttgtaaatactttttttgaccagatttcctgccatatatatttacatatatgatcgtgtagatactagctagatctttcctcttagagcatggacaatataatggttcaggcgactattgtctacataatctagacgacgcacacaatagaatattttaagcagatttttcataagtgccaaccactgcctatgttagaaaaatcttctcaagcatataagcatatagtctgatggtcatttcataaaaatctcttgatatgattttataagtgaacatgatcaaattaatttgaatgtacaagctgatatgaaattaaaagaagtagaagtttatgacatgctattaagaaaatttaggtgaactaaatccttattatgccttttttgttttcttctgacacaattgtaagtttgtttagagtactgtaagctgtggcaccgggg

SEQ ID NO: 11615 - DNA, 968 bp, Oryza sativa
  Intron number 1 from transcript LOC_Os02g54770.2 (locus LO C_Os02g54770) derived from phytozome v7.0 (chr-ID Chr2; po s 33539583 to 33540550 reverse strand)
cacacgccatcgtcgctcgcacccttcccgcgcaggtaactccatgcaccttgaagtttcacctcatgcgttgagtgtccacgaccctcgatcccctccgctttcggaaccctagaaacccatctccactttgattccgtcggtttcgttgcttatgtggttcgatccgtcagccggttctagttgaggaaccgtaggaaagctcatctcgtgacgggatgtgatttttttttcttttttgggcggctctcgattagggctacttttggttgggctatttttggtttgtgcgcaagggtatgaaattggatgttgttagttctgtgttgctgtcctgtggagaatctgtgatgcttcactttaagcgatatatgttctttttaactcatactccctctggcccaaaataagtgcagttttagcactgttcatatccaacgattgaccgttcgtcttatttgaaaaaagattatgattagtatttttattgttattagatgataaaacatgaatagtactttatgtgtgactatttttttaaatattttttataaaattttcaaataagacggatggtcaaaacgccgagcacgcatatttatggctgcacttattttgggacggaggtagtactgattaaacctgaaaggtccgaggttgggttaaggattactgcaataggtaagaatctccaaagtcgatactgtggactattatggctgtttcatgttgtgtcgatcagcttcagatttctgacacctagctctttactactatgtggatgaaatgaattcagaactgcactcttagtaaaaagcttgaaaagcttcttgaattagcttgtagcaagtcatagtttatggtctgaaggtgtaacatttatcttttggtcctcttgcattcatgtagaaatatatttagggaagagctataattggttcctttcttacttcagggatttgttcacg

SEQ ID NO: 11616 - DNA, 548 bp, Oryza sativa; identical to SEQ ID NO: 11269
  Intron number 2 from transcript LOC_Os02g09740.1 (locus LO C_Os02g09740) derived from phytozome v7.0 (chr-ID Chr2; po s 5020402 to 5020949)

SEQ ID NO: 11617 - DNA, 601 bp, Oryza sativa
  Intron number 3 from transcript LOC_Os02g43590.1 (locus LO C_Os02g43590) derived from phytozome v7.0 (chr-ID Chr2; po s 26293539 to 26294139 reverse strand)
atagttcaaacagtgatcatcaggtacttgtttttggctgatacacgacacctaactgttggtacataggacttttgatgttccatatttttctcttttgatgaagcgggggtgccacaactttatattaacgtccagaacaagatatgagttggaaacattctctaaagttgaataaccagaattgattcaactgaaaaagtatgattaaaaaaaaggtccgtacatatgtggaatttatgaggaaatattagatgttagtaactgaatatatttgatttcagatatttgtagaggcaatagattttcaggatgtagacagtcttttgaggttacaatgcaacaactttggtcgtttattttgtattttttatttaggcctcttattctcagtgtggcttatccctggagaactaaatccttaactcttttgtgaagttatgcatggcaatacagaactccagatcatgtgtgattctccagtattgttcatttcttcttggagatgacacttgaaaaatgttggaatagctactcgatgtgacacctcacatttcttcaatcaggaagcattgaaggacctctggcgtgcttcttttcc

SEQ ID NO: 11618 - DNA, 894 bp, Oryza sativa; identical to SEQ ID NO: 9562
  Intron number 1 from transcript LOC_Os01g08814.1 (locus LO C_Os01g08814) derived from phytozome v7.0 (chr-ID Chr1; po s 4424665 to 4425558 reverse strand)

SEQ ID NO: 11619 - DNA, 919 bp, Oryza sativa
  Intron number 1 from transcript LOC_Os01g10450.2 (locus LO C_Os01g10450) derived from phytozome v7.0 (chr-ID Chr1; po s 5512259 to 5513177 reverse strand)
atctatccgcttcgacgagccgcgatctctgggaggttggtttctttctttgctttgcttcagagattggcatctcccttcctccttttcttcttcttgggctgctctttcagatatcagatcggttttctgttgaggaaggcaagttctttcgagggtgatttgttgtttgttctagatgttttttttcttgttgattagtgcttaagcatcgatctttgtgttctagattggttttgtgttcatgtatgtatatgcttcgggtgttgaagccatcaatcagtgtgtgctaatatctgttccaggttcttatctgggttcatgctttgaattggtttagtatttttttttctctctctctgcgattatgaaattttaggagttggatgttgatttttcaatatatgaacaggagattttttttgtttggtcgtgttaagagaagtcgtaatctaggtaggtctctagtgctaattatagcaaaaggaagagatgtctttctctccagagtttaggtttcgttcaaaaattttgcgccgtattttgattgacaaggagagatgagatctgtgcagtatgtcaatcagtcaagactaatccagatgctgttcatgtcttgttcttgatctggtcataaccttgcactttcagtttctgtgatgcttcaattgtcaaaaccagcgtgttttagcactgttccaccatggcagttgttctccaacgcagctaaaaaaaagtcaattctttagtattatattgcagatatgtttgtctaccatttcagtctaataataataaatactactcgatttgtctctgtccattgaaccaaaacatattctatgaccaataattgacaatacaatactgcctgttgctaacccagttcagtttatctttcaggaatcttgagaagcct

SEQ ID NO: 11620 - DNA, 905 bp, Oryza sativa
  Intron number 3 from transcript LOC_Os03g09200.1 (locus LO C_Os03g09200) derived from phytozome v7.0 (chr-ID Chr3; po s 4796083 to 4796987 reverse strand)
caagggctccgaaatcttccctggctgttcttccggtatgtactcatcaggccatcactctacaaagtactcactcggccaactccacctgctatcactactccgtatctttttcatgtgaaactattattgatggactcgccgtttgattgcactgggagaggtcgttcaaaaaaaaaagtactgggagtagtactggaactgccatgactttgcatggacaccatggtcatggtgcatgtacagcaataatttatcgtctttttcagtactcacaagaaagaggccatcttatcaatctgaaaaaggctactatcttcctaaaataagtgctgccatagatattcgtgtccagcgttttgaccgtccgtcttatttaaaaattttattaaaaattaataatattagtcacacataaaataatattcatgtattatcatctaataacaataacaatactaatcataattcttttttaaataagacgaacgatcaaacgttgagcatgagcagtgttaaaactgtatttattttgagacggaaggagtaatttttttctttgttctcacttcacattgtcaactcgtttttcaaatgtgaaaatgggccatgatgggtgctgatagtaaaacacaagtacagctttcttacaccttgcacgtttccttgctgcacccacatcgtaaatcgtgtgtgaagacttcactacgaccctactgtctgaggttaatcagttaattaatgcgtggcggtagaagaagtctctcatactgtagcagcatccatcatccgaattataatggtcacctgtctctgccaaacctgctgtgtaaactgttcaattgtttttttctcctctaaaatttgcagatcggttcccacaccttcgtgtcaccgataggtct

SEQ ID NO: 11621 - DNA, 830 bp, Oryza sativa
  Intron number 1 from transcript LOC_Os01g70670.1 (locus LO C_Os01g70670) derived from phytozome v7.0 (chr-ID Chr1; po s 40914658 to 40915487)
catcgcctcatcatctcccgcagcgcctacttcaggtgagggttgtgagattgtcgaattcggaggcccccctggctcgcgttcgcgtgccctttgattcggtggggggatcggggttactgctttcgttatgagtatcttaggatttcatttccatggaaaagtgaaatgtatgtttcagtgtcatttgggggtcgtttctattcctttgaggtgggattttagctgttttcatgtgatcccctatttgaaatgcttggtagaagaatctgagcaaaaatgtgtgttgggcgacctaattttgagttttgctgttaattagagcaagttcgcgtagcttgagaagtgaaaacgtaattattgatttcacactcagtacataaactaaaatgtagatttcccactttagtgaaacttgttaggttcatgattcattcttattttccttgatggattttgcccccccccccccccccaaaaataataataataataatcggggactaagcaggtttccttctttcttctgtatgatgagatttggctagatgttatcttgttgtatacttattttccttgtataatatgcagttgagcttatggaatagtttccatgaaacacattacttattcgataacataatctacatagaaatccaatgaataatgttgaatagttaaaattcctctcagtgtcttcatctcatatatgtgcttcgttgttcatcctacatagcagtgaacctccttctgcagtcaaaccccatatctccgtactataatctttggtacaagtgacataaaaagtgctaaaaatgactggcaggaat

SEQ ID NO: 11622 - DNA, 622 bp, Oryza sativa
  Intron number 5 from transcript LOC_Os02g52420.2 (locus LO C_Os02g52420) derived from phytozome v7.0 (chr-ID Chr2; po s 32077293 to 32077914 reverse strand)
ttactgtttatctcaatgtaagtcaaacatcaatgtgtagatcacccaaaactattacccttaattgctttgatactgcagtgcttcctttgctaacaacaataagggtgaagggaagcaaccgcagtgcttatttaatagtagattgttataatattttgctttttctggtggattgtgatgatattgctatttctggtcgattgcgatgatattctcgaggatattttcttttagtagtggtttcttacatggtcatacacaaacaactagcctttccttttcttttcagagagtgtttctatgcatctcctccttatatttgcataaatgtcaaagtatgacaatggtggctggacagctggtgattacttacccttcacttggtttaggatttgtgcaacccatggtcgagataaggcatggaatttttatgtgtattcttagtcccatctgtctatgtacagttattgatatggttacatgtctactgtgtggttcattattagtatattgctttgactacagtcactttctgatttttttccctccagtgcatatatatattgtactcatgtatttggttccagggttaccacggtgatacatctgctacatttct

SEQ ID NO: 11623 - DNA, 756 bp, Oryza sativa
  Intron number 2 from transcript LOC_Os01g49580.1 (locus LO C_Os01g49580) derived from phytozome v7.0 (chr-ID Chr1; po s 28512884 to 28513639)
cagaaacaacggtgccagcaactcgtctgcattaagtaagtcctgcaaatttgtttttttagaactttgtaacaataccaaaccaattattagtcacttatttgaaatctcattcaaacgtccaagtgcatgacacctccgcatttgcttatacttggtagacccctaaaatctatatatctttgccgttcacatttttaatttgttttagataatatctttgccgttcagatgtagtaatccaaaaagaaaattatccgtacacaagaaatgtaaaatccgtcttgagcattatgtggacgtcgatatgcaccgtgtctcgacggagcaaaatggaagaccgtagtgccttggctagaaggaaaactattttaatcccttgaggggatatcccctcgttgtttgcatgtcacttaaatagttatgaaaaaattgaaaaaaaaattaagaagatgtattaacatgtgatgtatcactctataaacatgcaagtaaaaattcaatttatacatctcgtaacaacgaagggatattccctcgagatatcaagatccacttccctgcctagaaccccgtctacgaatactaatcttgccatgtaatgtcatgtagtacctcattcatcttccccgaaacctgccaaacaactgtaccagctctctgcttactagtaaacgggcgggcggggcacaaagcatcaagtcatcgttcaaaaccaaactgtttgttcatgctgacttcgatctctagctagcc

SEQ ID NO: 11624 - DNA, 800 bp, Oryza sativa
  Intron number 1 from transcript LOC_Os02g43960.1 (locus LO C_Os02g43960) derived from phytozome v7.0 (chr-ID Chr2; po s 26539842 to 26540641 reverse strand)
cgcgcgcgcgcctcgctgctctgcttcgtctttcggtaggacggcggcgggtggtggccgcggacagcgtggaagggcgagggcgacgacccggactccgactgcgagtcggactcgaacgacaacggggaggagggaggcgatggcggcatcgtgggtagccgccgtgctcctcgaaggcggtgtggaggcgctttgagagaggaaagagagatatgagatagagctgacatgtgggcccaagggcattttcgacattccactggcaaattaccatgtttatggagtgttttcccacaaaaataagtttaggtagtgtcctagggctaaaatctcacataacaagtgtcttgtagcaaaatttgccttacacattttatcttcattcactgttctcttgggtttattggacgatcataattacacatgtacatgtatgctttcgataagaatttagcgatgtggcataaatctcttaaatgattttaaagggaaaagttcggtgcatatatacatatgcgtgtttgattgtatatattttaaaatataaaattttcattttcccttcgtttccttttcgtttgtgttggtggaggaatattaatagccaacctttctggtgctgacacttgtgcttgtagctcgatcgctgctacacatgtccatcacgcagatttgtccggccggcccatgggaatcatttttactatttatcggagcattttcttctagtttcactgattgacacacgggatcagtactgttattctgcatttctgctaaatattctattcaggtag

SEQ ID NO: 11625 - DNA, 940 bp, Oryza sativa
  Intron number 1 from transcript LOC_Os02g38130.1 (locus LO C_Os02g38130) derived from phytozome v7.0 (chr-ID Chr2; po s 23059392 to 23060331 reverse strand)
gcgaggtgactagtgatattttctttcccctattccttcacccatttttctgctgttgtttttagggctcgtctgatcgttacccggatgggggtggatggtttttaatggttcaatgacgcgtctctttggttcatactcctcacatagtagtagtacttgaaataagtagtaatatgatttaagttgatgtaggatatcacttgggctcacagctcacggttgcttgaacagaattttactgaagaaatgagaaaatcttggtgggattagtatcattttaattaagaaattaatacgcaccgaaatcgagccaaagaggaatcaaatctaggtggcacacactcttacctacccacaaccacaagtgagctaggctatgcatgccaggttaatggtcagctgcacttgtatttgtggtctctgtcagagtgcataccgcaatgtggtcagtgtatggagctgaaatttagctatatcacaaatttgtttgcgttcagtgtggaattcggtttgttatggttcgaattatgttaacttctttgcttgaaattgctctgcatatttggtacatggaacacaaagcgttactgtctgtaattgtatcaccattgtactacattgttcaacccatggttatgcgacttcagctcaggcaccccccccccccccccacacacacacaccaaaaaaaaaaacttttcaatcaaggttttcatttagaaaagggcatcaaaatgatatagtactcatcttgctatacatagttcactaacaagcaatgctgaacggtcaatcgattatgcacaagtataactcccctaagtcatgcgcatatacatcgttttattctaacgttgcaagttactttagtaacaaatgccaacatgcttgttttgctgcaggtcttggcttataactggtaggggagttgctaaga

SEQ ID NO: 11626 - DNA, 723 bp, Oryza sativa
  Intron number 2 from transcript LOC_Os01g21240.1 (locus LO C_Os01g21240) derived from phytozome v7.0 (chr-ID Chr1; po s 11855148 to 11855870)
aggtacgctcatttgtgcgtgcaaatgttttatttttctttttctatgaaaggatttcttcctggactatagttgttgggctaaatgaagggatcaaactaagtgatacagattacagagtaacatttctggtaaattataaaaaaagatatatgataaaatggcaaagtcacctttttaatgactacatcagcatcaaattactgaggtcaggatgaatggatggtggccttgtgatcccatagaaaatgcctcttttgcgccttgtttacaataactataggtcaagaccgacagaaacaaatacatgaaacaaaaaattgcagtagctagagcttttgtaatactgtatgctactatgctgcgtagcactgtaaatttcagctaagggtttttttttgttttagattattcagatatatagaattttataaataacaaaaaaatgaaaaaaatcactattttatttctaaagaagaatgttcagaattaaatagttctccttcaggattatttttttttttcaaaatatgttcaacttatgctctgtttttttccaaccaaagtatacattctataccatttagaactcatatttgtcgatggtaatttgtagaatcaatcacttgtcagtgacaaaacatagaatttcttaagaaataaccatctttataaattctcttgataggtacctcattgtgatcaataatatttggagtgaat

SEQ ID NO: 11627 - DNA, 1039 bp, Oryza sativa; identical to SEQ ID NO: 11465
  Intron number 1 from transcript LOC_Os02g51610.2 (locus LO C_Os02g51610) derived from phytozome v7.0 (chr-ID Chr2; po s 31601151 to 31602189 reverse strand)

SEQ ID NO: 11628 - DNA, 553 bp, Oryza sativa
  Intron number 1 from transcript LOC_Os01g33764.1 (locus LO C_Os01g33764) derived from phytozome v7.0 (chr-ID Chr1; po s 18586973 to 18587525 reverse strand)
tccccagatagattgggtatccacatcaagaataggtaattcagaaaacataagacacaattatacttcaatttaattatactatgttatttaattatgctatattatgtttattcttcatctttcaatcagtttctaaccagtgaagtccttatttacgggaaattgtcaagtaatctctattgtacgtgttcttgatcgaaggatatagtggtgcatgtgtattcagtggtagtactctcaaacaaaaatattgagcatttgatgtacatcagaattgtactaagaagaacaaaattgtgtgccataatgaatccaagaatttaaatttgatttatttggaaaaaaattgcttacaacagtctacgtataaaatctaattgtactaccatcattatggttttttaaataataaaaatgttctcccttgcagtttggcaagtttaatttaagcaatttgtccaatttaattcatatactgatttttacgtgcattgcacgtggacgattactggcaggaagaaaagccagaccgggcaccgaaccagccaag

SEQ ID NO: 11629 - DNA, 490 bp, Oryza sativa
  Intron number 2 from transcript LOC_Os02g43500.1 (locus LO C_Os02g43500) derived from phytozome v7.0 (chr-ID Chr2; po s 26244537 to 26245026 reverse strand)
gaggaggtatgtcgactttgttttttctatgttactgtttttcattaaatggcaatagtgtaagcttggtatgatctgattatccctcacaaatagttaaaatacagaagataatgtgtagtccttgcttggtaatcagcatatgagttcaactaacgtggagatggcaatcctctgagctattacatagtacttttagattgtttacgcaatgatttcacagcttgcgccgttgttagttaatctttattctagatattgtgatattaaacaggtgtgttgcaaatcatcagagaactggaaacacccgttaatccttttgaataaatctggcacatcttctttctgcatgtactttagattgctttcagtttgttataccttctaaagttcttctgtgcagtgtcagatgtgttttgtgctgtatccttatttttctattttcgtgtacgtagattcgcaggttgagaatacaacaaagaataaagaa

SEQ ID NO: 11630 - DNA, 826 bp, Oryza sativa
  Intron number 2 from transcript LOC_Os02g18850.1 (locus LO C_Os02g18850) derived from phytozome v7.0 (chr-ID Chr2; po s 11002812 to 11003637 reverse strand)
gtgcaagcgaaagtgggaaggtacttctttggagttctgttaatgatactcacattttaataggaatatgtgtgcattgtgttgtttgttatcataccaagtcttgttgagcaggttgcaaagaaaagtttcatgttgactttctagaagtttattagctttattcttggcatgtaacccaacatgactatcattggaactagcatgtaacccaacatgactatcattggaactaagcaatatattgattttttttgtcaacaatatattcaatgtgttatagttcaaatatttctttctacctcttggtagggattgttttttggttgaaccaaagtaagcttaatccatagccaaagtccaaacagtgggatatttaccttccaaagacacacagcagccgaaactattgcaggaggctggcggtgtttataaagactacaagttttataagttagtcttttaaccaaactttagagggtgttctagttaactgccgccattagtgctatggctcaaataagcttctaggataaacttgcctgctaaaagaactttatgttcccctttaccaataatatctcatagtttttattagcttacccatgtagcatgtatattatgctatcagtattcttctaacattcaaaacatgctgagttgtgcattagtagttgcatgatcaacagaaatatataccggggattaaataaagtatgcaagatcatacatcatgtgttgttactgcaacttcagaatctaacatttgtacttgtttctttttttcccagatccacggacttgctgagtatattgcacaggtgca

SEQ ID NO: 11631 - DNA, 761 bp, Oryza sativa
  Intron number 1 from transcript LOC_Os02g18850.1 (locus LO C_Os02g18850) derived from phytozome v7.0 (chr-ID Chr2; po s 11003778 to 11004538 reverse strand)
cccgcgccggcattgtcgtgccgctcccctctggggttcgtatctctcaaaccgcaaaccctttcccccatttagttcttccttgatttatattattaccaattcagttgagttagtaacttagtattagatgatacgcattgccctaatcaaattcggtagttttatacttttatccttgtgtattggaccactttctcggattaaggatttggtatgaggttgacattctgattttgctatcagcaactgcacatggataggcttaggctcattaatttccgtttcgagtgttgaattaatggaaggctggtattggttttgtggggcagtgttgggtgaccattattatggttctggtttggatgtcgcgggatgagccatatttgctctgtagtcgttagtgatggctatgaagttgagtttatcagtgcctgcaggtctgtgcttgagatcgcacttcctgcattcttggtatagtgctgcatcttgtattggtggattaggtagctgacatgttcctaaatagtgatctcgctactgattcaaagaaataaaactcctctgttgtgttgattattgtcatctatggttagttttgtgttgtcagcgtatcatggatattctttttctggtagtttttgatgtttcagataacctttgtaaattttcaaggatgctaaatatcatgagtttcatggaaatatatcttttctatttccataggtttacttccaggatttgtctggtgctgaacctgt

SEQ ID NO: 11632 - DNA, 670 bp, Oryza sativa
  Intron number 2 from transcript LOC_Os03g02070.1 (locus LO C_Os03g02070) derived from phytozome v7.0 (chr-ID Chr3; po s 655871 to 656540 reverse strand)
gcagaaagcgatcgaagccgtcgcagatatctacggtaaacgattagcgcaacctttcttgattgttctttgcagtttggattacacatgcgagtactgagactgaaataagtatgcttctgtcccgaatctatgaaaaacaattaatctaagagagactgaaatggtttatttcagagactgcgaccatcttgtttgattccattttagtttcaatcgccattcatcgttcaacatctcatataattattcagtaagatagctttacaaccaatcaataactggattcttgtgagaaagaaacatcgttaggtggagttcgattgtgatacctgatcagactcggtgacatgagtcaagcagtaggtcgtccacatggaatattattatagatttataggtgaagagaatcaaaatccaaatggttcgtccttgtgtttcatgcagagagttggtgcagatcggcacctctgaataagtggattggttatgacttatgctgacatgaatagcatgattaattggaaaaagtagtccaaatcgaaccactgaagtgactgaaacttatttttaaaaatgaatcagctctgatcagatagaatggagcatcatccatcatttcttctgggttgcaggtattgattcgatagctgcagacctcaaggacaac

SEQ ID NO: 11633 - DNA, 573 bp, Oryza sativa
  Intron number 1 from transcript LOC_Os02g12170.1 (locus LO C_Os02g12170) derived from phytozome v7.0 (chr-ID Chr2; po s 6325611 to 6326183 reverse strand)
ggcaaggtcgccctcctgcatcgctacttgccgtccacgtgaccacgtctacaccatgccaatcggttgattccggtgagcggacttgaagaagatagaggtaggcgctgctagggaattttagatgttgtagcttgtttgttctattaagttgtttcatttcattttagtgaagttggaattttagtgatgttgcagcttatttgtatttttgttgcaatttgttctattaagttgtttcattccgttttgattcattgttacataaattaatttcttggtgttacagtgagtatgtttgactattttcatttggttgaaacaattttgtttaagcactgaaacattttctctggtagtgaaacatctgaaatattttcatttaaatatttttttatcaacaagtgaaacatgtgaaacattcttaaacaacaccaacaccgtccgataatttgcacaaaattggacgtctgatccgtagcaacctccaaatacttcttaagcaaattaaagattggtataaaattattggcaaaatttgctacaggacaccccaaaatcgtgtaattggct

SEQ ID NO: 11634 - DNA, 566 bp, Oryza sativa
  Intron number 3 from transcript LOC_Os01g53280.2 (locus LO C_Os01g53280) derived from phytozome v7.0 (chr-ID Chr1; po s 30609157 to 30609722)
gaaagttactactattattgtcttttagctcaaaggtgactcatgtaattctcccttacctatattaaatatttatgttattttgtgtgatgttctctgtagcaggaaacatctaattgcattattgtttatctggcccctttctgttagtcttatggagagtgttattcctttactgttgacaatttcagcaacagtactatggatttggtcataatatatgcaaagagtcatgactttgtcattacttgttcccttataatggtggccatgctgcctatcaaactttgcaagtttggtttcttattatttctgcgtaattatttgaaattactttggaggatttgtagttaacaaagcaactgtgcttcaaaatgcatatatacttctacaatgctttgattttcagaagaacagaaaagaatagtgctcagacaattcctttaggatgacagtcaaagttccccacttccccacttaaaggataatgataccttccagctcaatcacagtaagttcatcgcctaatgcattacccttattctgattcaggtttcctaccactc

SEQ ID NO: 11635 - DNA, 942 bp, Oryza sativa
  Intron number 2 from transcript LOC_Os02g44100.3 (locus LO C_Os02g44100) derived from phytozome v7.0 (chr-ID Chr2; po s 26614851 to 26615792)
cacggcgtcgcggagctgctgcgcgctctctcagggtaccctctgtcgcacctatcccggactttaacatcaatcaataccatcgatgagatgcacttgcctgtcttttccgtttgggtgagaaccgtgcccgtgcgtattattgtaccagtacttcattttcttcgcccgctactggcgcaattacttgttcatctgctgctgtttgtttcgtcaatgtaatagttttgccctcaaccaagcgtttttgtgctcagctctcttatttgtgtgattgatgtgtgacataactctgtgccgttgtgaacatataacgatttctatgcatacactaatcattttctcctttagtgcactaaaatagtgttgcatacatgatagtgatacatcaacatttttacagtacaatcctttttttctttgatgatcaacacaccatcacatcaatttcatgttgtatataataagtcaagagattcgcttgttaagttttctttttttttttgatgaattgaggtcaattgagtaagacatctggtttctgcaggcacatgacttgctagttcttgaaagattttaccaggagcttgctgttttgcttcacaatcatcgagaatgagtgccttaacatgtcaaattgtaatcaagactagcgttatgttttttaagctagaatcttagctgcctatgttgaggggcaacatgatggaataaagtaacatcattttacatgttttgcgtaatagttggctgtttgcccaagtctatttgtctgtgagatatttaatacaatctacgtaattttcctatggcatttgcaattttttcctagacttttcctgtttgcatggatgcatgctcgtttgattttttctttcaacaaagaattttataacatggttgccattttagtttacaatatgatcattcttctcttctcag

SEQ ID NO: 11636 - DNA, 516 bp, Oryza sativa
  Intron number 1 from transcript LOC_Os01g41900.1 (locus LO C_Os01g41900) derived from phytozome v7.0 (chr-ID Chr1; po s 23759894 to 23760409)
gcagaattgtccaggagaggaagaaaggtaatactaatgttgaaatggccttgcaatactctgcaatttttttattgttcagaaacattctgcagttttctttttagagggcatactttgcaattacagaagcatttaaaatcttctctgggaaaaaatagagagaaaagaaaatttggtatggaaattcagaggcttgtaatcttaaattacctaccaaatcttctactagtatctttctttgtttagtttatcatcccgaccgaacaaaagttacattatccctctgaaataaaagtagcattatcttctgcgatgaaaggataccaaggcatatctgtctccttttatatattcaccaaatgaatgttcaggacgacttatcatcctgaacaacataacccccagaaaaattcagtactagtagtacatatatatagtcatataacaaatcaaaataatctgtatatgaacatgacaggagttccgtggagcgaggaggagcaccggctgttc

SEQ ID NO: 11637 - DNA, 526 bp, Oryza sativa
  Intron number 2 from transcript LOC_Os01g58390.1 (locus LO C_Os01g58390) derived from phytozome v7.0 (chr-ID Chr1; po s 33733417 to 33733942 reverse strand)
tgatcaggcatggcaagtgcttgtcctcttatttctgactagtggaaaatttctgtgttacttagctccttttttttcgctaagagacctacaatacaaacgctttagaaccctttgaatgctccatgcgttttgttctcttgttattgaggctgacattgcatagaatgtaaatcgatcgttaactgaaaggggaattatggaactgctggattgttcaactgtcatctgtgaaatattggagtgttcagtcctttgtcacccaattcatttttaatgattctttcagctttgtttggcaccaatatttgttaaatggttccgtcgtgtcaaatatgcaagttatatattgcaactttgcaattaggctgcaaagtagttcttgttttgatattatctttcttgttgactgtgtgaggctgtagctttgatttgcacatataaaagataatggggatactctgtttatgcatcttctctgctggttgcagatataaagaagcctggtggagaagctaaggaaata

SEQ ID NO: 11638 - DNA, 623 bp, Oryza sativa
  Intron number 3 from transcript LOC_Os03g29490.1 (locus LO C_Os03g29490) derived from phytozome v7.0 (chr-ID Chr3; po s 16810223 to 16810845)
ggcatctaatccaccgtgtcattgtcctaagcaaggtaggctctcaaatagcctaatcatacttacttgcaggcgtgcgcaagcaaactactcgtactactgtaaactaattggcattaccagcgatgcgcaaaaggttcctcttctttcatcaattcatgtttcagtccaaattccaaaataaccctgaaactgaaggtagaaatttgattttatgaggggtaggttgaacacatggttaggaattggtcatcaaaatgtctggagggtagcttcatggtagaaaccactaccccgtttcatgttataagtcattttcttaagataattataacacttcattgattaagaagcataagaacaaagtatctcccggatacacttcagtattatagatcgtaggacataagtggtgaactcgctgatgtgtgtgccacaacaatacaacattcgacaaacgactactaacatgcatgcataaaagagagtctgaagccatgatcaccttctgaaaggaaacttctctcttgtcagatttccatggcttcagcaagttagggttaacaatcaatcactcatagagattgttgctcactgcatgcaggcaagcaaacaagcaccat

SEQ ID NO: 11639 - DNA, 764 bp, Oryza sativa
  Intron number 1 from transcript LOC_Os03g01550.1 (locus LO C_Os03g01550) derived from phytozome v7.0 (chr-ID Chr3; po s 350441 to 351204 reverse strand)
tccgcttccagccgacttccgccctgcaggtaaaggtaagttcatcttcttgatcctacctttggattcaccttgggttggcggctgatgcggtaatgctactgtttcggtatcttaagatgcgattttttcgggctgaatgaatgtggctagttcgtctacggcgaagaatcttcgcttgttgcagaaacaaaagattcttcatttccggctgaataatttctccagtttgcctcaacaaccaaaaccccttgcttttaggtgtcttgttcaattttcaccattttaggttgccaactatttctcttgtttgtttcttgagatctgttatccatttgcctcgtttgttattctgaacggagatataaaaatttcctatctggagcatatagaatggaagcatctagagttggtaggggctcatcatcttcttagttcgcttttcctttccctttgttggtatggtattctcttttgcctcccacgagaacaaagcgatgtgacatgtgcttctcatctatttttttccccaattcagatcgccttttctttttctttttcccattctcctcttctttttgacttaagatgcacatacctgacttatgtttcttcttgtgaggtcaggattttagaggatttaacaccatttgcgtccttttgttcatctagttgcagtgcatttcgttccatttattctgttcgactagtacaaattgtggagcttaatctttcaccttgtgtccacatgttaggtttcagca

SEQ ID NO: 11640 - DNA, 803 bp, Oryza sativa
  Intron number 1 from transcript LOC_Os02g47170.1 (locus LO C_Os02g47170) derived from phytozome v7.0 (chr-ID Chr2; po s 28793378 to 28794180 reverse strand)
ccagtgtgtgagttctgattcccttattttccatctgtttccaagtttctacttctgttgctgatggctaggtaatttttttggttagttgctgcctctagtgcatttgagatgctatgcaattttcctgttcagtaatttagttgtttgaaacttggacggaagaaggcgagaggcaatctgtgtatagctgtgtgcataaaatggtctatttttgtagtttagctccatgtcagttttttttaatgtgcctcgatgtttaaattctgagaaaaaagaaaaagaacttatatctgtaatgtataataatataaaatgtgtagtgaaatttctgcaactgataacctgcaaactgttccttgtaaaaaaaaaacaataagctaaacatgtgttttcatggtattcagtgtgaccatgtttggtcttgaagaactgaaaataaactaggaggattataagattgcttccttattcctgaggttgctatacagttgctatgttcagcattttggttctgtagagaaatttgcatgtttgctatgtggaaaccaaacagatggtggttctttgggaaataactttgactttatgtaaattggtgaaatgtttgccttgccttttagaaatcattctgattctattttacctgcactattttctcatgaattaatagtcacactatgcatttatattgtttgtttggttacatgattgcctatgtatattttgaattctgaaacttatgtacttgtcttttcttatccatagcgactggtacaacattgaaaaatcaaagcgcgtca

SEQ ID NO: 11641 - DNA, 936 bp, Oryza sativa
  Intron number 1 from transcript LOC_Os02g04880.1 (locus LO C_Os02g04880) derived from phytozome v7.0 (chr-ID Chr2; po s 2253532 to 2254467)
tgtccaatcctctttcaaattgccctcttgatcaggtaattaggtactgtactatcttaactaatcgatttgcttttatctatgctttccttcatctggttttgcttctgtttaaaggtgtgagtaattgaactgatgaactttgcccttgttttcctcgtccactgttcatgatgtgttggaattgtaacattttcattttatttcacattgacagcatgaaactaactttctactggattccacttgtggtgtcagtgggagaagatatatgcttaggacttcattgagattaatctagaagatatatttggactacaccatatgtttacgtgcagctgtcatgtatggtgacctttaatttggatttatttatgatatctttagttcttagccgtgaaagacattatggtatgtttatttgctgtaaaaaaaggcaattatttgtgaagtgtaaagttaagtttggacactttatgcaattatctgtgtagcacatgcacatacctgtttgtgtttttacatctatgcacatgcaatacaccgaaatactttgatacaattttgttgagggtgatgcattggttcagaaattcaattctggccgtgtgcaggaattagagataatctatatatgaacttgcagtcgtagaggtacactgaccaaacaaattgttattgaagagaaaaaaatatctaaggtttcactgaatatttcaaacgaattgtatattctagagtaaattccctgtgtgaaaactcactcaatactttctttagctaatcccttctatacccctgaaatttcaacttgatcccttccatgcccctactgttacattttccatcatttcactattacgtttagttacaaatgaccttttttcccttgatgctttaggtttgaatataaccttcaaaaacaattaaaaattt

SEQ ID NO: 11642 - DNA, 410 bp, Oryza sativa
  Intron number 2 from transcript LOC_Os03g11300.1 (locus LO C_Os03g11300) derived from phytozome v7.0 (chr-ID Chr3; po s 5814626 to 5815035 reverse strand)
aatactgcaagaagaagacacatctcttcaaagaggtaggtgatcaagatttcatctttcagttttaacgatgacataatcttttatttactgttgatcgctaccagcagtttgccattaaatttctgtcctatagcactatgaacaaatcggttaatcagcattctgcattgtaaaaaagtaatttctgctatcagatgttcagatgtttgaattaaaaagcagatgttgaaaatagataattgtcaaagatatatatatccggtttagtttgtcaaagatgtacttttctagttgagccatttattctgttgaaagaaagaaataaatcaggatagaacacacaaagcaaaatataagaagaaggaaacggaaaacttaataactggcagtgaaacttggcagcaccg

SEQ ID NO: 11643 - DNA, 897 bp, Oryza sativa
  Intron number 1 from transcript LOC_Os01g09246.1 (locus LO C_Os01g09246) derived from phytozome v7.0 (chr-ID Chr1; po s 4673379 to 4674275)
tctgggggaagcatctatatcaagtctaagactatgtaagtgttcttagaattgcttcaaattccttcctgcttcctacatgtgctaattgaaatgatgcatgggcatttaaactgcctaacaaacttgcagattagaaacagtttccaaagctgaggtcacatatgaatatattggttcagtaggatttatttcgtatttatacctgtttttcattttgttattaatgagtcatggatgcggggaggtagtactaaacatattagggatttacagaggcttgctcggtctaatagatatgagaacaagatttcctgtcatgctgtttatatttttgttaataaacgattagccgccacaatggaattgcagcttcttcaacgaacaaaaagaacatgaagttattaaatgttcagtctggttgtaatttttcttaacacttgagaagttaaggactaatgtgataggaatgtatgagtttagcatatttagtatgtagtcatgagctcaagcttgactatggtactagacaattggatttgaggatttttttttgcactaggtgttaataagagaaattaatgtcacagtccagattagttcagtggttaaattatgcatataattgattgactaataaatgaatataggaatagtttcattttattgttaccaactttcacaattgcacatatttggtagttcaaaccaatccagctaaacactagaccaccaatgcagtaatgagtggcatttgagttgaggaatgctttcattagcttgaactagctgttattttggtttgttataaatctgttgactatgcgctctagtatattcaataagcccatgcagaattgcaaactttccccttctgatcttctgtttgcaacaggc

SEQ ID NO: 11644 - DNA, 453 bp, Oryza sativa
  Intron number 1 from transcript LOC_Os01g70950.2 (locus LO C_Os01g70950) derived from phytozome v7.0 (chr-ID Chr1; po s 41068575 to 41069027 reverse strand)
tgtggactaataaggaggtacgtccatcatccatgaactattcttactagtgcatgtgaacattttgttacataaatacctcttcccagtccatagaaggtgggcttaatgatttaaacttcttagactaatttgtgaggcttaaccctatgttcagttgatttgagttttactgctatcacatcctgctaatatagatattaaactcttcagtcccagttccacttgatttatagtaccattatagcctgaagattcttttgttccataccaaatgtaagcattgaaggaaacgaattttgtaaatactactcagttttatacaatagctcctaaaaaaataaatagtatctgtttggtagtagttacattaataattccattgaatttacacacttacattatagtgcctgagatctagagatatgcatcttttcattaaataggtacatt

SEQ ID NO: 11645 - DNA, 1012 bp, Oryza sativa
  Intron number 1 from transcript LOC_Os03g07110.3 (locus LO C_Os03g07110) derived from phytozome v7.0 (chr-ID Chr3; po s 3633239 to 3634250 reverse strand)
gacatcagcagcggcggcgcttcgtctcccaggtaacaaatctctcatttctatacacacgcagctagagctagttcccatctgattgctttggtcaagtagcttggcacttggcagagtagccgtgttgtcttgtcattgattcttgagtaaaatttccttacatgacgaatcgataacaagaaatttgaaaaaaaaatctagcaacaaattatgccatcagattttagatctctttgatgtctgcagctctgcaatttgggttctagttatacctaattatccattccatgtttgttcaaaaacgattaaaagaacatgtgttgtgtatttttaaccactccaaatatatcataagctacctcccttttctttctccttttcttttccctcggagcattcaatcacctcagaccgtgcattgttatttatagggtgaagacagcaacaaacccatccccgtgttcatctgccctcttccatggtcattacctactctccatttatgcctggttcccctacatttgctctcattcgtcatgcaaattttcagattccttttagctttcttcctcgcagacctctcatcaggaggttctgttgggtggatggtgctgtaccctttgagctaggtaggtatggctgatgttctttgattttgaatcttgtttacagaaatgactctccgtgatcttcttggatttttttatctatatcgtttattattgaaactaggtgatttaagaaacaagaaatgagatggatcatttttatatgaaggataagaacatatttcatagagcccatttcacataatgtattttgatctcccttgataagatataaaacaaaggaaggaagacatcaaatgtgttgttaaaatgaccctgtcaactcagtcggcctacatttggtctcccttgattttccaatgtaaaacaggtcttggctcatctataaagtatgcattggtgcagagctccagagcgacagaagtaaggcttatcagaag

SEQ ID NO: 11646 - DNA, 918 bp, Oryza sativa
  Intron number 1 from transcript LOC_Os03g02200.1 (locus LO C_Os03g02200) derived from phytozome v7.0 (chr-ID Chr3; po s 735708 to 736625)
ctccgacgcgtgcaggtcgaggccggcactggcaggtattccttcttcgctgtttcctcacaaatggtagggctacttactggctagtgacatccctcacccaaaatcttacatctaacaactctattacatgttcttatgttaaaggtgctcgttatctagtgatgtcctgatccatggtatcaatgtaaagagtacagaaaatactttaacatatagggtctgttcagattgatgccaaaattttggtaaattgacaacactgtcaagttttggtagaatagactcaatataatgttgctaaaattccatagacattaccaatatttggtaacaaactaaatgcagccacatgattgccaattttactaaactaaataatggtatgatttaaaatgacatcaatctgaacaggctcataaacaagagtctctgtgaatgttttgatgccttgttgcagatggatgtgctttgaattttgattagggtgtctgctttgtggtacaaagttttatgttaaatggagctctaacacggcatgcgtgaagaattgagggtctgtttggttgttgcctaacattgccataactcaatttgccatagatgtggcatggcaaacaaagtgtggccaacaatttgttggtcacaagtgtggcaatgtttagctagaaaatgagtatatgacatgtaggcccatgaaacaagaaagtgtggcttgccacaactgaaacaagcaaccaaacgctaagctaacaatctgtggcatgcctaacatgtggtgtggcaatgtgtggcaccaaaccaaacagccccttgaatgcctaaggaactttgtttcttgagtgggttatgcacattttgacatttttcatcccttgaaaagcaggaacgtggcactcatcaagtctgacaaggaca

SEQ ID NO: 11647 - DNA, 824 bp, Oryza sativa
  Intron number 1 from transcript LOC_Os01g59870.1 (locus LO C_Os01g59870) derived from phytozome v7.0 (chr-ID Chr1; po s 34625666 to 34626489)
cgcgcgtacgcacaattactccatcgcctctcttttgctcctcccttttttagttcgcttgcaagggtttaattctgcctagcatagttgcaaaccgtggattttgacgaatagtagaacgtttacttgcgtattactagtactagtaatgtttttttgggaatactcaaaagatttgcgcatctttgtatgaagagaataattacagctgaacgagaacacagaaaaaataattaatactccctccatctacttttttttgatagtcatattttatcttggcacacagaccaaggataagtaattctacttatcatccatataaacatgctactagtcattccttataaacaagcgattcactgatatttacgtttctcaatgcgcatgtagccaatcatgtgtgtaagaatggagagtcatgcattaaatccgagaaagtcattaaaatgataggttgttgaagtgaaatatgcttatcaaaaataaaatttttagatttggaaatatgactatcaaaataaatggagagaggactattaatactagcaatgtgcgtgacacaacaccaaaagttagaaaggagaacaacttaaactgcatctgttctttgttcacatcagtctgtagctagctaggtagcttagctagtggaaatgtgatcaccctaatggtttattaccctgtccaaagctccaaatatcatttcactaaccccaacagtatatcttaccattccattcatcgaattttactgttttaaagaccgtataaaattaacttttggttacacacaaaatgcagttcttggagtacctgtgcct

SEQ ID NO: 11648 - DNA, 1059 bp, Oryza sativa
  Intron number 1 from transcript LOC_Os01g18100.1 (locus LO C_Os01g18100) derived from phytozome v7.0 (chr-ID Chr1; po s 10137767 to 10138825 reverse strand)
accgcgtcgccttcaaccctcacctcatcattcacgtaagaggagcttcccctccaccaaccctccccttgtgtttggattgatcctgatttctcccctaggagaagaagaagaaacagaaaattcacataggattctgggccatttttccacttcttcgcccattctagtagggctgtagaattgcggctgcgcttcctggcgtgctaattgtgtcgaggctttcgctttagctgatcagtacatggtagattatgcgaatttcagcttgtgggaatttggtagcgggattactgactgcataatgagttgggaaatttgggagtagtatccttctattgggagtaattgctggtagtttcgtggtaatgtttgtatttgcagaggggaacagagaattggaggctggaggagctgatgaagagagaattttctcctctttgagcctgctctgctacaagcatttactctagttgacaaaaaaaaagatcatcctatatgtaattctagttcagtgaaatatacttcctccagttaaaaacacatgtcattttggacttcaacactgtttcgtaatgtagcttttgaccgataatttctattgcaaaacatttgaatcctcataaaatgattatattagtaaagttactttgcgaggaaaatctgtgcatatgattgtcatacatccagcctaaatatttcgaaagggattttaaagtttgagttgaaacatgttcaaaacgacatgttttttttttgtgactagaaggagtatgcagcttctattcacaatgtgttttgtcaattcctatagggcatttttctctaaaatttgctagtaagctggtcttcttggaaaataactcattagtaggatacagatacacatcatctgctctaaaatattatgggtatagttgtgaaccccatttggatttcctacaccttctattttattgttttgaagttacagtctgctggttccacctgactaagcaagatgatcgttgttggtttgttgcagtactgtgacctgacacgcttcttcctgtcggcttt

SEQ ID NO: 11649 - DNA, 854 bp, Oryza sativa
  Intron number 1 from transcript LOC_Os01g13080.1 (locus LO C_Os01g13080) derived from phytozome v7.0 (chr-ID Chr1; po s 7278148 to 7279001 reverse strand)
gtctcccccagctccgccgtcttccaggtctgcttcccccccccaccacatccccatcgctgctgctgctgctgctgttcgattcgccattgtcctgctgatctacgtcgccacggcgctatttcgtcagatgcgttgattactttagttctcgatattctgtataaatccatctattgtaatccatgtgtgttgactgtttatattgttctgtttagatctaaataggcaataattaagctgctttagtgtcagatatgtggtgttgatgggtaatttgttgtaccatgtttgattgatgtttggtgctgttgtggcctcgatagttaggcgtcaagtgcacatctcattgcaactggaatttagcagataacaatgtttctagtttttcaattcgtgtgtgcaaaagaaatattttggggtattgcctgctagcccaaatttcatctatagacatcgtgctcgtttccagattactgctagttcacatttgaaatagataaacgggttgttggcattggttgtgccaattatctatctggcctaactactagctatgacatagaaattggtatctacagatatttattgtgtttcttagcattacagcctgtggctctgtgatcttatatttttacgattgtcaattctcttgctgttagttgacaatttatgccaggaagtaatctataaatatgcgaagtagccattggtaggtttgtgtgcctttgttttgtggagtgcattgacactcaacatatggtcataccatttatatgtaaccgatttttatgtagtgctgacctcgacttttcgcaggtgatcatcggtgctgttggtggtggtgctgccat

SEQ ID NO: 11650 - DNA, 425 bp, Oryza sativa
  Intron number 3 from transcript LOC_Os03g30460.1 (locus LO C_Os03g30460) derived from phytozome v7.0 (chr-ID Chr3; po s 17384522 to 17384946 reverse strand)
acaacattcgccaaattgagctggattctatacaggtatttatatatgatatggtcattcacgtcaatcatccaagttaatatgcttgatctagagctgctctttttatatacatatgaatatgaactgcagtttgaatttgacgttgagtaggaatacagttacagcatggttttattttattttgaaataagattatttagcttattttgccagatggctataagactacgaatccatccaatgacttgcctattcttaccagagaaagtttacgttgatcaaataattgcacaaatgttgtggaaaaaaaaacttatgatcttcagcttctgatgcttcataaatagaaattggcagtggataaaatgtagtgttccctctttgtaggattacattggagaaagtgaaaacttggtatcgct

SEQ ID NO: 11651 - DNA, 1038 bp, Oryza sativa
  Intron number 1 from transcript LOC_Os02g19030.1 (locus LO C_Os02g19030) derived from phytozome v7.0 (chr-ID Chr2; po s 11112046 to 11113083 reverse strand)
ccgcatccgctcctatttgccgagatccgtgggaggtacgagagctcggccgcatacgcccctatctgccgcaaacctagggtgctacgcgaccaccgccgcatgtgctcctatcagccgcaagccgacaaggagtgatgcatttttttcttttttatgttaatttcagaaaaaaaaaatccatatatggaatccgggaccgtccggaccgggtcgattttaaaaaaccatggttttccggtcaatcgctcataaaatatagcggaacggtttattttggataaataaaaaaaagttgactatggcaagatgttgaacaagaacaaagtgatctcagagagcctgtatcaaatcatcacgaagaggcctatataaatccaaacgttgacacgacttgtgaaacgaaggtaaggcaaattaaaattctctcgctaatgttactacaacttatcataatactaacgtgaacatgacctaacaggaggacagtaacgagtgcaatcaaagcagcaagaggcttataggtcctacaggaagaatatacaaaccaacaaatcggactgacttcatctacgaatcaaggggtaaaaaggacataatcagaacccaaacaccaacaaaaataacaccaggtactatgctatttcatccttacatatgctcatgattggtactaattttcctcattttcaagcgcgaacggaaaaagaagctatcatgccagacacagacgaattacagggtgaaaagaagagaaaacaaagcaaccaaacactgaagaaaatatctgaatgtatgaactctctacatcatcctaaattttattacttcttttctatgtttgtgtattactgatttgacttacccttttgtagtgtacatcgataaggaggatcttatcaaaaaaacacaaaagcccaccaaagaacgccttacgaggtcaaaagaaaagaaaaacgaacagccagacaccgataaaaaattctaaaggtaatatctaaacattgtacttttctataaatctattatatagattct

SEQ ID NO: 11652 - DNA, 732 bp, Oryza sativa
  Intron number 6 from transcript LOC_Os03g21990.1 (locus LO C_Os03g21990) derived from phytozome v7.0 (chr-ID Chr3; po s 12599413 to 12600144)
aatacaactataacaattcctggttcatctgacaggtttgttcacttatctttgctttaatcgttgatatgcagctcaaacacttgatgttgccccaatgtggctaatccaaaaacagaaatgccttcaattgaaactttgaactagctcatggcgtttccccttagccctttatgaacaccacctttgagtggctctagtgcttaggtgaattaggatatgggtgggtcttggtgctcaggaatgggtatcagctaacctttttcgtctttagaatgtgggcagccttgataacttgaagtagtagttgttaaagaaaatgttgttccactgagttgcaataccatcattgtgtataggtgcttcttaggctcctaatggcatgtgtgttttgatgccaagaagagaggctaagaaatttagcctccctaacctggaactagtaaactggagggagagaggctaagccactcaatagattattaattgctttaagtcgatgatggggtctaacaggatcaccagtgtggctacgcattgcaagaatttagactctagctcctgttagatgtggcagtgaggtggaaaaccaaactcctctcatgctagaaacactagcaagcgtatatattccatcctttatgatagaacaggttgaaaattttctagtttaactgaaatatgaatttctgatggcttatatctcatttcagattctctacatctgcactg

SEQ ID NO: 11653 - DNA, 795 bp, Oryza sativa
  Intron number 1 from transcript LOC_Os01g02840.1 (locus LO C_Os01g02840) derived from phytozome v7.0 (chr-ID Chr1; po s 997743 to 998537)
cgtccaggtattctctctaaacccctatacaacaggcagtaccatccccgtttatcttctgtccagtaagttttacaatttacatccccacacatatccatgcatggtagtaatatccgatcgtcaaaatccagcaaaacaattgcaattatgcccgatgtataagaaatcaatttttaccagccaatgagcatcatttgtatcatccaatcatcttataaactgaaagcaggaaatgaacataaccttgatatgctagcaaatgcatgtctgcacctggataaaatttctcaagaaacagagcttatttggtcacagctgtagcatcctgattgcttctagcagcagacaagtagttctcagatgggatgaaacttgagggtatacaagtatgatacaacgagagctacagttagttgctgcttggttactttgatgggtgtcaaggttaacatagatctgagatgtgataatagataatattgtcaccctttatccacattatccaaccctaacaattctcaatctgccatacctcttgcttagtcaccatagttagcacatgccaatttgcttctcatgatgtcaggctatcagctgaacaaaatgtagggatcatttctagtttagaaataaattcatagataatcaaagcttagctggtccaacacaatctaaaacttatgcgcatacccgtgtcagatttcaccttttctttgtcaagtcaatttctccttttactaatgagactatcgatcaagtctaaattattatgtttggcatttgcaggttcac

SEQ ID NO: 11654 - DNA, 917 bp, Oryza sativa
  Intron number 1 from transcript LOC_Os01g68460.1 (locus LO C_Os01g68460) derived from phytozome v7.0 (chr-ID Chr1; po s 39781187 to 39782103 reverse strand)
ccttctacaagcacgacttcttcttcttcaagtcggtcagtacagctggtgcccgttgcgaggcatgcgctgctgaggtctccgctctcttattcttaattactaattcctcctggcaaggtttatgattagatatacttaagtctggcttgtatatatttatatttgcacgtatttcgaataacataaatacatatttaaaaaccaaagtaattttgaataagataaatgcatatttaaaaaaaatcaaaggagtcatccatcataaaattaagccggtgataatacctccgaaacatgagaaactatttttatcccttgagggatgttccctcattgtttatatgttacttatgttacttaaatagttatgaaaaaaattgagaagatatattaacatgtgatataccactctacaaacatgtaagtttaaattcaacttatgcatctcgcaaaaaaattaaattatagctagttaacatatattcacagtcaattttattttttttctttgctagatatagaaattgaatttgaacttgcatgttcgtggagtgatatatcacatgttaatatatcttctctttttttttaaatttttttcataattatttaagtgacatacaaacaacgatgagacatctcctcgagttatcagaatccactcccccgaaacatatgttgatgtttctttccttggatggcgaggcatgcgctactgaggtcctcgctctctccattcttaatacttccttccggcaaggttgaccttgactgcaaattaatactctctatgactttttagtaaagaacgtcgttttgattttttacatagatttcatcatttgacttattaaaattttatataattatgatttctttattatggtttggtttatgattacagttacttaagt

SEQ ID NO: 11655 - DNA, 702 bp, Oryza sativa
  Intron number 1 from transcript LOC_Os01g66590.1 (locus LO C_Os01g66590) derived from phytozome v7.0 (chr-ID Chr1; po s 38675453 to 38676154)
agggatagcgggaaaaaagatcgcgcctaaaaagggtacgtacgcagccatccaccgccggcgtcggatccgataacatctttgctttctttatcctcctctctcctctttgtttttttttctcttccttggttgtgtcttactactaagtctattattatagttcagtcacactctttttcttgctggttctgattgactacaaagctggggctattgatccaagaaaagcacatgccttgacgtttcttcagttagctagctagttagatgaagatattcagatggagtgtctcatacgaacaaactcttgcaatttcactgaggaaccaaagtttcagactttgtgttacagttcggaaaataattcttttttttaacttgttttctcccttttgttttgaatggaaagaaattatgtcgtgattttggtccccttatttgttttcatgttttagatggaaggggcactaatgtatgtgcatttttagtagcttattttcttgtgctttttaggcagtgttctccatgtttagcaatacaataatacagatggttctttctgtttatgccctgctggttttctagcaacttccatagctttatgaggaaaagaaaaaatctatctatggtaatagagaacaatattaaaaagatcggctcttcttaccttttgcactttttctttcccaggcgaggagg

SEQ ID NO: 11656 - DNA, 930 bp, Oryza sativa
  Intron number 3 from transcript LOC_Os03g01090.1 (locus LO C_Os03g01090) derived from phytozome v7.0 (chr-ID Chr3; po s 63362 to 64291)
gcctggaaacaaaccttgggaccattcgtattcaagtaagtgctctttgcctctacaacaaggcaacaatattttgaatcttctttagtgttcaatcaccgaatcaagaatgttacatgtaaaatgctgtgcaccggggcccggggccatatacagctatagttgcatccactgatctaagatttctcttagcaattattttatttgcatatttttctacatgtatctcattttcagtattgtgcacttacctttgggcaatgtaaaacccctttttaatagaatggccacaaggtagatatcttttgtcaacaagaacattagatgcaggtagagatagggaagctggcggagtggtgtagtgtcatttacttttctttccatgaatctgacacattttttgtttactcattaagcattcattcaagccaacaaagatatggtgtgctaatcgtgttgcttctcctctgcccatcaggggtttttatagaatattgtttgttccaatctgttctactgagaacatggtatatgcttgttgagaattggcaacaacaaataatgcactggggttacatttgctacatggattgtttggctatatagagagccatggcaaacacatgagattatggatttaatatgtgtctaagagtaaaaccatacatgcatttaatgtaagaccgctaagctgccaagtgaatatcgatcattagagattatgctgttagcccaggttgctctgtcaagaagtttggatggtaatttcttgacattttgtgcaggtagttctaattctgtcttctggataatccacttgagttgaatggaattatactgtatctgcgatttttcaccatgtcttccctttctaatatactttctttgcatctagttgctgcctggctgtgcaccccattctgtggacta

SEQ ID NO: 11657 - DNA, 490 bp, Oryza sativa
  Intron number 1 from transcript LOC_Os01g65500.1 (locus LO C_Os01g65500) derived from phytozome v7.0 (chr-ID Chr1; po s 38016485 to 38016974)
cctccctgacgacgattgaagatcgaacctaccgtgtaagctcgttgattctgttgacgccttgtttttcttttttttttagggttgttgacgccttgttgattgattcatggtaaatgttgctgttagtttgattggtgtactcccttgcagcattgccttgatcgatgagttttaactgcattattaatagttaattcttttcctaatttgttctcggagatgaattgacaaattcaatcacaagctaatgcgggttgttcccatgcaagttcaacataacatatcctgaatatatttttgttgaaaaaatatcatacggagtattccgaatcatatacatgtacttgtatgtttttttccgtataacacattatccaaacaattttactacagaatatttttcttaatatatctctcgttaactaactcttgtcttaatcttacatatacagtgcaagatcttgtatagtttgcaaaatccagctgt

SEQ ID NO: 11658 - DNA, 827 bp, Oryza sativa
  Intron number 4 from transcript LOC_Os03g17340.1 (locus LO C_Os03g17340) derived from phytozome v7.0 (chr-ID Chr3; po s 9648226 to 9649052 reverse strand)
catgtactaacttctagcactctagcagtatagtttcaatcttttcgagggagtccgaatcagacctgccttgcctttttttatgaatgtggtttgcccattgtaagctagaatgctggacatatgggttagtttggccatatgggttacttctttgtgccttagctatctcatgtccactattcctatggcattaactgagtgctatttattaactaaaagttaacacttataagcaataaacttttcgaatactacacttaactgaaaataggtattaagcttgctttttttctaattatattgatcacataatttcccttaaggcagattgtcactagtcaacaatcaatcatcctttcatgaacctatgagtacagcaaaatgcatatgcttattttcatcatgcttgtttgttggcttgttgatgcatgttgacatcttgactttttctggaactgggaatcttatttttgtaatatatttttatatctgtggtaacaaagttcctgaagccagtactagtgtcctgaaggatgataatgactgcagatgattttgagtactgtcatggtacagtccatacttaagcttttgaaaaaaaaatgtcattggacaaaggccaagaagtggtgaatccactttgccctgggacatcccatttgagtttgagggtgttttgattttcatttatatatttgaacctgccgaatagtcaaatgtggttttcatctagatagtatttgtgctcagtttcgctaaatgctaaattttgtgacctgatgtaatgtttgtttctcttgcagttccttggtttgttggttgac

SEQ ID NO: 11659 - DNA, 697 bp, Oryza sativa
  Intron number 3 from transcript LOC_Os01g32259.1 (locus LO C_Os01g32259) derived from phytozome v7.0 (chr-ID Chr1; po s 17681294 to 17681990)
atgtatgttgccagatagcagtagtattaatattgttgcaggtgtggtggagggtactaggaatttaggtggtagcagtacatacttggtcaccagtatctagtgcccttttccttgttgggaaaaaagttgcttctatcgccatgcttatccttcctctttcggctcttctttgcacagcagctctagatcttttggtttcctgctctactggaatctgataatgctggatgcttcagaacttaggaggcttttagggctgaaacgttcaacctagttctccctatttcatcatctgcaagtatatatctttattagtttgttctatgggtagcctttgcgtatttaaagcgatttatcacttcgccgatgaatctagtttgctgttctctgaaattgctggagttcaatccttgtttgctcttgaagtcttgatagtttgcttagtgatgcactgatgaacctgtgtatatccttttcagatgaccacaaccaactgattcctattgcagctaactcaagtgtggaactagctttacgcttgaagctttcattcagaaaaaaaatagcctgcttaagtcaatttgtgctttcatgcacattctacatacggagtagtttgtgttttgactgttggggcttgaaggtgtttgttttatttcctcaattttgtgtgttatttttccactttatagcc

SEQ ID NO: 11660 - DNA, 696 bp, Oryza sativa
  Intron number 1 from transcript LOC_Os03g01180.1 (locus LO C_Os03g01180) derived from phytozome v7.0 (chr-ID Chr3; po s 120859 to 121554 reverse strand)
ccgcgctctcccccctgccccgtatcaacatcaaggtcttccccttgctgctgcatactccactttacttactgattgttactcctcaacgcctcatatcgcttcaattcttacttactgctcctatgtatgcaaatgcaatgtccctccgcttccttttcatcaattcaaatagtatatactatgcttagcaaaactacacaccctgctgcattcatactcttcacacttgacccattatatgctcttgttcaacaacctagtacaagtataactcaacttgcacctgctacaatcacaatctcatcttatttggttgctgcactgcaaacctatctgtctatctatcacaactcttgcatgatgacagcttttacacaaccctctatgtaatctttcatatgtttcttctaccaactgttttctctttattttgctactactgttaatgagaatgggatgggatgacccccctgttttcatcttcttcctttttgggcgtcacatatgggatgagaatgctcgttgcattgcacgggacacaaaaatgctgctgcccttcaactctcaagcttttacttgttggttctgtaattatagaaactgtgtgtgcattggtcctgtaattgcttgattgtatcgtgaacccgtttgccttgcctttccgatcatttgtactctaggtttcaattgaat

SEQ ID NO: 11661 - DNA, 540 bp, Oryza sativa
  Intron number 1 from transcript LOC_Os01g01600.1 (locus LO C_Os01g01600) derived from phytozome v7.0 (chr-ID Chr1; po s 302470 to 303009)
ctgtaagatatatagctttacacacacatacatatttatatatagatatagtttattcatgcatcttttctttgagttgttcatgcatatatgttgttccctctgaaaaggatcgaaaatgaagttatatgtatgtcttttgagtttgtattgtagatcatgcacctgggattcctaggatttggattttcttctctggcttcttgtctgctacctccttgttccttctgagattctggggaattgtagcaagcacaacaaaatgacaacttcagaggaaacaatgtgtgcattaattatattggcagcatggatctagctaggcttattgatttgttggtttccttgatgtaaaaagcttccatccgctcgcattacctttgttccttttgtcatgcatgatcaaggtctgtatatctcataataatctggtagatagatgataccagtgataataacaaattaagtaattaatatctgactcgattttcttaatttctctcttgatcagaagcagcagtactgatcagttaagctcat

SEQ ID NO: 11662 - DNA, 1007 bp, Oryza sativa
  Intron number 2 from transcript LOC_Os02g37120.1 (locus LO C_Os02g37120) derived from phytozome v7.0 (chr-ID Chr2; po s 22432419 to 22433425 reverse strand)
accttttcagttgcacccttgtctactcacagtaggtaagaacaccaactgttttctagtacggtcaatacatcactgtggctgggataaaatttaggattatttttttactttcaagttaactttgcttggttagtaagggtgccaatattctttgttcttgtaagctgtaagaaattgtgcagtcaactgctgtgttgagagtagctagggtagtcaactgctacttaaaaattaggatatccagcaagtgattcatcgttagttgcgaacactgattattcactacctaaaacctactctgttgactccatagctgtagcctgtttacaaaaactgaaaaccacttttagtaataataatgcagaaattcaacttgatcccaatcaaaatgaaagtctacatttttttttcagcaacttgtggacactgaaaggggatatggccttttcttaagagtgagaaaaggatccaattgtgtgtattcggggtctcgatcgatctcggttgcaggccttgcagctctacctgtcaaaaattgatttgttaagtgggaaggcatgatactcataatgaaaaatcaatgtcttgacgtggtcttatgcttatatatacgttggttccaccaagactaccaccagtccaccagcttctttgttcagagtttcagactggggggagaattgtccctatcatggtcttcatatactatattttaggaagatggcagtttgcagtcacaagtcactacaggaaaatttaatgcttataactgattaaaagtgatttagcaaccaaaatggaagaggacaatgctagagatcttaattaggttgaatttacattccattctgtaggatttgcccaaatgatgtttcatcgtgtattagtagtcagtcttgggttatatgtcaaaaaagataacttggtatgctagcatgacatttatttaaaaatatatttttttgccttgtgaaagttttgatatttttgtattggcttgacag

SEQ ID NO: 11663 - DNA, 625 bp, Oryza sativa
  Intron number 1 from transcript LOC_Os01g61440.1 (locus LO C_Os01g61440) derived from phytozome v7.0 (chr-ID Chr1; po s 35524984 to 35525608 reverse strand)
gcgcactccttgtcaccatcggcaacattgctcaggtacttgcgtgcaaatgtctcattttgactagtttgcaaacggaaggacattagagcattaatttttgcacagataacacataaatgattgacatgtagacactcatattattgattcagtttgtaatttgcattaaaaaaacaaatggcaaacgtgtaaaattaattacaggttttacagctacgaatttgctggtcgttcaccacagaaaaaagatgtgttgattgttcgtgagtggcagagtctgtctctaagaagcatagacatgtactaaaaagcatccatttttattttgcgaaggcatcaaattctaaagtataggctgtgcgtcaccactcaatttggacccatttaggccccatgtctgcatcaaccggtgcatcactgcctcacagctcggtttggaatccaccaaaggaccttaaaaaagagtcaaagatctcggcttttgaagagaaaccacaaagtgaccatcatgtcatgtctgttgtttcctttactctttgagcagcatcaaagcagtaacaacttgcttgaatttgccttaatgcctcttgttttttatggcacgcgtgctaggtgtggagca

SEQ ID NO: 11664 - DNA, 707 bp, Oryza sativa
  Intron number 1 from transcript LOC_Os02g01970.1 (locus LO C_Os02g01970) derived from phytozome v7.0 (chr-ID Chr2; po s 540572 to 541278)
tccacacggctggtgagcgtttcggggttccactcccacctgtccctgtatcttccctttgctgatttgctccacacaaccgattgatgatgagaccaatgtatttatttgttcccttacttgtttactgcttctgcctagtgtgatgctcgaagttgcgtcctaaattccacccggactcagcatcccatcagaattagtgtaacgcacctatatctatttactctaagctttgatgctttattttgcgctaaattcggagtattggttgctctggatttcgtcatttcatacatattacgtgaaatgtttgttggcatgtacacagcctattcaccacacggtagtacatatgatttttaagaacctgtacagggtgaaacaactaactgtacatgctaagttcaccatgtaaaattaatctcttggaactattggttggtactaggagtccaagtgcattagtgactcagtgtctcagcgcaagtggccggctgggaattttatgatacaatagaggtgcttgtacttgtagcttaacaacaaatcagtatctgtgcttttctatcatgttgtgtctaggaagagaacttattgccagttttgtatatatcgaacatggttagatgctttaatttcgatcggaatgtctgtccttgttggatcatgaggaagttctggcatttcattgtagattttgcaagcaa

SEQ ID NO: 11665 - DNA, 748 bp, Oryza sativa
  Intron number 1 from transcript LOC_Os03g19680.1 (locus LO C_Os03g19680) derived from phytozome v7.0 (chr-ID Chr3; po s 11068188 to 11068935)
ggccgctccgctaagttcatcgacacccacgccaagtgagttcgcccccctccacctcttgagtcaacaacttattcttgcaaaaaggatcacaagttgtaaatactgctcttgattttctcaattagagtatcttagttcctctattttggcaatttgagctcgataccttggtcaccaaatagtacaaaatatgatgacaagtaatccagtgcgatgtactagaaagtctcttttttatatgaaatctactagaaaagccctagctcttttgccttttggatattatcctctacgctcgagtagtgtgagcatgggcagaacacggtgaaatttgaatgtttaattacagttgttttcctttggtaattgattttggaccataagattgtcttgaatagttccatggaagagatcctatcttatcctgcagtttcagaagggggaactcgatattggaattggaatttctacttttattaggcagagttacacactgaagtcctgctaaatgcatatacttgttctatcttcagacaatgcatataaatcatgtagggattgatgcccttgccacacccttgggcgctgttttttgatcagcttttgttcaatatatatctttaaatagtatgtaatcatgtttgtatcaatgccattgccacaacattgtgccctatttttctgatctgcttttgttcaatgtgatgtaggtttgggatattcccttcttggggtctttcacaga

SEQ ID NO: 11666 - DNA, 908 bp, Oryza sativa
  Intron number 1 from transcript LOC_Os02g44540.2 (locus LO C_Os02g44540) derived from phytozome v7.0 (chr-ID Chr2; po s 26979771 to 26980678 reverse strand)
gttcaaccgaaaaccgacccctcaaccgaaacagggttagatctgcctctgcccagttccacctactttcaacttgttaattttgatttttgtttttagcagatgtaatttggttactgaatctcatccaaacacccttagaatagttgcattagaacggaaaatgtaagctcacataatttgtactcatcctaactcacataaatttcttaagaagaatctataccacaaactactcatagtcactcaaaaaatctttttattaaggtatatattcttataagaagttttcattccataaaattttctaaaggacatactgtgacacttggcattaatctaagggtgtgtttagatccaaactttgaatccaaagtttgcaaaattccatcacatcaacatgtcatacacacacaacttttcagtcacatcatctctaatttcaactaaaatccaaactttggatggaactaaacgcagcctaatttaacatttttttctttattaggttataaattttctaaaaaacatattgtgccacttggcattaatctaatttaacattctttatcaggttataaattgaaaccatcgaacgtactttgtcttcccgtttctaaaacattgcgatatatctataatattttaatttcaaaaataatttagactaacagtatagatatttaaattaggtaattaataaattcaaataaactatagtttagaataaaaaacaaaataatatatgccaagtacaatctaataacaatagaatgttagagacaatgtgaattcaatatttttataaagtttattttgggacggaggtagtagtaaattagccgggaaggcacactctggttgatctaaccccgagtcaaaaccatttctctacctggcaaactcag

SEQ ID NO: 11667 - DNA, 453 bp, Oryza sativa
  Intron number 2 from transcript LOC_Os02g54490.1 (locus LO C_Os02g54490) derived from phytozome v7.0 (chr-ID Chr2; po s 33358795 to 33359247)
ttgaggtgtgtatattaatgaaatggatgttcaaatcttgttgatccctttttgttttgtgttggatttggacatttactcatatatcatacaaacctgatcccctgcttattttctcttgatcttgatcttcaccctcaccagcttttatgagcagattggttgaactgtgtagggaccattgtgagaaatagttccaaggagctattggtactttggtagagatttataaatgacactcgaactagacacaaagaacatttccaattacttcctttcctgttgagcaccattttttaatacattcaacctatagcaattcctttgtaattgaatggtcattatcaaatgttttgtttgtagaaccaattttatgttgtgattctgtccacttgttacttttatttcactttacctcattgtgcatgtttaagtgaaggtgctgattgcaga

SEQ ID NO: 11668 - DNA, 989 bp, Oryza sativa
  Intron number 1 from transcript LOC_Os01g40940.1 (locus LO C_Os01g40940) derived from phytozome v7.0 (chr-ID Chr1; po s 23161309 to 23162297 reverse strand)
ttcgcggcgctgttcgtcacctacttttctcactgaagttcttttctacggtagcactactgtggacggtctgaaaaaaaaaaacgagaatgtcgatcgctaagagaacgagagtgccatggttctggttctggtctctgttccttcaagtatggttattgtttttatagcgttttgtaattttgttatcgatttgtttgggtgttgtaagaatgcataattgcataaggtcaagtctagaaaaaaagtctttttatcttttctttagaagcatatgcctctaactctcaagtgagtagaagagggtcatggtgttctgtatctgttcatgtagcagtagcagataattcttataattaagtttctttgtaaatttgtttgaataatgaatactattatatatgtgtgtatttactttaagctagtaagtctgtaacattttctttctttcttttcataagtaaaactctcttgagtatatttcataatatgggtggaaactcaaaaatctcttagagcatcaccaacagtctccctatatgattcccaaaactgattttgagggattttagtccaaaaatcagctccaacagatcccctactctcctacccgagttttgaagttcccttctcctggttcctcgctccgtttatatgtgggcgcggaaggcgctcccaatcacgcaatcccgcctctctccttcgttcccgcgtgtgggagatagcgatctttctgcgcgtgaaagaaaaaaaaacggaattttctgttggtagtttaacagaagggcctacttttaagttttggggattgaatttaggctatctgttggatggaggagttttttcacttcctattttcggtttaggaaaccaaaaaacaaatttttaggagaaaattatagataatctgttggtgatgctcttataacctatggttgggtactgaaaattttttaggaagcaagagctgcaatccggaatactgaaaa

SEQ ID NO: 11669 - DNA, 962 bp, Oryza sativa
  Intron number 2 from transcript LOC_Os01g21780.1 (locus LO C_Os01g21780) derived from phytozome v7.0 (chr-ID Chr1; po s 12219764 to 12220725)
gtttttaggcgaggagacagggctgaggctgctcggtatatgtctttttttcgacctactgttttgtatcgtatgttaattagggtttagggtttaagttcaaccctactttctttcttctcactcctccgatcgacggcgtccttcgaagagatgagttctaagatatatgcttgtgctaattaatcaatctgcaggttgatcgaagtgtttgaattgagtacgttagtgctctagtttaaacgttaagttttaagctactttgttagagatactcacccataaaaataggagatcgatttaatttggctatgtattataggacaaacaactattatgccaaaatcctgtctagctacatatatgtagccaaaattttatggatattcatctttttctcctttttaattgatgaaaataactcttaagagagaaaatggttttagggacagagatcaataacttgagtttattttttctaaaaaacaaggcatgggagagcacgaaaccaacgtagcagcaacactaccagagatgggatggctcgtgcgcactaattagttttctaattgctgtgtgaaaaaatatacactactataatattttggtgaatgattgtgcaaagttgcatgcatagagtttctatcgagaatctatatatactcgagtcactccgtccctaaatatttaacgccgttaacttttttatatatttgaccgttcgtcttattaaaaaaaacttttataaatattattcaaaaaacttgagtagtagtagtatatttaacaatgaatcaaggaaaaaaataataattacttaagttttttaataagacgaacggtcaaacatgttttaaaaaatcaacggcgtcaaacctttagggacggagggaatacaggcaattaactattctgttttctttttttcacatactcgcgatcgatcgatccagtgctgagga

SEQ ID NO: 11670 - DNA, 689 bp, Oryza sativa; identical to SEQ ID NO: 9252
  Intron number 2 from transcript LOC_Os02g29774.2 (locus LO C_Os02g29774) derived from phytozome v7.0 (chr-ID Chr2; po s 17712943 to 17713631 reverse strand)

SEQ ID NO: 11671 - DNA, 886 bp, Oryza sativa
  Intron number 1 from transcript LOC_Os01g39250.1 (locus LO C_Os01g39250) derived from phytozome v7.0 (chr-ID Chr1; po s 22073484 to 22074369)
gcgtggaggcgcgtcctttcgcaggtgcgtttttcttccggcctttctccctccttttgtccgctgcgcgtctctcctcgcctcgtgggttgtggtcggggaggaggactcgatcttgcgcggtgggcgcggggaggcgggggagttggtgtcgtctcctgttaagagtagtaatcttgggagatgttcgcgtgggtgcccgtattggatggaagggttagatgctccgcgccgcgattaagctggctgtttcttgacctggattagcgtgatcctgttcgtgctggatgctttgtggttttagactaatccgttaaaaacagcaacgcaaccttgttttcatggtttggcgttctttcgcgtagtctaattgggggactcgatcgatcttagcgatgggctgggttttaggtggtgtgttttgatggttgcggtcgtgatgatgataaacttgggagtagtgacctcggcaaactgagccttcacgcgggtgcctataaatgtattggaacgctgcatgctctgcccgattagtttgatgttctttgatccaaccagtggtgatcctgtttatgtttgattcttgaggctttagactaatcgatttgaagcagaaaaggcctcttcatttcatttcacggtcctctatcttggtgtgttagcttgttgttgtaggcatgcgttttgtggaaaaagctaatttgagcatatcggtgctgcaatgatttgctttattgcactgtattttctgtttctcttctagtttttatatgcattacattaaatgagtatccgtgctgcaatgatttggtttatgacgcaaggttgcttcttttcttttttcataaaagcttgcgaggagtcgaccagcatccacaatctacaa

SEQ ID NO: 11672 - DNA, 1039 bp, Oryza sativa
  Intron number 1 from transcript LOC_Os01g70130.1 (locus LO C_Os01g70130) derived from phytozome v7.0 (chr-ID Chr1; po s 40588881 to 40589919 reverse strand)
cacgcagcgccgacgccttccacaaacttgagaaggtactctagctagctatagtttggttgcttggccttttcctgcaagaggaaggatcgagttgttgagacttgagacccaaacatttctattttttttccatctgcttttcgtttttgttcctttcagaatgccctactcctccgacgtgctcgatcaaatttgccaaaaaagatgctttatgtttttcttttcagatcttttgcggtttgagttcttgttgttctcaaatagaattctgcttgatgttcttctttttcaatacatgaagcctcacaattcgatttcgaagaagttgtcatagttcacaaacccaaatattttttttgctgcgcggagttgcagagaacgagatatcgagggaaatttagttatgtttcagcagttgaagaaagataaacaaaacccaaagcccaagaaccaaactgttagaatagagacttaagacagagatggacaaatccccaggtttcttgagatcagttacaaatcctcccaacttcaagccatccctttttgttcatagtttatatcctgtccgcgtcacaaagaattcgtaaatggcgatttggaaagtcaacttcgcgcaattgcgcaatctgtgttattctcttgaaaaaagaatcaaatgcactaattgtattctcaaccttatcctcactatatttcaaataaaaccgagttgacaaaattttctcctttctgaaaccgagtcaacaaaatcacgaaaagaatcgtccaaatctgcttattttgctcaggaagaacataacttccttacacactaatttcattctcaagcttattatcctcaaccatttcacaaaagccgagcctttcttcttctgaaaattgggtacaaatttcagtgtttgcgcaatcaaattcgtcatttcgctcagaattttttttatataaaaagcttctttttggttggagaaaaaagaaattcatgaaaagaaccatacaaatcttgctgcattttgctcatagagaaaagattcaa

SEQ ID NO: 11673 - DNA, 786 bp, Oryza sativa
  Intron number 1 from transcript LOC_Os03g07430.1 (locus LO C_Os03g07430) derived from phytozome v7.0 (chr-ID Chr3; po s 3768902 to 3769687 reverse strand)
gcgcctgtaagtttccttgatactctcttcgtcgaaattccaaatttgtcttgtatgtatttgtcactttcctatcatagctgtaaagctgatattggttgcttgggatgttgggttgtttgtcctactagatcgtggatttattgtgtgttgaattgggtttagtactttggtttgactatgttgaagataaaattttaagatcagagcatgtgttctgcaactagttatacctgttggcctagttttttttttttttttgcatgataattttttttagcctagcttgttagttgctgcttttgtgcagcttcacttttgtttttgttcctctttcttacttctatagagtaaacaaacaatagcatggatgcatggataaaatcatgttttctctagtccttgggaggcagaggtaatttttcgtgttgatcagactggattaacactatgaggtacatgtaactctcaatacctcccaaggaccaaaggaagactctgatagaacatagaaatagggttcattgaaatatcataagcttctattgttgtaaaaagggagtcggatattttctttaaatgaatggcaggaaaatctgacttggtagtcctgacgacctgaccatacatatgcagagttctgattgaatttgaacagaagcggtgcttttggatacattttgaatttcacattgctttgttaataacaagttgttcttatgcacatttcattaatttcttgttgagatagcagacccatcaaaagtgaccagcaaaacaagttta

SEQ ID NO: 11674 - DNA, 702 bp, Oryza sativa
  Intron number 2 from transcript LOC_Os01g54980.1 (locus LO C_Os01g54980) derived from phytozome v7.0 (chr-ID Chr1; po s 31612682 to 31613383)
gcacagcatctaaggtcatctgccaccacaaccaggttgcatctccaccgaatgtgaccccactttgatggcggcgagctttgctttggtagtgttgctgtcaatttggctgtgcatttctttaaggggttcatctacgatccattgtagcatgcagatgactttaaattacaaatgagttaatgcataagattctttgtttccaagtataagaaattgatatatcttttgttgaagtatgagtatgctgatttgttccagcaaaatatagcaatgtacaatattttttgtggataataatttgataatgctccatccaaatgtagtcatgcatcttcatcaaaatagattgtggctttgcatttttagtttgttcattactaattatgccccttgaaggtagtgacttctataaaattaatttataacgagcatgtttgtaacttgacattagatgaccttttacatgcagaatctgagactaaacgtatacactaatcacactaatcactactactgctgctatatattactgttgtaccaaaaatatacaagtgcatttgataaaggttatacaggtctggatcagaactgtatattactgttgcaccaaaaataaattaatgaactgtaattttctctgtattatttttggatgtgattactaaagctcgctatgtgtctgctctttttgcactatag

SEQ ID NO: 11675 - DNA, 892 bp, Oryza sativa
  Intron number 1 from transcript LOC_Os01g59510.1 (locus LO C_Os01g59510) derived from phytozome v7.0 (chr-ID Chr1; po s 34414197 to 34415088 reverse strand)
attcggaaggaccgggagccaccagcaaagtaagtgcttactacattatccatttcccccattgtgtgctggaaaatgtgacatttgggaatgtaggattacagtgctggtttcagtgttttgcgatcattcatttgaatcatgtgggtaactagtgatgctgcgtgaccttggcttgtgtaacattgttgcaatcatcaaagccacctaattggcatattgaaaattctagattggaatcaaaataacagcatagaggcttcaatacctgaatgtcgtctgtcggttagattgtgatcagtgttttcgcttgaaattagtctgcgtcctcagtttatcttctttggtaaccttgactcctgagtccgtatcattatgacgatttagttgctgatttgatcgagatccattttattgttcgttactctttctggagtattgttagttaacttctttgatacacttgcttgcttgagtataatattattaatgtgattcaatattacatgttgaatgttttgctgccttgttaatgtctgagttggctccatttttaagtgacgtaccgtataaagttataatggtcgagttacatccttatatgccaatattgttcgtacttttttacactgcattgttatttgctcatagtaagtgctaattcttggtggaagattttgttgcatgagaatatggagaatgcaacattaactttgcatactaataatggaacattcttttttgaatacttagtctgctacaacagtttgtgctactaacttatggacatgccagggtaactctttaagaaaaatggtctgggtagctctttaagcaaaatgccatttgtgttacagggctgtattctgggcactgtttggagctatatatt

SEQ ID NO: 11676 - DNA, 885 bp, Oryza sativa
  Intron number 3 from transcript LOC_Os01g08780.1 (locus LO C_Os01g08780) derived from phytozome v7.0 (chr-ID Chr1; po s 4404708 to 4405592 reverse strand)
cgaggagcggcggcgggccgacggcgatctcgccggtgagtcttatgtctatgtgacggtttgatgacattcccatgtttgcgtgttgctcttatcctaaaaaagatggggaggagaaaagtgcagctttggactgttcagagtcttcagagtgatagtgctgttgtttagtgctttgcaccaagcttccatcaaatcttgtctccaatcacaacaatggcttacctacaattgctcaaagtggcaccttttctttttggattttgggatccattcaactgacagtaccaaagttgggttttgtcccaaaatcttcttggcagtaaaaaaaaggttcaatttctagaagggaaaagaagctactagtacaaactctgtgttgtctggccaatgaaaatgtggaatccaaacaaatcaacattttgtactccaaaaaataacattaggaaactgaattaaaaaattatttttgagaaaatgttacattccaccattgctcttttttttaaagaaaaacttccattgcagaattggcgtttttttcaagctcaaggctcttttgaaacgcatggattttacagaatagaatataaatccttcaaaatgttgtgaggtctttatcttgtttggtttttattagtttgtatctgattttggttttgttactttggttacatactcactgtgcgagtttatttttgtgtgaaccttataataattggttgtaactcattgagtaaagacccgaatgttttattccatgattaaaaaattaatccttcaaaaatccctcaatttcaaaggaggtctcaaacaaaaataaggagaaaaaaaaagttgtacagagttgctcatcacaccctaaccatttgtaaaaatgcccag

SEQ ID NO: 11677 - DNA, 591 bp, Oryza sativa
  Intron number 1 from transcript LOC_Os01g34860.1 (locus LO C_Os01g34860) derived from phytozome v7.0 (chr-ID Chr1; po s 19244891 to 19245481 reverse strand)
ttcatagaaagattgaagctgcactaaggaaaagggttagtactttccattccatattatgtgctactttcaaagtattgctctctagttagactattgatttggataatgaaaatatatatttagtgcagaattatctatttcatattgtcattataactgctcttctctgcatattcaattcttacctgatgattgagataatgaaaggatctgttatcgccgaattatcatttcataatgtcattataaattaataattgcagttttatgcaagttcacttctttcctggttttagtatctatttagcatggaattatccatttcatgatgtcattatggttgcacttttctgcaagttcacttattccctaatgatttgattaggataatgatgaaaggatttgttcggtgtggaattacccatttcataatgccattgtagtttattttttttgcaagttcacttcttccctattgattaggataacaagagtatatgtttagtgtgtaattgtccttttcataatgtcattataattgccatttttctacaagttcacttctttcatggttgtagggatatctat

SEQ ID NO: 11678 - DNA, 713 bp, Oryza sativa; identical to SEQ ID NO: 11541
  Intron number 1 from transcript LOC_Os02g55670.2 (locus LO C_Os02g55670) derived from phytozome v7.0 (chr-ID Chr2; po s 34093549 to 34094261 reverse strand)

SEQ ID NO: 11679 - DNA, 669 bp, Oryza sativa
  Intron number 2 from transcript LOC_Os02g52650.1 (locus LO C_Os02g52650) derived from phytozome v7.0 (chr-ID Chr2; po s 32194615 to 32195283 reverse strand)
gcaggggttgctggcatccttgcgactgatgtaagtttcttacatcttctgtccattcctcgtccaatgtaatctctttgcagttattagccctgagaaatcataacactggaagtttggtttcacagatatggatagagaattttctgaattttcacagttgtgcaaataaatccgagaaaaaaagaatgatacgggggattatctaatcaggttgaaatagatattcagtggaaattaaatcaaacccaatataccaacattgtaacacaagaatttaatattattatttttaagggaaataatttaatattaaacatctgaatatatcggaacccaatttttttagtgcgctaaaagctaaaatatatatcaacgagccaaaataaaagggatggatatagattgatagcattcaaacagagcctgcccaattacaaaatccaaacaagaacatgatttgcttcttcttcttttctttttttgaggtagcttcatggtatgttatgctttcttatggcgcatggtctaaattggctgtgtgccctatggaagaggtcaggcatgtaaaacattttcattatctttaaaaaaagtggcgcatggtctaaataattgtcactgttctctgcagttgatacgtgtatcaggaatcaacaacctgccagt

SEQ ID NO: 11680 - DNA, 791 bp, Oryza sativa
  Intron number 1 from transcript LOC_Os03g25464.1 (locus LO C_Os03g25464) derived from phytozome v7.0 (chr-ID Chr3; po s 14548938 to 14549728 reverse strand)
gttgccatcgtcaccatcatctgtgctgtcgagtaataaaaacaacgataatttttagcgtcagtactgactctgaggagtagcaaatctatctattatatctataaagtaatagaaaaagaagcttccacgttcgctctcacggcctagaaaatcccacgttaatcgaaagaaaaaaagaaaaatagaaggaggagtactttgcaaagaacacaaacttagaaacggacaaaaaaaattcgaatcggacaaaaaaatacttggaaacggacaaaaaataaaaacctaagagctgaaacggacaaaaaaaacttggaaacggacaaaaaaacaaagagtaaacggacaaaaataacttggaaacggacaagaaagatagaaaaaagtgaaaacggacaagaaaaatagaaattcccatgctaatcaagaaaaagagaaaaaaaataaccattgggtcatagtagattcagattataacagtttagatttaatatagggtgtctttagattccaaaaaatttggcgaaaaacatcacatcaaatgtttggacacatgtatggagcattaaatgtggacgaaaaaatcaattgcacagtttacatgtaaattgcgagatgaatcttttgagtctaattatgccatgatttgataatgtgatgctacagtaaacatttactaatgacggattaattaggcttaataaattcgcctcgtattttacaggcagattctgtagtttgttttgttattagactatgtttaatacttcaaatgtgtgtcagtatatccg

SEQ ID NO: 11681 - DNA, 453 bp, Oryza sativa
  Intron number 3 from transcript LOC_Os02g06660.1 (locus LO C_Os02g06660) derived from phytozome v7.0 (chr-ID Chr2; po s 3351689 to 3352141)
tgcaccatcaaggcagacttcttgggcctctttaggtatttaatgtcctctcatctttctatgtttatccttcaaaaataaagtcaatacaacatatataaaggttaatcaaacaaaagattctaaaatatgaagttccattggtgcttttgaatatgccacttgagccatgcctgatataaaacgtcacaatcatccatagtagtctaattggtcctgaatcttcagaactaatcatttattactatataaacgttggaaatcttcttgatctattttctaaggacaagtacttcagtagtggcacaccacttacaccattttctttttaggttgcttgcatgtttacaaggtgcaatgaacagatatacagaaaaatcatcaaacatggtatccaaacattcatgatgaccaaataatattttttatgcagattttgaacagccaagaagc

SEQ ID NO: 11682 - DNA, 925 bp, Oryza sativa
  Intron number 1 from transcript LOC_Os01g64949.1 (locus LO C_Os01g64949) derived from phytozome v7.0 (chr-ID Chr1; po s 37694129 to 37695053 reverse strand)
ttgggcttgctctggatcgaccaagcctgtcacaggttaatgtctaactgcttaataattttttcttgtactataatgtatacacaccataagcatagatatattgtttagattgcaaatggaaatattaatgacattgaactgcagatcgagatgtaaaaaaagcccaattttgtgcctgagtgtttgctctatataaataaaagaaaatttcaagaaccaatccatatgttgcatatatttcagcagggcattgagactctcacttctctgtgtggatttcatatctgcacagaatgtttgccgaccataaactaaagcccacttctccttgatctcaaataaatgatgtaaccattggttatcattcaaattgtactcctctatcatcttgttccatgctgatatgaactaatcaacttcttcaaaatcaaaaacacacttgccaaaatcattcttaaatgtttttgaaccttggaaaatgtgactcaaatgtaccgcagcattttggtacatatgccaaacgcagagacgatgagttgagttgggaaagacagtcccaatagcattaatgatggctgcacattgatcagttaatattgtccttggttctttgcctgacatggctcttttgaaagtttcaaataaccattcaaatgttgatgttgtttcatcatacagtaacgctgctccaaaaacaactgtttgcttgtgatggtttacaccaacaaaaagagcaaatggcctaccataattatttgtcctgtatgttgtgtcaaagcatatgacatcacccaaataatcaaaatccaatactgatcttgcatctgcccaaaatatattagtcatcatctcatcttcatctacttgtattgcatagaagaatgaagggttttccatttgcttgtcctgtaggtactgaaga

SEQ ID NO: 11683 - DNA, 656 bp, Oryza sativa
  Intron number 1 from transcript LOC_Os01g66300.1 (locus LO C_Os01g66300) derived from phytozome v7.0 (chr-ID Chr1; po s 38508657 to 38509312)
agttctttgaggtattcttcctctgaaagagagaggtgggttcatgcttcgtgctcttgattttgttttatttttttattcctgcgattggtttcctctctatttttaggtcgagttttgtttaggtatttgatcctgtttctggaaatctttatgagggggtacgagattcgggtgccatcggtggagatttctgcgtaattctgaccttctggatgtgatgtttggcattgatcaatgctgccgatgttggtggaggagtgatctgtggaaatagggcttttcgtgattgcttgctgatagatttgcaagtgagggtagtagaagatggctattaggaatagatagagccattttttgtttgtttggctgatgcttgatgtaaaatttgtgtgtaatagattgctcattgttaagagccgcatgtactccatattcttttatggatcttgctgtataatttcttattaaagttcttatttttgagtttattacattgtgggcttatagttattttacggttctatattttagaatattgtttaattatttcaattctctcatggaaatagtaaagtcagagtaactagtgttatactgatgagattgtttgtgtggcagatatctggctgagttgcttgccgagaggcagaaat

SEQ ID NO: 11684 - DNA, 756 bp, Oryza sativa
  Intron number 2 from transcript LOC_Os01g66300.1 (locus LO C_Os01g66300) derived from phytozome v7.0 (chr-ID Chr1; po s 38509329 to 38510084)
agttcttcccttctgcaccaggctcttgaaccaaggtcggtttcctttgctttcgtgaatactgtaatgttgcttgtttatataggtccttaccagtttaaaaacctaatcttgttaatgccctgatgaagtagtatattttgttaccaccatttgctatctttagttcacctttgagccgtctaggttgcagattgttaagttatagtaaatgctatgacgtcttgatggtcacctcagctattttagggtcatacttttttttgcgggggttggtatcatactgttgatagatcagaactcagaagaagagtatattacaaaggatacatttggctagatgttcttttggtcagttcacttaccacatatattattgtctactcctgagataattcacaggaagttgatttttccagtagaggctacgttaacaatgcatgtaatcgacttcattatgtacgatagatgcatttatgtcaaccaaaaatttcatcgtaagaatgtccactctgcactgtattcatattctttaactgaatgaagtgttttatatccttactacagtagttcaagttattatacaaatctaacaatgtaacttgtaccgcccacccattccgtgatataggaagcagatatactgccactgccattgttaaactattataagcggctgcaccaacattttctcatcatgatcatgtttcatttgatgcagagattctgcgggcgtcttctttgccacctaaccat

SEQ ID NO: 11685 - DNA, 579 bp, Oryza sativa
  Intron number 2 from transcript LOC_Os02g58040.1 (locus LO C_Os02g58040) derived from phytozome v7.0 (chr-ID Chr2; po s 35528796 to 35529374 reverse strand)
gggactgtcacggggaccccttgtcttttggggatgtcccactgctttcaagtctaagcctcactagttgagtcagctcctttctaccgtcacctccataagcgacctgctcctgaattttgaaagcgaaaaggtactagctagctgcttgctgttccggtcatttttatgcttacgctttgtttcatactccctccgtattttaatgtataacgatgttgactttttaattaacatttgaccattcgttttatttaaaaaaattatgttattatcatttattttatcgtgacttgatttattatcaaatgttctttaagcattatataaatatttttatatttacacaaaaattttgaataagacgaattgtcaaatgttgattaaaaagtcaacggtgtcatgcattaaaatacggagggagtatttgtttacatggaagatcaaccttactgatctggctttagaataaagcccaaaatagagaaataaaaccaaaaagcatattaattctgaagcgtgtaagcattctgaattaatttaggttaccctcatgttgcagatttgggttcgtccaga

SEQ ID NO: 11686 - DNA, 676 bp, Oryza sativa
  Intron number 1 from transcript LOC_Os02g06280.1 (locus LO C_Os02g06280) derived from phytozome v7.0 (chr-ID Chr2; po s 3136904 to 3137579 reverse strand)
agaatagacaacctgaagtccctcgtttttgccgggtcagccaaagagtggccaaccaatttcattaagaattagtaaaaaaaaaacaaagtacaaaagtatagttacatcgacaaaagcatgtcgagcatggtccgaggcacagcctccgactggagggggagaaaccctgaaactgggcagactataccctctactcattacattgggaaaaaaaattccagcttccttccaaatgaaactggcagaacctgaagtacctcttgttcctatcacttgacaacaatgtttttgggaatatctcaaatgcaattcatgcactcaagaactgcaaaaagtcaacactttgattatgggaatcaacttcaagggcaaggccatgccagatggcataccaatagttgatggttttcagagtcttcaggttctttcggtaccttcttgctcgttgtctggaaaaaatacctcgttggctttcaaaactgctcaaaatggaagttttggatctatcctacaattaactcactggaccaatatcagactggatccatggcctgaacttcctctacttcatagatatatcaaacaacaatcttagaagggatctcccagtagcaataatggagatgccaatgctacaatcatttggatccaagggtatttgaacttcctgttt

SEQ ID NO: 11687 - DNA, 1056 bp, Oryza sativa
  Intron number 1 from transcript LOC_Os01g15740.1 (locus LO C_Os01g15740) derived from phytozome v7.0 (chr-ID Chr1; po s 8852884 to 8853939)
cctgacatcaatagagagaaaggagaaattagcaagtaaggactgagctgaccgtaggcgtccgacgtttttcatctgatcggacgttcgaagagaagcatttttgacattagtgtttactaatttaacacctataaaccggaggcaactccggcttggacgtccgatgtttgggggaaatcgggcgctgacgttagcgcccgatttacgtgcaaaaactactttaaactgattttaatcttaaattacttatccaaatcatgattctattgcaccattaaattcgttgcaattaaatcttcaaaacaagaccacacatggatatatttcgatgaaaaatttttttagcttattattgaattatttttaaatgttgcatgatgttccaccaagtatatcggaattgtttcactacatagatcgaaaatttttcactcgtttaaatcgggtgttgtttcaccttatataaaaataatgtttgagcaaatagcgaaagaatgtttcagttcactacaacatttgatccatacatagtgaaatattataagtatactaggtgataaatattttggtggaacaataatagggggtttccaaaatatgtgggttttttgttgcaatggactatttcagttcactgcaacattagatctatacatagtgaaacattgtgagtacactaggtgaaacatttttgatggaacaaaaaataaaccaaattcccttaataggggtttgcaacggcgcgttccataatatcaaaatccactgcaacatttgatccgtacatagtgaaacatcgcaggtacactagctgaaacatcgtaaaactactggttgaaatatcaaaagagatcatatgcaatattaaaaaaaatatcaatagaaaagctaaaatattttttatcaaaatataatcatgtgtggtcttgttgtaaagatttaattgcaacgaatacaacggtgtgatcggatcgtagattggataattagtttaagagaaaaattgttttaaaactagttaaaataggagcggcagaggcgcgggggcccgag

SEQ ID NO: 11688 - DNA, 989 bp, Oryza sativa
  Intron number 2 from transcript LOC_Os02g41820.1 (locus LO C_Os02g41820) derived from phytozome v7.0 (chr-ID Chr2; po s 25141826 to 25142814 reverse strand)
aacgtatgctaattagactcttgtatagccatgtaatcattagcaagttaaggccatgtaatcattagcaagttagggaaataacgttagggtgaagtgttgcatgagattacactaggatgtgatattggactattagtataagaacaatcacatggattatacaaaaggagtgtgtggtaattacttaatggtagatatgcatatctcatatcaatgatatggtgaaagaggaggggaaggctagttggaagtatgtgggacaaaagcccatattgtgaaaaatattttctacaaaatctcataggccaatcgtatgaaagggttgcatgtgaaatttacaaccaccttgctaggtccttaccaatagagaaatccatgtgcgcgtctggtccagtttgtccaccatggctcattttcaactacaatcaggcactctgcaactctatgtcgttgccaacatccaatacctgttacaacatctaccgtaaacccgatcagcatcgagaagagggatggtgaccttgatctcaagcaccacctagctcaaactaggcaagaggaaactggggacattggtcattagagatgcattggatctggtggcccaagatcctactacccatcacatgcggataggcccgccaccaagcacctatagtctcccgttgctgtcaaagcagagtaggtgcaatgcggtgaccatcgaagggatgggcctcgaggtgcaatgtggtgaccatcaaacgtgaagagaaggaagtcgcttagcctgagaagacgcctagtggtttggcgactatcgacaacaatggtggtggcacgatgtgaggagtgtatgggaaggaggggacataagagtgagttactgagatacgagggagttattaaggttacgttggctacggatgtgctgctagtttgcttttaccatcatttttttgttttttccagtttggccaaccaagacagatatattaaattcggtt

SEQ ID NO: 11689 - DNA, 676 bp, Oryza sativa
  Intron number 2 from transcript LOC_Os01g13280.1 (locus LO C_Os01g13280) derived from phytozome v7.0 (chr-ID Chr1; po s 7406949 to 7407624 reverse strand)
gttttgtgtgaagaagaaggattccaagaagaaaggtgctgtacagctgcactactgcccctatttaacatcatgtttacatcagctgcttctgtttgtttgattgatccaaggatgctttcctcttttgatggcatattattagttgtcttgtgtactctttcttccatgaattctgcattttttttaaaaaaaagtgaaaatattaatgtgttttccggtgaaaggatactgcagatcaaatgaggtggtcataatggattaaaattgttggataattgtgggtgctgtacattggtctggattgctataccagatgcttcaaagtataccaaaatgtgatgtgtaaagtataaacttaatcttgacaaattcagagtgctattagtgtggttggatacatccactggagagtgaactagtggatagtctggtgttatgaatccatgagtcttggttgtcaacactgttttgaagtttgttaaactgtataaagaaaaaacaaacttaatatttcattagcctgtatacccatctccctctgaagcacggagttctactcattttgtttcagaaagataaaatcaagtgttttgctcttctgcctggcgttttctaataaaagaatatttttcatgcaggcaaagccattaatcctctttgtaaaggtatcttt

SEQ ID NO: 11690 - DNA, 997 bp, Oryza sativa
  Intron number 5 from transcript LOC_Os01g52680.1 (locus LO C_Os01g52680) derived from phytozome v7.0 (chr-ID Chr1; po s 30277614 to 30278610 reverse strand)
ggcgacaagaggagcggtacgggctgtgcgacaaggtaaagaatataatcattctggctatttatcaagttgtactatcttcgtttgttagtcagttcattatcatcgtcatcatcaattttccctttcaaatggtcaaaaagaaatcttgtgtaaatgttcttcataggcaaatgttgacagatgataggcaaacactcgtgagaaacatagcacttggcagcaatttcatataagtattgaacccacaagtgcaaagaaagacattgatccaaacaggtagctaagttctttggtgttcttggtcctgtagttttgccttcagatcttaattcatctctaaattagagataaataagcaaatactagcctataagaatggttagctgagaaatcattggtttattttagttgacggatcaagatacatagctttccctccaaaaataaaaataagacagaaaatagatcgaaaaaccatggtagatttgttttaaatttattccccttttgttgctgtgcctggatatttggttctttttttcagactataggatacagtataaagatagacgcaagtataggactatagaagcaccattcagaggaagcgtgcatgccctactcatggtactacatacacaggcacagtagaccgatgctagacaagagcaatgctccattacaaggcataaagagacacaaagtatactaacctagaacatatagaccctttcatggaacccctttaccatggaagtggaatagctttcagttcgtgaaagcaactgcatcaacctacatgaaactatgcagggtagctcatgaagcctacctacagtggccgctagtagcttactattgggttacgtgggtagagaaagtgaccaaaactttttgtttgatttctcaaaccctcctttttgtttctttctgagattttgaaatgcttcagtattttagatgttgctctgtaattttcctgcacagattgctc

SEQ ID NO: 11691 - DNA, 752 bp, Oryza sativa
  Intron number 1 from transcript LOC_Os01g06470.1 (locus LO C_Os01g06470) derived from phytozome v7.0 (chr-ID Chr1; po s 3046548 to 3047299)
gctccagcaccaccgcgaagccctcaagtcgtcaggtccgcgctctccacccagtacctcttccagtttcctcttctcgcccgtccgcggccgctctggaatttcgtagaacatttggcgcgcgcggccgcctgctgctgctggaggctggagcccgagccgccccctttgagtgcgcgtgtgagtttcttcgagtgaaattgctcttgccttcctggaggagagagccgctcagactcttctccggtcaggtttgagtagttgctaggttggaccaacgaggggttaaaagcttaaaattaaggtcaacagtaggtcgatattatcttatacttctagatcgaatcatatgagtgactgttcttatgtggttggaaatctagctggttagcatggcttagccaacaatttggcatgcactggactgtgtctgacttgctgaaacttaggtgctgcgattgacctgtttttaagtttaaaagtgcacttcttctgtgattttaaagaatttaatctgatgtcaggaataaacatcccatagtcggttaattctgtgtcccctagccctactgaactaatctcatgtgaaactgcaacgggtgaaaaagacaaaatacagaataagcataatgcattttggttcatcatattcatagaaagctttgtgctagagcactagttattataacctttagttggttgggtttctggttgtagtgcgcaacacggcagctagccggaggcgggaacaa

SEQ ID NO: 11692 - DNA, 856 bp, Oryza sativa
  Intron number 1 from transcript LOC_Os02g51150.1 (locus LO C_Os02g51150) derived from phytozome v7.0 (chr-ID Chr2; po s 31294214 to 31295069)
ccttccaggtcgccgtctcgctcaccctcttcgcggtaatcctcctcgccgccggttatctcttccagcatgcgggcacccgagttattggttggatgaattgtttcattttttagctttgtggtaatctgatgcgaaacatgcagaatcgctttttttttattattattttccttcagaagtgcagaagcagagatgcaaatacttggggtgaattttgaagtaaaataggcaaattgttgtacatgcgtcttgattagattgttttggagaacaatgaagtaaaaattgcttcacacgcatttcgattagattgttttggcccaccatcaccgtgtagcactcaataaatcaatctttaaacctcagcatctgtgctaacatgcggaggataggagctaatcgcatcatgtattaagttttggtctgtaggtgtgttgtttggtaggatagctttggtgctacttaaaatacattttttgtattcacttcgtatggaaggaagctgcacataactaaaagaagaagtcatttgaatataatgagtagggagcaaagttatgatacttgtgttgattttgcttctgcgttgcttatcaagaaaatccgtgctttgttgctttctgactaagtagaaaaatatatttatgagatggcagctgctctatgctgattgaagtatatcaaaatggtgtccatggaaaataaactgatatgcatgaatgtccagttgtacgaatgcttatgtgtcttgaaccaatattgtatcttgacatttcttttggagtttacctaatagctttacttgtatggttctcaaactgttgaacttctatcgaactgcaggttattggtg

SEQ ID NO: 11693 - DNA, 1017 bp, Oryza sativa
  Intron number 1 from transcript LOC_Os01g13360.1 (locus LO C_Os01g13360) derived from phytozome v7.0 (chr-ID Chr1; po s 7445083 to 7446099 reverse strand)
tttaactaaacatatccatacccatcactttggtaagtatcatttatgtgccacactatatatgtatatgcacgtcatttattttattggccacttttctagaaatcttaacccccttttcttacaaattcatgtgttgatgggtatattctgtggatttttattattatttggcatttattatggaggatggattcgaaggtaacatgtagagtaaaatacattgttggtccttaaagttgttgtgtgatgtcatactagtccctaaactttgaaactttgaagatggagtttgagaggaggggggggggagagagagagagagagagagagagagagagagagagagagagatggtaaccacaccagtatccgaaggagtatttggtattttaataagattaggatgtgtacttttttctcaaagttaagggatcaacatggcaccatgcaacaagtttagggagcacttctagtgtattttaatctttacttaaatgtgggaaaattatgtcttttaagtacactgtaggtcttgtgggagctacttttatggatgtgcctttttgtgtggcaacactatgttcaatttatttaggatattgtgcttatgtagtgtgattaaaatgatcaaatcaaaattgtgattgatgtcctaacacatactcctttgtcccaaaaaaaccccccaatcctagggatgtatctggacaacgtgtatgtctagatatatatctaggattggatttttttttttggacggatggagtactactttaattaatttcacaataactatatttggaattcgaaatgcaaagttcctttatctatgttcttacaactatttctcttcatgtacttgatttctggagatggcttccaagatattgtaattaaaaacacatccctcacagcttccatagacgctactaaagtttgtggtgcatatcaaagaaactattgttgacaagagcatggcatcaacaggcattgcagtgagcccaagcaacaacg

SEQ ID NO: 11694 - DNA, 590 bp, Oryza sativa
  Intron number 1 from transcript LOC_Os02g01520.1 (locus LO C_Os02g01520) derived from phytozome v7.0 (chr-ID Chr2; po s 300892 to 301481)
cgtcgccatcaacaaggtcacatcttctcctctacatttatttcattatttatttattcaattggacttggtcctagatttttcctattcagagtttcagatctaggagtagcagcttgttatctcaagcttgcgacgtgaggtttgcgcaccgatttgcacaaatccgtcatgtttctgatatgcaaagatctaatatacggagtacttaactactactccctccgtcgttttgactttaagattatggacaaacataataatatttacagtactaagttagttccatcaaaccaataattaaatatattttcataataattttgttttgggttaaaaatgttactacctttttctataaacttgatcaaatttaaatagtttgacttttaccaaagtcaaaacaacttataaactgaaacggaggtgtatttccgatggcattttgtaagggaagccatacccataaatgtgattagcaattgctagtaacagatagtagatcgtcaattttcgtgtgcgctgtactgacaacacaacactggttttctcaaggcgtttgcaagcagctacgccaagggcaagagaaa

SEQ ID NO: 11695 - DNA, 956 bp, Oryza sativa
  Intron number 1 from transcript LOC_Os03g17410.1 (locus LO C_Os03g17410) derived from phytozome v7.0 (chr-ID Chr3; po s 9683806 to 9684761 reverse strand)
gcggagctgatctctcggctttaggttttgttcaggtacacgggaaatatctcatcctttttgtttcgtcgccgccgccgcaagtggcgtcggctctgtttgtgaccgggggggaaggggctgattagatttgtcccggggtttcgctggatcgatcattgttttgagattttttttttgcttttttttgggggattttggctgctggttttgatcctttctattggtgcgtgatgcgggatgagtgttgttgcggttattcttcaacggattggtgaattcgtagtggtatatttggatgcttccctttcacgcaagcgcgtttgtggggcaagcctttttttttttgcttcagcacggcgacggctagctttgagccttgagtagttttgctattatgccaccgccgccacgcttttgctgataattggtagcgctagccgccaggtgaatcgcggctgattgatttcatgctttgttcctctgattacgatcttgctctgttgcatgctgtcttgattaaaccgaattctagtgtaaaaaggaatcacttttgcttggaagattaatctactagagttagtgtttgagtttatctcctactctggttgtgccattgtcattaacaattgatagatttgtctgttgctttgctttgattcctctagaacactttaaaatactttatttaaagtgttcctttattgatactgtattgaatcatataattcagtagtatagtagattattctctttggtctgcaaagagacaacgcattatgctagtatttaggtattcccgtgttatgatctgtcgtaccatcagctcatttattgccggttggtacgcatcacttgagcgttttcgtctgttcttgttattcttggtttcttccgggtactgaccgcggtttgtaccagaggacaccgaatattggctggtggtccacgccaag

SEQ ID NO: 11696 - DNA, 757 bp, Oryza sativa
  Intron number 1 from transcript LOC_Os03g18620.1 (locus LO C_Os03g18620) derived from phytozome v7.0 (chr-ID Chr3; po s 10428134 to 10428890)
tacccgcccatccaccaggtccgtgattcttggggttcttgtgtttctttgttggatctgcactcaccgcacgtcgtcgtcggtggggattattggggttcctgcgagttggagccgacatcagaaatattttcgggaatacaccagaggtgcatttttttctttactgacatcagaaacatagtgagctgattttgagttggcctttccagtccaactgaagacagaagatagaataacataccatgcctaacttaaagagagaaaaggcaccacgataaagaaactaaaactattattaggttattagctgcagtagtctacatggactggattccccaagttagtttcagcctgtcatattctgaatattaaaatgcatggcgccattcaaccatccataaataacctgtgttttttcagatcaattcagagcccttttgagtagcaagattcataaggagaatgtaatattttcagtcgagattcgagaaagacaagtgtgtgcaatgcttgaaataaacattcaccagacttgcagtatgacaatgggaaagcccataaacaaattgagcatttcagcttgacccaaatataatagtagtagtacttcgtatgttttagagtcgaaatacaaaagagattgatggagtattactgctactactactaccactgctagttatttgcattctgattgcaggtttatatattaattgcaggtttttcacatttaagctaagtacttggaaatagg

SEQ ID NO: 11697 - DNA, 1000 bp, Oryza sativa
  Intron number 2 from transcript LOC_Os03g18620.1 (locus LO C_Os03g18620) derived from phytozome v7.0 (chr-ID Chr3; po s 10428955 to 10429954)
aaggccaaaatctaggacaaaactgactaaaaacggtacacctctctgtcccttctatccaatgatgtttctcctgtgtaattagcatgtttctcctgtgatatatggtgaactgccgtgccctccttgtctgaacattttgttgtgatgtgagagtatttatttagcttggtaatcatgcctgactcagtatctagatcgatcttgacagccgtatatctgagttggattagctgaggtatgagattgggctcacacatgcataactagatcacaatgcatttttgttgcaatactagtagtagtacttcgtatgttttagagtagaaatacaatttgagaattcacttgattaggatgtcctttctttttcatggcattctcatatagagacaaactaggacaagtgtagttttcttaacatcatgatactaggacttgtgtttctttcaaagtatttatagtttatttgtaccttatgttgtcttaggaagtttgcaagtatgtctgtaaatgtatctgagggttctgggaccggtgattctttagaatatttgtccttgaaagtatcacgtgataaaagatcaaaagtgtgggagttctgtgagcaagatttagtagtaacatatggtgtcccaaaggcggtgtgtaggtattgctcagtggaattaacttgtcacaaaaaatctagaactagtagccttagagcacatattgttgagtcgtcaatcaaaatcccttatatttagggacggagggagtaggtcttaggtcttccaatcagtgattctgtgggctttaggcgtttagtattttcttaataccacgacaaccttaaaaatgtttacattttagaacggataaagtattatttctcaaggctactaatcagtactatcgttagaagagttttttttttaaaagaggaagtatgtttcacgagtcctattcacgattatataaacatgtacagtacagtagcctcccggcccactctgag

SEQ ID NO: 11698 - DNA, 654 bp, Oryza sativa
  Intron number 1 from transcript LOC_Os01g25150.1 (locus LO C_Os01g25150) derived from phytozome v7.0 (chr-ID Chr1; po s 14190634 to 14191287 reverse strand)
gtatgtttttaacatccactcttctacttcaattatctttcagttaaatgtatgtaacatttccatgatctatgccaagtatgtctcctgtactaaaggggtaagaaattttggtgaacagtgatgaactttcaaaaaacttctaaagagggtcaattttaagtatactctgcaaaagtatctttgtatgaggtttttgttgcaatgatggaggaataactcgactttgttttagtgactctaaaaccgttggcatgaactgaaatagatgctgctgtaatatagagaattcatactgagtttgaatcatagactcctgactttggctttcgttgtttttctattatttagtactcgtagaaggtagtagacacacattttctctaagatgagcataagaaataattattatagtaacattctaaaattgttaactactatatctaaatatccaatgatataaattagcttataatgaccaagctttagagaaggatgacagtgttttagataggattatttgtagtgcacgggacagtaccatatttttttttaataaagtatctattgatttgtgggtatatatatatggttctcattatctaaaaaaatcttgactgggtgttcatatatgcctcgtgctttatctgaagg

SEQ ID NO: 11699 - DNA, 693 bp, Oryza sativa
  Intron number 1 from transcript LOC_Os01g05340.1 (locus LO C_Os01g05340) derived from phytozome v7.0 (chr-ID Chr1; po s 2519692 to 2520384)
cctatccttgtggcagctctacactgccgctgctggtaacttctgatcccgtacgtctcgtcggcccgcgccctacatcactgccgcgcccgccgcttcctccatcagcccatcggagacaacacaaatagctagcctagtagtttgtttcgtgctgattggaatgttttctttgctagttggcctacgttgttttttttaatgaatcggtgagccgccattttcattgcatagaggagaagtaaattttacaagtatgaaggaaaactttacttcttctctattcaatgtagaaattgatggcttgttcattcgttaaaaaaaaacagcatctacgttgtgctagagtatacgaatagaatagaatcgaattgtatccggtttgttatgttaagatagtattagttttcttatctatctctctgagtttgctagagatccgatgtatgtaacctatataaattggtccctgaggctcaatataatgtgtgtaaatatatatttacagtattttctctcttcctatactactcaaacgtgttgcgcttgtgtgtatcaccatatatccatttgaatatttggctatattaattccagctgctcaagcacatttgggaagaattaaagggagtttttttttttgttttttctgattcagccggccgggtgataggttttcattattttgtttct

SEQ ID NO: 11700 - DNA, 658 bp, Oryza sativa
  Intron number 1 from transcript LOC_Os01g08280.1 (locus LO C_Os01g08280) derived from phytozome v7.0 (chr-ID Chr1; po s 4058862 to 4059519)
gccccatcgtcctacaggttccgatgacacccctcttttgtttcgatattagctcagtaattctaattaattttattcctggtaaaaaaaataagggaaagaaatgcctcatttaggaacagttcttagtctgctattgattctgtggctggggattgtatccagattgtggaagcggccagagtttgtagccgagtagactgacgaaaagatgttcttggctgttcttgtatggatatgtgtcaggcctttgtgaaacgatggtgttcttggctggacataaggttgagaatttgtgtctggatgctagggaatggccttacttaagatcgtttcaatcatgtggctggggcttgcgttgtatcattctcagtttgtggatgggtcgggttttgtatccgagcagatgaaaaagatgttcttggctgttccagggtggctatctgaacgtcctctgtggaacaatgatgtctagttgtctatctcaatggtgaaacatgggcttgtctttcctgatcatgattgaacctacatctagtgtttgtggagctgaactgttgtccttgtgttttggatttttttttttactgtttgatccctgcttaatgcaaacttgtttgcaggtagtatcagtaagagatatatatagaagcatcat

SEQ ID NO: 11701 - DNA, 767 bp, Oryza sativa
  Intron number 2 from transcript LOC_Os02g08270.1 (locus LO C_Os02g08270) derived from phytozome v7.0 (chr-ID Chr2; po s 4391731 to 4392497 reverse strand)
aggtgagagcacacttatcatattttttaaaagtttccatagaacgaatattggaataaatcttgaaatgatatgaaagtaatagttttttttctcctacatggctgttagatatttattatataaaaacaaaattctacttctcatcatctacattgatttagatcaactacattaattgttgtagtctagacaatctccactttcttcccatattataatatgataattcttgtaaccagtaagagcgactgtgatggcccttttacgctatattttaataatataataattattacacagtttgataatatcatatcgtatatttcgtgtttgcattattctatagccatttgcacatgttttaaaaccttaattgcggacacttggctagattgggcggtgtttgacttaatttttggagtgctgatttgagcaccactcctacctctcaacttgacactgaaaatattctcaaaaaaaaaaaaccttgacactgaaaatgtgtacttctgggttaatgcatggcatagcactgcatactaatcatatgcgtactattattatttctccctgtgatcactttctcttcctggccaagtaacaaaacaagtgtctagtattttcaaaagaaatatttagatatgcaatacctaacaaaagatatgtttgtaccttaatatataattaatcaatcgattgacctgaaaatgtaagttgatgtgtgcttaattacttaattgaattaggttttggaggtgcctcca

SEQ ID NO: 11702 - DNA, 522 bp, Oryza sativa
  Intron number 1 from transcript LOC_Os02g08270.1 (locus LO C_Os02g08270) derived from phytozome v7.0 (chr-ID Chr2; po s 4392626 to 4393147 reverse strand)
gcaagcgcatcctcggcatctgcttcggccaccaggttaatctaccaacatatactcctcacattcaaaataaaaaaaaacaacttttagcctttaaaatttgttttaaaatataataacttatccgcctacatttgttttctttaaccaatcgaaactttccaccattcaaaatttatattcgccttctcttcccaaccaaatttcaccagctgttttaatacccgtgttcaactctaaaactttttgagacggaggtagttatcattttcatatatatcaataaattgtacacaaattagtgtgttataattattccaattttcatattcttggagaatatatgaaagacagcgcaaacaaacaacttatgcagatgtagaaatgctaatattttggaatgaactgggcatttgaaggttaatcttcatgaaaatattaataaatattgagaattaagttttttttcttgtgtgtggttaattaggtattgtgtcgagcattgggtggtagaattggcaa

SEQ ID NO: 11703 - DNA, 444 bp, Oryza sativa
  Intron number 3 from transcript LOC_Os01g59840.1 (locus LO C_Os01g59840) derived from phytozome v7.0 (chr-ID Chr1; po s 34608850 to 34609293 reverse strand)
ggtaccacaaatacaaggtacacgatttaatttcttaggtggagtagaagctaggtttgacttcggaagattgcccttttatatattttccttgtcttgcttacatgtgaatgagtctcgccattgtagcaaaatgttgtgtttttgcaatatttttcctgaagaaggaactaaacataggaacaaggttcctcgagttccactttgaatgtttcacctttttcttctttctggtagaacttaaggttgtgtttagttcacaccaaatttggaaatttggttaaaattggaacgatgtgacagaaaatttagaagtttgtgtgtgtaggaaagttttgatgtgatggaaaagttggaagtttgaagaaaaattttacaactaaacacagcctaagttgagaactttggcttgtaataattttgcttgcctgattttttagggtg

SEQ ID NO: 11704 - DNA, 945 bp, Oryza sativa
  Intron number 3 from transcript LOC_Os02g33140.1 (locus LO C_Os02g33140) derived from phytozome v7.0 (chr-ID Chr2; po s 19706238 to 19707182 reverse strand)
tctgtccgggagggagacgctcgtccgcatcactggtaaaatcctcccctcctaagccccttccccgtttatctcgctctctatgccgatgtgatgcattaggggttgcttattgtctgaaatggtggagacaatttgtgtttttgagttcatgtcgcgatgttttttttttgctcatttgttaagcacggcccttaagatcgcctccctttcgtcacgtgggagcgtttcgagtcatagctgtgctaaagtaacaatgagggacctcggagtttttctttggtccttccctcttcctgttttgttctaggtatctccatctcagcttgtgtatcccttggtgtggctcggacttttatcagtcgcaattttgtgctgattgcctgagctgttcaccctgggaagcctcggtgaattgaatggagatgtctatattatgggagtggacatggtttatttttcttcaagaatgtatttttatttgcccacgctctgtgtgtatatataacttattaccgcattttctgttagacgtaattattgtaggatgttgtgaatatatcagttgagattggtaaaaagttcatgatagcaatcaggcagtttcacagttaatttaaattatcgtgtagtcattagaaaatagttgtttttgttttcagagaaatggtctcatttttgtctttactgtggatgttgctgtcattttctttataaacttgaattatttctgtggttatctttgttaaccggttgtgcgacggacttaagttaaatgggtgaaatcacaacttaattttacatgcttaagattaatatcagattgaccatttaatataatttatatattcattctagatgtgtcttttgtaggctgttatcattttctttgttataacaatgttcagttgttttaatatgttaattgtttgttgtcaaggtggc

SEQ ID NO: 11705 - DNA, 669 bp, Oryza sativa
  Intron number 1 from transcript LOC_Os01g41300.1 (locus LO C_Os01g41300) derived from phytozome v7.0 (chr-ID Chr1; po s 23366616 to 23367284)
gcggcaaccttcgcggcggtgagcttgtcctccggcatccatggagcagcggcgggcatccaaggggacggtggcaccgagcatgcctctctccgagttttcatcttcttcaccggcggaaggagcggccaccgcccgttgtttccgttctcaatctagaaaccaccgagagccacctttttttccatttgacggatccagaaggagaagaaagctgccaggatcaacaacaccatcaatcaattatttttcctggttttggttggacgttgtcctgatatttgatctcaccgatgtattattgtattatttgtgtgtaattagtttctaatacatgtgattcctatatgattagatgcatccggacatcttgcaaaaaaattgcaatctacatatcagtatattgacaattaaaaaagtactatatgtaatgtttggagtaaaatatttactatttgtaatttgtcagtaaaagtaactaaatgatgtatgatagttgaatctgaccatacctaaaagaaacataaattccattccctgtgtagagaaaactaaatttaggtgtacaagcattattttcggatcaaggactctattcattatccaccacaacaggatgtatcgcatgaaaaaaaattccgcttatttcggggcctcctctaacagctt

SEQ ID NO: 11706 - DNA, 933 bp, Oryza sativa
  Intron number 2 from transcript LOC_Os01g32130.1 (locus LO C_Os01g32130) derived from phytozome v7.0 (chr-ID Chr1; po s 17583096 to 17584028)
aaccttctgcaggtattctgcgttcctgctgataaatctcagctttttgtgtggacttctctcattcgatttggcgtatgagagatctggatgccatcgttattgttatttcttttgagatttgcaggagttttgtaagaacgtgaattgtggtttagattaagttgcattttcttgctcttctaaggacctctattatgttagatttcgtatgtttggctgtttatagcatatggaggctacttgcctcttgcatttatattctgcatacaaaatattgggcattgcgtaatttaacatcgctatctctgttcttttattccttttcattataattttgtagaagtatgatcatgcagtgttatgtgtaactagcatttcttttacatagtctctctatatatcggtgaaccaccactgttagtttgtgtttccttcagtgtttgtggtgatttatgacacaaaaattaagtgcctagctaatgtggatgtagttgtcttaagctcagggatctcattttggtactccatggtttagctttttcaaaagtgtactgtggctagtattaattacctgcccccagcgtccttgtgcttcatttagttcaatctgggatctgatcactttttatctttctgatggtcatgtggtacacttcttatcattttggtatcaatagttcctgcctggctgcctatcataccaatttcagtatttgcatggaataatgagttaatgactgttagcaaagattcatatctcatttctcaatgaaagctcattaatcacttggcctgaagcattctataccaaatcatcctatggaatgtgtttgtaagaataatcccgtgttatgaatttattctgaaatgttgccgcaagataagtctctaaaatgaattgtttactgatggctttgctttcagatagtg

SEQ ID NO: 11707 - DNA, 1033 bp, Oryza sativa
  Intron number 1 from transcript LOC_Os02g20410.1 (locus LO C_Os02g20410) derived from phytozome v7.0 (chr-ID Chr2; po s 12033222 to 12034254 reverse strand)
gcgccaggcagggcaagagcttcatccttaaccaggttcgctctcgcccccctcttctttttaccaatggttgaacaaatctgtcctgtggatcggcactggaacactagtaggatcctgataagaatctggaagaaataaatatcagttcgaggcactgtaggggacactggtagggaaggttggggtcttggttggcggcgtaaacatttcatttagaaataggaagaaaagacaacatttcgtgggttgtatgtctcgtgcagaaattgcattgcaaaagtaaaacttttgcttaccgtgttttttcttctcaataaactttccacctgcgggaatcagttttggtccctgttttttcttctttccgctatacattctttcagaaccgtgataaaggttgggtgtattaaggcatgcaactttcctaaataatcaaagagggccaacttttcttatgcattgtgtgtactaccatattggcgtattgctgcccggttactttggtcattgattcgatgaatttatggatgactgatgacacttacaagattctcctgaggatattttatatttgttagaccttaacattgattctggtctagtggaccatgaaacatcctttggtatttatataatgacttattaaggattatgatgtcttgaaaataaaatcggaaaggaagatggactaagtgtggtatattttctattttgtggaattgatgtatgctaacaaggtttaccataagtttcattttttttgggtgtgaaatgactgcagatgtccttttactcctatcagagcatgacctgtaaaagtatttctattagactttgtagtttggagaagagtctgtttttgacatctcaatttcttgcatttgaagcctcgttagcaaattcatatatatcaagattttgattacggagtactttatataccagctaattatcttgtcaaggagtaatctgctctatttctgtgtttttgacagcttctaggaagaagcagcggatttcaagtagcaag

SEQ ID NO: 11708 - DNA, 455 bp, Oryza sativa
  Intron number 2 from transcript LOC_Os03g16470.3 (locus LO C_Os03g16470) derived from phytozome v7.0 (chr-ID Chr3; po s 9079179 to 9079633)
attgctggtacagcacttcgtcttccttttccagtgtgagcacatcttccactgtctaacttagggcttgtttgatttaccagtactcgtacttttttttttttggaaaccaagtttgatagcagtaaaaatgtcaaattgggtctaacttcagaacactctaccattttgtttccattactactgaatatgtggttgcttggaccttggagtattcaaccttgtgacattctacattagggaatgctagaataggaattgattaagtaaatatagcaattagttgcataagatactaaacctctcttttctttaacaagtgtggggaatacatcttcgttggatgttctttagatgaatgagggcacgtgcataaatgaatccattgtaattagtttcattaggttatttgtgcactcacagggttcctctgttactgcagatcgatattcgac

SEQ ID NO: 11709 - DNA, 485 bp, Oryza sativa
  Intron number 1 from transcript LOC_Os02g35090.1 (locus LO C_Os02g35090) derived from phytozome v7.0 (chr-ID Chr2; po s 21054719 to 21055203 reverse strand)
acaccgccggccaaaccaacatctactccgtcgaggtattttcctttttctttctttctttttttttgtatttttcctatgtcccataaaaaaacgtactcacatacatagtactccacatcgtaacatcacgaatctgaacatgttcctctgttcaaattcattctagttaaggtgtgtctagtatcaggtttgtttttgaaagttcaattcagtttcatctcgttttgttcaaaatttcggattgattaaactatcggtctgttcgtgccgggcagcccgggcagccgacaggcccataaatttcgcgagcgtattaaatgcggtatagaatttttttaaaaaaaatcggattaattcaaatttttcggatttttcctgcgtattaaatgtggtcaagaaatatcttctttttatttttcttctgacctgaattggttgtgggcgaagccgacggtgtacgtggcggagagcgccatcagctc

SEQ ID NO: 11710 - DNA, 716 bp, Oryza sativa
  Intron number 1 from transcript LOC_Os02g10290.1 (locus LO C_Os02g10290) derived from phytozome v7.0 (chr-ID Chr2; po s 5404834 to 5405549)
cgccgccgccgccgcggtgatcaccggcggccgaggtaagccgccgctctgacgctccctcttgacggacggcgcgtttggtctcgccgcctttggcgttccgtgtttttatcttcgcccggattccggatggattttgattttgattttttttttgtttctgtttcccccaaatacccggggccttgtttgggttcgtggagataaacgcgtagtaggcggagttgctgcgggcgccgcctcttttttttcttgttcctcttttgtcaaatggacagttcgttggttgtcgttggcgcggtggagttggatttgtgggatttttttttctcgggcttaatgcaagtggtggttaaacaatttgcttcaacgctatcactgaacttagaatgtaccaaaaagatccaaacagtttgatttaatgttattttactaacaatttgggggggaggctgcacctgttagtgcttaccaggactatacttttggggatttttaaggagtttacatctgtactgagttcataattatctgtactgagttcataattatctgtaccgagttcataattcatagttcaagttgtacttgcagtacagaagtttgtgctggattatgagaagctattattatatcttaccaattggctgtaaaatatagcatggacatatgaccatctaaatttatgttggtttttggttgttcctgggacaggg

SEQ ID NO: 11711 - DNA, 913 bp, Oryza sativa
  Intron number 2 from transcript LOC_Os02g10290.1 (locus LO C_Os02g10290) derived from phytozome v7.0 (chr-ID Chr2; po s 5405776 to 5406688)
aagctgttgtccagtacagaccagaggaagccgatgtaagattgccttgagctgacggtcttgttctcaactgcactagatttccccagcatgggagggacaattttgggtgtttctcatcatggggcaaaataggatttaggattcaatgcatatctatattgtccttattcaagttattgtgggccagttctctatttgactaggagtatatgtctgcaactctgcatgaatttaattccagcaatatggtggttttgaattccaggagctgaattttatcctgtagatgtcatgatttaggtaattaggatacatgaaaattttgatttcagctttatattggtcattcatataaggtccacgagtaagtactacgaaccagtgactatcttaacaatcttttttgtcagcgtgggccaaacccttgacaatgactgtgcaatcatatgatgacctttatacctcatcgagttcatgttctccaggcctggaatattgaattacttcgcaatcatatgatcttttttacctcttactcagaaatttttactagcagtttggttcgaatcagtatttatcaaggttctaaaaattggtaactggtacttgacagttagtgaccatatagcctgtgatgtcaagttcaggctcatgtagtctcatgttctttgtatacagttgccatcatgcaattgccagttaggctgtatagtcactaatgagtgcaccaactggtaacttttgtctgcatggacatgctttcagttcactaaactcatgtatatttcaagttgcactcatgaagtaatgacaggatattttacggtttggcattattttccatctgttctcagtttggattcttattcttccaggcaagaaccataaaagaagctatcgaaggcctcaa

SEQ ID NO: 11712 - DNA, 1034 bp, Oryza sativa
  Intron number 3 from transcript LOC_Os02g15310.1 (locus LO C_Os02g15310) derived from phytozome v7.0 (chr-ID Chr2; po s 8555593 to 8556626 reverse strand)
tttacctgccaaaggattattataccgggtaaagtgttgctaatgactctgttgattggtttgttgattggcaatcgccaaaaaaatgtttgttataatgttaggatagtaaatgtagatagtctgtatgcttctctgtattgtcgctgcaataagcttacaagcttttctaaagttattcaatagactggaaataaaaaaaatcacaacggaggtttggcgtgaacattttccagcttcagtgtggtatcaattactgcagtcaccttttcatttagctccattaattgaaatgcttgaatcatttttttaatctgatgatgtgtttagtaatttttttcatgtcactagagcatgtaattcactaatgtggtaacccatatttttgctttctttctcctacgcacttaatatcataagaagtttttccctgaaactattcccagggtcgtactggattgaagtaaatacgatgttgaagaatgcttttcaatattcctaacaattgatttgtttggcaagatagagtcttgtccgaatgaagaagttcttctatgaagacaagatttgactcattgagaaaattaatttcacgaagagaagataagagagttgtactgggtggtgcatgcgaagataaaagtgagagaagttgatttcaagttctatcttgacttttcgcacattcgggaacttgaagcgaatgcttctgtgaagatgctctttatgaggatcaccatacgtagtgttatacaagaaattcagataatagagcctggacatctaactgctttttgcaacacttgcttcccttttgctggaaatgttcgtaagtttttaactgtgcttcactgagaatcatagagggtacattgagttttgaactgtgatggtaacatggcagacacacactacacatgaacattttgcaccttcttatttgttagttttaccatcaattttcctcaaacaactgtctcataaaatatacatatacagggaaccgcgagggtttgcattcgtggagtttgttg

SEQ ID NO: 11713 - DNA, 865 bp, Oryza sativa
  Intron number 1 from transcript LOC_Os01g62920.1 (locus LO C_Os01g62920) derived from phytozome v7.0 (chr-ID Chr1; po s 36446794 to 36447658 reverse strand)
gaagaggtgagtgagctccgctagccgcctcaattcctccttccaggtttcttgtggcgaccatctttttcaccttgtttcggcgttacaattatcgctactcctgggtggagaagaatcttgcacatagtggtcatgtcaccgatgcagttgcggattgcttttatttactgtggttgcatgtgcttttgatttgatgatgatttcctttgctgctgatacatcttttgatttgttctctctcttctttttcctcgagtggtttgagcttgtacagttctgcactgttcatgatgaatagtagtgttcctccgcgtcttatcaccaaagattgtattttgatcggctgtttagcactactgtgagtgcttgaaaagatagtcctccacatgaaattagaactaaccgtcctttcaaagtcttgagacatgacccatgggcgatgccagatgccattaattctctcttgttggtgtcctctggtgagaatagtggcgctgctaaaagcttcgagctttgaaatgcgctctcctctacgatgtcggagcatggcaattaggagtatactacatgagcatctacgtaggagtacaatgtagaaagcttctatttttggaaccctctgtaaggcaattttgtttgcctgtgttcttcaataacatctctctcccataattgggagctacgcttgctttgttcgtgtcatatccacatgaaaacaaaagcacactgcttccttttcctaacatggatatctttttatctaatcattctttgttggtagattatctctcatcgaattctaacccaacagcaatatctttttttaggtttgcaagaggtaccggcagtactaccagcaggt

SEQ ID NO: 11714 - DNA, 498 bp, Oryza sativa
  Intron number 1 from transcript LOC_Os01g34930.1 (locus LO C_Os01g34930) derived from phytozome v7.0 (chr-ID Chr1; po s 19304216 to 19304713 reverse strand)
acttcactacagttggtttctacttcaatagtgtatgaatcttattctttgacacatcaacttagtaacatataaagtttctggagctgcaatagctgattggttcactttgtggtttgtaaagcacgacaacaaacaagatatgaactagaaaaatcttgccactaaaaccaataaccaaccagtattattgcaaaaaaaacaaaaagtcccaggaagatatttggatgtgaagttaagtttgaggcacatttagcatgttggcccaataattatgctcccttatctttgcattccgtttgaggagataaattctctacaaagaaaacaacctagtagggaaataaaatggtctatattgttcttcatgatttttaaagcagtgaccagcagattataaagaactaaaaaatgtgacataaggtttgtacttttgtacaaagtgtgctaacgcattttatggctttgattactttcaggtggctgttcttacagtgt

SEQ ID NO: 11715 - DNA, 794 bp, Oryza sativa
  Intron number 1 from transcript LOC_Os01g12660.1 (locus LO C_Os01g12660) derived from phytozome v7.0 (chr-ID Chr1; po s 6974547 to 6975340 reverse strand)
agggtcaccttcgacgggttcccctactacctcaggtgattaacatcaacaacgtcttttttttcctcccgttcatcgagctatgcaactgttccgtcaccttgcatcgtcagatttttttttttaggattttttcccctttgttctgtcctgtataggggatatgtttttccctccgttcttatgatcttatcatgcacaaataattctgagtctgtgatatgcaagcaacagatttacagatgaactgtgtagtttggcaaattagaaaaagagagagagagagagagagaaatgttttgaaaggtttcaacaatcttttggctcggagatcacaaaatgaacgctctgattgaagacagtggcactgctatatttctgtagattagcttgttcataattttgcgtgggaggcgaagagagacaaccctgcttttctgaaatgttcctctttgtgattgaaaaatggcagccttgaaaggtagtgctggtagaattggttaaagaaaaaaaatgaggggacgatagaacacatacagaacaacatcgatgagacgtcaaacgtctgtttgttcactttcaagatcaaaatattagctggaattcaattttaatgatcacccagcaggacaaggaagatgctagatgaacgatagatttctagctctgttctcttttttaatgtacacgttcatttccttttccaccctccatgtcatcatcctttgtttctctttttccccaaactatgatttgcagcgagcaaacgcgtgtattgctgacaagcgcggcgt

SEQ ID NO: 11716 - DNA, 528 bp, Oryza sativa
  Intron number 1 from transcript LOC_Os03g11410.1 (locus LO C_Os03g11410) derived from phytozome v7.0 (chr-ID Chr3; po s 5869991 to 5870518)
gaagaggtttgcttccttatgcttagatgtgaacatcccttaattaatcatcttcattgtgatggtggctgatttatgttactagttgttggcgttctggtgtagattatatatgcattatatattacctttaggcccatgataaattagataagctgcattcaaatgcaaattcaacacgacagatgctggatggaaataacttcaccttatcctgttgtgttatgggtatttttatatgatgcgaaatcttctaaatcttccttttggattaagtacatttatgttagacatatagacatactaattttgaagcgttgcggttgttcacatgaattttttctatagattgtttcttttgctttatttatcctaattgtggaaaccaatatttatctaatcctttgattgactagctaaggcacactgtgtcataattcactagctaaggccttttttttttttctgtttgaggggcatcggcataacttctgactgttgctatcttatattaggttgagggacaat

SEQ ID NO: 11717 - DNA, 806 bp, Oryza sativa
  Intron number 2 from transcript LOC_Os01g02884.1 (locus LO C_Os01g02884) derived from phytozome v7.0 (chr-ID Chr1; po s 1023559 to 1024364)
atacatatacctgtaagatatttcttaaggcattttgagttcactcgtctttgtctttactttatcctttctgcgtctgcaactctgttggaatttttaatgaagtcacaatgccataaaaatgtcccattgtacctgccagcttgacagctctattgatatggcatttgcttctgtggtataccagctatgatgctgctctgttcaccagtagaactggttcagtatatttggtacttgtattgtctcgtgatactccctttgattccagatacaagttgttttagacttgtgtacaagtattgagaaattagctcaaatgacttgttcccttcatttgtagtactggaaaatatgactcattatccgtgactccgtgagagaggtagcacttatttggcaagggcaaacatggaagaagaaatacaaaaaggagcctagaagttccaatgcaacttacatttcggagttaaggctaaaataacttcatttacattttggagttaaggctaaaacaacttccatgtggaaccgggagtaatagaacttgttggcatacactttatgctctcaatactatgttttgatgtgggctgatatagtcgcttgggagatgcctaatttggctgtttcatatgttgttttcgtgttgcattttgctctgatcactcatcagtagggttattcataagagagatcctaacctagcctagattaaagcatcttattttattaggatggccctcattggttgcatacatctcatttcagggtttcacttatcctgttcggagtcgatttctaga

SEQ ID NO: 11718 - DNA, 455 bp, Oryza sativa
  Intron number 1 from transcript LOC_Os02g42200.1 (locus LO C_Os02g42200) derived from phytozome v7.0 (chr-ID Chr2; po s 25385959 to 25386413 reverse strand)
cagaagggggcgcttgaacgggtcggagcaagcaggtgcgttctggcgtaaccgttgagcaaatcatcatatgagctggtggttctatgaactgggaggttttttcccaaatgctgagctactatgcatgattgtcttggcaaaccaaaattgggtggggttactcacaatttggcatagttataaacaccatttccttagatgtattttggtcttacctttattatttcgtgagtttaatgcaggaacctgcatatattctgatcattagcaattagcatgcatttgcaaattacataagaagcatggtcaaatagaatagcattatctttctgttagccatatatacattgttccgtaatgtatatataggcagagaagatgattgattttgaatatttgcactgtgatgttattttcctttgtttctcataggacttctggtgtaacgcaaa

SEQ ID NO: 11719 - DNA, 835 bp, Oryza sativa
  Intron number 1 from transcript LOC_Os01g44220.1 (locus LO C_Os01g44220) derived from phytozome v7.0 (chr-ID Chr1; po s 25353203 to 25354037)
tcccttctgcaacaaagtaagctatgttttggacacattcccattcatttccctagtacagcggtggtggttcttttgagtttgcatatgatggaggggataggtttgcgttgcgttcatccttatgtatccaatattaagataagtgtagcatcggtagcacaatgtttccagaattcttttatatgcaaagagttcgtgtcaaacaagtaggcatgtttcaactggattgaagcatacaaccatatatatatatatatatatatatataacaaagttcaaaaggattgcattgattgaacaaagagataaccaattatttcctttttttttcttttgtatgttgtatggtgtttgctgaaaaggatcaaaacctgaacagtataactcaaggtttaatggaggagcaagaaatgtactaatatgacaccttataatagtttgtttggacaaaaggagaaggggattatgctcaatcccttcggcttggcagagaaacaaatcctgacagaataaaaagaacaagtttctatattttagattacgatagtttgacctgtacttttttccttcaagtgaagtgctatctcaaagttgtaaaaaaatagtttcttcaatttttcagttatatttattttgaaaatgggaagttacaatatctttttgatttaaatggtcttttccttcagaactggaccctcttacagaattgactagcagttaatttacctgtgcaaatgcttggatcaatgactagttactttcaaaagtcataagaacggtctctctttcagtatttgacggtgtgttgcttgttgaacatatagccatagcc

SEQ ID NO: 11720 - DNA, 806 bp, Oryza sativa
  Intron number 1 from transcript LOC_Os03g04030.1 (locus LO C_Os03g04030) derived from phytozome v7.0 (chr-ID Chr3; po s 1837762 to 1838567 reverse strand)
gctcgatcgagccgttgcttgtggccggaggaaaggtatactccctcgtttcgatttgttgccgtagcttcgcggcccgttagaagtgtttccaactttccatacacgctacgagtatcatcaggttgtttgtcagatatgggattaggctgctgttgcagttgagatgtgatccttttgctgtatgttctgcactctgtttccatgttggtgtaagcagcttgcatttggattttggagagatttgcgagacaaacgtagtgattgcctttgtagggggttgctttactgtctaggtagttcctcaatttagcgaagcaattttggcagctcgtttgattttttatttggggattcaagtcgatccgttatcaaactcctcaaattagcactagtgtttactaagtaggttgttcatatagattcccccccactctcttcatcctttggtatagcagttttttttttatttggaacggatctggtatagagaatctgaaatctataaattaagggtccgaaaagctactatgaatctacgatgcagtcatgattgaatactattttttaaaacgcatgatgactgtattaataaggggagcaaaagttgaaaactgccaaagcggtataatgatctgcttatctatgttttgtgttgtgaaggagcttgatgagggtttatgtgtaactgctgctgtagattcgatgctcataggacatccttgtttatggatgctgttattggctgttaaacagtgtttctaacaaatgtttgttttcttaacctttaggcctcaacagtcaat

SEQ ID NO: 11721 - DNA, 516 bp, Oryza sativa
  Intron number 2 from transcript LOC_Os03g11950.1 (locus LO C_Os03g11950) derived from phytozome v7.0 (chr-ID Chr3; po s 6264223 to 6264738)
aaccgtcctgtcctggagggacaccatcggagccggtacgttcaacaatcccagcttccatttttctccattatttccatccatccccacatcgctcctcatttactccactcccctcttttccatgtttctgccaacaaatctgagtttcatcaagcgtgtgtgtctgcatccctgcgattttccggcagcagccgggggccctgattttttttgaaatccgtggggggtttgccacattaatggtggtgcatgcccctgctctgtttcgcttctgttctcttcgcgatacctacggcacagtgtattttagtcaagctactgtgcgcctgaatttattgtgccgtgtgatttgtttccttgcaatattatgcaagcaaagtacagtctgcaacagtgtacactcttgttggtattctgttcttcgtcgggttgggggctaaattggttgattttgtgccctttgttttgtgttgagcagatcacatcatcgccgacgagttctccgccgagctg

SEQ ID NO: 11722 - DNA, 571 bp, Oryza sativa
  Intron number 1 from transcript LOC_Os02g56500.4 (locus LO C_Os02g56500) derived from phytozome v7.0 (chr-ID Chr2; po s 34590559 to 34591129)
taagttgcaggattaggctgattgcagaagattcggtgagttgtttgacactcgagagaacttggtttgttttgaatttcggtctgtttatttgacctgttcttgtacctgaaacttgaaagactccgagtaagaggggagtaaacgagtgataagccccgcgatttgttagcggctgtttttcagctaaccatctttcaatttctgtactggtttgtcagtgacttctgcatgtggctgtgttgtgcgactaccttggtccttcctgattagtgatggggtttagcgcatggtaatctgtttaatgtgcatgcatgccgatgatctttcatgtagactgtatattcctgtgcttagaagccatctgtggatcaaatccatgttgtcttccaagcaattagctcatctgtgatttgatttgtactttactctttgggaagaatttttttgtctttatagcttttcttgcatgaattccattccatgatgcatttggtgtttcttgattggaggcagtgtttgaatgcaagggtcaggttgcgctggtaggtatctgaggaattcaggaatt

SEQ ID NO: 11723 - DNA, 649 bp, Oryza sativa
  Intron number 1 from transcript LOC_Os02g50450.1 (locus LO C_Os02g50450) derived from phytozome v7.0 (chr-ID Chr2; po s 30793556 to 30794204)
acaggaggccacaggctaccaccgttggagcaaaagtatagccgatcgtgccctataagcaacgatcctaacaaccactgttgatagacagatatggcgtgagatcgtataccttcatgacttcatcagttctagcattgccgtgtcaaaggtctatttgtgtcagtaatcagtacccgtaattaagcaattttacttttgaaaaattccttgtcaatattcattcataacataagtagttctttaattataatatactccctctatcacggtttgttcatcacatatggtttttaaagtattcccaaaatggtcatcctccaacaagtgtacttgtggttcgtgtccaattgagaagaataaactgtatatattgtaactgcttaatgttcccatgtgtttttctaatatatgacacaattaacttctaaatatactatggagattatgagtaccatatgcgcacacaacttctttatccgaccagatataggggatagattatgtttatggaatatgtaacgagccatgacttagatattgcgttttcttatgtattatggaacaacctaaagttttgattcggtaatattgtaaagtagattaaggaaactgatgtcgtatccggccaggttctctctttgtaatc

SEQ ID NO: 11724 - DNA, 663 bp, Oryza sativa
  Intron number 2 from transcript LOC_Os03g27450.1 (locus LO C_Os03g27450) derived from phytozome v7.0 (chr-ID Chr3; po s 15746931 to 15747593)
ttcttattctaggtgttgacaaggctggcaaaacggtaataactcgcaagtttgttttggaaataatagttaatatctataagttttaatattgtgttctacttccttatgtcacagttgtctgatcatttattaattcaaagatttcccgtccctttcaaataagtgcactcatggttgtacattgtcaagttctttgaatgtaccaattcgtacaccgttatgtacctcagtgtctgtatcttgaaatacaatttattgtcatgatgttctctgtagcataccgcacaatcttgttttgggagactatttattgattgcattgatgggaaattacttgaccgttggtaagtgtatttgaaatgtagatggtgtccatgcaaactactactctggttctgttggagtatctagtatcttctaccattgcttataatggatttttaagttaactttctttcatcatggacatggtatactatctttcaagttgatttttatcatgttcatattatagtgcttatgctgcacttcttcaatttcatataaacgctttacatattaaaatgtagcaattacaattttttaacctaaaattgacatgttttttctatattttatgatatagactttgctcgaaaagataaaatcgatttatctgaa

SEQ ID NO: 11725 - DNA, 752 bp, Oryza sativa
  Intron number 1 from transcript LOC_Os01g22209.1 (locus LO C_Os01g22209) derived from phytozome v7.0 (chr-ID Chr1; po s 12487830 to 12488581 reverse strand)
gcatcccggacgcgccggtggtgagctcgtggacgttggtcgatccggaggactcggagtggacgcttgagcatgaagttgcgagctcatctcatttctcaaacgggcctgtgattacaacaagacttgccttcgtattagtagtattttcagatctactgtcttcatatatacaacgttaagaagttgcatctgttgctgtatctgtattctgtcatcattgtttttgttttttttactatatgttctctgattctttatgctcattgctctcacttaacatttgagacaacatgtttgtcataacagactatagtattttacttagactgctggaaaatatgaagccatagaaaattaaatttgaaatatgatgtggggaaagggattctaatcatgtgagtgggcgtccacccatttattgtacgttaactaaatggttatgaaaaatttatttaacaaatataacaagatagattaatgtgaaatatatcactttagaaacatgcaagtttaaattcgatttgtacaagttgtaacaaaaataactgcacatatatacatactaattagagtttaatttattatttttgatacaattcgtagaacttaaattttaaacttgtatatttgtggagtgacatattatatattaatatatttttatcattttatgaagtttttttattaccatttagttggcatacaaataaacacgtggatgtctacctaaattaattgtgactagttct

SEQ ID NO: 11726 - DNA, 731 bp, Oryza sativa
  Intron number 2 from transcript LOC_Os02g56050.1 (locus LO C_Os02g56050) derived from phytozome v7.0 (chr-ID Chr2; po s 34304789 to 34305519 reverse strand)
ttatatctggttcagcagtaggtttggaaggacaggtactgctgtttttagtaacacgacgactttgacttatctgttcattttagtgacactcatctgaactttctctaacagctgactgtttatcatcacaacggaagtccatgctaccggtgtctttatccaaacccaccatcgtcgccaacatcgcagagttgttccgataatggtattcttggaattcgtaagtaattatcttctctacgtagcaaaaaaacaccctatgaaaaggcatgtggatcaaattgtgagaaatttctgcatctcaattctaattgtaccaacatgaagaaaatttcggatggagattctcgaatagaattcaataattgagggttcttttatcttgtgttggtgtcttttagtttatgttttctttacattatgtcagtgtgtgctgagtttgttcgtgtgtggactttgtaataattggttgtatctcgttgagcaaaagccggaatgttatttcattatcttaaaaaaaatgaagaaaattaccaactacagtagaataagtagaggaattccataggtataggtatattatcttcataggtacatgtaaatgtacttgtcgtggatgtagaggccggttttctaatatcccatccatattgtctatatgaatgatccaatgtctacatttttgtttgttagttccaggagtaatcggctgccttcaagcattagag

SEQ ID NO: 11727 - DNA, 795 bp, Oryza sativa
  Intron number 3 from transcript LOC_Os03g21020.1 (locus LO C_Os03g21020) derived from phytozome v7.0 (chr-ID Chr3; po s 11926823 to 11927617 reverse strand)
cttggggtggattatccatttcctccgcacctcgagtaagtttcaccatcatcatcatcatcatttctttcatcaccttctaacatgttctgtttcctgtgaatacaccgattacataccaaatgcccagtcttgaaaaaataattaagagcttagcttctacctgcacactgagatcagccccgagtaggcaactgccaaagttgtcctcgatattcataagctctacattgtttttcctaactgcaaattgcaccttatgttacaatgcaatgcttggatatcgagaaacgaattgatttatgtgtgttgaattgttgagctgcttgatcatttggacggactgcctagtataaaggcctgagggtttgtttggataatgggataagaagagtgggattgggattgggaaatgagtgaagggttagggttaaatggaagagggaaaatggatggttaggatttaaagatgccttttggtgggttggaaatcattcccctaacccattagccaaacaaggcttgagttcttcaatgcaatgcccatctatgtcccacgctaatggcaatccatctggaactaaccaaaatcacactagtgtcttctccactcttatctatttaagttcaaattaacgttttacatttctcaaataggtcaaccacttgttatcttgaggagatctatctgatatacatttctacaagtcataagctaccacagttgctcttgtttgatcttattgcactttggaatgtcttttcttttttgtaggtacgcgtatcctccaccag

SEQ ID NO: 11728 - DNA, 552 bp, Oryza sativa
  Intron number 6 from transcript LOC_Os03g18270.1 (locus LO C_Os03g18270) derived from phytozome v7.0 (chr-ID Chr3; po s 10240488 to 10241039 reverse strand)
atcagctaacagagggaaccaacacactatttcaggtaaacttaaatcttaaaatcacattgcatctacaacaggcttgggtactgtcctgttgctgaaacttaattagacaatattgactatccagtttcaattgtcatttgcccaataaaaacaggttagcttcagaagattgggtttttataaattgtgtccaagaccatgttcagttacatgtataatttgaacttgaacaattttgagtgcattttcattttatttgtacaaattaccgtagaccttacttgagtggcattcagaatataggttgatgtgcttatgctttcaggaaaacatcatcacgagttgttctgtactttttgtaccttaatcaagttcagtcacgatgcatgttttggatttggattgcttttacctttacgcactatatttgaacagatcattctaataacaacatggagcttacttgatgttacagttttggaaactgtaacaaacagctgttgctatctaaatttgatcgatttcctactgatttgcaggataagccac

SEQ ID NO: 11729 - DNA, 968 bp, Oryza sativa
  Intron number 4 from transcript LOC_Os03g18270.1 (locus LO C_Os03g18270) derived from phytozome v7.0 (chr-ID Chr3; po s 10242432 to 10243399 reverse strand)
cagaagtcattgttgccaaactcataatctgagtaatgcgtgaaatgttttggtactatcagtcaccgactcatggtgctctctaatttgacagcaaaatttgttgctgaacaggactacttaattgctatgatctaattcttactatttcgtatatgatctaattcttgatcatctggtgtggcactttattctaaatttttgaagcgcctatgtgttcactccctttattttgttgttttcaaaggtaaaactccatcatatttttctgattgttatgtcgttttcaattgttatgtttcaatgtgtagcttaaaggatataataaatactttggttgcagtagatagtttttactaattaatgttcatgcttgcaaagaaaaaaaatatgttcagttctgcaaagaaaaaaaaagaggttgactctatatagaagaacatagaggaatgcatgtgtgttttcacagtgcatgagaaaatcagtgagaaagttcagccatctaccaattctatcattgattgctctaatggcaatattatatcaaacgaacagattgcattggtttccactaaatctagggagaaaacaaatttatgaagaggcatgtttattcttgacaagaagggaccagtatagtagctcacaacttctctgtcaagccagaacatatacgttgcttgtagattgtatttttgtgcttagaataccaaaatgcaagtaaaacttacaaatataattaccacattttgctattacaaactaatatggaatgactgaccacgctttttgtttttgttccttaattttgcttgtggcaaaaaaaaaatggaggattttccttttgccatgctgtattagcttcccttttaccggcatgcttgtttcttaaaatttggtttgcatcttcatttatctaggcacataaatttgatcatttcatgcctacatgtgtttgctcttaggcc

SEQ ID NO: 11730 - DNA, 612 bp, Oryza sativa
  Intron number 2 from transcript LOC_Os03g18270.1 (locus LO C_Os03g18270) derived from phytozome v7.0 (chr-ID Chr3; po s 10243581 to 10244192 reverse strand)
aaagaagccgcttttgagaggtacatattggttattcaactacaccagaaattaccctatttagcacagagttgattgaaagattgagatgtatttcttgctttctcacatctgtttcattcacctgttgtgtaatgcaatatacagataataagtttgttctttagaaaacccttcctgtagatggtgattaatatatgctctagaatttaaatagcagctgtcattttttctgcctttcattcatggtagagataacatgaacaaagagctgcaaccttttaagttttaacctttctaattctgatttactcaccttaatttttcccttaggtatagctggcttcaaaacatatatgctccctctccacccataacagcaaattcagatgcatttcatcctttcccgcatagttccagtggagctgaatgaacactgggttttattattttgtacagaactcaaatgcaacttaatatttgcataaatccagtatgcattgcttctccgtgcacccacaacaataagcattctttttggtacaatctgatgatgtttctacagcttactgcctctgcatcgaagaccagccaatctggaagattgaaaaa

SEQ ID NO: 11731 - DNA, 772 bp, Oryza sativa
  Intron number 2 from transcript LOC_Os02g05450.1 (locus LO C_Os02g05450) derived from phytozome v7.0 (chr-ID Chr2; po s 2621705 to 2622476)
ggcacaggtatgcactgcttctctcttactgttgtaagcttctgagttttgactatagaaatattcaaatccaactaatcttacatgccaaaaggggaaaaagaaacctgaaattatttaattcatgcttgcatgattgtagtttttgacggaaaactcaaaagcaaaccagattaaaccttctcagtaacaaagttccattttgtttagggcaataatgagcaagggcttagaatgaggtttagaactactcatgaagagaaaatcattcacatttactgtatgcaaaccagatgagaacttatgttttaaccaccaatagcatcttaataataggaggatcagaatccatccctagctcattggctgtgaccaactcctcatgggtcagaaataatactggtatatgtatctgttggaagtaatcattttgacttgcgtagttgaagtagtgtcttgggatagaagtgctttactgtggaggacctctcaatcatgatatacacatctagtttgccttctaattgttaatttgttactgtcagttgtcaattagctatcaaagaactgttctataacggtctatactgatgctctcagtaagcttcacttgtgttgttttatatctaattctctctctctatatatatatatatatatatcctgatgttgcatagaatgaagtaacagtatgctatttatactatacttactaaagggtgtgcctttcctaacagtcgagagaaaataaagccagagaaggagctacagc

SEQ ID NO: 11732 - DNA, 815 bp, Oryza sativa
  Intron number 1 from transcript LOC_Os01g55530.1 (locus LO C_Os01g55530) derived from phytozome v7.0 (chr-ID Chr1; po s 31994162 to 31994976 reverse strand)
tcaagctcgtcgccggagttctcgtagtagccgaggtgccttgctccttccatttcctccatctccgtcctgtcgttctccactgctctagctactagctagcaggatatactccacgaatcgcagaaatggtattcaatgccttgtaatcgttcagaaaactaaaaaaatattccgcaatcgcccacttcaaccccaaatcccctgttttccaatccccttcaccttttcgcttacaatccctataccgaactccatgctattttctgctccacccatgttgattggcacggtaaagcgcacagctcatatcaactttttttttttgttttctttcttgccggcatctcagatcaacatatcaacgtcctgaactgttctatttgtctgcaagtacctgccgagatgttatggttatttttccttggacagtatgatgcgcttttcaatttctcattcagtttttcttttcctgtttctccgattttcactcttcctgattttctatttaaacggtaggaaggtagctgtccttgcctgaaatagaaatgtttagtactgctcaccttttggcagtttctgcatcatgaaggtcattgaaatctggcatttaagttgtaatgctcatgcgtcgtgttgatcagtaaaaagtgttgctattctcaaagttctagtttgagtttatgaaaatttattctagaagttcaaattatggagggaatcttttgtttcttctgcagatactgattttcacggggatgcattaagctacggtctaacttgtgggagctggatactgctgaaaaggggaccaa

SEQ ID NO: 11733 - DNA, 876 bp, Oryza sativa
  Intron number 1 from transcript LOC_Os01g02400.2 (locus LO C_Os01g02400) derived from phytozome v7.0 (chr-ID Chr1; po s 770179 to 771054)
ctctcaaaggaatcaagcattctgccagcatcatagtatgtctctttctcaagtataaattcagtttcattatgatgacttgttttagtttgaattttcacttctctatctattacatctcttatttctcgagtattcagttttcaaactatccaggatatttttcacaaatagtcaaactatctagcaaactgtgaatcagccaaaggctagcttggatgaacattttggttctaggttcacaactgcaatttttctcaaagaaaatttcatcaagagatgataatgtctgatcattatgaaaatcaatatttttttttgtaaaattctcatagaaaaggttataagcaatggcagcacattttagcagatagcaatgatctaaagagcaagctttatttgtattactctagacattggtattaacttagaacactaaattggattcatatggttcaaatttactagtttggaatactgtaatagctacttgaacattaaagttatatgcaaatggcacaattttactagtttggattactgtgggaggtactacggtgagagtagtcaccatctcaattagaccttttggtgctagagatgcacttgatagtgcagtggcaaggggtgtgtggttttaaccccgaggtcccgtgttcaatccctaacacgctcacaatttcttcttaaaaaatggttggagggacatctctccctccaaatctcctatttttttagaccttttggtggtaagaccatagtcctgattgttagaaagttgcacccatcgagtaatcaagaatgtaccagtataatttacagcattaacaagttcccacagtgttaacagggtagaaaccagaacatatccatctt

SEQ ID NO: 11734 - DNA, 787 bp, Oryza sativa
  Intron number 4 from transcript LOC_Os03g27030.2 (locus LO C_Os03g27030) derived from phytozome v7.0 (chr-ID Chr3; po s 15475423 to 15476209 reverse strand)
ctgaaagaatgtaggaattccccccaacgtttttgtccgtgtgtcgattgcgctactgcttgttgaatctgccaacctttctgatgccttgctgtgctggtgtttctaaaattctgcgacggttattagttcttgattgcatacagtagcaaccattgttgttatatagaatctgagtgttgccgtgttgggctgcacgtgcaatgccaaacaaatttcctgattttctgcagtggatcaaagaagtatctcggttaagcgtgtatagcatgtaatgctgtgacaagttcactgcgttttggatgtttctttgacgatagtcagatgttaaaccatatgcctaataatttgatttagttgccagtcttatcttatggtgtcttttctcagcttttggtcatttctcattgacagcttttacactctttttttctttttctttttctctctcttttttttggtgggatagaacttttataattgggccctgctttaccaaacaaaaatagtgtaatgaaaatttgggtgctctgcaacataccatatctggtcaagaagtaccatttcagtcttcaaagcaatactgacatcttttacactaaatttagcatgggtactttttttctgccagaaagaaaatatgttgtaggaaattatcggttacaattctacacaagaatgtgcatgtatgaaacactcagaagtcaaaacgatttcacacattacatttgcctttctgtttgtgtttgcagtcataaggggaggattgtagaagagatttcgaagc

SEQ ID NO: 11735 - DNA, 948 bp, Oryza sativa
  Intron number 2 from transcript LOC_Os01g08660.1 (locus LO C_Os01g08660) derived from phytozome v7.0 (chr-ID Chr1; po s 4313111 to 4314058 reverse strand)
aaccctgccaatgtgagatttcggttcttcctttaggtttttttctagttactgatcttggtatattattattatcaaaatatatcaacatcaattgctctcacttgcacgacgctactattatgcaattggtttttcaagacaacatggagctaaggattaattcggcacgatgcttactactatgcaattggtttttcaagacaacacggagctaggattaattcaggagcacccgcgatagtttggtagcttgttgatgaattaataggaaacggagtcccaagtcatttgtgccaaaaacctgagtgataaaaatgttgatcgtgcattatctatccccttttatggtgcttatcaaacacgccgtcaggctaagctctttttatttatgttttttttgctcttgttttaaattactaagcaacaggtcaaatgaagcaactaaatagatgtaattttcaaaaagttccactctttccttaaatctccttcatcaggaaggagtcagtattattattggacgtccacagttttggttggagtgtacacaataggcataaaaccgttgccagtgatctcattaattaaaaaccttgcgtgtttatgaggaaaaactatggaaaaatagtgcctgattatacttatattctgcagagggtaactcagttaatttctatttggtcactcctgtccacttcaattaggtaatttagtggaaattccttgtatacctctgaaatcgagatctttgcagagttgagaatgcattgcaaattgttcctgtaatttgaattcatgctactgtattccatttatacatccagtaggatctgatgttaagttgccgctcttctcatttgccctttttggctactgttccttgttttctggtaactaatcttggttaaatattatctacaattccacaggcgtttggctgggcat

SEQ ID NO: 11736 - DNA, 866 bp, Oryza sativa
  Intron number 1 from transcript LOC_Os01g37260.2 (locus LO C_Os01g37260) derived from phytozome v7.0 (chr-ID Chr1; po s 20804993 to 20805858)
gacacagcaggcgccgccgcccaccaccgcaggtagcttgaccttctccccttccgaatcctctcttagatttgtaggaaatctcaaacctaccgtttcctctgaaattaacagcgacataatcttcttcttcttttaccgtttcccctgaaattaacagcgacataatcttcttcttcttcttttactcaagtttctggtggcacctgcattattacgtcattgcaaaagctgctccttctggattacagtcaccctcttcctctattgaaaatttagattactttttgcttggatggctggcgagaatttatcttaccatctgtcatgactaaataacaagtgggattgtaactagactatactggtgtttatcaccactaatgccagtgtttgaactcattctcaggaaaattattttattctcattttgtccaagacaaattttgttcacttcattgaacgcatgcatattctagttgtaaacttgggaacgttctagttttcactcagataggaattaggagctatttatccttttcttttcactgtcctttgataacaagttaacaacccatagatcatcccttaccttttcctcattttttttccctgtttggttacaaatgaacagaaatactaactgcgatagcgaactcttaccattgcacttcagctgttcagtgtttacgtaataagtttaagaattatattgataacatctaatctctggaatgcatcatctccaaagattcatagctagacaacttattgtttattatcattgctaaaggaatttcttgcactcttgcatatgcgccatcctgaaccattgctcattgtttctagtcttcataggtagtagc

SEQ ID NO: 11737 - DNA, 502 bp, Oryza sativa
  Intron number 5 from transcript LOC_Os02g04080.1 (locus LO C_Os02g04080) derived from phytozome v7.0 (chr-ID Chr2; po s 1778092 to 1778593 reverse strand)
atactaggaacgaattagctttggtaagattctaccatttttgttgtgtacgtttagtttcaagatgcatttttcctgccatgcaagttggaatattcaaactaaaagaaatgaatgaccattgcaacaagtttggcaaacaaacctttaaaatttagcatttcctactcactgtgatgtcatatttttttggttgtgatggaagaaacttttgaattaaggcgttccctcaatgcatcaaccatatttgcattatacaaactgcgatgtgatatgtaaaattcactcttaaaaaaaccaaagaaaacacagtatttatggcttcatcagtaaccacccactataccactaaccctactgctctggatccgggcagcagttaaaaaaaaatgtttgtttcttcattggttggtgaaaacgagagtgacaagagttcatttttaatcattatagccaatggatcaattgttttactgcctgctttgattcctcttgttgttag

SEQ ID NO: 11738 - DNA, 568 bp, Oryza sativa
  Intron number 1 from transcript LOC_Os01g67160.1 (locus LO C_Os01g67160) derived from phytozome v7.0 (chr-ID Chr1; po s 38982161 to 38982728 reverse strand)
ccaaccctcgccccctccccaccaacgtcatcaaggtacacctcttgcctgattatcccgtgtcttctccgcttctgggttggttgcctaggtgaaaatcggttgcagcaaccatgttagtgaaaatgaatgaaacactagatgtatgagttttcaaatgacattattgatttttcagtttttttttcactattcagaggcaaatactgggccatggaagtgtggatcaaattaaatacgaaatggaaaaaaaaattaacaatccttatagttcctatgtctctctttttttatatatataatctctgattgttggaggtttttcctttgattattgtgagaccttttacaaacaaagatagatgatgcacgaccgactaatcggttagtggtttcatattctgtcaagttgcacattgctctaattgcatagaattcacaattgttgcacgttaattatgcatacaacaacagtgatccaagttagttctctacaaattttatatggcaatgaaaagaaatgacttcttttttttttcaattccctgcagagcttcttgtatcagtt

SEQ ID NO: 11739 - DNA, 586 bp, Oryza sativa; identical to SEQ ID NO: 11462
  Intron number 1 from transcript LOC_Os02g57250.1 (locus LO C_Os02g57250) derived from phytozome v7.0 (chr-ID Chr2; po s 35068936 to 35069521 reverse strand)

SEQ ID NO: 11740 - DNA, 932 bp, Oryza sativa; identical to SEQ ID NO: 9928
  Intron number 1 from transcript LOC_Os03g11600.2 (locus LO C_Os03g11600) derived from phytozome v7.0 (chr-ID Chr3; po s 6040380 to 6041311)

SEQ ID NO: 11741 - DNA, 648 bp, Oryza sativa
  Intron number 1 from transcript LOC_Os02g44102.1 (locus LO C_Os02g44102) derived from phytozome v7.0 (chr-ID Chr2; po s 26620923 to 26621570 reverse strand)
acgcctcctcgttcgtcacgccacggctggttagtttccgtgttctttttccagggggaggcgcagtcctgaaggttcttgatttttttgctgcctttggtcttaatttcccattcttgcgtagcttgtaactattgaattgtggaaaacttcgccgacttcttgcgttagttctttggaggaaggtggtttcttggatgaggttgttcagtttcttgcatggtttacaggaacaaacgcctccagtttaaccattggtctagtgcctcaatgcaagatttatcaatgttcctggatttgatttgtgacctttgatcgattcaaatatcaaagcagtaagggtattgacaatcttggtttgctgttacatttctgctttctgaatcttgaaatagccaaaaactagagaattcttagctcagtcattttgtttgttatgttattacatgttttccacacgatcaaactaaatttggataattctctgtctgggtccatatagaattattacaagtagcttttggttgtatccatttagttgtactatctgccggtttgattttttcatttcccatacgtgatttggaaatgttaagaagccaatcatctgcaggaagaagaccaagaaaggctgccaaacagaggaga

SEQ ID NO: 11742 - DNA, 681 bp, Oryza sativa
  Intron number 1 from transcript LOC_Os01g07550.1 (locus LO C_Os01g07550) derived from phytozome v7.0 (chr-ID Chr1; po s 3617510 to 3618190 reverse strand)
caaggaagcacaaagctggtaactgttatgaaaagctggtcagttttttacatatggatgatgaaaggaatggagaaagaaagagagatcctcgcaagccataattacctgcctagctatatgctgtgacaagctgatagcatatgcattaagggactataataaaacatttacccatgcacagtagtcccgaaaattttcaccacactatactctagagagtagatctaccagactaccagattcttaaattaattatccagttaagtctagttctactttgtttgtactagcatgcatatagtacatgaaattattttgaccaaatgctgagatttgaagtttggcatgcaactggcaatggtaaattaagaatgattgaaatcaagtcgatcggtaggacctagttaatataatggcattgctgagacgaatcgcaatatatttcttctcatcttttaaataaaagaaaagatgaacaagttaaagtgatcaatggatcacgtgagacagtggactcttgggttgcttggcgcgtgagcgtatctccttaataattttccattccatgatggctaatccatttgtttgtacaaacttgtggatttagtataaatgatgtgatattagctggaatcttttgcagtataagcgcatctttgaagcagaaatacctgaaga

SEQ ID NO: 11743 - DNA, 987 bp, Oryza sativa
  Intron number 1 from transcript LOC_Os03g02040.1 (locus LO C_Os03g02040) derived from phytozome v7.0 (chr-ID Chr3; po s 647147 to 648133 reverse strand)
gcacgacgactccaaggccatcgtcctcgtcaagggtacgtagaccaacctctagatctagtgatcatctccgtgcatggccactcgcagtttcagctgctttcatctcagctagtttaagttctagtgattttcttttaaaatgaatttttaagttctagtacttgccaaatattatccgtggtgaaatgtgtatgatatgatgcgcgtgttctgctaaaaaaaagacacgaatattagagaatgatctattatcaaataattagaagaggtgagacttcgaactcagatcgtctaacccactaacttgtggagctagccgaaacatcatgggtgtttcctgctccatatataccagcaggacacactgattattgttcatatggtttcagttaatttcgctcgttcgattatatgtgacttgatttggtctttcatacagtagaaattgcttatacttgagtttggatatcgtttgatttgatcgtgctcatgtttttatctagatgggattttcaagagttctcctttatccggtactgatttaaacctgatttcagaagaagaaaaaaacgagttcaaacattgaactagtaacacttaggcttcacaagttaaaacaaactgctactgcacaattcaaatataaatggcaaatcaacgatcaagtaccaaactatcattccgagaaacaccaagggttttctggctagctacataagatggtcggctactatacccccggtgttccctcttaaaaaaaaaggtggttggctagacgacctgggttcgaagcctaaccctttaatttttaattattagatattaggtcattccctaatatttgcgttttttttttccaaactatcattttacttgcttatactagtactgagtaaacctgaatgaattcattctgaatgctgacatgtcctttcttctgtcccaccagaagctgaggctacaggaggttcagctgaaagaggt

SEQ ID NO: 11744 - DNA, 979 bp, Oryza sativa
  Intron number 1 from transcript LOC_Os01g56949.1 (locus LO C_Os01g56949) derived from phytozome v7.0 (chr-ID Chr1; po s 32900202 to 32901180)
accccgacggtggcgtcaccgtcggatccaagaaggtaaggagatctgcgtgctgcagttggatgagctcgatttcaacttgctgtgcgtgtagaggaatgcagtacagcctgtacagggtcaagctttgctgagaattgtttgaaggcgctgctagatttgagaattttatagattggcatcacatccggccttttatctcgactttaaagttctgatggatgatggattatggatcaaacagagtttatgaaaattatttgagggcacagacgagagaatttagtattagaaagttgaaaggttgactttaaaaagttctctaagaaatgccgatgaagaaagtttatgcaaaaatcataccgtttgggagtttgggaagtgcgcccgcaataatcaaaaatccgtgagaggaaaagaatgctttttttaattatttttcatctcattttatactctgcatttgctgtttcattctagcattttggatttaattaatgtgctagttattcaattaacttacacatttgctgggctctacaaaacctactcaattccgtgatgaactggctaccttaaattcagtccaaggttacagtcaaccattttatctggtacaagtctataagatagtaaattatattcaatattgatcttgtttacatccagactgtgctggtatcttcgctgtcacaatttgttcatgttaacggtcgtttaaaaccaagtagaatacagatttagtttagaaaaaataaacaataaacttattttgcactttattttagtcgaaatgcatctgcactttggttgtgcagcaggcacaaaataaacagaacaaaatttctaacagattcaggggaagctatagcatgctacacatgttttgagccatttggtactcttgctcttcgatactcagattgctggttctttcatgggttgcaggttttagttgtacaggcaagcgaggcgccga

SEQ ID NO: 11745 - DNA, 374 bp, Oryza sativa
  Intron number 3 from transcript LOC_Os02g03720.1 (locus LO C_Os02g03720) derived from phytozome v7.0 (chr-ID Chr2; po s 1561299 to 1561672)
tgaagctgtatctgaggcgagagaactatctcctagtatgtctcccacaggcttattactcgatgcattggtgatttactgtctactgattagtgccccaagaactgatgcattgatgaactgtttctactcaattaaattgccatggcccatgagaaggagcataatagtggggtttaccatctagagttcggttgctagggactaattttgctgtttatattttgtttcaaattgccccctttgctttcttggagaagaaaatatcccctttggctatgttgctcgaagaatcatcatgttgaaaataatggaataaaaatataaatcttcaaaatgataacattcatcataaatctgtttgcaacttgcag

SEQ ID NO: 11746 - DNA, 355 bp, Oryza sativa
  Intron number 4 from transcript LOC_Os02g03720.1 (locus LO C_Os02g03720) derived from phytozome v7.0 (chr-ID Chr2; po s 1561753 to 1562107)
ataagtttactgctcacacttggcactcctcacttgtatggtttcctacctgattgtttgacacttaattaatacctgattaattcttgttacagtttgacaattcttgtagtaaacatctagtactcttatggtcttaccttatagatgtgaaattatgttgtattaatacacagaacttgttgctgtacttgtgtgttactccgtatcccataagcttgctgctatcacttcataataacattttgaatatcaaaagcaggttagaatatccaaatcatacgtttctttgatgtgatcttcttttgtcttttccttagaccacctccaaaaggtactcctggggtaattgacc

SEQ ID NO: 11747 - DNA, 810 bp, Oryza sativa
  Intron number 3 from transcript LOC_Os01g72220.1 (locus LO C_Os01g72220) derived from phytozome v7.0 (chr-ID Chr1; po s 41877982 to 41878791 reverse strand)
ccactgtgcagccgactccagctgctgttctggacgtatgttaccttacccatttgccttgcttgtaaccaacatgttaaaagatagttgccatactgttttctgtttttagacttttatacttctgacgctcacatttcttttgtaatttggatttcaacaaaccactatgtacattatattgatgtcctttgcaatctcatgattgggaagatcttgaatattcttgagtcaaggttctggttaaacggaaatgttatgcagtaaaaatgatagtcttagaaaaagaaaactatattgttgtatgaatggattgttgtatgtggattaatcaaactcctgttgctatctagggagagtgcctatcagatcctgtctttggttgttgtttttgggccatttagcttgctaattaatgcataagttttcagttttgccacaactatgtaaatctgtctggatgttatttatgatatatatgtgagataaatcctccatggtacaacgtaaaactgagggtgctcaatggattaagctgacaaaattagatctttaactcttcagtcttcaggcaatattttacgtagaacatacttatgtctcattccttttaattagctgagtgctgctattttggttaagggttttggattgattactgggtagtgctgtcatcttggacaaaagatgattaagtttgatgaattaattgttcagtttggatgattatgaaattgtctgtatctactgtattttgaatacattgtctggtatctggatatcctgattaatgtgggttttttttttcag

SEQ ID NO: 11748 - DNA, 1005 bp, Oryza sativa
  Intron number 1 from transcript LOC_Os01g13760.1 (locus LO C_Os01g13760) derived from phytozome v7.0 (chr-ID Chr1; po s 7711767 to 7712771)
aggccaagttcaagcagatctccgaggcctacgaggttgccctcacaccccccgcatctccccctcctcatattcctgcgaagattagtttttcgtggttcattgtagcggctcgatccgttatctcggcggtttgaagaatgatgttctttctttgcggaagaagtaatcaaggccattggaaacctacatcatcatcaatcttacaaagatcatattttgattcctccaggcaaatctagggtattaatatatctgacacgatcatacctcgtattggttgttacccttagtccgtatggaggggaagaatttctttgtcatgttattcgtgttggaatcgttctagcttcaatgtttactgcgatttagcgggcgctctaaagtttttcttatgtctaaataaggaatagaggcgaaccgaccttatttggcgcgctaaatttttcgatgagtaaatagcgaatactatatcccttttacaatacttagattatggccttgttcggccatcatttttgtagatgtggctaccgccagtagccacgtgtgcggggccgcagccagaaccactaggcgaagcggcagctgcatccgcaaaaatcgcagccaagcagagcctatggtgctaagggcatgtcatatactcatatcataatttatgttatacattctgaatgattctttatccacgttcgaaggtattggtatgaggctaatgctaggtacacaattatttcaagtaaagtaaaaaagatctgctgatccaaaatgtaacccagccattcggtatctttcattttccagaatacacattgttgagttgcgattctcattccatggttggtattttcttttagtgcaatataacagcttagtttatttcaatccagtccttgcagtgattgaaaattatccgtccgttgttgatattttttgatctgttattaatgctatttttttttaccttttaggtccttagtgatccccagaaacgcacaatct

SEQ ID NO: 11749 - DNA, 423 bp, Oryza sativa
  Intron number 1 from transcript LOC_Os03g18430.1 (locus LO C_Os03g18430) derived from phytozome v7.0 (chr-ID Chr3; po s 10334273 to 10334695 reverse strand)
gacctccgccgccacttcgacgctcttcccaacaggtcagtgtctcaaagttcgcacctttttttttattatgttcagagaccattttcttcaagaaggggctgaataaccaacagtttttttggatctatgggtggatgtcaaactgttgtcttttcagtggcaaaatgccacttaaaagtttaaaacagccgtttttgttttttgcctactaagaaactgaaaattcacagattctagtgataaccagattaaaggctagtgaaagaattggtatttagttctacgatttttttactcctgtgaatttcgggagtgccaattgcggagtcaagtacataatttgatatgtaagctggtagcataatgcatctctgaattgcggaatgcttcgctgacaagcagaaatctccatttgcagct

SEQ ID NO: 11750 - DNA, 734 bp, Oryza sativa
  Intron number 1 from transcript LOC_Os02g24354.1 (locus LO C_Os02g24354) derived from phytozome v7.0 (chr-ID Chr2; po s 14124969 to 14125702 reverse strand)
cgccttgccctccgggcaggattcgatcccactaggtgcatcttcttctcttttcgtttttcgtttctatctcccgctatatttgattttttgatggattggaattggaatgcaaatgaacaatgatttgctggtggacaaaaggcctttttgactattctccatggacactagccatttttttatcttcatgttaattataaaatatccatctagtgactttctggggaaggtccgatttcagtgtcaaaagacatataaatgcaatagttggaccggaagaaagtagtatgaaaatggttcattaatatgctatatttatattttttttgccatattacgatgataggcaactttgttaattctaccaattttgttcacagagcttgactcgtgaatatgattttgataacactatgtttgcacaagcattagaatttataaccaaaatggtccgaacttaagaccatgtgttgggtcaaggagcacagccaaatttacatggcagaatgtagtgtaagaaattacgatcttcatatttcacagagcatgcgaggtgacaatccatgatgaaatctaagcgtatctatgaatgtttccaagttatagattgcacagttttctaaagtctttatctgtaacaaataagtacttcagttcatgtcaattgataccaaacaaaattgtagtaactaactagtttaagtatttatttaagttcaggtgtatattta

SEQ ID NO: 11751 - DNA, 105 bp, Oryza sativa
  Intron number 5 from transcript LOC_Os02g40280.1 (locus LO C_Os02g40280) derived from phytozome v7.0 (chr-ID Chr2; po s 24389422 to 24389526 reverse strand)
atcaggtaagtatcttctctatctgcgttttttgacttttctattattaattctcacgtgattgatttggaatctgacatgtgttttgattgctgtagggaactg

SEQ ID NO: 11752 - DNA, 537 bp, Oryza sativa
  Intron number 2 from transcript LOC_Os01g22390.3 (locus LO C_Os01g22390) derived from phytozome v7.0 (chr-ID Chr1; po s 12592571 to 12593107 reverse strand)
ggaggtagggctactgattctttggttacagttactttgcatattatctaaaacaattacctttcgtgttgatgatattttctggcaagatggaaaatttagctgtatatgctcttacctctttacaatatcacaacattatactttagttagattattgatcatggaaacaattgagtaaatcactaactgaactgttagctatttttagcagtgttatttcaatgctgctgcaaaattccttatttttcacttgggagtatcattaaagcacatgctggggcttttctttggacattttaacaaggttgggcacaagaaagtttgacattgttagtacaccagttcttgaaacaagatgcacggaaaatagtaaccatctgcaaaacaactcaaaagccgtttgtacatctatgcagtttttggctattagagctagttgtatcttgtatgctgactcactgatctacgccctttgttttcttaactaactggattgtcctcttccttttgtttcgttccatccttattcaagtg

SEQ ID NO: 11753 - DNA, 655 bp, Oryza sativa
  Intron number 1 from transcript LOC_Os02g01760.1 (locus LO C_Os02g01760) derived from phytozome v7.0 (chr-ID Chr2; po s 421550 to 422204)
agggcaggtcttctccacttactggacccggcaagattatttgcctataccaccaagagagcagaagattttcccctaccccacccaacatcctgaaagagtccatataggcactgatcggcctagcaacgatgagggaggatagcaagaatgctaactgggaatggttatgtttgaaatgtttcttaggctcttaacactgtttttgctttgcacttctggtatcattttcgtttctgttatcacttttgttttgacgtaagtggtgcacaatattactcattctgatttgtgaagaaaaactcgattcaaattgtggactgcatgagtgttggaccatgtaaattgtgctgttgcgtgaccatgaccaatgaaccatgtgtttggcacttgaatcctatgctaccaaaatttcagttgtacgtagagaacaaatagttcgattacaatgtttcaaggtgattgaagaattacagatactcttgtcatcacttgaagagtctgctcttattcacagccattttttcttcttcagatattgtatgtatacagaaggacatgatgcaatatactgagagcaaataacaaaaattcagtaattttctgaaatgggaaaggaaaaacaaagcttcagcagtctaaattcatgcctagc

SEQ ID NO: 11754 - DNA, 843 bp, Oryza sativa
  Intron number 2 from transcript LOC_Os01g70150.1 (locus LO C_Os01g70150) derived from phytozome v7.0 (chr-ID Chr1; po s 40600528 to 40601370)
tcgttggtgcgcttcttccagaagcgcaaggagaggtaattgatacgacaaactcagctgcaaattgattccatctcgtttaattcttagatgtatggattaacacactagctatagtgttctaattgttgatggagtgagctagattagtcaaaattaggttaactaaaaccaatcgtttgcaacaaaaacaaactgtgcttctttcagatatatgaaattaaacacactgtcttctaaagaatctctccaacaaaatacttgcaattgttaattactattggagcacatgcagcttggttgcttctgtccccggcaaccacaagcacactggtccatggcgtgctattcttaagagaaaaattatgcaatgatttagtataacaggagtatgcttatagctaagcgtgaaacacgtttgaattgacctagatatgaagtcgactcgtcagtatacatatatgtagattgtactaagctgacatttcaaagttttgaaggtcgtgtatatatacaattcgttgcttgcttaatataaatatttttagatttggacacggttattaagaaaataagtagaattaaacaggaggaagattgggattagatgataagtagaggtgggtggagaaattgaatgatgcagggttatgattggttggaaaaagaatgttggtggggaagctgttatattttgatataaattttaaagactaaaagttgttatattttaggacgaatgaagtaaataataattatccacgtttcgctgtcacacgcacttaattgttttactattctgtaactcattttccatcacatggcagattgtacaggccctag

SEQ ID NO: 11755 - DNA, 913 bp, Oryza sativa
  Intron number 3 from transcript LOC_Os01g39800.1 (locus LO C_Os01g39800) derived from phytozome v7.0 (chr-ID Chr1; po s 22446957 to 22447869 reverse strand)
ggtaagtttgctccagaaaaccatgtcttcccccagcaatttcagttcttagaagaagctatagtaatactgctttaatcttagactatgggcatggttctttttcgcatgagtatgtcttagaatggggagaatagctactgtagtccctaaagtttctatgtaggatcattttagtccctaaccttttaaatagttcaaagaaatccttaaactttgtcataaggcctagaataatccttgggtccaccaaaatcgtcatatggatatgccatgtcatcattcatgcaaaatctatgataaattgtctagtttacctttatgtatatcatagaaaaataaatgtaagggtgaattagacataaccatagggaaaaaaatacttttcctttttttcacccttttgacgtatatttttgctcttacatataccatatattttttaatttttccttttgttttttattttcctatgatatatgtaaatataaattggacaaatcatatagattttgcataggagggtgacatggcatgtccatgtggcgattttgatgggaccaaggactatatcagcccatgtgacaaatttaaaggacttgtttgaacaatatgaaaaattaaggactaaaatggcccaggagcgaaactttagggaccatcttggctattctccctcttagaatgtacaactaatgatggactgagacttgatcttcttgtatctgagggaggtgcttctgtaattccgttgttctttaaaatgtaatccattatgaaatgcacttagtgaagcattatagtacacactatctgacttttacttgcataaatcttgttaattgctgtcttttattgttgcaatccgtgctgcttgacaaatatttcagagaaagtgaaggagaattcgagt

SEQ ID NO: 11756 - DNA, 871 bp, Oryza sativa
  Intron number 2 from transcript LOC_Os02g48220.1 (locus LO C_Os02g48220) derived from phytozome v7.0 (chr-ID Chr2; po s 29518631 to 29519501 reverse strand)
cgaaggaatttccctaatccagacactttaggtaaccggtcacatcaaactcaaaaactacatttgggctgagtttagatccaaactttttcttcaaacgtccaacttatccatcacatcaaaactttcctacacgtacaaacttccaacttttccgtcacatcattccaatttcaaccaaactttcaattttgatatgaactaaacacacccttggtctagtcatatgatgttgtatatctatgtactaatacatgacagtgattgaactagtataagaagtctacaaggcacgtatgttctctgtacttgagcatgtagatgcgcatacatctgaaagaaaacacataataagggagattgagggaggggcttctaaattctcgaaggaacattccgtcgttatttatatatcattcaaatggttgaaaaaaaataaaaaaaattcaaccaaatagattaatatgagatagatcactccacaaatatgcaagttaaaattcaacttctacatgttgaaaaaaaaatagaaaacactatggctagttaacgtgttttcacagtcaaatttgtttttttcgttacaacttgtgaaagttaaatttgaccctacatatttgtggagtgatttatcacatattaatctatcttattaatttttttttaatttttttataatcatttagatgacatgtaaataataagggatatcgccttgagaatttataatagtttcccgggagattgatcagggtgtacattgcttgctcattgggcaaaaccctgtttgaaatttgagaaagagatagagagatgatcacaagggtttgactttgaccagggatagaggaaggcgcaacgctgggagcaa

SEQ ID NO: 11757 - DNA, 920 bp, Oryza sativa
  Intron number 1 from transcript LOC_Os02g55980.1 (locus LO C_Os02g55980) derived from phytozome v7.0 (chr-ID Chr2; po s 34256099 to 34257018 reverse strand)
ccgcctggggagcgtttccgcgggacgcggccagagtatgcatccgtctcccctcctttcttcctccttgccttgcgtagctactggttgaatcgctgcaggttgcggccctagagagagagagggagggaatgattggttggtctgttcctgaatcagatctgaatctctgaattggatgatagcctgggagaagaattacatattacccacctaggttgcgtacatgtggaatgattggttttgcacttatctagctagtagtaactttttagcaagttcacatttatgagcaatttttcgtataagttctcttgccgggccaattcatgcagaattgtattgattacgacacgctggtgagctgttcacatgaacactcttgtgggcgtttgcggttcgctctgttcgttccttttgctgtgcacatggctgtttttgtttatcttcgagtctgcaaatcatgtgtgtgtctgacagaattatgaccaattcatatgttgaaggccgactgaaaacaaggtctggtgtctggttgttttagactatgttgagggagcattactctaggtggatttctctgttctgtactctacaaccatattgttgtgattcagcctctattctccatccaccgtagttctttggctgggaaacttgttcgatttgaatcatgtgcttgtgctggggagctggcaattcgccagttcaaacagcatacttttcttgcacaactgtttttgtgataagttggccaaagcaaacactaaacattatattcgaggtggtttctgtggcaattttgggctttactccatgtactgtctgtaatgtgtttctcatttcacttcaaaacaatacattgcttatctacctgttcctattccggaaactgaatctgaacagctgcaagggaaaca

SEQ ID NO: 11758 - DNA, 624 bp, Oryza sativa
  Intron number 2 from transcript LOC_Os01g17160.1 (locus LO C_Os01g17160) derived from phytozome v7.0 (chr-ID Chr1; po s 9868050 to 9868673)
accactgcccctgggtcggccagtgcatcggtctggtgagcaccatactgttactgatgtagtactgtacattattaagctgatatattgaattactgaaacaaattatttacttcatgcttcgaaaaacaagtttccagctatttcaccggattacttaaacgaattatttacttcaagcattaaaaaataagtttgggggtttgctgaaagtacagtgggctcctctgcctctgcccttccttgctattttttttcctttttaagtagcctttttccttagtatcagtcttctcctttttcggttttttctttctttattctccaataatggcaatatagccgttttgtgttgtgtaactaaactcttttttcttttgatatattgatgtgtaatcttttttcatgttcgtgaaaaaaataagttttcttaaaaaaacttcttctactgcgttgttttaaactatttgttaaatttatttttctaaatatttgattaatccctacaaccaagtagataatccactcgataaaataccaatgatgatatatttgatgagacggaggattgttttcgcattttgtgcagcggaattaccggttcttcttcctgttcatctcgac

SEQ ID NO: 11759 - DNA, 770 bp, Oryza sativa
  Intron number 2 from transcript LOC_Os01g56490.1 (locus LO C_Os01g56490) derived from phytozome v7.0 (chr-ID Chr1; po s 32567461 to 32568230 reverse strand)
gaaggtgagatttctctgtgtttttatatttttcctctgaatttaatctgatctgtttgtcaagctttgttattaattgggttatatttttttagggtgttaactcaggccattttttcatagtatgtttcatgggatgcgactagtctctagaaccactgcccaaaacattaattatgaatcgtgcattcacgctgtacttgcaaacttctggtatttagttttttcggtactcgcaaacaataggttttgtaagaattactgaactctactgggaggtcgccagggtcagtaggagtcctcgggcttgttctcccaaaaaataagtctagttaactattgaagaatgtgcggtttgtaagttaactattgaagaatgtgcggtttgtttccagatggttttagctctttgattataaggtgataaacatgtcctgtagtcctgtactattggttgatgctaaggaaaaaaaacaatgcagaattccagatgctggctaagaaacctggaacttgaaaagagtaatattccaatctactgaacatgctctgtttgttttttttctttcctggttgtgtgttggttgttttttgtggtggtactggtatacctgtcgttatcaggtcattgaaaaatgggcatatgctaattttcaccggtgcatgtgacactagagtcatgcaattgtttatcatgttacttttgttgtttaacatatttatttcatcttgcagactctggatcaacagttgagaacgagcaggtacca

SEQ ID NO: 11760 - DNA, 994 bp, Oryza sativa
  Intron number 2 from transcript LOC_Os02g13270.1 (locus LO C_Os02g13270) derived from phytozome v7.0 (chr-ID Chr2; po s 7067963 to 7068956 reverse strand)
agaggatcgagaagcgccgcctcctgctcaaggtacggacctgtgcttgtgctagtttcctgccttcctgcggggttgttgcgggattgggtaaaggtggatcgttttcttgattttttttagtatagtcctttatgactgcgagactgatcgtgtgctgatctcctttgtgtatagaattctcatgtaggagtagaggatttcgatttaggatttgcagtaatgcagtatatcaatgtgatttgtttattgtttgagtagaggatccagttgaaagatgccttgcgcttctacactgatgagttgtatagcgagtagtttcaggcattctgatctggtgaggtttgcttaggtgcgctgcagttcttgcgtcattgagtttccatgaatagaaaaattagttgttagtgctttacagcattgaggatttttaggtatcctgtaaacttcaattataaaagagtaaattttatgtgttgctgaattgccacaataatgtatatttgtgcattccaactatttatgaatgtttgatactttcaggctgaagcaagctcttagtttgccattatctactacttttggtctcagttaccatagagttacggatccttggatttcaattttgattacacattgtaggctgaattatgactagttgcatggccattaaagtattaaaaaactattcaaggcttgaacccttgtttttcacttctacttcttgcttttcttcatgagacacttgacatttcgtccagtggacaacaaatggtgcttcacatctattcatatctaacctgttctttgatgttaacttggaagtttgtatctaacctgttctctgatgttggtaacttggcaaaatttaatcacattgccattcctacaataactttctcttctgttatttatgatgctttcatgcatgtttttgtgtactaaaagttctgacaagtgtactatgttttcctgtagctctttgggtttgctt

SEQ ID NO: 11761 - DNA, 1016 bp, Oryza sativa
  Intron number 1 from transcript LOC_Os03g02470.1 (locus LO C_Os03g02470) derived from phytozome v7.0 (chr-ID Chr3; po s 887331 to 888346 reverse strand)
agtttttgacagagcaatagcgagattgccacacggtaagatgagatcgtactgtatattgatcagcaggaacaggcaggagcccaggactcggtagattctgtattcttgacctcatgcatcagtggatcagcaaaagccctacatatccttatccacaggaagctgtgtgcggtggtcctagtggagattccgagccgattgtcagcgagatgtttcactgctgctgcatgcccccgagcatcagccatttcagccccggcccagccaaacaacacccactcgagaatttttttaaaaaaatagtacaattttaatgaaaatttataaaaatagatgttgattgtctaaaatcacagatttagcacattatcgaataaccattatttgacagggtttaaaaaaaattaggaacttaggatatgtgtgtatgcatatgagcgagctgtgagacctcgataggtcaatcaagccaattaacatgtcaaaagaccattgttcgacatgtaacttatcgaacaatggttgtttgatagataccttattgaaatatgattgttcgactggttactgaatatttgatttctatcaaccaacacctatttttacacttttttttattaaagttgtattatttctacaataaactgtccactcgatctccccttttgccctccaacttgacgcgtcaatggacaaaacaacaacaacaaaaaaaaaacaacgtggggtgtgagctctctgaacctcctagcttgcccgagacagagagaaaaagaaagcctcatctccggcccctcttcctccttgattccggtggctcgccgccggtgacgggagggagaggggtcaggctcaattgcgtctccttcgtatagtagtttagtcgggttagtctcgtagtcaagttagtctcgttctatgtccttcctgttctttgtctttggtcctctatgaagagtccagtattcccttcttcagatctgaaatattgtgggtggatcagccagggaggt

SEQ ID NO: 11762 - DNA, 736 bp, Oryza sativa
  Intron number 1 from transcript LOC_Os02g55870.1 (locus LO C_Os02g55870) derived from phytozome v7.0 (chr-ID Chr2; po s 34194070 to 34194805)
cctgcagctggggactcgccaccctcctcaacgtctgtgtttttctttcttttcttttctttttttttcctttcccatttcatgttaagttgtttggaaagtttttcaaatttgagttccagaattgacagtaaatttagtagtttagtatatcatctcgttgcaatgcgattccgtagaacatggacgtggttttcaaggatgtttcttgtgcaaatgcatttctttctctctttttttttatgtagtcggcaacggtttggtttggatctttttgggagctgtgttggataggaatttgacggcctagggagtttcatggacctataattttgtcggtccatttgcatttccatttgcatcacaaccttttcctaccaaatcatgtgcaaatgtaaagcctactaccttaaagaatgtttgggtcaggtttttatgaaaagaggtacacagtggtaggaaaggtagcaacagtagtttattttgttgcgtgcctcttcaactcaactgtgattttttaaaaaaaaaaagaagaagaagaagaagaagaagcaagaactcaactgtgctagcttggaagttgggattctttggttgctaccttgcaaaagtgtacaataattatggtcatgagcacgggtgattatctgattgacacaggtctttaatgattatctgattgacacaggtctttaatgttttcctccgcaggatctttcaaacaaaatcctgttga

SEQ ID NO: 11763 - DNA, 957 bp, Oryza sativa
  Intron number 1 from transcript LOC_Os02g39550.2 (locus LO C_Os02g39550) derived from phytozome v7.0 (chr-ID Chr2; po s 23867960 to 23868916 reverse strand)
ctcgacgggctcggcggcgcgcctctcgcccggcggtgagccgattcactctccacccccgctttacctcgagacgatccctgggcgtgtttttctttgatttctttcccctgggtttctctgctgggggattcgcgtttgagccgcgagtaggtcgttgggtggagtggatcgggagccgggtgggtgagctcgctctttgctcatcggtgtcgcgttctttttgtttttcttttgggtgatttggctgtggtcatcttaggattgatttgtcagtgttgatcaatgcaaacgaattagtgtttttcctaaaagttctttttatttttttccatgatgttgtagcgctacactggtagatcctaagtgccgtgtgtttggattgtctctgggttgttggttctctgtagctaccagaactgtatctttccctcgattatttgccttcacaggaattgtgaaatgagtggactttaatttactgtgttacttgggttccctgtatctgtactctagcaacatgggagtagctggttccctagttccagctcgcgatagtaattttcttatctgttaggttcaatgaattgattcctattccattctttacatttgttagattctagcaaacttctaccgatgttagtgttgtgctgagatgcccttggatgcttgaagtgaatttctggtgatagctatcttgttgatttaaactcccacttcaacacaccacgtgcagtattgtgggaactctggataatccttatttcatcgttgaaaccagcaaatgtagggcctttgggggaaagtagcaaaatttgtttaaacattaagctagaattcttggaatgaatattgttcactcatatgtgctgcttctttcttttttccctttgtggataatccacacgtttatgcttgaattggattatttcagggtctttgtccgaaaaaggc

SEQ ID NO: 11764 - DNA, 564 bp, Oryza sativa
  Intron number 2 from transcript LOC_Os02g15880.3 (locus LO C_Os02g15880) derived from phytozome v7.0 (chr-ID Chr2; po s 8987047 to 8987610 reverse strand)
aagcataagtgggccattgcttctggcttttactggtaataaacataggcttcaacttcaagttactctatcttaaggaattaatagttcatatataagtgcattatcgagcttgaattggcctgttatcattgccgtaacaaaggatcagggtattttttttgtttgtagctatttcacttcaattgatgaaattttactttagatttgttgatgcaaccagacttcctatattttgttaatacacttgctatacagtaagtttgaatcctgtttttatcatctgaattttagacaaaattttggagtactctcttttttaagagtacaacgaaaagccacacaaacatatgcccctcaaatgcatgagaggcatgtagagatcctgctatcatatgaacttttgtatcttctcttcatgtgtgtagcagcatataacatcctaattttctttatatgtgtttgttgtcctcttttttttttgtgtgtatgagttgtattatcatgatcattgatcatatctttgtccttttgttatctgcagaacgtaactcacttggccaa

SEQ ID NO: 11765 - DNA, 546 bp, Oryza sativa
  Intron number 1 from transcript LOC_Os02g18910.1 (locus LO C_Os02g18910) derived from phytozome v7.0 (chr-ID Chr2; po s 11043085 to 11043630)
ccgccaagtcggcgacagctaggtatgttatcccaaatattgtacttgtgtgattctaatgaatatagagcaacaccggctttggccaataggagtagggctattacctgtcagataagggtcccgaacctgtataaaatccttgtctccatctcttttacctcaatctcgcatatacccaggtaccgacgatctccatatcatgcaataaccgtagtcgagacctcaaacgtcgacacatgtgatactccaatttctaactactactcttcttgtactgaaacatactaatttttagcgtttaaaatttactaactttccaatctcatatatatatctcgtatactccctccgtttgtaattatattataagttgttttatttttttcatttatatctcatattctcaactaaattaaatttaagtttgactaagtttatagaaaagtatagtagtatttctaaatgaactaattatgctagatttaataaaattaatttgatattttagatcgttcgaaaaaaaggtcatcaacggtctgatcg

SEQ ID NO: 11766 - DNA, 607 bp, Oryza sativa
  Intron number 2 from transcript LOC_Os03g02130.1 (locus LO C_Os03g02130) derived from phytozome v7.0 (chr-ID Chr3; po s 687751 to 688357 reverse strand)
tcaggtcacacagccgacgcaggagacggaggccggtcaggggccagacgtgacaccacagcaggcagctagagataggcacccccctgataatttgacatatctcactgagcagattaggcgtaggaagaagggaggacctagcaagcgtgcgaagggcactaatcgtccttgacttatctatttgtattaaacttttagtcatttctgttctgtccgtactatttgagaaacactttacgattaacttagtactatcagtactatttcataaacttcttcggataattactcagtagcatacccttcgaatgaatcatgacaaattatcattcaaatatacaaataatgaaactaaataattcaaatattttaaccaacaaataaatactacaatttctgaccaaacattatcaaaaccctaaatcatatacatataacattacaaaaatattttcctttcttacacactaaaataaattacatattattaaaaaaataacttattacaaataaatggagaacgcgaccctgtcgaactgcgccagttcgacggatatcctgtcgaacaggggcagttcgacagccccctgtcgaacaggggcag

SEQ ID NO: 11767 - DNA, 763 bp, Oryza sativa
  Intron number 3 from transcript LOC_Os01g07980.1 (locus LO C_Os01g07980) derived from phytozome v7.0 (chr-ID Chr1; po s 3859104 to 3859866 reverse strand)
atgtatgttttctattcttctgagtcagttgttgcttctccactttggtctataagtctgattcttttgtgttttattacaactctgaggatgttttgtctaaggtcatgtcagtttatgattaagatacagattttacctcggtttttgttagcaaaattttcaaattgttaaactatgtatttcgtgcgaaaactttctatatagaagttgctttaaaatatcaaataaatccattttcaagtttaaaataattaaaactaaattaatcatacactaatggttttcttgttttacgtgtcccatatttaatattcatccttgtcacatcctaagagggcctaatttaacaaaaacattgcacttatgatttgcatattttgtagtttcctatggattatctgaacctgtgttcttttattttattgtatgtgtaagtatatcttacgagttgtacaaagcatggatgacctttcagcaaccgacgagttctcaaatccagcctatatccaaaataccattttgatagaagttcatatcaatgtccaaaaagcccatggccagctttgaacctacagaccatggttttttgggacgcaatgagtcgtttggttgaaacttgaaagccacagattgtgataataggccatacactgatttcaccaatattgtttgttttaggttccttgctgaattacgctgtatgaaactatttttcttcattctgttgtgcttgtgcagttgggttggttgccaatagagc

SEQ ID NO: 11768 - DNA, 1055 bp, Oryza sativa
  Intron number 1 from transcript LOC_Os01g01670.2 (locus LO C_Os01g01670) derived from phytozome v7.0 (chr-ID Chr1; po s 329557 to 330611 reverse strand)
ccattctgattgaagctgttccagaatttttgaaggtggtgtggtgaggttgttctagctgctgtattctatcttcattttgtcactggggttgggttgtggacttcatggttttatcttgtaatatcaatccatatgccctgcttttgtaacagtgaaatttacattgttgttgtcccttgactccctgttactctggtgccgtcggttgctaatttgctgtttatatcagtgcttcagagaatttcttacaaaacagtgcattcaattttagaatattcaataccattcaattctataatgtttggttggcctttcatttctaacgactgaatccatttgaaacaacaacacttctgcaatgtattgttaagagatgtaatgcttaaaacttgcacgtatgaattgatgtggttatttcagctttatcgtcttgtacttacttgcctgtatcttgtaaaacataaacttgatctcgagtcaaccatgtctatctgccctcttgtagtatgagaaattgtgtaccatgtatcacaggtgttgagaatttctgtagattctagtttggagcatgagctaactctgaacaattgcagtctatacgtgttgatgatcatgggtgcagctcatgtgttcttctcctctaggattaactaatatgtgctcattgtccatgtatttatttatatgccatttacactagtgacttaatgaacctttaatctctgtctatccctcgcaatagagcttgcttattctgttagaaacaatgtatgtcatggcttctgttttctgctaatgtacttttggctttagtaaaatctgcatgtattcattcatgataatttgatactatatgcaataacttcatcttgccattccatatcactatgccatactagaagatttttggctttctcttggctctcattcacctcttttgtggagtctattgtggtggtatttgtatgaattgcttgattgagtaaaaatgacacttttgatgattttcttattcagcacaggtacactgtgattggtttaagagggaataa

SEQ ID NO: 11769 - DNA, 890 bp, Oryza sativa
  Intron number 1 from transcript LOC_Os01g12840.1 (locus LO C_Os01g12840) derived from phytozome v7.0 (chr-ID Chr1; po s 7107031 to 7107920 reverse strand)
gagaggcctgcgttcttgcgaaagaggagctagaggtgggtgccatttattcccgtcttcgttcttggcttttgtttttggttgtaaactgacaatttgggggttggggattgagttgataatcggagatagtcatatagatggtttctgaaaaaaagcttctgtgagttcatttgcttggccactctggtttttttgattgtttacttgggggaggtaacaacaagaagaatgcaggggacttcttgtttattggtcatcttgtttagctagttaatttgggggttttttttttggcgctctacagtaaaatttggaggattccatgtctttggggagataaaataaactgtccagtgttgatacatgattcattacactgttgtaataggcagtctgggatttttggtttaggatttgcatgtttgattttacagtatgggagtcatgtacagagttaatgagagcgaatgacctctaactacaaactactaccttccagcttccatcaccttgattcactttccccctttcccttttcacctttctataagagaaaagtgtagtgtactgcttgtgagctatcagttctttattcttgacatgatccatatgaaattcgagcactggtgaatcgagagaagaggccaggtaggtagctggtcaatgcatggatattccgtgggcagatagagaaccctcgtagtagctttctttcttgtaaccacttcttccactgcttctccttgacattcaatttctctgcattatttcttgcaaaagataaaccttggtatatgatatcctaattttctatatttccctctgtaagagtagctttcttgtgatttgcagcttcaggataaagcagacaccaattcctcaaggaa

SEQ ID NO: 11770 - DNA, 948 bp, Oryza sativa
  Intron number 3 from transcript LOC_Os02g05890.1 (locus LO C_Os02g05890) derived from phytozome v7.0 (chr-ID Chr2; po s 2923360 to 2924307 reverse strand)
cgaagcatccgtgaggacgtgcctgcctgtctgttctgtggttaagtagaatatttcttggttttgctatgacatgcctgctcgtcatacttgtgttttagttttacacggtcaaaagcttcatagatcaatttattggttataatatactaattctcagaaatacatttatcaggtatgactgcatcagcaaatctgatagctgagaaagttcatgtcttcaggcttcagtgcaaatccaaagttttgaacttgaactagttcatgaaattagaataggtcggacatttcacagatttatatataaagaagcgctccttgcatattctaaaaaaaatcacagatttaaaagtattggatttttgtaacacaagagatgtatatctcatataaaattgtgatgttgtgaaagagtgctttctcccagctgtacttttaatattaaaaaaatgttatttatgtgtgacactttggtccatttcacggaacatatattcttcaactattcatattggagtaatcattagtctcaaaaagtaaatcactcctgcaaaaatagggaattttaactagactttcagagcttcaggctttagctagagaaaaagaattgagacctaagataggtgaagcgaaaacaaattccaaactgctaattatttaatcttttcatgttcaatctggtgctagcttgaattctgattatactcatcacttcacaaagcatgagtttaagttttattaggcgactatcgtgctgtttttaagaaagcaacagcatgagtttaagtagctatggtttgtaataactttcaatgttaagttgctgtgcagcatgatgcttctaaatttagaagtgcagacacgaagttctaaccagcaaaaggtctgaaaccacctaacactaactgtttctgaatttgcttttttttttctgcagagaataac

SEQ ID NO: 11771 - DNA, 802 bp, Oryza sativa
  Intron number 1 from transcript LOC_Os03g04400.1 (locus LO C_Os03g04400) derived from phytozome v7.0 (chr-ID Chr3; po s 2019675 to 2020476 reverse strand)
agcaatcggcctcttcaagcactcctcccgcttcggtaaggatccgaacctctttctctatctaatgtcgaaactattacatggaatcgttttgattggatttaattgtttcctcgggtaggatttatatcaccatcggttagggttagaaatttggggaattgttgcgttctggaattctggatgttgttgtctcgtgaattgccaccatgtgatgttggggaattgctgcgttctagtaatctgcacggtggtagatactgcaaattaagcacacgatattctagcatactgctctttttttttctttggaggaatgagcacttgagcaggtagtgattccaagtatattgtacaaacagtacttctagattattgcataggaaggactgtgaatactatatgtaagtcgcatcctacaaaggatgtttcttctaggttactgtcagggtaacaccaaagagaaacattgattgtaagtatatcaaaggggactcatgaaggtggaacatcactgatagactgtttgtagaattgagttttgggttcacatattgctaacaaatatgaccagcaaaattatttcattagctaagattattgagcatgaagtgaatttctcttatctggttcaaacaccatagcttcctcccatgcctcctcttttatgatcaaaatacacttggagtaactttctaggcctatgctggctggtcttataaactcatgcgttggtagcagttaacagaactagcttttacaattcaatttttttttgtctaggcacctggagccccacaag

SEQ ID NO: 11772 - DNA, 962 bp, Oryza sativa
  Intron number 1 from transcript LOC_Os03g10890.1 (locus LO C_Os03g10890) derived from phytozome v7.0 (chr-ID Chr3; po s 5593325 to 5594286)
gggccccgccctcccgccgccgcgcttcgtacaccgtgagaagcacatccccccgcctcatcctctctagattttttttgttcatttttttattatttttgtgtggatgtgattagatcgaaatgatttagctcatactgataaaaatttgggaggattagggctcctaatttggcttgcgcaatcccgattggggtttggatgctttagattaggttatcctcgcctagtttatggtgaaatggggacaattgttagtgtggctagcctattctcttccatttttttttctgttactgcatcaattgtcacgttgagtactaatcaatatcgtcctggcaagtactagtacttgcacaaaagactgaaaccaaacccgatcatgctgtttggtctgttcaactgaggtgttcttctgctatgcacttgtagatcattacggtccccaaaggggcagtgataatatcgtgcagtgtatctcgagaattcgttgcatcctgtaaaggcttgattttcgttataaacattaagttgaaggagacccttatcttcatttccatagaaaatataacatatcaaaatggtgtgatggtgcctcatctttcttcactcactcctgaaaattgaaatggctaggatgtatgtttagaatattggctacgcttattagaatgtcaatactcagacctgtgcatttagtattccattgccttttcttcttcttctttttgttccagttccacttgaaattcttattatgaattgttatggatgaacattaaattatgacctaggatgcatagtggaatttataactgtacagcattctgatctatttatttcaactaagaaaacgtaaatttagattgatgtttgttgtttctggtgaatcaaatgaggatattcggtctcttttgttgtctacaggatcgtgtcttatcatacatagacaatagcaacat

SEQ ID NO: 11773 - DNA, 921 bp, Oryza sativa
  Intron number 1 from transcript LOC_Os03g36500.1 (locus LO C_Os03g36500) derived from phytozome v7.0 (chr-ID Chr3; po s 20215318 to 20216238)
gcctccaggcggagcgcggcagaggaggggtggtggttagggaaccaaatcaaacacctagagggctaatgaacagtgctagccaactatttttttattttagagggtattttgcaattaggaaaaatatactattgccactaattttgtcacaatgtaaaatacaccaatcctaagttactccatcgaaatttgtattcaaatttaatattgaacatatttttatttttattatatattttcctaagtattcctattttcctacttttagggctttggttgatttataaattgagaaaagttataaattaaatttgtattactcctatgcatttgggtgaccatattaagtgtccaagtgtgaattttcccaaaatttaatattgtccgatatttaagatttattaaagattctataatttcctaatgagaccgttattaacacagtagcattagctcaatttatttatatgttagtttatttgaatgatcatcatttcatgtgtactcatattatggcacccacctacattattcaaatattttaatatttgatgaaatagcttaatgataacttttcttttatttgattttaatatcttgtgcataaatattcgtagggttaaatatattcttgtaaattatatctattgcttaaatgtcgatcttttctttactttctttgtgatcatttacggtttggcaagccatagcaatcataacaaccagcatgctgcaaaagttttaaaaagttcgaaattttagtaatttttattgtgaggaattttcaggatgttacaacatgtcaacctcttcttcccctcccctctcctcctaccttcctctctctttttcttttctctcacttttctcctcagttgggcagggcacccggcgggtggggaggaggccggtggggga

SEQ ID NO: 11774 - DNA, 565 bp, Oryza sativa
  Intron number 1 from transcript LOC_Os01g36630.1 (locus LO C_Os01g36630) derived from phytozome v7.0 (chr-ID Chr1; po s 20321742 to 20322306)
ccctgctgtacctgaaagattggcattttgtgaaggtctgactagattccgcagcatgtgttatgttggcttttgtttgctgaatttgtggtatcctaacattatctaggtttcttcttgcgatcatattaagtggcagtgtcagaaactgcaatcgtatttgctattagtttgggccgggcagacgtgagatttagtcatgtataacataattgttgctgtatatctgtttgttttatttgtatgccacaaaattttctttagcaactgaaattattaggaccaatacagtacagttttaaagcacatgatattacatagtttcaacactgaagtctattccaattttgtagccttttaggctatagtctatagagtaatatcagtatgagttaattccacatgtggtatatgcctgtgcttataagattgaactcttcctttgatagctccaacaatggagtgtactgaatgcaatattttattctattcccaattgataattcatcccctgctcaatgtggttgattttgtattgtcttgaccttccaggagtaccctggtt

SEQ ID NO: 11775 - DNA, 671 bp, Oryza sativa
  Intron number 1 from transcript LOC_Os02g48830.1 (locus LO C_Os02g48830) derived from phytozome v7.0 (chr-ID Chr2; po s 29871522 to 29872192)
ttcggcgtcgcactccttcgtcttcgcgtgatccggtaagccgtcgccgctcgtggcaacggagatctggttattttggtgcttgatgtgtgtggatgagctgagagtttcgtggattagtggagtctaagagatggccttggcttgggtggtgggattggcgcgtcgcggcggcggaatgcgcttgtctgtctctcgacccctgatttggttagtctcgatggttccggtggttttgttcttaggaatttccgaagaacttcatccagttgtcgaccaatggcgttgtttgtagttctagatttggtccagttgcgtgctcggtggagatgatctcgatgcagagctatctccatatgaattatcgattttggttgcgtttcacggatggatttgtttaggtttgagataaatgttgttggcctgttgaaactcccaggtattgagctgttttgttgttgttgttgtgtgcggcagtaattaatgttttttcccttgggccatcagctgtttctgcgattggcatttaatagtatttctgtcaattggtgggggagatgtgatgctagaacgatttaaaatgctagtagttatatgtgtctcttataatcatatctgaccaattcaaatgctcagcctggcagatcgggatcgactaagcattggccttt

SEQ ID NO: 11776 - DNA, 967 bp, Oryza sativa
  Intron number 1 from transcript LOC_Os02g08364.1 (locus LO C_Os02g08364) derived from phytozome v7.0 (chr-ID Chr2; po s 4450447 to 4451413)
cggatccatccatctcgccacctttctcccacaaggtataaattcttgtttctttgctcgctctgcttggttttgcggttcttgttgctgtaattctggtggcggctgtgtccttttgttcggtctgggaattcggttttgctgggttggttaatttcttgtgttgtcatttcgcgcgtcattttccattgtgtacagtacagagcagtcgattttgcacggatctcgtacaggtgagtggtttgggggttagttagaggaagttatcttttatatcgagttggatggtgaaagtgaaacctcacccaactcaggtggtggtctaaggggaagaaaaaaagatatctttgttggtataggtatagccccttgattcgttttgaatcgtgtgttttgaattccgagttagtctcattttattctcctgttacatttttgatttaggacaaataccgatgttcaattatggatgttggttggccaaacttgtcctagtttattcctgattctgtgcaattataaccttttttatttttttttgggggttgtgtcctgtgattgctgaagtatgatgcaataattgagtttttttttttgttatcacaaaggcttgaaatgtgccaaagagaagtggatgttgagacttgagactgtatccttctgtgtcctacatggtagtagtacagacacttgtgtgatgtctgttaggtttttgtttctgtttttctccatcctgttacatcagcattggtgctttgcatacctggtacatagcaatttgggcgattgcgctcttgattgtttggtttatattgttggttttgccattattgatgtcttgttggctcatcgctgttttggactcattgtacatttgttcttcttttggttctcaattcgataatggtttgccatcttgattttttttttaggaatttactagctctcggagaaactacggttgagg

SEQ ID NO: 11777 - DNA, 987 bp, Oryza sativa
  Intron number 2 from transcript LOC_Os02g34850.1 (locus LO C_Os02g34850) derived from phytozome v7.0 (chr-ID Chr2; po s 20894721 to 20895707)
ctggcagataaaatctcaaaagaaaatctcaggtattgatttccatcctgccatccctatttgatcaattttcttggttgcaccagtcctctaacctaattgagtaatcatacgctgaaatctattactgcattgttccactggaaaataactcatttgaaatcctttttgtttggatttccttttgttttgctatgctagtccacaatcacctatgtgaaatagaaaagtttggtaaaatggaaaacatatttctttctaaaggaagaaagacttctgacactatatttagataatctgtagagtaaatcttacattttgcatttgtttgtgctctatcattttggcagttggctagcagccagccagttacccagaggaagaaaggtgcttcttgcatgttagatgtgcccatgttcaatatttcatattagtatttcctgtgcaaacagaggctgttcaattctacagtgtaactacagatatctattgcattccattccttaaaatattcgtatttcatgggcctttttcatttatgctcatactttccacgggattcatgtagactattaatgtatatatgtagaagcatatcgtttgacttgagaggtgatgtcatgggatttgtcttgcataatactttcataacagacagtttccatgtactatattgtaatgaaaaacatgggcaatattgcattggagactgaaaagtgaaaaatgacctgtgtttgtgaagtttgagagggcaaagattaaccttattaccaacatgtggctccgctacattgaaaatatatattttaattcttccatttggtttaatattattgatctttttgatgtagatgtcatttcagatgtgtttgcctactcattttgaattttttctttatctgttgaatggttaataaattacaactcattttcctttcttgtttatacaaaggacttgtaaggaaaacgaagataagacatttgcca

SEQ ID NO: 11778 - DNA, 812 bp, Oryza sativa
  Intron number 8 from transcript LOC_Os02g37830.2 (locus LO C_Os02g37830) derived from phytozome v7.0 (chr-ID Chr2; po s 22817885 to 22818696 reverse strand)
gaggaccttgcatcgacggtatggcttaaacctgtgctatcatgttgtgtaaatataactcgcaaaacacatttccaggtagcaaagaatacataactatgcagttacctacataaagtcacactaaatcataacatgtataaacaccattcatgtaaacccttttgattttgaatagtggttcataactaaattctttatggcttatgatcttcaatcgtactagcagaatgcccgtactttgttacggaattcaaaagaaaaattgtatggtattacatattcatgtgggaaaaattaatgtctgcatcacgaaatacaatagctttgaactttgatttttaactgtatataatttttttttcacttgtcttattaataatcatgaaaagagattgaacaacaaaaattggcaaaaaaaaatatgccccttaattttattctaaaattaaatatgtaagtacccacttctctctttagttgaaaaaaaagatgcttttatgctcccttctactttgaccttgagtacatatgaaggcccgctcgtcattgatggccaccaccattgccttcttttatgatggtatagataatggaattttgttctagaaatatgtgatgccatttcagtatagttccggcagtgttatttcatttgtatatatttatttatagaattatatatgaacagtaggacactttcctaccttcttcattcaaaatattgtgacatgtgaatgaactgataggttccattgccactcaatgaattcaacatctatgtttttcagattgtgggaaccccaaactac

SEQ ID NO: 11779 - DNA, 648 bp, Oryza sativa
  Intron number 1 from transcript LOC_Os03g19690.2 (locus LO C_Os03g19690) derived from phytozome v7.0 (chr-ID Chr3; po s 11070886 to 11071533)
ctccacacgcgcgcagaggtaacttactcatcgtcactctcatccccccctcgtcgctcgtcggctccccccgttaaatctctctcgcccgcacacgagtggcgcacgtcgacagaggtgatccggtggttttgagctcggatgaattcgagcttggtagtagcttgcgatgcggtgaattttactctcgatgtacgggatctgcaggtggatttcgttcctctcccctcgtgagatcgaccgccgttttgatgttgtgggacgtgcaaagtttgtagattttagaatttgtatgcttataagttggaattcttcctccgagcatgtgtgagactgtttagatgtgctagcattatgagtgcctgcaagatggcataaggaaagaaaagaccttgtgagaagttttttgttgtagttgactggctgttgtaacttttgtccacactggtgctcatacaacaagaatagcataacaaactgtagtaatcttaactttctgtaatcatttgttgctgctctactttatgtttcttctgaaacattcattgtgtgcatcttttacgtttgcaatgtctgttgacacactgggagaatttcgcaggttccatttcaggtgcctctcgaggttaacgttgttcttattggttt

SEQ ID NO: 11780 - DNA, 983 bp, Oryza sativa
  Intron number 2 from transcript LOC_Os01g05420.1 (locus LO C_Os01g05420) derived from phytozome v7.0 (chr-ID Chr1; po s 2560648 to 2561630)
ggataccatcgccgggggtgactccgaggtaataattgatcatgttcttctaaatcttattatgcttgctttgttccaatgtatttcagatgtttgttacggagtactcactattagctgcgtgtttgctgctcgtaatcttagcttgcaattgtgttagtatgttagataattgggattctgctgactgttgtaatgactaattaggattccgtctgttagacctaaatttacttcattctgctgattgatgtagcttttctgcttgatggggctgttaaatatttgctgggtaatcttttatgttgcaactgttggttcattcacatgctacttgttattttcctaagggctgctaaatatttgctgggttatcttttatgttgcatttgctggttcattcacatgctacttgttattttcctaaggattccagattattcttgaggtattttgttagtggtctttgttgcagcctgtgctttgcaattaggatgtctagcggatatcacttaccgaacttatgtactcgtggttacatttgctctctagtatcagtttacggatttgttaaatatgttttgttgcttaatattgagtcactaggctccttgtgacttaacatctagatgcccttggattaatttttcaaggcagattttgcctcttgagaaccatgataacttttagattttcctgccagaatttcaaattgttgatgttatgcaatatttaatctatcgttgcgattccttatttccgagtgtaatacttaggaataattgaataattattatcttggaaacatcattaggatgatactttgctaatcttcatgatatttgagtttgcctgcctacctctctgtttcagagatttatctttggatgatgtgtgggaatatcaattcaagtttgacaatatattctactagccttggacaaaaaaaacactctcctaacattttgttttcatgtaacagg

SEQ ID NO: 11781 - DNA, 878 bp, Oryza sativa
  Intron number 1 from transcript LOC_Os03g22670.1 (locus LO C_Os03g22670) derived from phytozome v7.0 (chr-ID Chr3; po s 13091278 to 13092155 reverse strand)
ggatcgtagcagcaacaggtaaagctcatctctgcctcagccttatcacttgctgctagcgcggcagctgatggattgattatttgatttctttctgttcttttttgttttctttgatgcaattttgtttttttatgcaactgatttctcttcatcgatttaatttcaatttgagaaggggggaaaaatgaggcgaattttatatctcaatgtgctcatgcaaggtttgcttgtactgtagtagtagatttaatcactagtagtgtggctgtttctggaagacagtgatgttgactgttattgttgactattgtttctggctttctgcaagacgattaataatgttgactattgtttacttcctccgtttgacgatgtaagtaaatctaacatttctcacatctgtctagattcattagcatcaatatgaatgtaggaaatgctaaaatgacttacattgtgaaacggatagggtatatgaaatcaataactattgtacctggaagcaaaaaaaaaaaggatattttgcacgcgtgagttgaacttgaaccttcaaatgtatagcaaagtacagggcctttgtatctcaattctttcatctaatggcatgaagaaggaatggtaccctagcaggaacattgctttcatcacccagacaatctaaggaatacacaaatgcaacactaaagtttacttatgttctaattcttgtctgatagcatttattcttgatgagtatgaatgtatgatgtgtaactgagatttgcacatatcagcatccctgttcttttcgataagatatctatcagcatgcctaaaggctagatgttccaatctccacagaatccagtgtccagaatagtgagcagagctttggt

SEQ ID NO: 11782 - DNA, 917 bp, Oryza sativa
  Intron number 1 from transcript LOC_Os01g43774.1 (locus LO C_Os01g43774) derived from phytozome v7.0 (chr-ID Chr1; po s 25072859 to 25073775)
acatcttctggtaggataagccaaatgcgatatattttgacaaacatagacaggggctgtattaacactggatttggtttcttttgctagttggtcagctaacttgtttatgcccctaggaatccacatgacctgcaaaagagattcaggaattgtggcaacgatctgactccaaataggtcttaagctccaatgacctggctccgtttgaaatcttccttttctaagggtttccacaatggtagaattatcagagaggagagtcactccttcaatgttaagaagacagtcacctccaaagcaagttgaagcgccattaactcagcctgcaaggaagagcaaggaacctcggaggaggctttaagaaaaatggcattatgagtagatggcatatgaaagaaaatttccattcctgtgattccattttcccatgctgcatctatgtaacatctggttccgtctggcagtcttccaggtcccctccccctttgttcttcctgcaaattctcttgtattgaattataagaagagaattttattttaagtgttgatcatagcttcagctgccatgcagacttgaggaggctccattttttccccctgaaatttaagatcatttcttgccttccaaatttgcaacattattataagaatcctattaagcactgaattagaagaaccattattaatgaattagaagaacaattattatttggcactgcacgtgggaacctcaatgtacgatatctagatagcacagcatacatatggcaaggctcataaattgacctcaaagttggcagtggtagactggtaggcaagcattccgtcaaagacatagcaagcatgcatatattaatgaaccacattgttaattagcaggtttacctgttgaaagcaggagattaaaagtttgg

SEQ ID NO: 11783 - DNA, 867 bp, Oryza sativa
  Intron number 2 from transcript LOC_Os02g50330.1 (locus LO C_Os02g50330) derived from phytozome v7.0 (chr-ID Chr2; po s 30725611 to 30726477)
cacccaagtcacaaacgaagtttcttttgatccaggtatcttgagctctacagcacttgctgatttcttttcagtaaattgtacaattattgtatgaccacatgttcacattgactaatcttgctgttgagatagtttctttagtaaatattaaagtggttcgcctgtactgtgttttgttctgctattaaggcttgacgaagaacggtttagtcacaacagttcatggtgatgacttttggaattttggtcaatggtgattttgctgttttcggaaggtgaaagttacatgggagttctgttagaatgtatgtatcatatggtccttatttgatatacaaatggacaatgttaatgtgtttaggagcttactgtgatggtttaaaagaatcatttgaatttcttctgttagtattcttgttcccctacctgctttgctgtggctcacaacctgcactttagcatggttgaacgacattatactgttcaatcataaattactggataatgaaattgcatttctaatctttgtgtttctttaattcttcatgctaatgaatttatgagtgctctctaactcgcctgtccctttcatttcaaaatatgcggcaatgaagttgtataaagatatgctacttgagtattacttatctggagtgaaaatatgatcgtgttcttatgtaaaaaaaaatatgatcatgctgaagcactgaattcttttatccagtattttcctttatatttccacttcaaaatgttgatccaccccagtcaccaattctagttgttatctcttgatttaaagtttagataaccttaaatttataaatcgtttcatgtttcaggttcaagctgcacctaagattt

SEQ ID NO: 11784 - DNA, 638 bp, Oryza sativa
  Intron number 1 from transcript LOC_Os02g29390.1 (locus LO C_Os02g29390) derived from phytozome v7.0 (chr-ID Chr2; po s 17450545 to 17451182 reverse strand)
ggcccgtggcttctcccctccctctcccctccccggtagcgatgggagcgggcagcggatccggcaccggcgaccgcgggggcgacggtggcgggcctcgactagggtggcggtggcggctggattagggttagggtttggtttttcttttttttttgatttttcattttcccgtgctggcggcttaagcgcccgcgtcgcccgcacgaaaaaatcgtgattttcgcagacactttcttccagacggtcgaatgctctgcacgggaaaatccttattgtagtagtggttgtgtgttcttatgctaatactccttactcttgttgagtagtgctatgtatctatctatacatacatatataatatatattgcaggtcacattacaagaggaaagcagaagcagcagcacatggctgagtcttaacaagtcatcgttgcttcttcaggtattcgattccatcaatattttcttttcgtatataccgtgtgtttgttcctagatgaacataccattgcgtgcgtatgtaacaaaagtcgaaactatcagttacctcattaaaatgtgcatgttacctctctgcttgttctgattgtatgatttattgttgggatccttcaggtgggcagctaaccgagaac

SEQ ID NO: 11785 - DNA, 790 bp, Oryza sativa
  Intron number 1 from transcript LOC_Os01g20890.1 (locus LO C_Os01g20890) derived from phytozome v7.0 (chr-ID Chr1; po s 11662014 to 11662803)
ctgaggacctggaactgctcgtcagggatatcgaggtgagtaagcccaatgcgctgcaggttgggagaattttgcgtcaaatgttgcttcttgcgttggtaacttttttccaatcgggagcttctgtccgtttctatttgccagggacgaactctgtataaaagtttgatatttttgccggaattctgcctgaaagctctggtcctgaatgtggttttggtctaagtatgaattctgtaggagtagcagttgatttatcaattgaaagttttactacggttcgtgggaagaggagtttggattccagtgataatttacttcacactttcacagttttgttgtcactatcaacaattatttatctgctctccatgggtcttaatcttcattgtttacactgcaaaatagcacaagagaaacccgcagcatgtttttgttgtcatttgagctagccatttcaacagtgactaatggacctacatataatgcatttttttcagagcctagatctttcaaggattgatcggatcatccagcgctcccttggatcacctcatgcgaaaaaaaaaatgtctttccaatgtagaacattagagttatttataattttgtcatcacacttgccttaggttttttggataatgaaagctttacagaactcagtcaattacatcaagatgataaaaccgtactgtgaaactttcttagtacttgccttaatcttatggtgtgattaatgttctttccaagtgcaggcttcctttgcccaccgtcaagctggtgtcggagt

SEQ ID NO: 11786 - DNA, 526 bp, Oryza sativa
  Intron number 1 from transcript LOC_Os01g35040.1 (locus LO C_Os01g35040) derived from phytozome v7.0 (chr-ID Chr1; po s 19389125 to 19389650)
agcgccgcctcgacgccgcccgcgcgcaggaagaggtaataataccaccacaaaagcacacaacaaccacgttcctaacctgctagggaatctagggttaggatcacttttgctccccccgtccgtgatccattttgcggtcgtttgtattggtttttatcctgtttgatgattgtaaataggcttctcaagtggagtaattcgattcccaaacccaaatttgatcccaaagccttcatgttaattctgagcaaacacatgcggcaaagattatgcattcactcgatcgcccaatgtcccctttgttgttatattagaaacaataatttcttttcctgatactttggtggatatcttgaatgtttgattggttcaacttgttgaattggactgcttgctccccatgacaatttatcgaaatgcttgcatttgttttctttggtgtctactcctgccttttgatgtgctaccggctcgtgttaatgatctgttttatgtatttgtgttgtaataggctcagcagaag

SEQ ID NO: 11787 - DNA, 978 bp, Oryza sativa
  Intron number 1 from transcript LOC_Os01g49120.1 (locus LO C_Os01g49120) derived from phytozome v7.0 (chr-ID Chr1; po s 28236200 to 28237177 reverse strand)
cctccctcgcctccgtcaccggcttcagcctcctcgtccgtacaaccccccaaattactccccccagcttttcatttttgattgctgccttaatttgcaaacattactattagtattatcttgctttcgctggctgcatgtatacttgcatgtcctcactgttggattgagcgatactgggagcctctgggagaaatgagttcgattatttgggcatgcaagatttgtgcttaatttgttcttggttagttaactgttccaggatgatcttgaacaaaaaagaaaccaagaaaacggaagagattcacgagtttcctttttcccattgtttttagcatcggtcagtgtccagcttccctggtgcagctttctagcgtgaaagccatgtgattttcggagtattttacggtcgaacacgtgatactgatctagtggcttcctcctgatttccgattggtgtaggggctcaattggtctaagtatttacttattccaactggttcgctagcgacagccactctgcaggaattgtatattagtaggactctaagatgagttatctttgaggaataatcgtccaaaatgtctgctggcctcagcttaaagtttgttgtctttcgggtagaaatggttgttagtccaagcgtgctttgcattggataagagtacaatactgtggtacgaccaggctactcgcatgtcattagtgtctcttcgacttgtttagtcgctgagtcacatcatgcaaagaagaaactgatatcgagatcccgttaaattgagtttactttggtcggtaaactagtcaagtacaattatttttgtaagtcataaagcagtgctgattgtattgtgcatctgaactgaaaacttactgacgcagtacaactctagtttacccctctctttggttgcgagaaaagaaacgattctgatttcacctgatacagctaacatcatttgtaaatgcagattgga

SEQ ID NO: 11788 - DNA, 752 bp, Oryza sativa
  Intron number 2 from transcript LOC_Os02g16640.1 (locus LO C_Os02g16640) derived from phytozome v7.0 (chr-ID Chr2; po s 9508569 to 9509320 reverse strand)
actctgtgagtttctcctcctccccctccccctccactttgcactgctatagatagccagttctttaatttgattttaggtttctatagtattatgcccagtaaaataatcatagcatgattggcgttaccaagtataatgctgttgctgaagtggttaaagatcagttccctgtcaacagtacatgttcttttttactgggaggatgttacagtatattcatgcctgtttctgaagatattcctgtgccactgaataccatcatggccattcaatcaattttgtgccaagtacatgtgaatagctgtaactaatgttgtcttcatataattaatgtgtaactggatattagtttaccctggattgcttagcctaaataaacacacaattaagcactcggtggccacttatttacgtatatgcaatgtgcagtgagatatatgcaaactacataacatcatttttaagataaaaatgcttcaatgcagtgaaatatttacgaactttcaacttattgcttctgtaaatttcaatagatcattttgttgcttttgagactgtcaaataccatgaattgtatgtgattagtgttgaaagctctataaatcccatgacgattatccaattcttttgtaattatatgtgcctctgtggtgcattctgttctagatatatagtttttttgtatagttgatatgtctgttaacttattctaaaaaaaatgctgcagccatctgtccgtaaacagcaca

SEQ ID NO: 11789 - DNA, 452 bp, Oryza sativa
  Intron number 1 from transcript LOC_Os03g28140.1 (locus LO C_Os03g28140) derived from phytozome v7.0 (chr-ID Chr3; po s 16190378 to 16190829 reverse strand)
acttcttcagttcattttggctattacacaaacaggtattactatgaaatgacatgtatgatgaaacccattttgaattgtagaatatgctttgcttccttcaaagaatacttattgcggctcaaaatataggttgttttagatttgtgtacaagaattgagaaagtagttaaattatttagactaacattggagaaaatgagttgattattcatgagcatagtcgcatttaagcagcaaggacaaatgacccgaaaacaagagacaagtgtatcgatcttctatgatgacctatattagagaaggttgagaaggctaaaaatattttatttactttgttacttcacaggagtttgacactgaatattcattgattttttaccttatgtgttacttgatgaattggcaagttacaaggatttctgatcgtgtgatagtcttcttcaggagtg

SEQ ID NO: 11790 - DNA, 846 bp, Oryza sativa
  Intron number 2 from transcript LOC_Os03g22550.1 (locus LO C_Os03g22550) derived from phytozome v7.0 (chr-ID Chr3; po s 12953841 to 12954686)
ggccaaggctcccagagacaaggagcatccgtgtcagtctcccaattctcttctactctgtgatcctcgtttgtatacggatgtgattcttggctatggtggcaggactgatacttaggtaaatgtcatgcattgttctaagctcgtggcaaaccgagggtccaatagatactaattatctaattattgactgatatactaattaatatgatgtaaattaactagaattgaataatctacctggggacctctgaccccaggaattactatgtagtaacgccacttctaagaggcatctgtctaccaatttatgggagttttgcaattagttaactgatatactgactgacaagacgacaatctcctgttcccacttcctttgttgacataggcagtttacttgcattcataatggaattgcagaaacttagctccactagaacataggctgttactagggtcatgttttatgtgttaaaactgttaagaatagtcaaggctcatatatgatgattagcctactttttgaaagaaaaaaaaaagaatatgaagggagctgaaatccgtcagttgtttacagtatggaagctattactacatgtgcttgtgcgttattgcagccacatgcatgttcatgtgtgcaacaagatataaatgctagaaaagttagtaagggcattttcttactgattctcatgttttttctaagctacctgaattgcttgcgttataataattattaaagtctacatagaacagcctccatgcctatttgatttattgtcttgtttgattgcgctaaaagtgttgaagattccatgtcttattttgcttcccttccaggtc

SEQ ID NO: 11791 - DNA, 643 bp, Oryza sativa
  Intron number 1 from transcript LOC_Os02g55220.1 (locus LO C_Os02g55220) derived from phytozome v7.0 (chr-ID Chr2; po s 33817136 to 33817778 reverse strand)
tcctgacaactttacaagttaataagactattcaggtattagcaagtatacctttttccgagatacatttagtgatcctttgatggctaacaagcacagagaaacattaaagtaggtagaagatggagacatatatgattgtgtcgatgtgaatctacaaccatcattgaaacatccattgttcaaaggacataaaattcaggttagccactttcataaagatctgattttctatcacatgacggtgatttagatatttttaattttaaatcaaaaaatatttgcaagtcccttcatattcataattatatggtatataggctgaaaattgtaggaaaaatcatcatagcaagattctttacattagtttgtattcatgataggtcatagcttgcttctacatttgtttttaaaaatcgttctttatccactctctacactttgatttaacattaagaacaataacttctttttgtatctattgttcatcgtctacacatgtgaaaactgcacttcaaatcatgtgtgcatatttttctatgtgtatatctatttaattggttgtgcgttgggagtcatttattatacggtgatcaagttttttttaatgaatacggtgatcaagttttttcatgacaaatag

SEQ ID NO: 11792 - DNA, 497 bp, Oryza sativa; identical to SEQ ID NO: 11503
  Intron number 1 from transcript LOC_Os02g43930.2 (locus LO C_Os02g43930) derived from phytozome v7.0 (chr-ID Chr2; po s 26513641 to 26514137)

SEQ ID NO: 11793 - DNA, 866 bp, Oryza sativa; identical to SEQ ID NO: 11736
  Intron number 1 from transcript LOC_Os01g37260.1 (locus LO C_Os01g37260) derived from phytozome v7.0 (chr-ID Chr1; po s 20804993 to 20805858)

SEQ ID NO: 11794 - DNA, 704 bp, Oryza sativa
  Intron number 1 from transcript LOC_Os02g03870.1 (locus LO C_Os02g03870) derived from phytozome v7.0 (chr-ID Chr2; po s 1647850 to 1648553 reverse strand)
cgcaactacttcattggtatacttgattgcttcttggttcttgcagcagagatacatattgattcttgcatctaaaaacaagatacacatataataagtagaatgcgaatgcaaacacctcaggaaattatatataatatctaattaatatcgatgaaagcttttgcgtgtttgaaaaaaaactataatatagtgcaggtcaaactaaaacagtttgaagtctgaagttctctaatatatatttttgacatgcaaagattttacgcgttcgtgaagaaaaagtttgaagtttgaacgaatgtctatattgtgattcggccaggagtttgtttaagctagctataacaaaataacatttcttaaagaattcgtactttgataatgggtaatgcagacaaatgtctaacgaaccagtttggtgagattgggagtcaaacactctgaatccgtatgatatggtcatggaaatatggatattataagatactaatgattttgtaaatacaaggtttgaatcttagctttcactgcaagcacaagtgagggcatgcatctccataaataaatgtaaatactaaaacagattcaaaatgaattaattaatcaaaattagctagctactcaaaccggccattaaattaagacgaatatatatctctcaaattgcagggagcgtgctgagcggcggcggcagcgtgccggcg

SEQ ID NO: 11795 - DNA, 678 bp, Oryza sativa
  Intron number 1 from transcript LOC_Os02g39040.1 (locus LO C_Os02g39040) derived from phytozome v7.0 (chr-ID Chr2; po s 23570049 to 23570726)
cggctcatcctttccccctccccttcctcccgcaggtaaagcctctgcttccttcttcacgcgcttttaagtggaattggccttgctagattgatagctgagtggaaatggaagctgtgtgtggagtttcctcttggctcttgtgattccagactcgatttgttcacctgcgccattcacatggagctgcagttcaaacccttaggttttagcatctgtgtaatttggagagtaggtgctccagttctacttatagacgaaagattcatattatagtcctggtctcagatggggatgccaatgactgaggtcctgttagaattgtgaatttcaatgtcagaaccaattttgcctcctttctttgggatcaaaactggcagtcattcttttcaaaaagaaaagaaagagaaagagaaagagaaatggcagtcatttaatttgtttgtataaatgcaaaagggtctcaattttagttcatttgctacttttgttttggttggactagaaaaccatcaagctaaaacataaactttcaaaagtaaagtaacattgagtatttaacattgtccaataattgttcactcttattcttatcatgatatcatcatcccatacattcttaacgctgctatctgttctacaggctttgcactctaatttctagacaacttcccattt

SEQ ID NO: 11796 - DNA, 437 bp, Oryza sativa
  Intron number 3 from transcript LOC_Os01g63880.1 (locus LO C_Os01g63880) derived from phytozome v7.0 (chr-ID Chr1; po s 37066194 to 37066630 reverse strand)
agaagcagttcaacgagaatcggagctcagccaaggtaagcaaccaaacacagttacacagaaacactgctcagagttgtgataccaaattcttccacttccagagaaaatgtttcacatgaagcaacttctgcagtagtacatgtgtacaacaaaaatataatctcataactttgtaccatgaactacgccacagagagagtcaacttccccttgacttccacatgctaccaaatttagtgcacatgcagtacaaaaatgtgtaccaccaacttgataagtataaataatttgctctctcaaaatgcttttttttaataacaaaatgcactgcagagtgctacccacaggttagttagtatcatgagtgaaacctggttgttttggttcaaaatttgacattttactcatacttttgtctttggagctccaggttc

SEQ ID NO: 11797 - DNA, 648 bp, Oryza sativa
  Intron number 1 from transcript LOC_Os03g09900.1 (locus LO C_Os03g09900) derived from phytozome v7.0 (chr-ID Chr3; po s 4923617 to 4924264)
gtaccgcctccaactccaggctgcaccgccgtaacgtaagttcttctcctcctccttgttgatcgattcagtgaactttttcaattagaggatgttgcttctcgagtttattttagacgttaggcatgtcaccaactaacgataggtaatcaactagaggtcagtcatcggtgtcatccttttaaagattttcattttaggatcgccgaattgttttgatcagatattccattccagttgagttgaggatgactggaggattgagaattaatcctgttggattgatcaattgacatgatgatatacataacctaaccaaatagataggcaattttggcggctaacttttaataacacgatgtggttagttcaacaaccggatagagatgggattaggagacgttatcccttctgctcatctgtttctagaaaaaaaaaatgaagggtcaaaattcaactccgagaagcaaccaagcctgcaactgtcccaacttttgtgacatgcagttgctcaagttgctcaaccagtacacacaattttctttttcatagttgatcacgaaacaactacttgtttggtttaatttgattcgagattatccttaatctgcaccaaactaatcaacgcatggtcgtacgtacagatcc

SEQ ID NO: 11798 - DNA, 833 bp, Oryza sativa
  Intron number 2 from transcript LOC_Os01g40120.1 (locus LO C_Os01g40120) derived from phytozome v7.0 (chr-ID Chr1; po s 22634973 to 22635805 reverse strand)
ccgtccagggccacgcccagtgcatctccggggctgtgagtacacctgccccctccacccatatcttgattgctcgtgcagttctagtgaaatgtgattcgtttgtttttcccatgtaacctgtgtttgaattggcgtcgaatcgaatggtattggatggaaatgtttcgtgcttgtatggtgaggccaggtcgaattgctttcagtttttcgttcattttagttgatagggattagggtggaattcgtaagttttcattatgttcttattagtgaaccaactgcagagatggggatgatttggtgatctgattattgtgaaactgaccagtgaagcgctttcaaagccttaaagtaatccactgaatagggtgaaacgctttcaaagccttaaagtaatccactaaataggtctctactgcgttcattagcctgtgttccctacactaaccgtgcgcacggaaaacggaacagtccattagcacgtgattaattaagtattagatatttgtttttaaaaatggatcaatatgatttttgtaagcaacttttgtatataaaatttttgtaaaaaacgcacagtttagcagtttaggaagcgtgcgcgcggaaaacaaggcggagggagctggaacgaaggaagcctatgttccatcaaaatttactgagcagtcgaactccacataacataggtcttctctgaattctttgagggatgtttaactctctaaggttattctattcgtttaggttggctatagattcatggtaaattgtggtttgaatcttattatcttaatcattaccatgctgcatcccttttcaggagaagt

SEQ ID NO: 11799 - DNA, 937 bp, Oryza sativa
  Intron number 2 from transcript LOC_Os03g24060.1 (locus LO C_Os03g24060) derived from phytozome v7.0 (chr-ID Chr3; po s 13659727 to 13660663 reverse strand)
cttcaaggtaatgaagccacatacatcctttaattttttttagcatttggaatttgttaatcaattcaaaagctgaatgaatagagtagtagtttactgtttctaacatatgaatgtttaccccatcactttctgaaaatttatacgaccatgataatatgtgtctccccatgtgaactatttatatattatttttggtcatgaaaacatttatcagttctccagaatgcaacttgcttgaccacgaattatctataatgtgtctgtagggccgatattattatggtataatgaaagtactttggggacaaatctacacataatttttgtgtatctaatctaaatatttaaaagacatttctgctcaaagtctcgatgtatgtccaaatgaagatgttttcatgaccaaagggagtatataagtcagatattgttaacctggaatacaaatctatctggaaatcatgattttaattctgacgctgtttcagacttatatatttaagtttcaacagatgagccacacattgtctaacaatttatctagggggacccctttttaatcgaatcaaatagcttttaacatatgttataagtgtcctcccacatgattacccattctgacgctcctattaaacttcctgtatgcactcttctgaacaaactttattaatagtgccgttaatatggcactctaatgctgaatcaaaatgtcacttcattacattgtgtcacctataaagtgatattccaatccattgtccacattttcttgtatgtcaaccatttttcaattttctttaacacttttttgatcggttggcaatcagatattgtatctgaccttcctgctttcacttgtggttgggggggactcatgtttttctcttggcacctggcagcttctttggacaggtctaccagtccactgcagaca

SEQ ID NO: 11800 - DNA, 274 bp, Oryza sativa
  Intron number 1 from transcript LOC_Os02g58139.3 (locus LO C_Os02g58139) derived from phytozome v7.0 (chr-ID Chr2; po s 35571902 to 35572175 reverse strand)
gattcgccacgccctcgtccacctcattaccctgggtaacaatcgatcctttttttcttttcttttttgcataatattacgcctttttgcgcttcgattaaattgctagtgcctgtagaccttgtcccttcatatgcctgactgactgactccaaacaggcgtgaattcaatggataaagacagtgaattttgattagaattagtgtgtttgtatatgctgctcgttctccctccccgtttagttaatctgtttgttgtttggcactgacaggg

SEQ ID NO: 11801 - DNA, 1024 bp, Oryza sativa
  Intron number 1 from transcript LOC_Os01g45710.1 (locus LO C_Os01g45710) derived from phytozome v7.0 (chr-ID Chr1; po s 25951744 to 25952767)
gaggcggccgccggcgggaagaggcggcggtggcagtgagccctagatctattgcttttttcttttttctttttttctttttatatgtgtgtttataatatggaggggtagtggtgtaaaattgctacagaatttataaaatgcattatgcattaatttgattagggggggtatattcaccatctcaagtaagaggtgaccacacctacaaatccatcatactcccttcaaccaaacaaaaaattagatcaccaaatccaccttcatccctacatcaaacaaaaaactggatcgccatattcattctaccaaaaaaactggattgccatatgaaaaaaaaatgtaccgctgtatcccatccaaccttaaccgtgaaccaaacaaacccttactaccgtagcatggatgcttgatgcttctttgattttggcaactagtagtcggtagtctgttcttattcctagcaaattccatctgtgacctcatcttcattagtttggtagtccatgatcccaacccgttcccgtcgatgggcccaaaatctagttcaaaattgtggcccactaacgtggagtggaccggaaaacatgggctaactaaacaaggtatatagcgtggccttttgcccttgcatattggctcatttcagaacattgaaactttaaggcaacttattattggccttgttcaaaggcaaggctcgaagccgcaaaactcatcggtgaaaggttatgaaataagtctattttgcttcccttgtttcttactctagtcaaattgcatctatcaaccacaaaagcgggtatgacgccctccctcccccacttcggaaagcggtgcaaatatactccttcggtggcttaggaagtggtttttgccgattcagcatgtggccccctaatgttagtgaaatgtggcaaacacatgtggtgggcaccatatgttagttacatcacttttctccttccccatttctctcctctcttcccctctttcctcgcatgcagcagtggaaagaagtttg

SEQ ID NO: 11802 - DNA, 999 bp, Oryza sativa
  Intron number 1 from transcript LOC_Os02g55890.1 (locus LO C_Os02g55890) derived from phytozome v7.0 (chr-ID Chr2; po s 34207709 to 34208707 reverse strand)
caagtgcgccgagatacagaacgccatcgctgaaggtgagcactgagcagagcagcctcgcttctactgtactacacttacttagttctttcgcttcgtcggttgcttgcttccacgtggcatatacatggcgtttgctttctgcaatttttttttccatttttttgttcggaaaaaaagtatatatatttttttgtgggagtagttcttaacttgcacaattgaagaaaaaaaaagttgattcttgttattagataatgaaaatggtttacatttcctgcctctgcggttaggcacaccacacgggcatggagttttggtacctaaaataaaatcgattcttctttgtttttttttgtttgaataataataatcgtttattgtgatggtagtcgtcttccgtccccgacgtagattattgttaggtcactgttaagtttacaatttgcaaatatgttgaaagtaggaaattttcgcttagttaggcctatgttaattaatcatcagttcatgaatgcaaaatgttaatttgcacggttgatgttataaccttgaaaaattcgatctttttaaatcagccatgatgctaaatgacgtatagttgatggcatcaatgttcatccattgaacgtgtagcacttttgggtcttgaactggcatggaggatactggaacgcctactttcctccctaaaaagtcactcaagggccccatctggacctactaccgagaggataattatagttcaatatcaccacaaaaaaaaaaaaccattcaacatgtgtacattttacattggttaattgatgttactgataagttacaatttttttttttaccgaattggcatttagagtgtgccgatttcattaaatatagccggagttgtacacaagtgtgaatgttactgataagtcacagcactttgagtgtaattatctgacattaatcctactatgagcaggagcaacatcgttccttttcaccgaataccaatac

SEQ ID NO: 11803 - DNA, 470 bp, Oryza sativa
  Intron number 4 from transcript LOC_Os02g07490.1 (locus LO C_Os02g07490) derived from phytozome v7.0 (chr-ID Chr2; po s 3869194 to 3869663)
ttcgagtggcgagaagacaaaggttggcatcagtgagttgcttctgtttattctaggaactagtccattaattttaatgggatatattaatctgtttattctaggaacctagtccattaaaaaaattgctataattttaatgggatatattaatctgtgctggccaatgcattttgtcttgcatgcgttttttcttttctttttttgcaaatatatgatatcaattgcaactgaatgtgttagttcgagttccatgtctttaggttttccaaaagcaatttttagtgctcagttaggtatatgctacagcaactgaatcacccatggcttgttggcagaagtagtttacagtttattgtaccatacatcaaaagtaggcgaaataatttattgctatttgtttgtaatgcttgtcttatttttttggtatcatagggtttgggcgaattgggaggttggtcctgcgtatt

SEQ ID NO: 11804 - DNA, 1019 bp, Oryza sativa
  Intron number 1 from transcript LOC_Os01g11040.1 (locus LO C_Os01g11040) derived from phytozome v7.0 (chr-ID Chr1; po s 5890102 to 5891120)
gtcgggatcctgcgccagctcggagatctcgcggagtaagcgcccccacattacttctcaccctctctccttggcgctgtgattcaggcgagattcgagttgccgcgtgagtttgtggctccagcgcgggatctggtgcgcttcgtgtgtgatgatttcggcgagccgctgcagttccggggggaagtttcgcgcttgttcgggagtggtggtgtgtgttggtttgtgcataggattggggtgatgagaagaagggggatctggggttgaggttggatttgatgagacgagtggcacgctgggttttaggaattagagtaggatttcggtctgttggttatcgagaaattttgcggagctgcctgtccagaactggatatgtgtctgggatctctttctagggttggatgcgttttaggagtgggaaatggctgaccaatgtggttttttgccgcatttgctttgttcgggtttcatgctttggtgaattgatcgaaactgtttatgtattttgagtatctcactgtggttttcagtaagatcttgtgttagcatgggggtaataggttatgctttggaaaatttcccttttgtttttggatgacatcgccggtaattctgaaattttccttttccatcagttagtctaaggggtgattggatgcatttgggttttgggatagatgttattgaatgtctttgctacttctggcttgaggatttcaagggctgttggcaatttccattgcttgttgatgaaaagctcccaccatcattttggaagttgtttctggctattgatttacttttgaataccgccctacatccctacatacctgcctgcttttactatgtttctttctttttattaccgctatatgtttcttaaccgtgtctggtaaaaattgaagtgctggctattagttgggttcgactatgttgtgagccctctattttcatgtaatcgtttagtttactatggctaaatagatattttggtcttaccagatttgcagcag

SEQ ID NO: 11805 - DNA, 869 bp, Oryza sativa
  Intron number 3 from transcript LOC_Os02g30050.1 (locus LO C_Os02g30050) derived from phytozome v7.0 (chr-ID Chr2; po s 17840898 to 17841766)
cccgcgccatccgccgccgcctcaccaagcaccaggtataagatttcataaaaccgtgcacacctactactgatatctaaaactcatgctgatagagattcacatggtgtcatcttccttcaaacttttagcttaacttgggctgttttgttttttttgcatgaaatgtgtacttactaccattgcagtagataacttagttaatgcagtgaattgttctgtactgctacatctgcatgctacaccattttgttaattctattagcaacgccattttgttaactgcgtggggtttcatcattgttggttgcttttaattgttagattgtacatgtaattgtagatttttattatattacttgctataaaattgcttttcttaacaaaattgtgagaaatacaatcagttttgtcagattgtatgcatccctcatcgtcaatcacttcacagcaactactaggaaacagataaaaaaatggggcatcattttttcccatgtagaatgtggaatacatgagccctgggatgaatacatattgctcacgcaatatcaagatatatgtagttactttttttgtttgttttggcagttggtacttggctgtgcttgtctgcatatgatatataggaagatattaagagagaagggtagataaaggacttgtttgctgcattctttgaaaaatgaaggctcacctttttcaattcttatagaaacatgaagtcatttgtcatcctaaacttatgttcaattttctagtgtcttgtaatgaatctagttatgttatacttgcatccgtcttctgacattttccatggttgccatatcacagctttcgctgaagacggagagggaaaagaagcgcga

SEQ ID NO: 11806 - DNA, 511 bp, Oryza sativa
  Intron number 3 from transcript LOC_Os01g58470.1 (locus LO C_Os01g58470) derived from phytozome v7.0 (chr-ID Chr1; po s 33802870 to 33803380)
ctttggttgaggtacactatcaatgaacgtgaatcttctgtcactttcattttgtgaatatcgttcttggtaactactagcatcttcattcacttgaggagccgacatacattttagtgtatactaaccagtcacatgctatgctctagtatttgaaataaccagtaaaaaacactgcctctgtactgtagcactattgttgacatttgaatgataaaggaaatctgaaagatttgttgtgcctttgctggtgtcacgcaagaactgctgcctccctgttgtgaattacttgtttttagaacctataattatcaaacagtcgtttaaaatttattcattctaacttttttttttccaaatgaatttgcctggattccattactcatgtaacaaaataaagtgaagtgagtacctttttacatgatcttcataccatccttcttcattccatacttagtttggccccaacatattgcttcagcggtcagttaataatatgccttgcaggtta

SEQ ID NO: 11807 - DNA, 972 bp, Oryza sativa
  Intron number 2 from transcript LOC_Os02g36890.1 (locus LO C_Os02g36890) derived from phytozome v7.0 (chr-ID Chr2; po s 22262406 to 22263377)
accatcatccagctccacgcgctcctcggaaacaggtgatcatcgcctcgtgctgtgcaggtgtacgcagcacttctgcaggaatcatatgctttattttcgacattcttttcgccctctacactaagaaattattctaaactctcctgggatactcttcgttgttatatgacatctaaatggttataaaaaaattaacaagatatattaatatgtgataaattactccataaatatataaggtcaaatttaacttttccaagttgcatgaaaaaaacaaatttgactatgaatatatgttaactagttatagtttaatttgtttttttaacctgtaaaaattaaattttaacttacatatttatggagttttctattacatattaatctatctagttaatatttttaatttttttataactatttagatgacatacaaataacgaggagatattctctcgagagtagaatctgctctccctctgcactgcagtgctctgcaccgcacagcctctccccactttgacgaccatgcaacacagtacacgtagtaccgactgtcaccgaagccagatggatgtagagtacagtacgtgagataagagtgaaaaaatactggagtccatctaccgggtcctttttttggtttcaccttagtcacgtttacaattaaagcccttgagcccccgctggcttcgctgtgcctcaccatgcgtgtcagggctagtggaccatttgtcaccgccttttgccctgtccatctccatgttgacttgcctatctccgcctccacaattcactgcacgcaccacacacacctccaatcatttaggcattctataggagtagtagattcaggtggtaaaagagaatttgcagttgcaacaatgcaggaaaaaaaataaaaggtaactgacactcagacgcacgtacacaggtggtcggcgatcgcgacgcacctgccgaagcgga

SEQ ID NO: 11808 - DNA, 977 bp, Oryza sativa
  Intron number 2 from transcript LOC_Os01g71280.1 (locus LO C_Os01g71280) derived from phytozome v7.0 (chr-ID Chr1; po s 41245732 to 41246708)
attagttctgcaagtaagcagctctctcttatctctttgcttatgcctacatgctcacctattaagatactctttatgtcatagtgtcatcaaggaatagaaatggagttggttagtggaaggttgcaataaatatatttaatgaaagaaacacatagtactgtactatggataaataggttactaaatgattcccaaagggcatacattgagtgaagggcttattaatgatttaaacagtgtgctcttcgatgtttgaatttctgctgctgatgctattaactagagcacatgacattccgaagtaccagttcagtatttttatcaggtaactgtcaatgtccagctttacagaacaaaaatgtattcagtacttatagttgccatgacatgtactccctccgtactcgtaaaggaagtcgtttaggacaatgtttaagtcaaaccttgggaatataaatcatgaataactctcaagttattgagtttgaaaatgtaaaaattatatgaatagatttgtcttgaaaaatactttcataaaagtatacatatatcattttttaataaatatttttatagaaataagaagtcaaagttgtgttttggacaccgtgtcgctgtcctaaacgacttcctttacgagtacggagggagtataattctgtagcattcattgacattttgggtgtgcactaacccttggttttgcttaatcacatcacatggcctgctctgtttgaagactgtttacatgaaaacacaaatacactgttcttgtcaattcattatagacagggacatgctacttattttctgactcatgctaaagatggtcttatcttgacatgcatttatgtgatattaactttcgttgacccaacctattccttcccttgttttattcaaattacaactaattcagcattttaaaataaattgcagctggagttccaactgagaatatactatatcttgga

SEQ ID NO: 11809 - DNA, 876 bp, Oryza sativa
  Intron number 3 from transcript LOC_Os02g58550.1 (locus LO C_Os02g58550) derived from phytozome v7.0 (chr-ID Chr2; po s 35780339 to 35781214 reverse strand)
tcaggctcaaacttggatatcaactcttgcacaaggtacttttctttttctttctttattcttctttatatatatatgcacgcccaccatcaccatctaaacgttacagccacaatgttctagctctacccacacaacttctgtgcttatctagcattttgtctccctttattctttatgcaaatgtctctttcctttcaatcaaaacaacttccaccacgagttctagaaaactaaaagggcatccatgtcttgtaaaggagcttcattcattacagattacagacacttacaatctcaccaaacactctcagtgaaaggaaacatcactagcaacgttgcaccaaaaccttctgcttaccaccgacctcccgagaccttttgtctctcacccatctacatccacttatctacgtcttgcagtcaagaccttggcaagctggctgagcaccgtgctgtcttcctcctttctcttgaaatacggaccaaagctatcagcagccaatggcatatactactgtttagtaccttccaaggatcatgtggaaccacacccctgaattgtgcattaatcctggtttcccacagggtcaatactgtaagtcaatattgacttagaataactaggtttctaccttttcctgtaaatctgaaaatatggacccaatggtgaaacaggtgtctttcatttcttggtgacatgccaaacaaaaaaggtcaatggaaatcaaatgatcaattatctccttggctctgatcccctcaaaattttgcctatacttattgggcctcccagtcattctcacacagtgcattagcctaaattatctgtcttctggtaatggattttctaaaagaaaatttatttgtttgcag

SEQ ID NO: 11810 - DNA, 972 bp, Oryza sativa
  Intron number 2 from transcript LOC_Os01g36270.1 (locus LO C_Os01g36270) derived from phytozome v7.0 (chr-ID Chr1; po s 20100133 to 20101104)
ggggcgccgccctcgccgaccacttcgcccgcaaggtatatgcatcatgcgtatacgtccacctcctccatcagaattccggccgccgcgcgcacggttttgatcagattagctaggcgcggacgtggtgctgcgcggtgggcgctccgggtggtggcgagggccatggagggcgccgccgccgacgccgacccggcggccgtcgtcaccgtgttcttcgctcgacgaatatatataccaggccaacctccgcgccatctgcggctacctcaaggtagcttcagaatcagattcagtttcgcgtcttatactctgaatactgatagtctcatactgatactgctgcaaacttcttccttggttaactctttgtttggttttgtttcttggcatgaagccatgaacgatgccaatccactagaattatactcatcacgcctccaccgatctatgaaatgaacccgcgagaattcggttagtgaggaaggaattgaatagctagccgttctgtttgttatatggcatttactcgctaagataatattcactatcctctgttgattccattcatggcatttaatccggctaattctagttgtggtgatgaatgacaaggataaaaccagtgaattgcttgtgtctgttcgtactgaattactccgataaaaattgcttttttcaagaatttaaaaccgagttcataatgtaccagtccagtacatatggcatgcttatgattgatttatgttcttgtatccatgaaaatatttaaccattttgtctctgtgtatctcatgtaaatgtatgcacattatacactgtgggagattttaccttttcatttggtgaccgttggcttgatctgagcattcttttttcaagtaacaaattaaaacatttctacctttttgtaaataagatttgtatatgtaaaccgtcctgattgtccctgtcttccatgcagggagatat

SEQ ID NO: 11811 - DNA, 877 bp, Oryza sativa
  Intron number 2 from transcript LOC_Os03g10340.1 (locus LO C_Os03g10340) derived from phytozome v7.0 (chr-ID Chr3; po s 5274248 to 5275124)
gcaagaccctcgtgtccaggacacagggtacaaaggtatgagcaccgcttccttgttcttggccgttgtataattctctgttgtgtttgcgctaagtgtttgctgcctaacccttcctgtgaacgaagggatctatacgaccttgacattgtcaactcgccatgtgatggattttgcaaattttgtaactttgctatgtgtgtgtgtgcactgcgtatggtaggattgatctatatgctgtactaagggctaagatagcatgggaaatatatgatgtattattagcatgttagttccatttttgttcctgatgagaggttacagatgctggtttggatgagcttagttattccgaatagatttgtcttctggtttagcttgtctagttgtacctcccaattgtttatttcatcaaacgtcaaacagcgtggttcaattgttgagagcttcctttagtgtgggattgagtttgtcttctagtttcactaatttgtgtgtttacctgcctttgtttttctggttatgcactatgcagtattagtatgcataataaaacataatgccatattgttgttacttgttagggattcttgtgctgttttaagacgtctgtataactgtactgcaatgggtacaaacattcttcactgtagagttttggggttgccatatgtaggatatatgagtaattttgttcatatatttgatggttacagtgcttcaattgtaggtattattttaatttgtctgttcatcatgctttaggtctgtcaacctctaaacctgtagctgtcataatttatgatgtcatctgctgattctcaatatttctttcgttttagattgcttctgagggcctaaagcatagagtgtttga

SEQ ID NO: 11812 - DNA, 856 bp, Oryza sativa
  Intron number 2 from transcript LOC_Os02g17380.1 (locus LO C_Os02g17380) derived from phytozome v7.0 (chr-ID Chr2; po s 9995190 to 9996045)
catcaaccaggagatttggaggtaaataattggctttaacatttatatttgtttgctttatagagtaattcatgaattgctgtcctcaacattgtttcatgatttcacaatgtttgtctctcccttactcgttgttaagtgtctttggccctcttctctttgcatcgtgacagttaaaaaaattccacggattgagaatatgtaatacctcattacttcttaaattcatctgtgtttgttgacttgctctcaattttgatgtcctaatagtgcactaagaaaatgtaggtatgtaagcatccatttggactatgcaatatagtatacaaatatgacaagtagcccgaaacctgtctgcctgatccttttgctccttttttttagagcacccttgagtttatgttaagagggttctttagggaaattggtaaactgtttcattttccaaatcataagttcacataacacgtggtttgggaattatgggtcgaaatcacatcattagggcctgtttggcacagctctagctccagctccacccctcctggagctggagctcagccaaacagtttcagctccactaatactgggagtggagttgggtggagctctctcacaaaatgtactagagttgtggagctgggtttaggcagctccacaactccactctagactcaactcctggagtaatatttaggagttggagctgtaccaaacaggcccttagtctcctgatcaggcaccttgtgatcttgttgatcctcttttgccaaacaatgtttcattatgtactaatttttcattataccttctctgggcaggttcacaatttcagacatctcaagctagctgcatc

SEQ ID NO: 11813 - DNA, 757 bp, Oryza sativa
  Intron number 2 from transcript LOC_Os03g18290.1 (locus LO C_Os03g18290) derived from phytozome v7.0 (chr-ID Chr3; po s 10251608 to 10252364 reverse strand)
cccttgtattgcatcagctcgccgttcatctttcggtgagtaatcccatcaactgatttagagcacaagaaagcctcgtcttaccatcatctgattaagatgacaaagactagctacatgccattgaaagagaataagtgaaaaccagtccattgaacaaacctactcttgcttagccagcaatgcaatgctgtctgctgactgttaaatgtatcctacattctgttggacctcattatctaaaaaaagaaaaaaaaattgttggaccaggagaggactcactacgtgcatcctacctgttgttcttcgattctcagttattgttttatcatgtactactctatcagttttatattgttttaaaatataagtatttctatgattcaaaatttatatcacaatgtaagtatttctggggtattgattccgatgcacaaaaatccaaacattttcaaccaaaagcttagaaggaatcaaagcaattcaaaatttgaccgataatgtaactgaaaaggatttatttttctcaaccttaatctttacttaacgaaattgtttatgttttggaattgagggagggaatgtgttttaagatcgtagtctaccttttttttctttctgatttcttctttttgtcgtaggttgtttgtacgatccaacagctacccgggactttttgcttgacggaacacacctgtgtctcacattctcagtttctcactgtctcatatggctttcaggctagggcaaattgtca

SEQ ID NO: 11814 - DNA, 952 bp, Oryza sativa
  Intron number 2 from transcript LOC_Os02g17940.4 (locus LO C_Os02g17940) derived from phytozome v7.0 (chr-ID Chr2; po s 10387207 to 10388158)
gtggaattccatcgcttatcagcctggtaaagaatactgttattaattttctaaaactaagagcaatgccataacttattctctatccacttatgataggaggttttattcttatgaaattgtttatttcattattgattcctcaattttctgtagttttttctatgcgtgctaactcagcaagctcttttatgggcctaattgctcaaagacagattcttttttactctagattgaattaaattatgtacataacaagttgaaatcagatgtgcatatttaatggctcagttctgccgaccaataataacataatatttaaacatttagttcggatcataggttcgtctcgatatctaattctagctgactgactatcaatttatgtatttttgaaaaaaaaatcaaatttaaagtataatccaattataatatattatggcccatatatacacaaggctcttatacgggcatcacaaagtcgcgcaacgcgcggctaggtggctagttatactagttgaaatatctaggagataagagaaggcaagcaatggaatttgtttttcccattcaggcattcagccccgtttggaactcaattccacaatgttactagctcacttccacaatgtcaaactgcttgaaataccagtccctttcttctgcccaattccacaatgttaaatagtttgaatacctttagtttaatttcaaaaaaggaatttgaagattccctttcttgtgctcaattccacgatgtcaaacagtttgaatacctatccctttcttcagctcaatctgaatctttttatcttatctataacgagtcattttttttcaccatgtacatcgtacatcatttcttctactgttgaatagtagctgagaagcagtgtccattctcattatgcttgaattttcaatccattttcatccaagtatccaattcaag

SEQ ID NO: 11815 - DNA, 1042 bp, Oryza sativa
  Intron number 2 from transcript LOC_Os03g15650.2 (locus LO C_Os03g15650) derived from phytozome v7.0 (chr-ID Chr3; po s 8630032 to 8631073)
ggctggaagttctgaagaagaactagaaagtgccggtgaggtaatcaatttccttgttccgtggtactgctgatatagtaatattacataactagagagatgaacatcaaaattgaatttcagagctctatgttcttgttgattacctgcttgcaaagtaagtcgttaaatttggtttgtccaaatgtcttatgggtaatttccgtatgaactttctatagataagatatgcctgtgttctttttatttttggatttttaattgatgtcactgtgctatatgagtatatgattcttgattcgtggaccatgctgtctttcctttttgacatgatcggattaatgcattgactaaaatctgttagacaacgggatgaactaaacatcctattttggttctactttaacatgagatgaattatttctgtctttcattttccagttatcctattttctggtgaccatgcctgcttgccaaagattcaggcagtcaatccatcatgttatcataatctctgtgtttaacagagatacataataaatgcatctgacttgtatttactcccatcggaaatttggaatgcacggcttcatcaaattatctcaggcattttgattaagaatgtgttggagtactaggaaggaacttagcatccattattgatagagaagaaaatggtgagaaaacctgcgttagaagggattcgaactcaggctggtgctctgctcctggcagctccctgccagccgagctaggtgcctttcttagacactttgattaagactggcagttacgtggaattattaacttattccactagtcatgttgctgtttttaaagtgcagttcaaactcgatacttttaaacttaaactctcctttttcactctcgctctaccctttacctaccgagttcctcttcatcttattgatatattccataaaatgtcataacgttacttgcatattctccaatatatttgtcgttatatcaacatttggattgtcttgtattgtgattttagggccttgagaaatacgtt

SEQ ID NO: 11816 - DNA, 957 bp, Oryza sativa
  Intron number 2 from transcript LOC_Os03g24540.1 (locus LO C_Os03g24540) derived from phytozome v7.0 (chr-ID Chr3; po s 13987297 to 13988253 reverse strand)
gccaaactttccagaggtatgtgttgcaaactattgattacggaagatttatatcacaagtggaatatctgtatgactgctgtaactgcacaatttggtcgacctatagatagctaaaccgaaatttaagaacagaccttctactttgctattatgacattaaggagtaagtctatagctttcttgagtttaattacatggcctattaccaaccataatagaagagttcatttagaaggtccagtttttaaaaacctggagagctttgatcgccccagttaaaagcctggaaatacaaatggacaaatttcatcctgtcataatccatcttttaagggaatgtgcaaaagaattgcacacctttgtattaagtaggagaaaaaaaactacagaatcaacacgccagagcggcggaataaaccactcctttgcgccgcgccctccgtggacacggtctaccgtgggccgatccctcccggtgccactgacagtgggccccacgaggggtttattccaaaatattcctttttcccataaagaaactcttttttcctttgtccataaaatcatataatcttccaaaaatcatatctcctaaaccgtcactccgattgactccgttcaacttccatattttttcctaaaatgagatttattggatggcagtattaaatcttactgtttgagctattttattagcccttgtgttgattttctctttttcgcatatagttgccaatcccgcggtcgattcggaagctgttctcgacgaggaagaaccaccataggaccaaggcaagctacctttgaccatactatttcctatatgtgcaaaattatgttgtttgtaaatgtgcatgcttaagttacacgtgaaactgtttggcctcggtttgtgaatgcatccgatggacctaccgattagtcgcatttatactctgtaggatattgaatacc

SEQ ID NO: 11817 - DNA, 996 bp, Oryza sativa
  Intron number 1 from transcript LOC_Os02g07210.1 (locus LO C_Os02g07210) derived from phytozome v7.0 (chr-ID Chr2; po s 3708788 to 3709783 reverse strand)
cctcctcccgcgcgcggccggcaagaaccagcaaggtgcgggatagccacctgaagttggattggttggttcctttcagttaacccttctagttttctggatttctttgatgcgtgcttgttcttgtatttgtagcagaactagcagtttctgttaaaaagaaaaaaattggggattcagttgaactcccatgctccaatgttaggtctacccatcatctgtacaactttttttgccttgtagttcccggaaaaatggtaattttgtgggtgtcctttttgtccggtcagggagtccgttccaagttgcaagctcagatccatggcttcattggtacagtttttgtgtggtataattcttggacggttagctaaagcttgggtattgttcagagagttcgtagtttcctccagtaaatcggtagtgcaaggaggcgtgtgaaatttttgcttctctgaaaatatcagatttatctcgtttgattagtagtgttgccgtgtgaggaacgggccttccagttacccagttgacaattgtctcgttttcttggaaattagttgccttatcatctggcattctggtgcatcgtttctactacttcagttctttgcgtgtccttactggtttataccaatgagacaatcaatggcatttgtagctcagcgagtttattttgcaacaaatatgctggatacaagaaatcatctggtggagccagatgtgtaatatgtttttttttttgagctagcagctgtgtaatatgtatgctccaatgttgatattagaatatttaggtaggtaattccagcatagaagccattcagtgttgtgtctgaacactttgctgtttgctaggagtacttgccatcagtttctttaatattgtacttactgtccatgttattatgcaaatgtatgctcttaactgttgatttttttttatattgcagcactgattctttcctttggaacctgcagccaatccatatattttca

SEQ ID NO: 11818 - DNA, 654 bp, Oryza sativa
  Intron number 1 from transcript LOC_Os01g58690.2 (locus LO C_Os01g58690) derived from phytozome v7.0 (chr-ID Chr1; po s 33925662 to 33926315)
tcggcgatccgcgcctcttctcaccggctgtatccccctttctcctcctcctcctccctctctctctctctctgagttcgtggtttagattgtttctggaatctggttatatctctattttttggtatctctcgttatgttctccgtgactgttgggagtagagtcctgaacggagagaagccaatctttgattcttgaagagcgtggggtcttaggggttttggattggggtttaggaaaggattctgctacgagagttgaaaccccccaatattagggcaaaatcttcagagcgattattatagcttccgttactagcatataattttgatgcggccttcgttcttgtttgagaaccgagcagtagaagcacgcttttggcgacaaaaggctattctagttggaaggacaggttcttgattagtttactttcgttgctctttttgcccaaattattgacaggcatatgttttttattatcattatggaagtagtataacactataaccataagtttttcagtgtgcagctaccctttgtatgactaatgaaagatggaattcctattgtttccttaagtactgttgttgcaatcgttgctgaagtattcctgaatcaggcagacaagaactgtggcattaacaaggacaaag

SEQ ID NO: 11819 - DNA, 752 bp, Oryza sativa; identical to SEQ ID NO: 11725
  Intron number 1 from transcript LOC_Os01g22039.1 (locus LO C_Os01g22039) derived from phytozome v7.0 (chr-ID Chr1; po s 12375369 to 12376120)

SEQ ID NO: 11820 - DNA, 978 bp, Oryza sativa
  Intron number 1 from transcript LOC_Os02g58440.1 (locus LO C_Os02g58440) derived from phytozome v7.0 (chr-ID Chr2; po s 35733286 to 35734263)
tctacttcctcgcctccccgttgacctgcaagaaggtcttgcctttcctttactttcctcctcctttcctttttcttttcatccatctttttccccccttctcctcttgctcgattacctcccgatctgccgcttctctcatctgctacacccaccccctctttcgatctgccttccctccactctatcttgatttcttttcattcccttacttttacctttgtaagtcttcttgggaaattctctcttgtagattagaaagatgctacaacagtagattcgtttgccctttcaactaattaattaattcattaattcatctgtatatatagcgtatgcgatgagatgacatgtcctcagctcgcacaaaacttgtgtttgtgctaggttttcggttctactactacttactaggctaagctcaaggccggggggggggggggtgcggtgcatggctaggatcctcatgtgctgtggtgggggacaacaaaacatttcgtcgctcttcatcacatcctttacttacctcaccatctcacctgcttattttctagctatgtgcccaatattaagacaatactccactaacccataaatatagttctcttgtcggtctctccatatgcaccttgcttcaatattcatatatgaaaacttccatttttgagtagattatcacggagtacgtcatcggttccaagccagagatttatttcatttgtcgtttctaatgcgttgcaccttactgattcattcattcttcacctgcaatgctctttaggctgtgtttagttcacattaaaattggaagtttggttgaaattggaacgatgtgatggaaagttggaagtttgtgtgtgtaggaaagttttgatgtgatggaaaagtttgaagtttgaagaattattttggaactaaacacggccttatttcaatatactgacatcatctttttcctttactcactcagggaagtga

SEQ ID NO: 11821 - DNA, 803 bp, Oryza sativa
  Intron number 4 from transcript LOC_Os03g25020.1 (locus LO C_Os03g25020) derived from phytozome v7.0 (chr-ID Chr3; po s 14281868 to 14282670)
tgcatttgggctggcacctgcaattgataccaaaggtagtgttgtctttcttctgtctatttaataccctgctttgccgatacctagatacctcccctcccccccaaatcttttgaaggctaccccttgtgcctgagaccttgaaagcctgtggataattatttttcagaacacaaatagaacatatactagaggctgagaaaaattgagcgtatttaaaaattcaacatgtacttctgttttaaaaaatctgcatataaccaaaatacatggtacactcatatcactatcagaaacttcaaagtatttattggataagagtggaatatatgtttaagagaaagtatagcacaaaggaaacatcatacgattattagttgttttaaactcgattctttcaggccttcgcatgttcattatgttctcctttgaaattccacagcgtacttcatagactagacttctatattgttcacattttttaagtatttgacaactacaaaaatatattgactaaccaaatggtgaagatatgccaaccaaaatatcaagatggactaggggtacaaaaccatgatatcaagaatttatgtttaccgcaaaacaaaaaaaaaagaatttatgtttaccaagaaattactaatccagttggttagtgatgaaggcctatggtaggacctttcgcgaaacaaatttttgatgggaaaaacctctaacccatgtcttataaacctgtgatatcctattttgtgcctatattaatgcggatgaaactccaaattttacattctgtgactttagat

SEQ ID NO: 11822 - DNA, 681 bp, Oryza sativa
  Intron number 5 from transcript LOC_Os02g30974.1 (locus LO C_Os02g30974) derived from phytozome v7.0 (chr-ID Chr2; po s 18500177 to 18500857 reverse strand)
ggcctctgaattttcccagaaacacaaagtaatctcttgtcttccctatttgctttttcccctatattggtttttctgacataaacatgcttgtaatggatgattcctctaatctaaatttgtattgtacaaaccaatctgtatccatcattttacttcctttgttttatcatttgcaggagatacacaccattgtttcacaatagtggcatgacatcgcagtcttttaccctgttgacattaattctaattataaatttgtgaagttaacttcctgattgaacaatattcaaccttgcaagaaattttgcagttggacattaatagtgataaaatataatggggaagaacaaatattataggtgtcttatgttcaagactgaaatgctgcacacatgctgcttcatggtttggccatcttgatcctaaatcacaaatgtcttccttactactatctcatcaaatgttctttctaatgattatctccatacttgatgtttaactatggaagcttgtccgacaagttatgctagtcatgttttattgatgatcatcattctgtaagcgccattgtaacacgctggttaaactctctgggtgctagatgccagcggtatgttatgatttattgtatcattgattcttgcaggcatttgagaggctgatagagaaaataaaggg

SEQ ID NO: 11823 - DNA, 845 bp, Oryza sativa
  Intron number 1 from transcript LOC_Os02g47590.1 (locus LO C_Os02g47590) derived from phytozome v7.0 (chr-ID Chr2; po s 29072640 to 29073484)
gagccccgccgtgtcgtcctctgctggtaaaggttagtgtttttctcgcgccgcattgaagtgttgtcgattgctcgttgagtcgttggggaactagcgtgtagtcaacttggtactgacagctagggttctcgtcttaaagaaaaaggaacagctagggttctggtgaggaatgtggtcttgttaaatcttgaatcgattcgatttttttcagtaagaaatcaaattttgtgatccgttgggggtggctatgaagattgattgattaattaaatgcgaatattttagtcctctttcttttggacatcaggcgttgggttgctccgggggatttggaatatagttgagggtggtgcaaaacgtggatgcaactatggtagctacagatgagaaatgattttgtgatgagagtcctcgagagatcacactggatatatgggtgatcaagcaagaatcggacagattttcctgtttgacaatgcaaagcaaaatctgttttctttccccttgatcctctcatcaatgtgatatttttcttgattggattccgtttctcatgaacttttaacaacaattatttgttaagatttttgtttttcaattattgtttacatggttggtagttagctgttttgtcctactacttttcccccctgaagatgcacatgtgcaaccaatttaactttgttttatttagaacatgatcgctcaatctatgatatgcaattttaatcctttgggcatcaataatgtttttattactgattcatgtgcagttcacttccttaattatgttgtcatatcatgcagccaaacagattcctaaggactttcttcatattgat

SEQ ID NO: 11824 - DNA, 822 bp, Oryza sativa
  Intron number 1 from transcript LOC_Os01g13250.1 (locus LO C_Os01g13250) derived from phytozome v7.0 (chr-ID Chr1; po s 7385013 to 7385834)
agctccaggaggagctccgctccatagagcgccaggttaggtcttacacacagtccccaatttattgtgcaatctttcttaatgccttgggaatgatagaaatatgaacctatttggaaccaatatgctggaccagtgaccactgattgtcatttcacagagaggatcaattgtgacgaacaatttggatagaattaggaggaagggaagaaagtatcaatttgatattcttgtcgaatatgaccattctatttcttgtatgttgttctttgtgcctgagaacactttgttgctctagggtaaaaatgaaaatcagttagctacaacctgtaaattccatctgttcttattatcaagataagatgtggagtttctactgtgtcttagtcagaaattatttgcaacaagtatcaaatgagctacttctattcaaagtatttcaaagttacactatgtgctccaacttccaatctatgtttgtgatggtgaatcttggtgtgtcatccaaaatcattaaataagaggagcatttggtttagtagaaaccataatcctaaaaagggaggaaatgggtattgctctcatatcaagtattttaatggcacagatatgtgtttttttttagaaagaacaaaacagtcgctctttaataccaggaacaacacatgatctataatgtcaaccatctttgcttgactttaaggggaagttttgtatatgatattaaacactcataatttaacaaaatatctattcatgcttttaacagaattgttcttatacaacctgcaaatgatgtttatgtccatatgttgcaggttt

SEQ ID NO: 11825 - DNA, 885 bp, Oryza sativa
  Intron number 3 from transcript LOC_Os02g34630.1 (locus LO C_Os02g34630) derived from phytozome v7.0 (chr-ID Chr2; po s 20760049 to 20760933 reverse strand)
aagcattagctgaggccacatcgtttgccaaggtatcactttctggaaagaccattatcttgtacaaccgaagcctataatttcgtatagcgtggatgcttctttcgagtataagatgctaaaactggttgatttccccttattttcgcacctttttttttctgtgtgattatgtagttcttgtgtgtgtgcgtgtgtcattttgggttcatacgaggcagttgttgcacatattatttgattatggtcgtgatctcctattttatcaccgttcagtatctatctgataatgtgtagtgtttctattattgttggcttccgcaagcacagtttatgctttgacactaacataggttgttgaataacttagtagttatgctagtgtgtatagtttgagatagacagaatatgggcaaacatattcaaaggctattattgatgctcaatactggcagtgttcatagcttgattggtgcttcattatcaactggaagatagtgctccgtgtgtttttcactacaaatagggcaataaaaagttcctttgtggatgtgaaaatgcatgggaaaaatgttctcttttttcagtgtgtggccttccctgccatctaataatttacaagttaaaattgtgtgtagtggcacacttatagtgcttgcaggcagtcttgaattacatgtgtctagaaagacataaaagggcaatcaattttagtttatggaaaagattgtcgtatggaatgtgatgcacaaaaccacctaacctctagtttctttggcaattttgcatggtattcttttgaggcctgtggttctgtgtaatggcacctgatcctgtcatgcaatttcagactattatcaccggatcttcacgtgaacaaacctc

SEQ ID NO: 11826 - DNA, 401 bp, Oryza sativa
  Intron number 1 from transcript LOC_Os01g68790.2 (locus LO C_Os01g68790) derived from phytozome v7.0 (chr-ID Chr1; po s 39953778 to 39954178)
gattctactcgttccaccactaggtagaggtgggatttgtttgttgttgatagattctactcgttccaccgctaggtggaggtggggatttgttctctgtatttggttagctattttgtaactagttatgcgattttcggcctctgatttggcttagatccatgcatgaaattggtcaaatcgtttgatttgttatgatttgtggttcgtttgtagttggtcctggttggtttagattagattggtcgaagaccgctgtgagatgaataatcggcggaaaccattttttatggtagggtttccccgtaggccctggattgtttggctgcttatgattaaaaatcactgtgtactgatggttaacaatgcgcggctacgggttttcgcagatttaatcctca

SEQ ID NO: 11827 - DNA, 979 bp, Oryza sativa; identical to SEQ ID NO: 11744
  Intron number 1 from transcript LOC_Os01g56969.1 (locus LO C_Os01g56969) derived from phytozome v7.0 (chr-ID Chr1; po s 32906554 to 32907532)

SEQ ID NO: 11828 - DNA, 560 bp, Oryza sativa
  Intron number 1 from transcript LOC_Os01g47470.1 (locus LO C_Os01g47470) derived from phytozome v7.0 (chr-ID Chr1; po s 27132250 to 27132809 reverse strand)
agctgaaggcgctgcagaggtaatctcccggtctctttcctcttcgtgttttgttgggggaacgtcggcatctgtgatcttgggaggtgtttgactctgtgcctcttggaattgtgatgggctttgggatttccggtgtgggttgggggtggtgtcggtagaattctggtttgtttttgcaatttgcattgtgcggatttttttctttcttggacaccctgtatcttgcatttgaataattttatataggcgtggttgttgaataaacagttcagagttttgagtcccatcaggagtccatgcctcgctggtggtttgacccagaaatggacattttttttcctgtttgattagtttgcttgtgcgaattgtctgtacagtgatatgaaagataatattttttccccctgaacatggaagaattgggccatcatatgcgcgcagctttattacttttatagttctgttcatgtgctggttcaggtttcagagttaagtaatagagtaccttttgttttttaacagataaaagcaaaccaggataagtttgtaaattcagc

SEQ ID NO: 11829 - DNA, 915 bp, Oryza sativa
  Intron number 1 from transcript LOC_Os03g22830.2 (locus LO C_Os03g22830) derived from phytozome v7.0 (chr-ID Chr3; po s 13198976 to 13199890 reverse strand)
gtatcgtaatcgaaccagcggaaaccgctattcgtgtgcgtgttttttttctattcaatttgtttgctcgggccgcgtaatcttgggagttatctgcaatcagttttcttttctttctttttctttttttttttcattttgaatggagtgaatcgtgtggaaaaggtggctgttgtagagtttttagtcttaccatgaactgattgatctacgggcgagtgggaatttagcctgttcttggattttagcctggttgcagcatctagtgtaattgatccagtttgatttcttttttttttttgggaataaatcagtgtgaggcagcctatgaaccgaacataagtatctagtattagtctgtgagacaaactatccctggctctataagagggaaacctgatgtgtctgaaagaagttgcgagttcaagaattcctatctgaaaaaagcaaagatcaggcaaagatcatcagtttggatcatgtataaatttcccatgttgcagtatgtcttaattaggaggattattcattaacaaatgtcatgcgaaaaatttatatcttcggaaacaatcgctttatcattcatgagcgaattattacttcgattaggcggatttgtgataattgatgaataattctaagtaatccttgacagttcagtgatttggactggtactggatggtaggtgcccatctgtgtgcctttttgacttgtctatatgccttggtaccattgtgaaacttcatgtattcagtcttgttggattttgtaagttgcattggaatgatatgcttatgtaacattactagtggagctgttgccctgatatgttagaaattgtgccattttttgcagtgcggaggaggtataccacacctttggattttggggaagcagtacgttgattggaagaa

SEQ ID NO: 11830 - DNA, 948 bp, Oryza sativa
  Intron number 1 from transcript LOC_Os01g59850.1 (locus LO C_Os01g59850) derived from phytozome v7.0 (chr-ID Chr1; po s 34611930 to 34612877)
cgcccaatcgcaagtgcatcaattgcaacagtgtggtaataatctcctccgcctcctgcttgcgtttgttgctgagaagcttgattggtggttcatttcgttcccggatcgttgcatggtagagcgtggaattggtctgctgggttgtagtgttctgcagttagcgcagatttatgaaatccatttgtctctggtgtgaacttttggttcgtccgtatgtttaagcttcaatgttggttggatgatgatagggcggctcgttcgtttctgatacagggatgacatctgagaatagtgaatccgttgctattagctgtggttagtttggttttatatgttatatgattggttaatcaatagggaaggtagttcttggctcctgagttttattggctcgtgaatttcattacttcatgcacagttgtttgtatttgatatctagtcgctaagttggctgaaatatgagccgctgaacttttaatactctactccctccatcccacaaaatttcaaaccctagcattccaagatgaaattaaggaggaaggcaaaataccaaaatgtccctaattaataggaaagttgtattgatggatgggtaggtgaggggtatttaaaggataaaatttcttgatttgcgaactggtggtaggtaagaagatagaaattggtttattttgggacaaaattcaaacatagaagttgatttatttggggacggagggagtacatgtcagcaagtgcctccgcaacagtgtggtaatactcccaagtgcctctgaaattgtttaacaattgtttgtgccctatttttgcaatggttcacaaaatatgaccagcggttcagcaccatgttttcttttagttgcacttctaagtgaactcagatgtcattgtatttattatgttaactgaagcacataattgttttgttgcaggggccacaat

SEQ ID NO: 11831 - DNA, 775 bp, Oryza sativa
  Intron number 3 from transcript LOC_Os02g07420.1 (locus LO C_Os02g07420) derived from phytozome v7.0 (chr-ID Chr2; po s 3830911 to 3831685 reverse strand)
atgtgagttctctaagtctgaatgatgctatgaatctactgggcatcatcaatcaaatgattttgcatattagcagttaagctatctgaataggctatttaggccacattttttcatatatgaattgttctacaagcttgagccttcgtataactatggtactggaacgaggttggtttttctttacaagtagaaccaaactggagaacgtccctagttcagttaattcttcagtgcgtgaatcagggatagattatcgcagatttcttacgaccattttttttcgccgggctggtatatgttctgtagccatcttacccagcctgagtaggagccccttttgttttcctgaacaatgaaattttgctgaagcttgccagaatgtattttgtctctgaagactgaatataaaggaaaagctttttttttttttgctgttgccatcgaattgaattagtgatatcagtttgtaggttatttccttttgtgtgtctgtgatgaaaattagtgataccaagtcaggtacttgtttaaggtcacagttcacaagaaccagaatggcttatctgtatctggacaggtggacaggagttgtatcatgtatgccatttatatttttgagactaacaacaattttggggaagtattaaactgttgagaacatacataatggcatactgcaccctttgagctctccatttcctttctccttgagaccatgcttatcattgttcttttgttttactgaaacaggatttcaaagaaatatccaaag

SEQ ID NO: 11832 - DNA, 949 bp, Oryza sativa
  Intron number 2 from transcript LOC_Os02g40460.1 (locus LO C_Os02g40460) derived from phytozome v7.0 (chr-ID Chr2; po s 24527782 to 24528730 reverse strand)
gcttttccacaggaaaaaaattgagcaagaaacaggtatcaagcccctgtgcaacttctttcaagaaataactagcatcatgtctgcacgttgcaacgaatccttaacatactatagtccaaaatatattatgcaaaaaagaaataattatactaaatccagatgttgcatgcatgatacatgatgctaatcaaacatctacatattgtcatatacttgtgcaaatatgccatttttttctgtaaacatcttacaaaaaatgcacacatgcctatatgtttgtagccacaaacgatgtagagtagcccaactccctcttctttaaaagtaaagatgcatgccatttcactagagtgatagatcaacgtagtggaaatcctggctattgtcgtaccataaagtcataaatttatgcggattggtgatgacttggtgtttcagtgtttgaaaaaagtgttttgcagagcttaacggcacctttttttttagaaaaaaaaacattgatttgatgaaagaatatcatatggatatatttaaggatcagaacttcataaagaatagcccatggacatatgtaagggtcaaaatgtcacttaatttagtatcgaatggttgcaagtttgtatctttcaaaacttcaggagtttgttttttttgcacgacaatatgaatataaaatattggtagagtttcattttgctaccaagcattcatattttatttctctattcttgacctcgcttatgtaggttctaaatttacagtctgtgtgagaatggagtttctcttgaggttaaaaatgatgtttcatcactaatttgtatttgataacctgcatatttgaatgcatgaacatacaatgcactctgttttattcacatttttctcaatcagctgagttttaactcttatcttccatattctcaaggtgcacgggtatctgttagtg

SEQ ID NO: 11833 - DNA, 1057 bp, Oryza sativa
  Intron number 1 from transcript LOC_Os01g28580.1 (locus LO C_Os01g28580) derived from phytozome v7.0 (chr-ID Chr1; po s 15992296 to 15993352)
gcctccgtcctcgacgccacagtctccctctataggtacaggtcccctcctgcctcaccccaacctccccccccctccctcttctctctctacccaaccctaattactcggcccgcagtccattgccggggtaggcctcgccgccaggccccctcccttctgccacatgaaaatctgctcaattttttttaccagtgaagcatgtatatcataaaggtgctgaatatagtagagaatcagatatcataattagtggaaaatcatacattggcctaatatatacagcagaggtcccaaattaacttttcagtcaaacaattgcaataatcgagtaccatcgctcattatctggagtggtttggcgatgtagaggccgggtttatcccattttctaaaaaaaaaatgtctggagtggtgcaatcttccccgaagcactataatgcttgcctggtgaattatgtgaagaatcctctgaagtagtggcacatcaaccttcttcgcttaactggaacaataaaacagcaatgggattttgtcagtttcttcagacatcggccaacattgttcacttctgtaaaattgctaatcatggtttattttaagtttattacttaggattagcagaagttaatttattggactgcttcaaagtgagtctgcctggtgtgtacaaatttgcataaaactgaatatgaaggagcgcaagtcatgaactgattgatgctccaggaaaacaataacagcaattaacagtttcactctccctaaaaaaatacagcaactaacagtttcagaggccctcctttatgttcatgaatcaaatcaaattgattatttatacaatttatatatctgcataatttgtctcacaatgatcatgacattcaagttattgctacttatttcagtatatttaaactgttgtcgcagataaaaatcagactttttgctctcatcatgcaaagaataatttcttttattctttactgctccaatgatacttcggttatttttctacttagtcaagttcttataaaatttgggagtgcatctctgt

SEQ ID NO: 11834 - DNA, 677 bp, Oryza sativa
  Intron number 2 from transcript LOC_Os01g63680.1 (locus LO C_Os01g63680) derived from phytozome v7.0 (chr-ID Chr1; po s 36936566 to 36937242)
gaccaatcatttgcgcccagacatcaaggttttactcttaacttcttgattcctatattattatgtagatctaagggggtttcttcatccatgtgattttgaggggtgatttctttttagatttacattaaaatcatgctaagcagtattctagcatagggattatcgaaataattcattttgttgcggttgttgtgtatgctaatcttaatgttctaggcaccgagtaatccaaagcctccgttttatatgatgtttttaggactagaaaatcagtagatcttgggctacaagatcaaagattcagactcatcatgtccctgcaggaaaaaaaaacaaaggcaaatctgtccaaaattgtacctacttcaattaatgcgtattacattttataaggttaaatctcttcttgatttataactacggagtaaacaacaacagtgttatacaacaccctgcatgaatatggtagccgttaatgatcatatatagatatatttttctatccttaataaatgtactgcttagatttaaattattccaactatctaccgatcttagaaggttcgagggcatattttcttgtgttgtgtcgccgattgcgtggatgaaattagtattcaaaaactgtacaatttatactgcagaaggacgtctggactgaggaggacgacagg

SEQ ID NO: 11835 - DNA, 775 bp, Oryza sativa
  Intron number 1 from transcript LOC_Os01g37320.1 (locus LO C_Os01g37320) derived from phytozome v7.0 (chr-ID Chr1; po s 20833242 to 20834016 reverse strand)
aggtgaggagattggtttttttttttcacgtaagtgggacagatcggtttctttgtttttcattttagttgaggccgtccatcaattgttatattttaccgaacgtgagcaggcacatgtattcaacaagatatgagtgttgtgtactttttgtcttttgttattattttgttttgtccttttgtgattaggaataaaggttcactttttcctatttgtcattgattgcgtgtcgctctagcctctgggaaggatgttgctaatactaatcaggtgcgtgttgcgtcggcgtttgattcagaacgtgggaggcaggacgcacgagtgcgtgcggcgcgcgccaggcagagcggaaaggccggcgcgggtgagtgtggatcagatggggagggggtgtaaaatagtcttacgtgtgtgtctatatatatatatatatagcctatatactactcccaggagtagctactcctattgtaaccatcggacacctgtccaactcacatcagggtttcgcccaccgatgctgaaaattgaattatttttttttgaaaattcggatcaccgcgctgtgttctgcatggtgagtcattttgaacgttctgcatgcatggtttgttgacccgcacgcatgcacggcggtgcgaccaggagagtagttattgtggatgttgctactgatactctatttaagttgacggtgatgtaggacagaaaatgaggagcagaattatctttcggatttgtgaggaagaagattttgttctgcaggtttttg

SEQ ID NO: 11836 - DNA, 946 bp, Oryza sativa
  Intron number 2 from transcript LOC_Os02g37050.1 (locus LO C_Os02g37050) derived from phytozome v7.0 (chr-ID Chr2; po s 22375817 to 22376762)
aagaccccagtgctgtcaccaaaggtgtgccatcccatctcagctctaattctggccatttcttcatgttcaatgcaaactaggatgtcagttggtaagaattcaaatgtaggggttattactagcttgttcatgtcatagctggtagacacagatatggtggtccaaactccaaactatttaggaaaaccatcaaacatggtatcttcggtgctagctagactgctacagtaagttcagtaggactagaatgcaatgcggtggcatggtactcagagaagtttcagctctagttctagcgtgccgctactggttatttttcatgtttgatgcaactaggatgtcagtcggtaagaattcaaatatatgggttactacctagttcatatcataaatggtatacatagattatggtggtccaaaccatagaggaaaaaacaccaaagatggtatctgcagtgctagctagactgctagagcaagttcagtaggactagaatgcagtccggtggcatggtgctcagagtagccgaaacctttaattggctctgatttagcgaatccttgttagtagctatgcttcttctagaaaagttaaatataatttgcttataggttaacttctattttgcagtattgtacttagcggctgattttcttagcctttttctgtggtgttcagagaaaaaggctaagaaaataatcattcccttaccagttacatattcattttttctttgaatttctaaatattctggtaaagttcaattaaacttgctgtaactgaactttaccataatatttacaaccattcccgctgatacctgtggtcagtgtacaactatagtattagtgctactagttttccgctgacatggcatgtcaaaactcatgtactggtatttgttcagttgtagaaactgtgagcattgttctacccattgat

SEQ ID NO: 11837 - DNA, 956 bp, Oryza sativa
  Intron number 3 from transcript LOC_Os02g35490.1 (locus LO C_Os02g35490) derived from phytozome v7.0 (chr-ID Chr2; po s 21327674 to 21328629 reverse strand)
gaggaggggccaagtctgactactgcgagaaaaaggtactagtagtagttaggactatttaatttgatttgcctttaatttgtttgactctcatcatgccgctttcctagaaatgccacaaattaattaactcgaaactgttgagacttacacaaatcagcgaatggataaaattttcttctctttttctttttcgttcaagtacaatatccgaacaaattatcatgaagaatgggtaaacggtaaacgagggagggttgcatctatacatcgtgtccagcgtttcaagttcgttaaccaaacacaaggaacgagaactagaggtgtccttttttactctattgtttgtaggacgccgagctgtgcacaatattgttgttacaacttagaacaagtaccatggtgcatccatcatacatattgttatttttttttaattagtactccctccttctcaaaatgatcataatatatatatatgtttatgcaccaagaccaaggataatttaaatcacatcaatcaagacatcatacacacattctctcacaatgcatgcatcgattaaaacatcctaccaattagtacaacttagcattcacacattctcccatgttgcattaattaaattctgatgaaatccgtatccatgcggttatatgatgattaatttgagaaattttgaattgtatttttaatgatcaatttgggaaggagggagtaccaagtttatgtagttatgcttcttttacttcgtgttccattgtataaaatgaaagcaaaccacaacacatttcaatatgctactcccctctcatcttagtaacacactatcatgctgcattttgttgtgcttatcttctatctattttgcacattcatgttaccttcttgccgaaactaattattactatattacacagggtttagttccaatactttcagttgaagccattca

SEQ ID NO: 11838 - DNA, 886 bp, Oryza sativa
  Intron number 1 from transcript LOC_Os01g07100.1 (locus LO C_Os01g07100) derived from phytozome v7.0 (chr-ID Chr1; po s 3335445 to 3336330)
tgaggtcgcgccgcgacctgcctcctccccagcaggtgagggatccctcctctccccgtgccttgggtattgcgagtgtaacatttgcgcgaggtgcgcgggattcgctgttgcgtgcgcgatgcgctagtttgatctcggtgtttttcgaccttggggcgtagaggggcgagggggtcgattacccgactcttcgtggcgaatttgaggaaactagggttctagtaccgaatcatgtccaattgcgaatctcgccattttattgtgtggaactactagctggaaaaatcaatcgtaatatttctaagaaaaattaagattacttattgtggtttgatgatgataaaaaaaggcatcaatgatttactctccgcagtccgcaccacctggttgtgcgcataatcactagggccttgtccggttacgcccggattcaatccgggccgggaatgacaagtacagtaagaaatttatgatagatacaatgagagaccgggaattattccgggccgggagccaatttactcatgatagagacaataagagaccgggaatcaatccactagtcaagaggtgtggaactaatccggatgttttgttgtccctatcatgagtaaattagttcccggcccgaaaaaatcccggtctctcattgtatctatcataaatttcttactatacttgtcattcctggcccggattgaatccagacgtaaccgaacaaggcctagctgtgggtatacctggtttggatcctctttgaagtgttcccagtcccagcatggttcctcatacccatctttgacaacattgagtatatttccctttggattgatgtttgtaaccgtgaggtgtttgttttcagacaatcgaaaagcttgagaat

SEQ ID NO: 11839 - DNA, 316 bp, Oryza sativa
  Intron number 1 from transcript LOC_Os02g37160.1 (locus LO C_Os02g37160) derived from phytozome v7.0 (chr-ID Chr2; po s 22463407 to 22463722 reverse strand)
aaggtaattaacatggttccttttctctcatgattcccgtgtttctgcaagtttgagttcgaatttggtgtgttttaatttctacgagttgcaccacgaattggtgcgtgttttatggaggtttatttgcagagtttaattggtgtttcctctgaaagtttcttctacgtacatattttgctttggtctgcttgaaactttttgtccgagacacaggcgagattttagttaatccatgtctgaagaacttatctgtgaaatccatgcgttgaaaatttcagaaggagatcattatcaggatttccgtgaaaaccga

SEQ ID NO: 11840 - DNA, 454 bp, Oryza sativa
  Intron number 2 from transcript LOC_Os02g42230.1 (locus LO C_Os02g42230) derived from phytozome v7.0 (chr-ID Chr2; po s 25401565 to 25402018 reverse strand)
gaggtgtccacggtatcgatcttgcctacttctgtgtggtgattggtgttcggaaatgaacattgattgggtggtgattagactccatttttttttgggaaattacaaacagttcttgtatgcattgtacttgcgctggttgggccaaaggttgcctatcggagtggtagagaaaatatagttgggcaaaaaaaaaaaaaactccttggagctgaaactagctccttgaaaatattaaatatgtatatggtcctttcaaaatacgatgctatcttctttatgattttgtttagcgtaattatgtaattgtattttgccttttttagaatctaaattctcttggtttgaattggttttgcttcggtcagtttgctttctgtacatgttggcaaatatcgtatgttgtgtattgaatttttatcaccctggattgcaggttaggcttgtaggacgc

SEQ ID NO: 11841 - DNA, 850 bp, Oryza sativa
  Intron number 3 from transcript LOC_Os01g16510.1 (locus LO C_Os01g16510) derived from phytozome v7.0 (chr-ID Chr1; po s 9370717 to 9371566)
tggctcggctactgcagctgcatttggacttatatgtatgtatctcttcatgtccagtttatacttttgtttagatggtggaaattttggtcacctcaaataatttgaagtgagcttatgaaatatgtttgtgatactgtgaagcctgaattgcattcaaatattcaattactgattgtaatagaataagaatagccccagtcatgttttgaaagaaaaatgacatatttttgaagaaaacgaggttatcatgtacccgtaatatgtatgtaattcagtatagacaatcttgtgtcgtaagtactattattttggggaaagtcgtctgttgtagtcatctaccagaggttctgaaggttagtaggttatattacttgtcttcctctataaggtttgcttcctttataggccttctaccgctgtgagcttctaggtcctagccatatgatacctgaaaatctgattggtggaatagacttgctaagatatatagccctacttggatttttctgtcaccatgatgtgctcgattttttcccctgtaccttgaaggatgtagattaatgtaagaagctcttaaaataggttccttgaatatctaataaatcctgttatctttgactttggttttcaatctgtgtgctcagaaattattactacctgtcagggttaattgtgatctcattgccacatgatatgatgagataaatcattgttttatgatattgtttgtattttagttctgattctgctgtgcaaatagttggttaacttcattaactaaggtagccctcagcatccttagtttatcttaactgatgatcgttcatcttcagtgccaggttcacca

SEQ ID NO: 11842 - DNA, 745 bp, Oryza sativa
  Intron number 1 from transcript LOC_Os02g35480.1 (locus LO C_Os02g35480) derived from phytozome v7.0 (chr-ID Chr2; po s 21322929 to 21323673 reverse strand)
gcgagcgcggtgaggcgcggttttggaacgcccaggtgaagggtcttgatccatccaatagtgcatagtcctgagtttttttattcttgttaatcatctgaaaatcttaagagggttgttaggttgagcttctacttttaaaggaattttagattgaatttagtttccacatattgagattattaggaaattcgatctggaggtagatatttatttattgcttgaattcataagagccccttgtaaaggccgagtaggaatccgtaaattttctgagttaaaaaggttgggttcctagttgagagttggtctttcgagtttgttttcttattaaaactcttctggaaatacaaattttcaagttttcgtacctgtggggatatcatctcttggttggctgttgcttcgtcggtatccgtgtggtctgatgatcttaccaaataccaaatgcaacatttgatctcatatggtgaccccccacaaattgcttgtcaatcggattttgatttatctgtagctctaatccttgaaatctttttgttcgtatttccagcctccactagaagtttattagttttatggttatatgtgatgtgcagtaaacgctaaattttggatccttttgtccccctgtttagcatcttggattaagtgattcttcaagctaatagattggttgttaaatcggtgtttttctgcttgatctttagggagtatccgaatattcttgctaggacataatata

SEQ ID NO: 11843 - DNA, 328 bp, Oryza sativa
  Intron number 1 from transcript LOC_Os01g64040.1 (locus LO C_Os01g64040) derived from phytozome v7.0 (chr-ID Chr1; po s 37197473 to 37197800)
ctccaaagcattgcgacctcaggcgaggttttcaggtaactctactctagttcggatgaaatcggactgcacaactgaatatttgtatttactagcaaaatgcccgtgcgttgcaccgggtaatgatatggtgactgaaatttgatttgaactatttttatgaagaaaatgaattataatttaatgaaatataaaattttctgcaatattaattacactcttttaaattatagcaaaagtggtcttgcgttgcaacgaaaagaaaaaacagataaaattgaattaaaacatattaaattctaatatttggtattttttaagtaggtag

SEQ ID NO: 11844 - DNA, 840 bp, Oryza sativa
  Intron number 2 from transcript LOC_Os01g49250.1 (locus LO C_Os01g49250) derived from phytozome v7.0 (chr-ID Chr1; po s 28311784 to 28312623)
cgcatccaaattgactgtggtcagacatccaagcgagtttattgttgaaaagcaaagcaaattcacccactttgtttttgtgctggagtttaagcctcgaggcagtgcaaatcatcccttagcactgaaaaatgtgacaaattacacatgacggttttttagaagaccctttctgtttagttagtgatacttgatgatcatatggacccatcacctacacgcgtttgattgcctaatccaatataaagtagactttattttatctattgctgctagataggttgggttatgggtaggtgtccactaaccagtggcagaaaatacattttaggtataatcatagcttcctgactgcctgtccactataggactagaaagccactagaaccatgtaagttcctccaggggaaatatactccattctaaaagacaaagtccattctgatgtcacgttgaaggacgagaccaagaggttgagattgtaatactgtatcactccacctcattgtttgaaggtggcctatctacgcactctttaatagatatgacatggatcgatgcaatgagcatatatcatgctccagagtgtataatcagaatacatacattatatttgtagacaattggtacattttgctatttaaggatggatcaatatactagatcgtttatggcatgttgcatatcagcataaatggcaagaggggaaacgtgtctgttgcctacttatttctttcctttgaattttcttgtgattagttttataattggtctgttattatcagcagtttttgttttaatattctaaaatattgctgtgttgacacagttctgacaaag

SEQ ID NO: 11845 - DNA, 850 bp, Oryza sativa
  Intron number 1 from transcript LOC_Os02g42000.1 (locus LO C_Os02g42000) derived from phytozome v7.0 (chr-ID Chr2; po s 25234228 to 25235077)
tgctcaccaacaagctcttctacttcttggaggaggtgattgatctattgctctcttgaatctcttctgaactctatcatggcttagccttttcttacaagaacaaattaatcttattgcttaatttgcaaccaagatgattaattttccttaacagagaagctgggcacaacaatatttattaatgagatatcctgacaggtgggcccttagaatctgatcttttgggcccagtttatagcagttaaacttgctactggccactatcaattagcgtgttcattgttcagaattgtctccgtgttgtttacatgtcaaagtagagtagcaaattcagcaatctattaatgtggatgctgttcctgaattggtcaaacagtatccatgggagtctaactcaatttcatgtctgctattttttgtctcatcatttgtgagccacctagtttcaaaaatgccccgttagattagaagtcctgtccattgattgcagataaatgctcctggtgacctcttagcaaattgtgatgtttctggactagtattacccactaaacaacaccaaatcgcccattgcattgcagttcactttgcaatgcagtataactctagctccttaactagccatggtcaaaagtggaaaacccaataggtttgttactactactagtttggtccttgttatgcccaacgaactaatttgacagcgacaacacaaacaaaggggtcagctaatccactatagtttaagaaaaagtctgcgtttgcgtttgatgttgacttgacttgaactgttcctgttggacaaatggcagctgaccgacgcggtgacgagcggaagcgtctcctt

SEQ ID NO: 11846 - DNA, 984 bp, Oryza sativa
  Intron number 1 from transcript LOC_Os03g01222.4 (locus LO C_Os03g01222) derived from phytozome v7.0 (chr-ID Chr3; po s 143775 to 144758)
ccctgtaactactgtctactcctattttccctcctcaatccatctctacccttactacttctaatttttttatttttatttttattttttttggaaaaataataattatatcattacgatgttagtattgaggaggaggaatcattaaaatggaatcccctcccctcaaacaatacagcaccaaccatggtttggtttgtccaaatcgggggaagaagaaatttaggaatggactggagtggaggaacaagatgactgatgctccatggtggggatataataaataacaagatgaacgtgtggagacacactggacatttgggtttctatttcacccattggaactctccaaatctcctctctgtttttttaattattatttctttcatctaaattaacgtcgtctacatagtcttgtctgttttaaagattatatttgctagctattctaatcttattttcttataataaggtggtcgaggtattccttcacctctctacattttacttgctcttctctcatcctctccctccatgactgatatttcattcaaagctgaatgtcaaattgcacacttctaagatttaaggcgtgtttacgttgcttcactctctttaccatttacgcattggcatcagcagcgaacaagagcatcaccaatgggttctgccaagggaccaagctggattgatgggttcgattatttctgaaattttctctacttcactgattttcaggaattccggaccacattttggtcaaagtttgaaaaaatcgatcaaaatctgccattggaccaccgatttttcatgatttctttttctttttttaaaaaaaagaaaaacagcgagtgatccctagagtggtttccttagtctgccatttcctgcgcatgcatcgattgattgatttatgggtgggttcctcattttgaatgaatatgaacaggacacggtgggcattgtggcgcggctgtctgagtg

SEQ ID NO: 11847 - DNA, 1013 bp, Oryza sativa
  Intron number 1 from transcript LOC_Os02g11060.1 (locus LO C_Os02g11060) derived from phytozome v7.0 (chr-ID Chr2; po s 5925131 to 5926143)
gcccgacggctgcttcctcatcagcgcgagcaagggtaaacgcgcgcgtgttccctgacgatttttgctttgctctgattgcttgctctggattcgttgggacttgggaggccgatgcgttgcaatgcgattgttttgtagtacggcgcctgatagataatggtatgctgtattgcaaatgtgattggtgcagctcggctttgtgtcggttttcagtaggcgctgcttgagcccttgaggttggaccataaataattgtcggtagctgaagcagattgaccatgtcaaatagttcaggttgtttagtaagaagctcaatgacctgaaattttgaattcaagtaacagaatgcgttgaatgtgatgcatcaaaagtgcatcgaaggttaaacctgaacatacactctattcattgagacatgggacccatctgttagttgttcacatgtctacagcatccattttacttggatggtctgattttcacctatgcaaaataaaaaataaaaaagatgagggaccggtatgatgttgtgcccggcttgaatgtatcatagggagtaaattcttccttaaagagaaatggatatttttatgcttatgctttgtttatttttttttgtctaaatttataattcttctttgggttaatctcaacaacaattcctgccaacctttagcttgatatcccatgtgctactcttatctcaacagcaacattgatctctttttataaattgatccactgcgataattcgaattctaagcattaaataaattcggccactgcactgctattatttggtagattcgcttcttgtggatattggatacagagtctagggaagtgtactccccctccccgcccctgagacttgacaccatacagtggaaagtaatgctgttagaatcttccatttatatgcttcacttcttgttggattaattcttctactctttatgtcgttgatattgattgatattatctttcatttctttccagactcaaaccca

SEQ ID NO: 11848 - DNA, 898 bp, Oryza sativa
  Intron number 5 from transcript LOC_Os01g01570.1 (locus LO C_Os01g01570) derived from phytozome v7.0 (chr-ID Chr1; po s 289509 to 290406)
ctgggtgagttttctgtgtagctataattcatgtaattagctcccaaccaaagtggagtttatttcttttccttccatatgttattttagttcggctttggctaaaatcttgagaacaaaattcactgcaataggactcacttgagatattcatgcatttcagcagcataaattttgttctatcattttttccgttctgtataaaatgttgtttttatatttatgaattcatcaaaaccatgtttgtaagacttaaacatctgtgatttgtcaatgtgaaggtacacttactgaactagatgtatgaaatagtcaacggcccacctattcttatgaaattattctgaaaattaattaaacaatcacagttgtaatgatatcagtatgttaataatgtatctgatctcctaatgaatttctaaaaacgctaatgagatgcatcagatcaaaatattaccactaggccacttcctttaagtgggaggcacttgctctgtactctgtcctattgccactatattgtttaatcattctgcatatttaaaactaatgtgagttttgttaaaaggtcatagccgcaacacagctaattataaagagggtaagttcttgaatgtgtgggctaagtgacattagtatggcaggactaataataagcagtgtgtatttgcagtgtcatgaacatgttaaactagacaatttatttgcactgtcatgcaaatacacagtttgaggcctcttttctatttacataatttactgcatatttgcatttttactgctccttggtttgaacaggaaagtataatgaagtctatctttattgggaatattggcagactgactctaaatttccactgcagctcggataaaagaagtggacacataccttatcgag

SEQ ID NO: 11849 - DNA, 970 bp, Oryza sativa
  Intron number 1 from transcript LOC_Os03g07290.1 (locus LO C_Os03g07290) derived from phytozome v7.0 (chr-ID Chr3; po s 3710337 to 3711306)
gccgttcccaagaaaaaggtatcctagcttctccccccactgtatctcgtggtttttggtttgttaccttcatagtcatggtctggtcgtgggtcgatggtgcggtatggcgcaccactgcaccgtgcccggtggagtgcactctaggtgttcgtcggattgcctggagagtagaaaggtattatgacctatggaataatggaaatgtcctaacggtggaacacggggtgatagtgcacacagaagattgcctctttttttctcgatccattgcttggtaggttagtgatagatgttttgtgttttgagcccattccatttggagcataatgtcagcgaggtgtggtcttaggggtatgcttgtttaagctatctttgcaactatggcaaacaatatagttctcatgaaattcagttccacttataactgtgacgaaggctgagtttgttctttcaatgtctaaaaagctctttaattgtagagtgtatactgaaagatgttgccaagactagtggtaagttttcacttttgtttgtaattagcaatgcacaagttgtttgttatgtgagtggatttggcagatgagtcaatacatgtgtaactcatcatgatgatatgcaaatgtgataactcaggaaaaatcagaaaacaaagataaccgagcaagtagtcagaaaatgtctggttaaaggcataaatttcttgtcacatttgatatttgagcatttgcagttatctatatgtaaatagtgatagtcttgcggtgagatcaactaattctaactactagcatagttacttttgaatatgtactttttatgtgctctgttgaagcatgtgcttcatctcattgcctcagcagcttcagctgctttttgagatttgagaattattatttgtttgtttcatgttccatgattgttgcttcttgaatgttgcaggtctcaaaatacaagaagggtttgagga

SEQ ID NO: 11850 - DNA, 979 bp, Oryza sativa
  Intron number 1 from transcript LOC_Os02g20290.1 (locus LO C_Os02g20290) derived from phytozome v7.0 (chr-ID Chr2; po s 11952903 to 11953881 reverse strand)
agaagaaaaagaagatcaagaggtctaccctgtaggccgaaaaccgtcagaataatatgaattaccgtcagaaaatacttttctgtgggtgcaccgtcagagtttgccgacagaaaaaagaccacggagaaaataaatttttctgtcgttttcctgacagaaatatcatttctgtcgggaattcctgtcggttggctcacaaaaaaaatcaactggcgtcaggtttgtgaaagcttatttttgacgtggacccgtcaggaaaaaccatcatccaccgtcagaaaaaatgagttccacgcccaaaaaaaaacacatggtgatttggataaatatatgaacatcaatcacaatccatacatcaaaattcaagtctgcaaagcttacataaatagtccatctaagttcagtacatacaaattcattcaaaccggatttagtaatatacaaagggtccatagaaaagataaatgtgttcagttacaattcatcaaacatatgtaaaagaacattgtcttccagcagcagtccgtgttccgtggtgcttcaaccttgggcaaaggaagctaaaaggttttaaaaaagaggttcaatttcataattttcttcattacaaaataaataacaatgattctgaataccccagttatagagaaacaaatagattagtacaggaaaaactgaagtgagcaacataaatttgtcaactacaaagcatgaaaatgaaatatggcaactgaaatgaaaagtgaccatgaaaatacttcctgtagtactctgccaattcagataagacataaatgctaggataataggatcaaactcattttctatggatgcttaaatgacaagtttcatggtgcaaatgctaggacatcttagactaagaaagatttcatccactgaatgagaagcataccttgattttcatcatgtgcaacgttctgtagatatttaactgcagcacttaaagattcaagct

SEQ ID NO: 11851 - DNA, 504 bp, Oryza sativa
  Intron number 1 from transcript LOC_Os01g69900.1 (locus LO C_Os01g69900) derived from phytozome v7.0 (chr-ID Chr1; po s 40384566 to 40385069)
aggtcctccgcttccatctcccgcgcctcgcagcagtacggactccccgcctcgccctttctgtttttcttttttttttttggtagtattacttctcttggattgggagatgctgtaggtggcggagaagcgtgggattcaggcgttgccttggggttgatagttaggccttttaggggggatacttttatttggtgtcgctttgtttgcaacctaggctagatttgatctgatggaataacaaaaaagattacgacacagtagcactacgaactagaaaactgaagaatacaaatccaattaatctgttataatgatgtatgaatgctactagtagtttgttgaattttaattcggtaacgcagataacttcatttacaatttacaagcaagcttgtcttcaatatgacatgcataaccggttaatagtgcattgatgcgaagtgagtaaaaccgaaatgctagcgggcagcattgcaactgaagagtatttgcctcaggtcg

SEQ ID NO: 11852 - DNA, 865 bp, Oryza sativa
  Intron number 1 from transcript LOC_Os01g47620.1 (locus LO C_Os01g47620) derived from phytozome v7.0 (chr-ID Chr1; po s 27243694 to 27244558 reverse strand)
cccgcgcccacaagtacgtctccttactacttctcatcgacctgattatccggggaattgacgaatcagtcccaattgctgccctttgctaggtattagatgccttgaaatggttattgttcatatgatctagtagtaggaggatgaacggaatactttagttgcaatctgtagttaatcctcatcgttctttgctgaacaaaatgaataatcccctttgcaacatgactagatttggtttgggcttataaatctaggttatgtgacttgcctatcatacaaggcagcaagctggaattacttcagaacaatatcagtaactggttcatattggagatcaatgtttttatgcttctttgtattggatgtcatggaatttgattaggtaaaacaattttagatagtgtaccttttagcaattgtacagctggtaacaaatgtagggcccgttgcctgtacttctgctacattggtcatttctccataaagacacagcttttgttcactagtggaaattaacaatggatatgatcaaagaacaattacggctagatgttactatttgatgttccttccatcttgctcagaccaatcatctgatatcctgaccgcaatggctcttaagaagaatttccttttctcattcagcatttctacacatcgtcagctaactctcccctttgcatttgtctagtgtagcatttctaagaatgttgattacgtattttgcttattatgacgtccataatatgctacctgtgttttttcccctcttgctcatgctcttgaccagcactaatgcctaattcctactttgatatttgcttttgcaacagagataagttggagctaaaagctgtgaagg

SEQ ID NO: 11853 - DNA, 638 bp, Oryza sativa
  Intron number 2 from transcript LOC_Os01g68710.1 (locus LO C_Os01g68710) derived from phytozome v7.0 (chr-ID Chr1; po s 39914534 to 39915171 reverse strand)
tcacggagcttcagatcggtgtgaaggtaaccggttttttctggttgttcttgcgattcttgcttcggggtgtagtggatctgatactgctgagttcgtcgattcgatgtatatctgctaatccgttcaaacaagctcgatttgtaccaggcgtgacgaatttgatatggattggtgttgttgagcttggacgatatggtagaatagattgtgttgtgcggatctgaaatgtgcgaaatggatggttactggttagggtcttttccaattccatgaaagggctgttgaatgaactttgtttcacttgaatatttgaacctgttctttacaacaaagataagaattttaaattgcttatgttcacctgatctattcatgtgctgaatggaccggctcaaagcagatagtacatcacaaatgaaagtgtgtgcttgggggggggggggggggacggttgttgttattgaatgttttttgcatattttgatttcaacgctcagttcctacaggaaaaagacaatcattgcaaagttaggattgttctgtttttacgtttaaaattaagcatttctgcatttcactgcattgcatagcataagttttctttggctatcctcctttcagtacaagccagagtc

SEQ ID NO: 11854 - DNA, 723 bp, Oryza sativa
  Intron number 1 from transcript LOC_Os01g62800.1 (locus LO C_Os01g62800) derived from phytozome v7.0 (chr-ID Chr1; po s 36371360 to 36372082 reverse strand)
aggtgcgcattggtgttctctctttcacattttgacagtgtgctgtaaacaaaagttttgatagtgtgatgcatacaattcttcagtgtataactctatgccctatagtactaggcatcgagtataacatgcaaggtattcaaaaattgatggattgcctttggattttccgaacgtggaacatggggtagtgtttgattttgtgggttattactagcattgtagcaagctcatactgggttttctgtttgctaagtagaggagatgtcttctgattctgccatcagtatgaagtatgaattcaaattaactagagcatgatgaagcagcatttgaagtacagcattttatttaatgcaaaattaaatactccctccattccaaaattccaaaatataaggcataaccacccttaacccaaagaccaagaaacaattacgatcacctcctagtttggatcaccgtaacaaatgcaatgcatgcacccaatagaattagagatcttgagtgtggaggatttaaatataataattgaatagagaggaggtgctatttaattgcatgcatgcatgcacacctcatattatgaaatatctgaaaaaagtagttgtgccttatattatgaaatggagggagtataaccaactgatttggtttaatttttcaaagacctctgggttcaggtaaaggagtttctataacacactttgatgaattgcaggt

SEQ ID NO: 11855 - DNA, 727 bp, Oryza sativa
  Intron number 2 from transcript LOC_Os02g47800.1 (locus LO C_Os02g47800) derived from phytozome v7.0 (chr-ID Chr2; po s 29226697 to 29227423 reverse strand)
tccggcactaagcaaaggctatttactcccagaaggtgcatccacacacttcttatagctgagcattccgctggaacaccatgtgtgtagtctgaaattctgcataattatataagcagaatagtccaatgatatatgctacatgttctgttggaactatggattatttgtcttccatggttctatccatcttcaaaaccacagcagggaaacacacatgtcctgtttgctctatatgtttttggtttacccatataggaccactatcttcaacagtctgttcacttttcccttttcttaacagacctatgtgaactctgagaaaagtgtaccatagaagcctatttgaggtttacaatgcaaggttgcatgataaaaataaattgaactggcagaattgagtgtcaaaaaatagacaatatgatctttgcttcaatttacagttggtaagtacttctagcagatgaaaaaatagttgacagatgtctctaaatagagaaaattccttgtatacccatgaaaaaataaccttgttttcatttccaaaatatcttagcatgtattgattcttcatgctactggttcaactatgcttgaacgcttctgcttaccaaggtgtctacagatatcccatgtgtgatgctcagattgttaatcttgctaactgttattaatccctgtgctatttacaggtgccgctcgtcttccaggatttcatacctgcgtt

SEQ ID NO: 11856 - DNA, 862 bp, Oryza sativa
  Intron number 1 from transcript LOC_Os01g36294.1 (locus LO C_Os01g36294) derived from phytozome v7.0 (chr-ID Chr1; po s 20123662 to 20124523)
aggtgcggtcgtaccgtgtagcacgagaagaggaggtacatgatctgcatacatatgattgtaatactcttctcacaaacacataaacatatatacagatctaaaatgaagtgaggattgaatattatatctagattgacgagtgaatgactatctcaaaaaaaaaaaagatgaagaagaagcagaggattgattttatattgagatatggtaagagggtacatcaaattctctagccatattgattaatcagccttttttccaataaaaacatatttgattatttcagttaatgcatcacagcacaaaaaaaaagagagaccaaaataaaaaatccttttctattaatttggcatggttttatatgtatggatttgaccgtaatattgacgtgatcttcgatctattaattagtcctaacatttaattaaaaaaatttaaaatcatatagggttataatctgcaactcaaaccaagcaggcaaaactaagactttatatatacaaatgtgtacattaattcttttaaagtactccctccattttatattataagtcgtttgacttttcttcctagtctaacttctgtaagttgatccaagtttatagaaatataagtttaaccaaatttatagaaaaatataagaacattttaaataaaaataaacatgtaatcaaaatatattcaatattaaatttaatgaaactaatttagtgttgtaaatattgctaattttgcatacaaacttggtgagactaaaataagtttgaataaggaaaaaatcaaacgactttaaatattagatggatggagtacttttatcatattttaatttgtatttcgttggcaggtgcataaggta

SEQ ID NO: 11857 - DNA, 829 bp, Oryza sativa
  Intron number 2 from transcript LOC_Os01g70360.1 (locus LO C_Os01g70360) derived from phytozome v7.0 (chr-ID Chr1; po s 40761328 to 40762156 reverse strand)
atttctacatccgccgcttcttccgccgcgtccaggtgagctcaccttcttctctctttctgtccaaccatgcaattttttttctaatattaatgcgcaagagccttacatgtcaatatgttatattagaaaaaaaaaagaaaattttatacaatcgtaccatgctgtaacggttagaagaggcatacacaaagaaaaaaaaccgtaaatattaaaaaatgacctaatatcaaataaataaaaagggtaaaacgttttaaatccaggctagctaacccactatcttatgaaactagccagaaaaccactagaagtttctcatatacacaaagagaaaatgacatcaacagctagcagataggcatgactgcatgagccctgagctcccaccattcactcatccatgcgtataattagtagaactaatgtgctatatgtattaatcaattattacttacttagtttacttcctgtgtttaaagttgcttttatttttgctcggccctaagttaaacgtatatactagcatctttgattattagtttatagagaaaccgtataacttaaaaacatgttaatgatatattatgaagatataattaaaaaaacataaatgttatggtgttaaattatataaatatttaggaattaatagtttgatttacaataaagttaaaacgataaataatttgaaacgaattatgtacttactaacatgcatggtgaattattaatctgtttaattctcgatctgttcttgtgtttttctgaacgaattactgttctcgctgcaggactgtttcgggcgaccgatagccagcaagcctga

SEQ ID NO: 11858 - DNA, 890 bp, Oryza sativa
  Intron number 1 from transcript LOC_Os01g43870.4 (locus LO C_Os01g43870) derived from phytozome v7.0 (chr-ID Chr1; po s 25131952 to 25132841)
gagggaacggcggcgaggagctgggtgcatctcgggtacgtgcctcctctctctctctctcctcgcgtcgctcgagctctgctttggacgggggatttccggagctcgatttcctgctcgggctcgactctctgtgattcttgtgggttttgtgtaatttgatctggggggatgcttcgctctgtgtagggtggtacatgtttggctgcttgagtatgtttcagctagttgttgggtggttgagctttttgtacccgtgagaaatacttgtaagctcaaaatttgggccgaggtatagagaggaattgtgtttgtgtgaaggttttcgggctgctcggtggaaaaggagtagcgagcttttgggatgtggcatgtgtttggggaattctgtaggctgcgttcctgctgtagcttagtttctgatcttaattactgtcctgacaagttcgaacgaaaatttgtttcatgggaaagtataaaaaagggaggggaaagcaaggaagggattttagttggtgttaaagttgttgcttgctaggagggtttaaagattttgaaagggttgttcgattggtgaattcactggagtgagtgttttattttagtggtagattttggagaaaaaaaatggtggctggctctaatttattgagaacatatgggtaaagtatgttcttccagtagatcattagtctgtagatattttaccagcttcacttttctccactaatgtctttagtgatatcaaatgtttcaacagttggacttttcctactggaactgcagtactttcaacatgctttttgcaaatgcctgcattaaggatgaataaaatgttaagcaccgactatttagggacgcaggagcttcattcattttgcaagaccacc

SEQ ID NO: 11859 - DNA, 666 bp, Oryza sativa
  Intron number 2 from transcript LOC_Os01g39000.2 (locus LO C_Os01g39000) derived from phytozome v7.0 (chr-ID Chr1; po s 21925203 to 21925868 reverse strand)
tgcccttacaggaactctccagacagcaaagagttagccattccattcatttttagcaacaaaaaaactactttacaggaatgctatttatgttgaaacaagcctgttcgtccttttgagttcaagtattagccatgataggaagtatctgacattaatagcatgtaagagttttgacagcaataaggaaatacgaatgatttgggtttgaacttcgaatgcttgaccgtcgaattatgatttgtgcatgttggtgtattaacagatgcctggatagtacgattgcttgattaccaactcaatacgctgatattttgttggcacacgtcctgagacagacatgcaaatgcccttaaaaagtgtcaaacacaggaaaatagaacagctaatattactattttttatagtgggtaatatgctacacacctacacaagaaaaattctgatactcacatgaacatgtaataattaatcaaagtagagagaatgcactacttaatcagagatgaagttttttttctttttctgtttcagaattgaaatgaaaaggagttcgtgccttgcatatttcttcacattagctgttcaaagtcctaatggacagcagatcatatgttgtactttcaatattgtcatgagtccctgacctttgaaatcgatcggtag

SEQ ID NO: 11860 - DNA, 749 bp, Oryza sativa
  Intron number 1 from transcript LOC_Os01g39000.2 (locus LO C_Os01g39000) derived from phytozome v7.0 (chr-ID Chr1; po s 21925988 to 21926736 reverse strand)
tttgctgctcatatcaacttatcaaagggaggtaggtaagatatgcatatgccccacatgctcacatgcttgtgtttcttgtcttgtttcttttttacttttgtttttgttgtgttaccctgaaagtttagtggaatgaatgagtttttagctgggtcggttgaatgatgagtttgttagggtgttgtttgccatgagttaagggcatatgtgttgttcttggtcacctgattagattagaccatgttttttcttcatttgcaatagtttcggcacatttggttgggattcctccctcaaaatttcagtaactaggaagaaattggcctgagttatgaatcagtagaaaccatgttgcaaaaccatgtgtggtccatttttctctctctctctcttagtccaaacaacacgtgaactagtatgaattgaagaaatttctgggttttgtgtagtttttcagatgaaggagcttggcagtgctgaagttagcatgaactgcattacatggctgttctgaatatgatccaggcagttctaagaaataaagaaattaatcttaggcaataaaattgataactagatttgatagatggtgcgataggtcttggcgattgcaacaacaatatatcaagagtcaatacaaatatacaatcatctctttgattttgtgaatctgattctggtggattgcttacattttctccctttctacatgaactgttgtagtgcaagaggaagaacaaaacaag

SEQ ID NO: 11861 - DNA, 799 bp, Oryza sativa
  Intron number 1 from transcript LOC_Os02g53450.2 (locus LO C_Os02g53450) derived from phytozome v7.0 (chr-ID Chr2; po s 32694811 to 32695609)
atcccgacggcttcctccgctccgagaaggtcaggcttaaaaatcggctttaggtgaaaggagcccgtgaatttgcacagtagagatgtttgtacactctcccacactgatgtatgtacattttttgctggactagtgctgtgtgtttgcctatttactctgatacggtgcataagtgcatccgtctacaataagataatactatccttttagatgattacgtgccctataagtgtccagttacccccctcgatggcaggaagggaagataaaaacacaacagagtttgaatgtgctgagcatttcaaatataatgaaatgacaggttgctagaagcttagaagtgaaaatatatatcactgtatgtctgtatcaggcatatggtttctgctagtaatcttctagcattgaaaaatcaaatctgtttagtgctcaatggtagctcttggacgagatgatcttagctgttcaagcacaatgaaatctacaatgttaattgctaaatgaactagtagtagacaccgtatattatgaatgacggcattgagagattaaaactatttactgctactgttgtccttagacaaaacactttatgaactgcaatataacctcaagtactatggttgaatatgataaagttggtcttaaattgtgctagtaataaattacacatacattcgagtctctattgtttttcaagtttagctctggttacctgtttcaggtaaacgttgagcataaaagattcgattttgtttctgttccaggatcgaaagtgcggtatctgaagagtcac

SEQ ID NO: 11862 - DNA, 1014 bp, Oryza sativa
  Intron number 2 from transcript LOC_Os01g23620.1 (locus LO C_Os01g23620) derived from phytozome v7.0 (chr-ID Chr1; po s 13285789 to 13286802)
tcgcccgccgcgtctggaaggactactacgccaaggtctcgcgccaatctcttccaactattccattccattgcatgtttatgtttgcattcggtctctcagatctagtttgttgacggtgataactttctggcttctgtattccattttgtccgtctaattaggaaacgaaatgattttgccatccgtaggctataaggggatatgcgaataattgaattgtgccggtaatggaattcttcaggagccctgcatatgttagcttgaatagttttgtgggtatggtggtagcacaattatggagttgttaaaatcataccagtatctgcgctataattgataaaggtttaattgtctgttttctgcaaaacctcaaagtgcctttgtgttagtgtaaggatgaaggattaaagcataaaggtttagtttaaatactatatcttcattgcacggtattcttttcttcatgggtggtaatcttcattgattcattcctcattattcttttcttcacctgtagcttacagctaatgttacgtaaagttgtaaatttccttttatctcgtgccacttgttagttttgtatctggttaacattgtatgttcatatggttctccgctgaaatgattctctctctgtactatgtgatttacggcacatcttagattttgtgtgatgcattagcaagtctttgcccttgcatggaactgtcaacttgtctgatatgttgtctattctatgattaatatactagctgttcttataatatgattacttgaccaatgaccatgcatgatatatctatgtttagtgcgtggctgttctctcattatttgcacccagatgtaggaatgcatgttttgttgaggatgcctgtgttctgtttcggtgtttcctatgtttcatttgctttgactctgtccttattcttctgatattattaagcttttttccccatctgctaccaccttgtattcttgcttgacttttccctgctgtctcaaaacaggttg

SEQ ID NO: 11863 - DNA, 945 bp, Oryza sativa
  Intron number 1 from transcript LOC_Os01g67770.1 (locus LO C_Os01g67770) derived from phytozome v7.0 (chr-ID Chr1; po s 39388943 to 39389887 reverse strand)
ctcaggaagtgttcctacgaaggttggaatcttttgctttcccatctggttcttgagctttgattgctttgccgcggcagaggctaagaggaacatgggctgttgggggcgtgcgtgcgtgcgtgcgcgcgcgtggttccgctatctatgcaagtcgtgtgtttgttcaaattacgcagcgagagttcgtttgagaagcgaactcgctcatgcgactagttgctaacttaaatcgggtacatggtacttgtgtattattggattatactaaggttgtccggggaattaattttcttctgtagatttttgtcggcaatttcccctgactttattggcttcttcatgtgctctgttattgctcatatagacaggtaggaggtgtatgtaccattgacataattcgcaaactttgtgttgtgaactgttatgagtgggagctgcacctggtccattagcacaatatggaacaaatatatccatttcaaggctttgtcaactgcaaaatgatgaatatttagctatttagatggattgctactaagtactaaaattcataaggcttagttactgtctcattttctcacttttgcagtcctgcagaccatttaatttctttactttttgtggcaccagtaattggtttccaagctggtaaagattccaagtgaactagcaagcatatcatattttgttcttgtgactatgtagattcgatttgaaaaacacttattggttcctttggcacaccaattatcggtttataaccactgaatggtctgcttctcaagaaatttggctgctgatccgatatatcatggtctctttcccattcttcctcttccagaaaaacctgttttgtacacacctatttttatattcctactagtcatgaattattcaagacagttaagactgaagtgatcagttaccttctgcagtcaccac

SEQ ID NO: 11864 - DNA, 578 bp, Oryza sativa
  Intron number 2 from transcript LOC_Os02g14500.1 (locus LO C_Os02g14500) derived from phytozome v7.0 (chr-ID Chr2; po s 7995583 to 7996160 reverse strand)
ttgcaaagaagaaagctgttggcaaaaagtcaaaggtaccaactctagtactaaactcttctactaatcaatatctctaattgactgagctatgcgtgtttagtgagattcaatacatgtatgatgtagtttagatgccacttatattttgcatatgaattctttgatctacttggttaaacatgttgaacaattgcagtattgcttaagtgccaatagctggttcatagcactgaatccaaacttaatggttggtcatagagtatgaaaaatatgattaatctgtcgggagagtactctatcccttacgtgtacagttggtacaaatatattgttagttagcccctgccttatatggactccggcatagttaggcaatttttttggaaactattgtcaaagacgtaagattaggtcttagatatgttgagtttgcattctgaattttacatttatattgatattctgtgacatatttattcgcagtggatatttaaggaagtttttcatgactttgtttctgcaacttatttgtacatgtctttgtttgctttgtgaggctttgttactaggggaag

SEQ ID NO: 11865 - DNA, 975 bp, Oryza sativa
  Intron number 1 from transcript LOC_Os01g10430.1 (locus LO C_Os01g10430) derived from phytozome v7.0 (chr-ID Chr1; po s 5492711 to 5493685)
ctcgccgcgccgagtcgttcgagaagctcgacaaggtcacacactctcttctcctctctctctctctctctacatctccattttggctctgttcattttctgctctcatctttgatctctaatttggaacattggaacggcgagaatttggagcaatgcgggctgcgaattcccccttttggatttctgtttctcgttgagaatataaattgatgcattaacaatgtgctccccaccttcatactttctctaatggaaggaaaaaaggtaaaattgggctgtaaaatgtggggagtttacccctcttacagggatatttactgacgattgatgagggtgggtactatcgcgatgtttttatttgggttgtctattaagtggattcttggtagctaggacgactggaaacagtacaaatctgttattagtgggaggcaccttttacgttggatgcgaaaatgcggtggcattttctttattttggatttcttgataattttggtggaccttggaacctgggaacagtgggcattactagcaactcatgccctgctattaatggggtggggtgaacaatgctattctagtagtagtactacattgctatgggatctgagagtatggtggcaacttttttttttcacctgcaaacttggtttaaaatttaaatagtaatagtaataatgtaatatattctgctaacagttgatccagtttcagtttagctgaatcactggtgtttagctgttataataccgcggtttcctgttttgtttgctacgggatactttatttctctgaacttcaaaattttaggaactgctatttggttgacaattatgtccctttttctttgtaactagattgtgcactgttaaactttactttgcacctggactgattgcgccctttataccatggtgtgttcagttgttgttattttgtttatacagattggtcagggaacatacagta

SEQ ID NO: 11866 - DNA, 824 bp, Oryza sativa
  Intron number 1 from transcript LOC_Os01g13030.2 (locus LO C_Os01g13030) derived from phytozome v7.0 (chr-ID Chr1; po s 7249233 to 7250056)
aagaaggtcgccgcgccgccgcagccggctgcgaagtaggtgccctttgctcctgcggattccgtcgattcttcatgtgttttttcttggtgccatgtcgtgttcttggtggtggtggtggtggtggtggtggatgctgccttgctgctggtcggtgtggttggagcgcgaatgggtgatgagtttgaaggattttttttccttacataaagagattttttttgtgggggatttagttaggcctgcctgcgagaaggtgaaatttgcaatctgtgccatgtttatttgaggcagctcttttgtggattcgcaaaagagactttttccgtggaaattgggtggcaaaattcgcatttttttttgcttttttcatttgtttcttttttaactttgtggcgcgttttggatttagcttgatctcttgtgtttagaaccgttcaaaagttttttttttcagctttgcgtagttccttttctagttccctctaaaatttatactcctttgcccccaaagattaattgtgagtgcgtgctcttcctctctttttttttctcatttgaaggattaaaatacttgcgataacctgatatttgaaagtttgagctggctacctttgaaatggtcaaatttcttcctcccctattagatcaaagttcacagaaaaatcagttgtgtggtcgttttcagttttttttgtcgacccaccgttgaacaattattgctgattcttctttctggtattgatttttttctcttgttcttatacatttatactgaattattactttgcaatgatgtgcttgtgcagggctcaggtggtggg

SEQ ID NO: 11867 - DNA, 1041 bp, Oryza sativa
  Intron number 1 from transcript LOC_Os01g08540.1 (locus LO C_Os01g08540) derived from phytozome v7.0 (chr-ID Chr1; po s 4242215 to 4243255 reverse strand)
ctcgtgcggccgccgcggcagcagcagcaggggaggtacggcgcgccgatcgctggctgcttctatgtaacgcagccgtcgtactgtgaatggcgggaggcggctagggttttgggggtggtggtttgggggccttcccagtcgggttgcggcaaagcttttggtcgggtttagggtttcaagcgcgttcgtatcactagttaatactagacgggaaggattcaatcgatgtactattgggttggttccaatgtgcgccattcggattattctagttgctatcgcgcgccgacttatattggtggtatttagtacttactgccactgtaggtctgtatccaataagggtgacattgatgtgaatatgccatggatcctactttcgtccccttggcttatctgtggattgactcataatgggaggtttaatggttttgattgctgcggtgtgcgatgtatggtagttttggcctgcaatgcgtggtcctagtcatgtttgatcggtctgtctcatctaagtttgtttcaagtttgtgtctgggttttcagatagtatgttaatgcgatctgtggttttgattgtacttttgcgattaatttgcttcttcaggcaaggaaggaggacccatccacagagcttcattttttgaaaccaaaatcaagttcgagtttggattggtctagcacaaaacggcatcaactacaaaattgataatttgcacatattttatctttattaatcttcattgtgattagcctcaatggatatcagatttctggttcagaattatattttagtgaagtagtccatccttaatcttagttgcagccttgcaggtttggattgttgtactgattacttaaatcggccgtctttgtttctcttggtttatttcatttcagggtgttcttttccatgtaccaaagttatttgtttgctaactgctatggacaaaaccaggcacttgctagggccttcaaaatagtcgtgtcttgttgcgttatcatgacattttccttgtgcttgtttcagagaccagg

SEQ ID NO: 11868 - DNA, 919 bp, Oryza sativa
  Intron number 1 from transcript LOC_Os03g21640.1 (locus LO C_Os03g21640) derived from phytozome v7.0 (chr-ID Chr3; po s 12353823 to 12354741)
acggggagaagcggccgaggaggtctggagaaaaggtgagttcttggcttcttcctcctcctcctcctccttttcgccctcatttctccctctttcctgtctccggatttagtatacttcagtttttgtcttgggagtttgggagggagttcgtgctcataccctcatatctcccctgttcgtctccctctctcggcgtcttcacgttcttcttgggtagaactgtagaagtagaagcaggagtctttaggtgttcttgacgatgctcggtgagttctgttcttgatgcctctctgtttttctttttttttttctgcgatatgcttccactggagttgtacaggtttcagtaattcagtttgtgttgctagtttgtgctactgatagtaatactaaccacgatcatggcagcatttgttctctgatcttagctttctacatactgtagtacagtagttctttgaatttgtccgacaaggttaatcggtcgaggactggtagtattgagacaattgctgatgttctcagttctctgatgacctggatgagcaggggacagacatgtgtgtccttttttagctgttacctattcatgtaaatagctttttaggtggttgtttccctggtcaataaagtccgagtaagttccccttgctctgtgttgctaatatatgactgatcgcacactaatttcagtgcctcaagatgcgttgatcgtgtatttatatttcttaatctcgttcggcatctcttctgattttgatgctgctgaagttagttcatgactttgtccttagtctgtgtcctcattgctcttctatggatgcaagtccagccgagactgctagatagattctgaacatctttttcttgcacattttcaggctcagcgggcgttgtaatattagagctcagagga

SEQ ID NO: 11869 - DNA, 784 bp, Oryza sativa
  Intron number 3 from transcript LOC_Os01g29870.1 (locus LO C_Os01g29870) derived from phytozome v7.0 (chr-ID Chr1; po s 16731320 to 16732103)
tcatattcgtcgtgctcatcggcttgctgtaagtttctcggccatcctcctaatcaattcagttgcattgttctcgtgattgacaaatggtttccttgtaagaaatattatgagtataaaagtttttaggattgaaaaaaataatatcatcatagaattttcagttagttatttggtgactgataaaatggtctttacccattggagtattttgattttgtgctgatttagacatgttcggccaggacaaaaaaaaggtaagttagctgctgtttgacacttgacagtaataagggattgttttcgttaacatcctgctaaaccaactgtgtgcacgtatattttgttttcgtgaacatcctgctaataagggattgttcagttagcagcaacaaactaagagcatatccactttatattttggtgtcaacacaataccaattcactgtcacaaaagttgaattatctcattcgacaaaggcaataatgcaacacaggccttttggatttacgtcaattgtattttcatagcgtcttcttttattaaaaaattgcttcttctcatctctttttccttcaaaaagaaccttatcagacaatttcagtatatgagttttcaatagtcaatgaattagctactacagtcggtatgtgctattgtatgttttccatgattgtatatgatatttcttttcaattaaactaacagtaactacttattagttccagaagctgaaactttactgttgcattcaccagagcttcaggtcaggcatctccaagc

SEQ ID NO: 11870 - DNA, 756 bp, Oryza sativa
  Intron number 1 from transcript LOC_Os01g67420.1 (locus LO C_Os01g67420) derived from phytozome v7.0 (chr-ID Chr1; po s 39157366 to 39158121)
tcgacagcgaccgcgacctccgccacctctcgcgggtaagctccaccggccgaacgccaatgcgattcgtgttcaattctaatatgcgagagattcgatagtttcgaaaacgggaggggagggcaacgtcaaaactttgctgccaaacggtgctcagaagagcaaatttgtgtgttttgttgtgcgatgatgcttgaattgttcaatcaattgcggcaatctttaacatttgcttcaagctgctgtgtgctgcgattgttaggccaagctgcctctgtaggttgcagccttgcagcatctggttagctcagtctttgaaggccgagtttagttctaaactttttcttcaaacttccaacttttccatcacatcaaaactttcctacacacacaaactttcaacttttccgtcacatcgttccaattttaaccaaatttctaattttggcgtgaactaaacacacccgaaatgtagtgtgacaacttgacaagtcaccatgagagtaggataccctgaattaattgacttgaatttgtttttcctaaatatcatgttaccaaaatctgaaatcgtttttaacttcaccgatattcagcaaaatggcatctattcttataggtgagagttttattagtgttattttttttactgttgctttgcagtgctgatcctgcatttttagatgcttactggtattaatgtctgaaccttgaggttactccctgttctgtttgttggcagctgcggtacaagag

SEQ ID NO: 11871 - DNA, 939 bp, Oryza sativa
  Intron number 1 from transcript LOC_Os02g25580.1 (locus LO C_Os02g25580) derived from phytozome v7.0 (chr-ID Chr2; po s 14954955 to 14955893 reverse strand)
ggaccaccggagcttccgccaaatcacgcgagaccgtaaggccaccactctgtgcttcctctatccctgctgctcccgatttgcttgcttgctgctgctgctgatgctgctgttggggatggatctgggacaattgcttgtggagataggaaaaatccgtgtggttgtgcgaatttgtttgcttagagctcttatcggagtagaaaatcgtacaggattatttggtttttacctgagatgccttcactgctgcatcatcgttgtactactggtgtctagttggacgagtctgttatgcagcaatggcttctttgtgctcttgatttccatatttctggaatgtactattctttgatatatggaagccatatctggtaggatgcccgacgatgaaatgaattgggccatgcttgcttatttagtggtagtcaaaaccatttctgttctgtacagttaatgatgtcaaaatttactggtgagaaataattgctgaatcacagtttttcttataattgttttaactgcaggatatttaatttttggttgtcttgtttgtcttgtgacttgtgagcaaaaggttcgctcatgattgtagtttctatggccaactaatcttgacagaagcttaccttttttatttttcatctatttattcttctgctccatggagcgctagttaccttattttgacttggttgtcttgtcgacttatgtggtatactaatcaaccgtgtaattctctgcatggcaagtttcatgttgtatatttctgcttcatcacacttccaaccaaaccacacatttcaattctctattcatattcattcaaggagcactgttattgtctgtttttgcacaagcttatctgctttcatatagaaagcacctccatttaaccttttttttttttgctgtgaccatgcaggtttattatttgaa

SEQ ID NO: 11872 - DNA, 958 bp, Oryza sativa
  Intron number 2 from transcript LOC_Os01g40000.1 (locus LO C_Os01g40000) derived from phytozome v7.0 (chr-ID Chr1; po s 22558882 to 22559839 reverse strand)
gcaatcccccggctttggtcgacggggtgtgcaaggtatcctccattgtctcctcatggttgtggatttgttacattagggcatgtacaaaggtagagtcagatatgagctctacgttatctagagactagcatcctacaacagttaaagacaatatggtctctaatcattaatgtataaaaatactttttcttactcttctttcctttctttcaccaccatcgactctgagccgttgtcatgcactaacaaccatactcctttctctttcttccatatcatcaaatttacttgcatgacaatagagaaagaccactaataaagaccgttgtacatgcccttagtcgtgccatctgaaacaataataaaccagtagcagtttgtttgaaatagccatcaaagtatccaacaaattcaatattcaaagctcttcattgaacttatggctaggttatgtccatttttcaaataacggaggtaatcttggctaggttatgttaatggttcaaaacttgttttgaaattgcttaaccaggacagttattttgaagttaatagtatatgggagatatatgggaccatgtgagatatgtgacattgttgcttacttcctgattttttttgttccatgttttattccctattttctgacttgatagacagaaccgcaatttccccccctaaaatttgtcattatctcttgttttgagcatttcatcaaaattgaacactgaatagtaacattctccagtagatcatgcctaccaagcaaaatcttgttctaccctaccaattatcatgttcctgtgcttatttcttaatttctactttagattggttggatccttatgcctgtccaatcctaatattaatggtaattggaatgcttaaatcattttatgtaccatttatgtcttcagagaaacagtgttgtgatttctactactttcaggaatct

SEQ ID NO: 11873 - DNA, 911 bp, Oryza sativa
  Intron number 1 from transcript LOC_Os03g06740.1 (locus LO C_Os03g06740) derived from phytozome v7.0 (chr-ID Chr3; po s 3426970 to 3427880)
gtcgcctcggacgacctcggtggagtcggcggcacgtaagtggacgcttctcttgctactatatagactagtctattagttcatcacattttccccttgattcgtaggaaggttagcaacttagcatcgttggcttttggctttacttttttgcatgcaccgtaattggagcgcttccttgtgatttgtgaatgactagccaggaatcatttccaattttgtcgcgggttccatctttgctgatgttttgttctgtgatgtttttgtgataggaatggcttcgctaactcatttttgttactacattctagagaatttttgtggttgggtacattgttactcactatcatatactgcatttgaacggggtacttttgagtgagaacatcctcacgggctgttatctcagtggtgtttgctcattttaggggttagaggcacaaatctggtggggaatgtgtgtttccagtgatatgcacttgtttgttattattagtacttttaagtaatttacatttgcaccatttgttgcctttaccgctctcaccaagtttcaaggttttatatggtttcttattcagtattattgaagaaattgtttgaatgtatacaacgcaatgactccaatgcacgatttgcgctgctataccggcataatgtggcttatttcagtatttactgggatttacaatttgaatcattatgaataccagagctaaacccatgcgttttaatgaccctgtacaatattagacaatagatttccaataatatgtaagcagtttggcataacataccagcatatgaagcctaaaagatgggcatgcttttaatagctaccaccttgctgtaataccagtgcctagaaggatatgcatatgcataagaactgttatttgtttttgtcacag

SEQ ID NO: 11874 - DNA, 622 bp, Oryza sativa
  Intron number 3 from transcript LOC_Os01g51420.1 (locus LO C_Os01g51420) derived from phytozome v7.0 (chr-ID Chr1; po s 29568176 to 29568797)
acggcctgatccataaggttaatgataaactattcttcttcttcttttacagcacatttggtgagacgtgtactcctttgattctttttagcccattggttcagtttggtcgatccatactgcagaattggaactatggttacgatgctagtagatttcggtttactaaactctgtaactcttctacttgcaaaaaggaaaaggacactggaattcttcattttagttattcaacaaggaaaaaaaataaactaacaagtcttttgaaccaattaggacgggttaaccaggttgcaatccagtagtttagtatggtgccctcatgcatgttgaaaaggacttgctagttagtaatttacggagagcagaaaaggaaaaaatgaccgaaatgtcaaatgtttacatggagagtagacatgtaaacatcagagatagaaagatatgctgcgactagccccaatagaatttctataattgtacgcttgtaactggatgatatcttccaggtgaagattttacagtggaaaatgttatagtgttacctttttttggtcactaactgtgaatgtttgtacttgttttttcaggaagagctgcaattagccttgtttagaacaccggc

SEQ ID NO: 11875 - DNA, 688 bp, Oryza sativa
  Intron number 2 from transcript LOC_Os01g54190.1 (locus LO C_Os01g54190) derived from phytozome v7.0 (chr-ID Chr1; po s 31165210 to 31165897)
ccgggcaagacttacaggcaagctacctctccgtatgatctctctcttcccaccccatgtctctttcttccctcctgcacgcatggagaagggcccttgtggatttgatttgtgaagagaagcattttacttttcacctggacagctgcaaagggcttttttctagaatattattttttccctctaaatatagaactacgcattttggtttctggtggagaacttggagctcagatttgatttctcgtgtagctagtaactacttgtaagatatacttatattcaatttgtcgtgtaggagtacttttttatagcacctttcttcagtgctcatttgttttcagggtttaaacatatttctgataatgaaactatttttttcatctttcataatgacaaagtgtagctatttacaattatcaattttttttcattttattagtgttagtgagaagaaacaattgtgcttttgtgcaagttactggaattaagtggagataaaattcttgttttatctatatgatgcaattccttttcttgaggattgcttccatgagccagccagtacaacacaactaaaatcatatggagtatgaaccaactgtacatatatctgtagtttgatttagagatgcctaaaatttacttgtgtgaaattattattcccttttttcagaagattggaggc

SEQ ID NO: 11876 - DNA, 895 bp, Oryza sativa
  Intron number 2 from transcript LOC_Os01g60700.1 (locus LO C_Os01g60700) derived from phytozome v7.0 (chr-ID Chr1; po s 35096772 to 35097666 reverse strand)
aagcaatagtatctcggttgctctcctccactcaggtactgttctccgtaatattgaattatgtgtttcatcttctttgttttcccctggaaggaagttgtattggatgtaaagcggtagctttgccattttgctttgttggtcagcttgtcaaacagatggttggcatgttatggcttacttttatttctctcttgctagtgagtagtgacttggcaaaatgcttgtacactgtaaggattatactcttttagggctttaaccattttgcagcatttcttctattaagaagctgaccttaggctagaggcacggactggttttgtaggcatgtgatctatgctcttaatgttacagctatgctgtctccagcagaaataactctttctatttttgtgaatgcaaaccaggaccacaccattggtggggttaggtaacatgctctggactttgaaggcagaccatgtgtttgatcttctttcttcactttactcctagatgctttctccactccttcctaatcatatccagtgactagcgagattttcttttgacgtttgtttgatactttgatatatgatatctcatgctttccactttatgtggtttattggcatggttctgatcttccctcacttgtattcagtattgaaggaatctaaaaaatcactgtagtgttattgtgtagttctgggaattcagtggttcactagactttgtattgtgtgtgtgtgtctaaatctgataccccctttggtgttacctaatgttgcagcaccgtttattggaccatcctgatctattatttacaatttaactggttatggtactgatgcaacacacattttattaatatgcagagtttgaaagagtttaaaacacaagtgaatacctt

SEQ ID NO: 11877 - DNA, 716 bp, Oryza sativa
  Intron number 1 from transcript LOC_Os01g53680.1 (locus LO C_Os01g53680) derived from phytozome v7.0 (chr-ID Chr1; po s 30843079 to 30843794 reverse strand)
tcccgcacttcacggactacctctccgatctccccgtgagcgccgacacccctcctcttcccactcatccttgtctcgcgctggttgttccgctgccagattcgacgcctgcggtgaaaaaaattgcagtatgcagtgctgcttgagattttgatggttcttttggagacgcggatctcgtgaaagctttagatttagttctgccatttgtgtgaggtggagctttatttggatggttcctttatttttggtgtttttggcgtgtcatgccggggatgggttctggaatgagatccatttcggttgttctcagttcattagctggatatttatcaaacagaaaaagtcgcattagtgtaggacaagtacagctttggcgattcgtacctgcaattgaggttgtggcgtggatctcttaattacttgtgcttgtaggtatctggatggaggtttgatctggtagaaatagaatagaacatagcttcactttggaagtaacttctgttaattggctggctggctgccttccctggctcctataaatcagctacatgtgcatcctttgaacgtggaatacgcaacaactcatttgtttgccttcaattatattctgaaatgttgttttcaaggtgatgtcatgggggttaagctaataattttctcgtttactgtccctggcagacttttcctaatccactgcaagatcatccagccta

SEQ ID NO: 11878 - DNA, 567 bp, Oryza sativa
  Intron number 1 from transcript LOC_Os03g21210.1 (locus LO C_Os03g21210) derived from phytozome v7.0 (chr-ID Chr3; po s 12105996 to 12106562 reverse strand)
cccagaaatgtgagtgtgcttccctccctgccgcctcgcgcgtcggagtatcagatcatttttttcctttttttgtgagttctcagttgtgctggattagaaatggtgggttttttttggcgatctgggcgatttatgttcgggagcttttaggatttgattattgtgcgtttgagctttgccaagttctgaagattcgatttttttttcatgcttctcttggtagaataggaaagaccggattttcccgttgtttctcccggtgatcttgtggacaggaagtttcaagtctttagcttggtttccggtttcttccgagagttacgatggcttgagagttgagacgccggcttcagagatgggatttttattttattagcttggatttatttttccggtgcttgaaatgggaataactaggcaccaaaccggtctgtccatcagatccatccgtaaagattacaggagtttatctagaagaataatatgtccaacttaaagatcacattttgatggtacttcccatttgtgtatttgctgcagctggaaagcttccgaagaacaaca

SEQ ID NO: 11879 - DNA, 1066 bp, Oryza sativa
  Intron number 1 from transcript LOC_Os01g67510.1 (locus LO C_Os01g67510) derived from phytozome v7.0 (chr-ID Chr1; po s 39241689 to 39242754 reverse strand)
ccgccgtcgcggcagcagccgcgccctgccccgaggtcgaaactcccctcctctctccccgccgtatttgactgtgttttttttgccccccttggtggccatggagtgttcctactggcagcttgtgccatatgtgattgcgatttggcatccttgctggggtttgatcgcttgcgtttggtgaaccgcgcggcttatatgccctcggcgatttgctctgtgccaccgaatgacccccattttgatcactgagggtacccctccccttattttgtactacaaacctagaatccgggattttggagaaatgcctattaaggctatgtgcaatctgtgtgcttggacagatgcttaggggagtaaactgtgtctatttttgccacgctggtgctgcgtgaggtgcttgccgccaagtgaaacagtcgatgcttgcgagcgcctgcatgaaaaatggagtggagaagcacctgaaataactaaagcgtccgtaaaataggtgttctctattggacatcaaggctcttgaacagatgctaagggatttttttcctaagcatctgtactatttgtacatgccctttaatgcgccataaatatattttttgcttacaatagattaacctgcaacaccaaaggtgatttaggttattagattagtgtagcctccaggggttttcttgaggttgcaacacatctccgtgtcatctttatcctgacctcacgatttgtttgcaccttcagacttgtaggtatttgtatgcacttaagacaaatactggatcatttgtgacacacacagtatgcacaatgaaattgatgagaatggaagagattcactcatagtgtgcacttcaaaacaaatactgaaatcatttgtgatacgcacagtatgcataatgaaattaatgcggctggaagatatgtattcataattagctttaaatgatgccggttgagaatgaaacaatgctgtttaatctttcacataaaaaccttgatatggttttgctaatgcatcaatctttgtgcagagctataagcaagggatctgtggctctactttcca

SEQ ID NO: 11880 - DNA, 1002 bp, Oryza sativa
  Intron number 3 from transcript LOC_Os02g48100.1 (locus LO C_Os02g48100) derived from phytozome v7.0 (chr-ID Chr2; po s 29442604 to 29443605)
ttggtgttgttcaaagaggaaggtttaatagtaaggtaatttgctgagcatttgctatttacattgaataaaaaccatacacgtcctttttgactgttactttttttgcggggactttttgactgttactttgctcctgcattgtcactcattctgtaaaccttgttgttgaataaaatcacacacatccttcgtttacttactttgctccaggattgtcacccattctgtaaactttgttggcaaacttagaaagaaaattgctaattactactccttccatcctaaaacatagcagcttttagcgttcaaaatttgtcccaaaacatagcaacttctccatgtacttcatcatctgaaccaatcacaaccatctctcatttaatttccccacctacttcctcatcaaaaccaatcctaaccatctctcatttaatttcacctctctccttaatctccatgaaaaactctagaagtgcttatattttggggcttagggagtaagaagtatgcctctggatttccatgttcgtgtatcttattttgtggtaagatgggccagagcgttcctactgacttttttcttctttctgttcttacaaactagcatatcactgcagaaaatgacccatcattacaatttgctattcttgctgttattacaatagctagcatatcattgcagaaaatgatggtaataacgggttaatgataattttatttaataaaaatcccaattcaatgggtaatatgctagtgattatataaaatgctatggtgaaagccttcaaggagtgtgctgtagttctcaaggctgcctaattgtccaaaacaaaagataatgtatctggtacttacacttgagtatttgatatccaaacctcgttgcataattcatgtctttcttattttggtttcaaatttaacatagttaacatttgtttgttaatacaaattactgccattcattacagctatataccccttccacgaaatcgagtg

SEQ ID NO: 11881 - DNA, 966 bp, Oryza sativa
  Intron number 3 from transcript LOC_Os01g58520.1 (locus LO C_Os01g58520) derived from phytozome v7.0 (chr-ID Chr1; po s 33817694 to 33818659 reverse strand)
ctaattaaagggtaagggtgctccagattcttaggatatctgatatcttgccagtatgatagtctcttggtgctcgtttgtctgggaaactattttgatccctcaatgggatgttccctcgttatttgtatgtcacttaaatggttataaaaaaaattgaaaaaaattaagtagatgtattaacatgtgatatatcactacacaaacatgcaagttcaaattcaacttcgacaactcgcaacgaaaaaaacaaatctgactatgaatatatgtaaactagctgtaatttaattttttttattgcgagatgtagaagttgaatttgaacttgcatgtttgtggagtgatatatcacgtgttaatacatcgtttcaaattttttcacccgtttgagtgacgtgcaaacaacgaggggacatccccttgaggatcaaaatccactccccatttgtctcactggtggtctgcttaggtgtgtggctgcttttgtaacttgtctctgaaaacgttgcacagtgaagtttcgctgctaatctcactgctttctcttgaatctgaagaagaagaagaatagcatacataagaattttttaaattttgataaacagaaataattaatgaatacaatcttagtcgaatcagctagaattttgcttagcagttctttcatttctgtagccaacctagcctcattgtaatatgatttctgaggcctgagttagcttcaatacctcttttagaggaactagccgaatttcccacccaatcgggcagacagtctaccaaaactataattgtgctacaaaaatctaatctttatttctaaaaatacaattgtatttctcatagagttgtaagacttgctttcatgtttagagatattattgaatccaagcacatccaagtaccttcctctttttcacattgtcagctctgtttcaggtgattgcagttgcagaaatcacg

SEQ ID NO: 11882 - DNA, 637 bp, Oryza sativa
  Intron number 1 from transcript LOC_Os02g31910.2 (locus LO C_Os02g31910) derived from phytozome v7.0 (chr-ID Chr2; po s 18842840 to 18843476 reverse strand)
agctttgtttttgcagcctctccttcggatcccgggtacctcctcctttttagttctctgatctgctgatctttcaccattttatttctcatcatcttgacatcttcttcttctgaaacatttttctggaagaacatttctcaaaacactctagttgtaataataattgttattactgaaatatcattctccagatactttcttcgttgggagaattgtgcatgttgctgtttactctgaaatatattcagtcaaattaagccacatttgttttcctcaaagaactcaaccctgtcacattttcacgtgccaattcccttcgatccaacaattagtggtttcttctgacaaaaacaccgacaaggaagatctccaacattattgatagtgttctcaaaatctctgtcgaacaacacgacatgtttcagtgacgaggacttacgatagaagaaccatacggatttggatccgcgtatatcgtcgcgtatatagatatcaaattccatctctttagttaccatttcttggttgtctattaggatctcatcagaattaattagtagtgtctaaaagtctagtatcctgaattcctgatgatgcagggcacaggggttctgaagcctaaacccttcaacat

SEQ ID NO: 11883 - DNA, 834 bp, Oryza sativa
  Intron number 2 from transcript LOC_Os01g58444.1 (locus LO C_Os01g58444) derived from phytozome v7.0 (chr-ID Chr1; po s 33782224 to 33783057)
ttcctcttccattgttacaggtatggttcctactaatttccataaagatttcttttgatttttagataaaggattataaattaactcggcctctgcaccttttagaaggtgtacacagccaacaaaaagatccaatagtacataagactcaatcaaatacttttgatatgtttgctagccgtacaatcggcctaaagtccaaacaacaatcatgttttcctatttctttcacagtatatgatttcccattgttttagtgatgcataatagttttatatatcctgctgggattccatttgtttagcagccatatgtgattacagcacatattttcatttttacacatagcaaaattgcatgtacagagggatattggcttcaaatttttccccatgtaattgtatcatgtgttcatatacctatggttagtgcagtatgtcacgaaaccatgcaccatgaaatgttaacttataaaaaatcattgtgctatttgtccgattgcacatgctctatttctgcttgcataggaataattagtaactgctttggtgtacataagatgattgttttttgccgcatgcttcaatgtttctaattggcttcacggcgatacaaatgagaagaatgaggtgctcattcaacctggaagatgatttactattgcatagataatcttcatgtttagtatagaaggcacacaattgaatttgattgcaaccgtttgcaatgattgcttatattacgagtcctatatatggactatcaagttcatggtcttcagtaagtgatatatttgttgaattgcatgcataacaccttgcttttgtaggtttc

SEQ ID NO: 11884 - DNA, 968 bp, Oryza sativa
  Intron number 1 from transcript LOC_Os02g53000.1 (locus LO C_Os02g53000) derived from phytozome v7.0 (chr-ID Chr2; po s 32421759 to 32422726 reverse strand)
cgcgccgggcgacattctcgccatcccattgccaggtacatgttcatctcaaactttgcaaacgatatcgcagatgagccgtatggtttattgcattgagctaactgttttgagctaaaactttgcaaacgagcatattttctgcaggcaaattggttcgtcagtatgtttttgttctgaataaataataatcagacaatgcatcattggggatataaacagtatgcatgctagtggacattgcattggtgccttagctttaatatttgattgcttcataggctgcttatattctagggtttaattgattagtacagtaaagaaaatcacatcagtttaatgtcgggcttcaccatcttgctcgattttagtcttcctcatgttggtccgaactgaacatttgaaattatgaatctgtcgtcattacagtagcccaattactagctgcagtttgatgtttggtacttcctccgtttcataatataagtctttttagcattacacacattcatatagatgtttatcaatttaaacatatatgtgtgtctagattcattaacatctatatgaatgtggccaatgctagaaagtcttatattatgaaacggaaggagtatatgcgatgtttcaattcgctaacatcggagtcagataaatagaactttgtttaggcaatcgattactcttcaataggaattaggaagatactattggagagttatgcacgaactgttcagttttcctttctattcattcagtgagtttcagattgtgtatcctgtaagaaaacataagcatcatattatgatgagcctctgcgtttatggactctatcttttgttgattgctaattcttctgttctgccttctgtgacaacagttgggctgcatcatttatcttttctaaatatcagcattttctccctagttcttccagtgacaattgttgcttgtttctgtatcttagc

SEQ ID NO: 11885 - DNA, 765 bp, Oryza sativa
  Intron number 1 from transcript LOC_Os02g26120.1 (locus LO C_Os02g26120) derived from phytozome v7.0 (chr-ID Chr2; po s 15340431 to 15341195)
ggacctcgggacccgaccatcatcccgctgggcttgtatcgctcatgagcacaccagtatgattcattccatgaaccctaagtctcgttcatctgtactttttgcatctactgtggttggaagagacttgaatagtccttaggtatggaattcttcaaggaaagaaaaaatcaaaatatttgcttgcttccaatgacaagatgaaatattttttttgtttgtggtcagttttgcaacgcaattgatttctctgtttcttgaaaatggcagtgtttcttcactttcagcttggccatgtatttttctttctagagaattacatgctttactttctcgttaattccagtggttcctcttctatgcaatttccttctgaaatgctgatacattgtagatacatgtaggaacatgcatgtcatcattcagcttgtgtgtacactgaagtgtgattttaatattcctactgatgatttgtgtacactgaagttgctgtaaattacatcaatttcttgcatgtactagcttagttatgcagattctggcaaactagttaatcaattacagtatcaaattaacagctccaaaatttggcctacaaattttggataatcacctgatggcaaacaaatgtatcatcatcaatattttagcttgtcaatttgatcctggaaggttgcatattgtttgaactcaatctgatgccctggatattttaaaatttaattgctaggtttggatctcttccattagtatttgtggatctca

SEQ ID NO: 11886 - DNA, 955 bp, Oryza sativa
  Intron number 1 from transcript LOC_Os02g47320.1 (locus LO C_Os02g47320) derived from phytozome v7.0 (chr-ID Chr2; po s 28894002 to 28894956 reverse strand)
ccccaacaccccttcgagaatcgtcgtgcgcgcaggtatgatcccctctcgcctgcgcataccaggtccctcgctcgatccaatcttcggttgattgaagcgaatctggaggctttgcctctctagtaggtttttttttcctgattatttccactcacatttgcttgcgcatctcaaacactattgtggagaagtggggaggtggtgaaaactggcaatgggatcgttgtgggccggatcagggatgaatcttgggggattattgccttctgctcgccgctatagacgtatgcttgtttagttttagtattctgactcttttcggctgatcgtatcatcataaaagctcttggtccactctgtggtttgattttgtgcaagaagaaatataatatcgcatgattatattctgtgatcgtagattgggatagagagcagatgttattttgtgcacgcacacttttaaaatcctctgatatggttaactaattccgtgacctcttcattcagcaaacctgtacatgggtaaacaagcataactgaattacaggcaagccggtagcttggaaagaaccctcttactcccagtaaaaacaataggaggcccactactgctattttctttattgtgcttctgaatgcaaagtagcacaagtagggatattaggtatgggagagaaagtccttttgttttgttgttatcctcgttattgtaactgttatccggtgccaaattagcacctgttattgtaactaaaagtcagtggcttttattagaagataacatcttccattttttatttatacctcttaaaatgtatcttgtgaatgctcgaattctggcatatgttatgcaatcacattcatttgtgttctgttcatttaggacttgttatattccactcggctttcactatgtgttattttgtctaataataaaatagttcctcacacc

SEQ ID NO: 11887 - DNA, 816 bp, Oryza sativa
  Intron number 1 from transcript LOC_Os01g60280.1 (locus LO C_Os01g60280) derived from phytozome v7.0 (chr-ID Chr1; po s 34877526 to 34878341 reverse strand)
tgtcgtaaggggacagagcactgaccctgctgaaggtaatatacagtaatctctagtaggacatgtgctgtactgcatttgcttgcttgctttctgttatacttttgagccaggcagtttgaattgccggagctcagaatagctactagttctatagttcaggaagacagaattgggctttaagctttcaaagtttcaattatgcatatcccatctgtgcggatttaagcatatctttttgtaagtagtgctatgttttgaaagtatctcgaagatcccgtcccccccatctgaacctgttgtgaattgtccgtttctacaatgttcatgccatcaattgccgcacactcaattgttgtcacaccagtaatcagttatattcatgtggtaatttaaaaagttcatgatataacatgtttttaattcagagttaaagaagttcataatattacagattttaaattaaagaagttcacaatattgtaagtaaacttacaatattacataacattatattgcctggcaattacataacattatgttagttaatctggtatgaacaactttgttagagaagtagaataataactatttgaaagggttgcttcccagtagttcttccaaagaaatatctgaagaatagttttttaatagataatctgaagatagctgtgcaatcaaagtaagaataatcattattagtttttttgttgttgctgagatgtgtgatgcttagtttaaacagtaatattgactcagatacttaaaattttaaaactgctgtgaattgaactgtttccctcttatgtgcagtaa

SEQ ID NO: 11888 - DNA, 974 bp, Oryza sativa
  Intron number 1 from transcript LOC_Os02g12550.1 (locus LO C_Os02g12550) derived from phytozome v7.0 (chr-ID Chr2; po s 6559981 to 6560954)
gtgtcctctccttccgtcacatcagggaacaagaggtacatatataggttacacacattagcttacactacttaacaattttagggccttgtttagttccaaattttttcttcaaactttcaactaattttccattacatcaaaattttcctacacacgtaaacttccaacttttccatcacatcgttccaatttcaaccaaactttcaattttggcgtgaactaaacacacccgtggtgtttggatctaggtactttagtctctgtcacatcggatgtttcgacgctgattagaagtattaaacgtagactaataataaaactaattgtataaatgagagataattcgcgagacaaaatttttaaacctaattaatctataattagtacatgtttactgtagccacataggataatcatggattaattaggtttaatagattcatctcgcgaattagtctaggattatggaatgagttttgttattagtctacatttaatacttctaattagtgtcaaacatccgatgtgacagggactaaaattttagtccctgatccaaacagacccttaattaacacattctaatcacaaattcacattttgaagtgtggtagccaaaacatgtgcatcatcgacatcagacgtttttttttaatgaaccggtacttagtgtgctaatttaattggatatatatataataggagtatatattgtacaagtaagaaagaatcatactaaaaaaagcaaggggataagttttaagggtcgttttgctccagatacggtctagattttgatctcctccttgattttcgccactagggttgtcgtcgaaagctcattgtgttcaaacactctactttctctctttcaaaattacataagtacatcaaaagaggtttggtagctaatcagaaattttgatcacaatcactaatatcctaatacaacatgttatttttacatgtag

SEQ ID NO: 11889 - DNA, 522 bp, Oryza sativa
  Intron number 2 from transcript LOC_Os02g51030.1 (locus LO C_Os02g51030) derived from phytozome v7.0 (chr-ID Chr2; po s 31204814 to 31205335)
aaaccttacgaggctgaggtatttttgcttttcccctagtttcagactttcagttccactactctgccattctgaaacttgtggtttgctagtagatttttgtctatacgaacaactgtattggtgctcagtgctcactcaactcagtttgcccaattcgacatcagagttaatttttttccatacatgacatgttgaccatttcgatcacatatctgttaatctgtataagctctaacgtttgattttcagaactcggtaatttgtcttagtatctgaatttttttccatagatatcactatatcagaattcacaagtaagcacctagagtgtctgcgagtagcagacatgatcttaaatcttcatcagtaattttagcttccctgttaaaaaaagttatcactgttttttttctcagggattgtgatgtgattttgatcatctgccgtgatcatgctgatcttatcacaataatgagttttgcagattgcacagtataaatcaaagctcttttcccaatt

SEQ ID NO: 11890 - DNA, 1026 bp, Oryza sativa
  Intron number 1 from transcript LOC_Os02g01270.1 (locus LO C_Os02g01270) derived from phytozome v7.0 (chr-ID Chr2; po s 146971 to 147996)
tcgcctactacaagaagaaacccaaagacaacgtacccgccctaactccatcatcattcattaatcaatcaattattactactcgtactaatttcaaacactcttactatcactgccttgttttaattttccttcccctggcacacgcttgtctggccaattacattgtgtaacaaaaaaactcttttcattctaatatattgatgcgttcgcgaaaaaaaaacactcttactattacacatttgcactactactcatagtaaattcaaacacacacacacacactatatatatatatatatatatatatatatatatatatatatatatatatttggcaccaaaaattaaatatgcattaattcagtcacatcatctagaatatagtagcctttggatccttcttatgctttgatctcaaccatccatttacatatgcatttacaacccactaaatacatagttattagtataaaattcaatgtgcattaaaccataacatctacaaaactaatagtcattggatctctctctcatatttgatactccctccatccctaaatatttgacgccgttgacttttctttttatacatatctgaccgttcgtcttattcaaaatcttttgtgaaatatgtaaaactctatatatacataaaagtatatttaacaataaattaaatgataggaaaagaattaataattacttaatttttttaaataagacgaacgatcaaacatatttaaaaaagtcaacattgtcaaatatttagatatggagggagtatataactatcccagctgtcatgtaaaattgaaatttataatcaactactattgagcaaatattctctatttacatattataagtacttgatttacatattgctttcttttaattttctataaagtatttttaaatttcctgctgcaatgcgcgggatatgcactagttatatgtaataatgttgtacatgcatatatccatgcaggtgccactaaaatcgctgctgatagacgggaattg

SEQ ID NO: 11891 - DNA, 750 bp, Oryza sativa
  Intron number 1 from transcript LOC_Os01g12230.1 (locus LO C_Os01g12230) derived from phytozome v7.0 (chr-ID Chr1; po s 6668498 to 6669247 reverse strand)
ctggtggacgcgctccgcgacgccaaccgcgcgaggtacccgcgctactgggacgagatggtggggacggccgacggcagcggggtcccactcctacatgtaaaatgtcccttttgccccctctctgctcctggttagtattacccagtgaaattattagcagggttttaaatcttctgttatagctgctatctttcgctgttgctgtttgagaagtgttttaattatttattctcatatacaatttagctgctataactccgctaaatgctttagtccactatttaaaatagattattaggacaaaatttgttgaatatatgaagtctaggtttttttttactttttaacttggctgattttattgagcagtttgtttttccagcttgataaacccgatacccgatgttatcgtcgtgaattatatgagatcttcaaatgaatcgaatcggcataaaaattatcgcgtttcaaaaataacttaatgtgttcggaaatggcttgtttttggagcatccggtgattaagcccatatgccaatttagacgactactgtatattcctatgctcgtatatatactaccctgtaaaaaaaatataatctaactagattcgttgttagaattgtttttttttaaaggatggagagaaaatataggagtatttgactagagctgactcgcgggagtaaacaggtgattctagtgaactttaggaaggagctcctgccgttcatcacagaggaggaag

SEQ ID NO: 11892 - DNA, 1053 bp, Oryza sativa
  Intron number 1 from transcript LOC_Os01g41510.1 (locus LO C_Os01g41510) derived from phytozome v7.0 (chr-ID Chr1; po s 23497517 to 23498569)
aatcgcgcccaagaatccatctcctccggcggcaggtatggtgatttcgtcttcctcgaactcctccgtttctttttcctttttttttaaaaaaaaatcatccatttctcccctgatggagtggagtggagagctccgtttctcgtcttctcggtggatttggtcattcgggtagtgctaccgtttcttgatttatcctgcggaaatcgtgctcttccgcattgatcttataggctggtgggaggcgccgagccgcccatttgagttgaggggttgaccaatctgaggaatattctgacggcgttatataattcggacaatcgatgcacaactggggcccaaaaacaaaaaaatgttcctttcttaaacagttggttcagaatgggatttttttttctttttggtaatttttattttttgttccttcccgattaccgtgaacagtttttacaagcaatctacatgtctggtcatgaacttaacatctctaaaatatttactctattatatatatcatacactgttcaactgaattgagattgcttttttttttcttttttgtagttttatttgtttgttcccttccaagtaccatgaacaatcttgcaaattacaatccatttacatgtttggccacggcttgaaatgttaatccagtatatggagaatcatatacggctgaactgacttaaaacactgtagtgtttgacaatataaatcacactgttgaactttgttttagacttaagatactatatagtatttaacagtaacagtatgttgtactatgtatcatatatgcactgctgaactatcttaagagactgtaggtttaacagtaaaagattgccacctgtaatttcctgaaggatataagcagttaggaacatctttttttcgccgggccggcaaagaacaccggccacagttaggaacatctttgttgctgtatattcgtaatgcacccctatattcccttcttgttctgttcttattgctgttttatttgcatgtacagcttacagggtcgctgctccatctccttgaattgta

SEQ ID NO: 11893 - DNA, 460 bp, Oryza sativa
  Intron number 2 from transcript LOC_Os01g41510.1 (locus LO C_Os01g41510) derived from phytozome v7.0 (chr-ID Chr1; po s 23498696 to 23499155)
acgggaagctgtggctcttgcggctgaaacatcttgtgagaacgtcgatctaccagatttcgttaatattgccactggaacaccctgtgagaattgaaatccatctttccataagaaagaaaaaggatttagtttgtttttggatatttttatgattctgtcttaaaatgtgtggattagcttttcttatgttagtcgttcaaaatcaaacaaaatgacaatgcactgcatatatgatgtgtattatcctgagtagaatggaactttgaaccaataacttcttttctaccacagtaccagtaacccaatggatgccagggtaggccaatttcatctaaaaaagcatgttatacattatcatggattgcgtatagttctgtaatgttacctgaaatacatatatttttccgggttttacaacaagtttcttaacatttttctattattgcagttactgtga

SEQ ID NO: 11894 - DNA, 350 bp, Oryza sativa
  Intron number 3 from transcript LOC_Os01g08260.1 (locus LO C_Os01g08260) derived from phytozome v7.0 (chr-ID Chr1; po s 4035243 to 4035592 reverse strand)
aggttaatttctttacaaaacctagtagtcaatttatgcatgcatgacaagcaatagttcaaaagtcattattttgagctatccttttcgtgacatattaacaagttgagcacagattttgatattttttcgaagcaacagtacagattttaataatcgttcataatttgatgttaatcagttttcttatcaatgatggatgtgaacagaaactagtcccttttacacttgatctgttgaactttcattgtgctacttagggaaaccgcgaaattttcttatacaagtatgtactaacatttaaccagcaccctttcctaactcattcatatgctggtcagcttttgttc

SEQ ID NO: 11895 - DNA, 860 bp, Oryza sativa
  Intron number 1 from transcript LOC_Os01g12860.1 (locus LO C_Os01g12860) derived from phytozome v7.0 (chr-ID Chr1; po s 7115107 to 7115966)
caggctcgcccgtcagcaaggcgattggtgatctggtatatatctctccatctctctgcttgattaattgttgctttgggatgttgcttcgttggtgattgggttgaagtgttgtgctgatttgagtttgaatatggaggaggtgctatgctatacgatataaaccgacttacgagcccagataattcgtatcactaagatctgtgttatatattttttgtctggtaaattccacagcgaaagtcagacgcttttagcaccaaataaacctgaaacccagacagaggaggtccatatttttagattatggataaaccaggagataattcacattttgcagaaaatacaatcctcaaatctaaaaggagaaaaaacattttactaccctaaaactattttatatattgcagaaagcttaaggtttactccccctaaatgtgaaattagctacttcagtagttcggacttcggagggtagaatgagctaataagtagatttgcagaatagtttacggaagcaaagaggagtttttccccatttgcaagttatccacttgactgcatatcaatcaaccatctacatatacatcagggtgaatgatgcattttttagttttcataaagatgtacaacgagggggtgtagacacattatcaccccaactctttttttagataaaatattatacaatccatctctataataaaacgaaaatgacatgaattctaccccaactcctttgaaatgagaattcatgttcttatgagggtagtcaatgtcctgtcctctatgcatccctgaatgcttctattgttacatcttgtgacaatatcttcattcgtccaattcttttgcagctt

SEQ ID NO: 11896 - DNA, 532 bp, Oryza sativa
  Intron number 1 from transcript LOC_Os02g07750.1 (locus LO C_Os02g07750) derived from phytozome v7.0 (chr-ID Chr2; po s 4041371 to 4041902 reverse strand)
ggcggcgcccaggaggaacaccaggaagcccaagtgtgagatcttgctgcgattatctttgttgttgcttctcgttttttcttatttttattttgttccccttttgatcgggggtttggagtaataatttccggttttttttttcatcctttgtgatatactagtactagtagattatatgagtttgaagaggtttagatgttttatgtgtaaggtttaatttggctgaagtactgaaagttgtgatgctataatttagatttcaattcgagactgggacattattgttataggatttttttttttaaaaagttcttgttcttcctatctgcaatagtagcagttggctttgactttagaactggagttttgagtcatcgacgaagcctttgcaatttagaatggtctgccatcttttcagatggtgggatgattgttttggtggaattgttaaattcgctatgaaatttactttatttaccctcttttatgtgcagattccaagtttactcagcaggagctcccagcttgc

SEQ ID NO: 11897 - DNA, 1025 bp, Oryza sativa
  Intron number 1 from transcript LOC_Os03g04690.1 (locus LO C_Os03g04690) derived from phytozome v7.0 (chr-ID Chr3; po s 2225681 to 2226705 reverse strand)
gcggcggcatcggaggtcagtttctttgctcgcctagtttactcgacgaatctgtgcccgtgcctgcaatctgatgcttagttgcttacatcaatgattcaattgcttgttgatcggatcggtagtgatgactaatctaattattccccacaaaataaagatgactgatctaatttagtcacggatatattgttcaggtttaggaatttgggcaaacttattcctttctgtatatcaagtagtgaactttttaaagatttgcctggctggctagcttatgcatgtgaaacattcgatggtggatttgtctgtatgtatgcgttggtgagatcttgctagggttctttgtttagttgtccttagaattgattgatagggatggtggggatgccttttggttgtttgtttggttgattctgattgttttggcaaaattgtgcacattagtgccctctcaggtgctgattgtctagttagattataagctttacatggtccagcactggtagtggaaggtttgatttatgtggagtatcttgcccttgttaaagtagaactctggtggagatagtggcatgatcttgttcctttgtttggttagtttctgaattggcagacaaagataatcagctgtttccgttgtgacttgtgaggttctcctgtactggttagctcaatttaggggtgcgcattactgaaacctctctttattacttgtctgaaaaaaactctctttattgtttagtttcatgcattttgcttgggaactatatgccactatggcagcagattagtgcaacttctgttcttcctagttgtttatgccatctgtctagttgtatattcaggctttcagaaaagttggtgtccactgccttttccctttctttctggatttactggagatatgcatctatgattgcccccatgattagacgtggcatccctagtttgatcaatcgatttgcctcttctccttgtgtttatcagggcagcagacagcaaagactgtagccattgttctc

SEQ ID NO: 11898 - DNA, 301 bp, Oryza sativa
  Intron number 3 from transcript LOC_Os02g32460.1 (locus LO C_Os02g32460) derived from phytozome v7.0 (chr-ID Chr2; po s 19187419 to 19187719)
ttgagcttaataaccttcaccgacaggtacagataatttggcgtgtattttgtccatgtatcttctgttctctaatactttcattattttcccttctgaattatttgaatgatgtttgattactgattgataaccgtaggaacataatttgtattcactttctagctagcaacttcataatcactcaacagtgggtcattttgttctcgaaaattcacgtggcatgtcgttctctgttttttttttccccttgaatgtcctctcagataatccacaaagaagcatttgttgggaaatcaaa

SEQ ID NO: 11899 - DNA, 1059 bp, Oryza sativa
  Intron number 1 from transcript LOC_Os01g67570.1 (locus LO C_Os01g67570) derived from phytozome v7.0 (chr-ID Chr1; po s 39272198 to 39273256 reverse strand)
ccaatcgggacaggttggaggaggagtcctacaaggtaaagccgttaattttgttcgatcatttgtgtgatggtttgatttaactgggaatttgcgtttgactgtgcattgtgttagttagatgtagaagtgttcatgctttagtggtctgtgcctgtaattagatatctgcagaccaattgcttcagttcacattggttatggaacgtgttggcatgctgctaattactatgataattatcagaggtgataagttcacaaaggatggaagaaatacctgtagaatgtaacagtagtccaaaatcattattctggtaataactagatagttgaaaataaacctttttagtgattactgcagtggtttattgtgaatttgtgatatcttaataaaagtattttacatttgtatgaacagtctactattatcagaaaacctagacaacggtatcccgttggaacgggatacccttatatgagacttacctaatacctaatacctgttgtggtaccagctgcatggtaccctatacctgtgatacctgttacccggtacctgtgatacctaggacctgatacctgtgatactcgtgcaagagaatagttaatatatctatcccgttgcaacgggatccccttttgtagcggccctctactattattgtattttcttatcacttaaaaaaagttccttttcgacccaaaaaaaaaaactgttatggtgttcagaaccccctcagatgcctatttccttgtacgtcatgaacacctgtgtcctaaactcttaggttcgatgttggcaagttgttttgttattcatttgagtggctcggtattgtctgttttatgctctcttcagagagaggcacgtcagataaccatgggttgattttatctcctgtaactaagctttgtttgttggtttagacctttagtttaggggttgagtctcacttgtcatctttaagagtatttgtagtgttctaggcggtaatacccctctttggctatttttgtcgtgcagtttgatcaggattactaccctggcagacggaaaag

SEQ ID NO: 11900 - DNA, 919 bp, Oryza sativa; identical to SEQ ID NO: 11619
  Intron number 1 from transcript LOC_Os01g10450.1 (locus LO C_Os01g10450) derived from phytozome v7.0 (chr-ID Chr1; po s 5512259 to 5513177 reverse strand)

SEQ ID NO: 11901 - DNA, 389 bp, Oryza sativa
  Intron number 1 from transcript LOC_Os01g37490.1 (locus LO C_Os01g37490) derived from phytozome v7.0 (chr-ID Chr1; po s 20949765 to 20950153 reverse strand)
tgaagaaggtgagcttatttttttttctttcaatttgtgatctttcgcttgtttgtttacttttgttttgtattctgaaagggattgcactgattccgttcattgtatacgctccttccctttgtcttttggacgggttctttgtgaaatcaaattttagaaacttatcatttatgttgtcaattatgagatgcacttctagcatcttctgtatcatgcaatgcacatagccttaatgctgaaacacgtagtaaaatcattatctgatatattagaacctaaatagtgttgctgcttcactttttaatacttgtttttgaaggaaaatgtaatctggcttggcttctaacatcttgtccttgatatccaacaggagtttgataaagttt

SEQ ID NO: 11902 - DNA, 781 bp, Oryza sativa
  Intron number 1 from transcript LOC_Os02g10170.1 (locus LO C_Os02g10170) derived from phytozome v7.0 (chr-ID Chr2; po s 5329731 to 5330511)
gagcggcgccaccggtgagggggagagggagcggcggcgctggtgggggacgggaggggaggggagtagcggctgagagagagggggagaatggaaatgattttaggattagggtttagacttatgagtttttatatagattgggatcaatcaggaccgtccatcagatcggacggctactgcttctcccacgtcgggtcgggtgccactcccaggccgcccacactattgggccgcatgtacgctccgcgtgaaaaaatttcactttagatccctcaagttgtccccaaattgttcccaggccgaccacactattgggccaccacataggccgcgtgtacgctccacacggaataagttcgctttagctccctttatttgtcccctcaaactcctaaaaccaatgcaaatctttaaattttagttaacccgttgcaacgcatgggtatatttgctaatctacttctacttatactacttaaaaaatctaaaatgtttccatcgtccgtaatttataaagagcgaaaaaaaccaggcagaaaaaaaaaaagaaaacgcaccgtaaaaagaagagaacggcggaaaaaaaaacaggctcaaaaagtccgattcgtacgacacaaaaaaaaatctggaaaaaaacaaaaaaaaacaccggctgtaatcttatcttaactaattaaaatattcataattttcctttcatcacaatctgtttcatccatccggtgattttttgtctgtaggaaaaagggggtcttggatccctgaagaaaagctc

SEQ ID NO: 11903 - DNA, 823 bp, Oryza sativa
  Intron number 1 from transcript LOC_Os01g36660.1 (locus LO C_Os01g36660) derived from phytozome v7.0 (chr-ID Chr1; po s 20339388 to 20340210 reverse strand)
gggttcgccgcgactccgtctccggcggccacgaggtcagcatttcttcgacaacaacaacaaaaaaaagaaaaatccatttcttcgatttatttcactccatggcggcattgcattatttcatagttaattcatacttctactactctttctctctgttcttgaaccatttcgattttgaaaagagggagaaaaagaatccattcttcctctttcctctcgttcagccattatctacatggcattgcatcatttcctagtacttaatagctctctgttcttgaatcatttcaattttgatatgaaaataaagttgttcaaaattccaaaaccagtttcatttattttcaattcgaatttttcctcctttcaaatagcgctcgaaatacatatgcactgcatatctccgattggtaccagagtttgtttttgtccccttttttttctctctttctgtatatctgagcagctgacgacaaatagactagctgaaagtgtcacgtcatatggctgagaatatataaaaaaaaaacgtacaatctacaccgatgacgataaccgccgcaaggacattcagatttcagagtcaggcagtgaccagtttttaacctcaccgattttgaccccattcggttgactgcttttgtcgccattgctgcatcagcattgatcccaaataggagtatactacttctatctcatttctctatccatcccagctgcctgcttgactgcaattaactgcagattaattttagatgggttattaagtgcattgattaactgaaatttaagttgggggtgtggcagcacgcggtggggt

SEQ ID NO: 11904 - DNA, 712 bp, Oryza sativa
  Intron number 1 from transcript LOC_Os03g21400.1 (locus LO C_Os03g21400) derived from phytozome v7.0 (chr-ID Chr3; po s 12235583 to 12236294 reverse strand)
tcattgcccgtgagttcttcctggacaaggtcaaggtatgtgcaatatatcgcactgttccaatatccagttagtatccaactatcatacatgcaaataaaaattattatggcaaactgaaactcttgaggttgaggcccagaatgactctgaaatgtcactcccactatagccaccaaaaaagaactgacagtgagatatatgttcaaatagacttgggttgctaacaaagatttgaaggcatcggaggaaaaccttaggccccagcaagtaggcattcaaagctatcctcatagtttcagggagaaataaatatgtggatctacatgttcccgcttagcaaacgcaatttagaattacagttcaacgtaagagagcctggagcagagtgactactacagtctgatccagctagataatgtgttacgagcattaaaatttctgattaggaccactcacgacagcaaaactacaatattctgatccaccaagataacgtgctataccccactctagttaggaccactttcagtaacattggatcattctgatgagctatttatcacacttacataagggttttttattcttctcctattgtcatcagtaaattagaattcaaagatttaagaacaagcatacagctagacagaagacaacaatgagtgttacttgcctgcctgattctttgtttttttcacatacttagggc

SEQ ID NO: 11905 - DNA, 754 bp, Oryza sativa
  Intron number 2 from transcript LOC_Os02g25060.2 (locus LO C_Os02g25060) derived from phytozome v7.0 (chr-ID Chr2; po s 14530205 to 14530958 reverse strand)
aggtgaatttcaagggctttattttgtaccaaagcaaatcagatgttcgttgctagtactcctgaatttcaaggactttattttgaatttcaaggtctctgtaaatggaggtggcggctttgtttcccttttgtagcgacctcaaaaggtctctctagtactcttgttttttatttgctttgtatggaagcaggggttccgcttttggtctaaaaaaagagctggtcagggtgctctacttttcttcctgtttcagattgaatattgttcgtcctttgcaatgggtcagaggaattgacttgaccaacagaaaacacctaagtacaaaaatcacagtaattccttcctccagtggttccaggacaacctattcttggagtggttccaggacaacctgaatatctgttttatgcttgcacgggcaaatgacggccatattgtatttttggaatttactaatttgcaccgttgaaattgaacttctgttagaacatatggaataaaagtggacagcttgtacatactatctggtagaatgcataaatttattagcattcaatagattggttagtctcttagatgttctaaccatgacttggtatactggcttgagatttgatcgatctgtatcttctatcactgtcattgtgattgcatgattcagccttatattgccattacataacataccacttgctgtttgaatgtcaattgcacaggaccctgtaatcaggccacttgttgaacttgatac

SEQ ID NO: 11906 - DNA, 550 bp, Oryza sativa
  Intron number 1 from transcript LOC_Os02g32504.2 (locus LO C_Os02g32504) derived from phytozome v7.0 (chr-ID Chr2; po s 19222399 to 19222948 reverse strand)
acaaaatactgaaaatattcgtgtggctcttccaggtaaaatagcggtgaaaactggggcctggccatggaatccgatgccgtcctggacatgtcgccatcggcatcgcttgattcgcttcgctcctttggtttgagattgcgttgggactttgggagttgtgtattttcaaaacgtttcatttctgtttataaggaagattgaattttaacttgcatgtttgtggattgatacattacatattgatctatcttattcatatttttttattttttttttaaatcatttagatgacatgcaataaacggttggatatccactcgagctgttaaaacagtttcccgctcttctaatcacacacacaacattatctaaaaaaatcacacacacaaaaatcactggactgtaaattgttatcacggaagcattgatagctaatcacttacgatcgtggtgttgtacaagggggaatttttttaaatgaatttaagaaatgtgtttttttcttgtaaggtataacatcccatgattattttgcctgatgcagctt

SEQ ID NO: 11907 - DNA, 803 bp, Oryza sativa
  Intron number 1 from transcript LOC_Os02g04460.1 (locus LO C_Os02g04460) derived from phytozome v7.0 (chr-ID Chr2; po s 1973370 to 1974172 reverse strand)
catctccggcaagtccatcggcaaggggttccaaggtcagtaaacttgattatttttttttactcccttttcacaatgtgactaccatttcgccctgtctgaatttgaacaatgctttacattgtgaggaagacttgagaacaagcttgaaattttgctgtatcaaatttaccatatgctcaccaatgttagtgtacagaattgttcttgggaagaatcatttagcctcttctcttgattagcgtcctagacttgcacaatggcattgccaatatggcaatgtcaatgctgttcttggagttgcagacctgtaccatgtcaacacattcgttatagttcacaatttattgcaaccatcagcatcacttgtataattttcatgaagtgaatataacatcgtaaacccgttgcaattgcgctcttgatttgctgcgaccaacgatttgccaataccgcaaacattatccatttcatgtatattcttcccaaacaacataataaaaaagacacaaatattagagaaggacctaatatcaaataattagaatgggtgaggcttcgaacccaggtcgtctagcctaccaccttgtggagctagttggaagacccctgggtgtttctccccaaacaacataatcgtttatagcattctcatgaagtcaagagcaccaatatctcttttagttcctgatcatctaatggcaatatggcataattgtgcaactatgctctcaatttgcgactgacggttcttggacatcgacacaggtggcatcaagaggcacaacttcaagcgagggctg

SEQ ID NO: 11908 - DNA, 1035 bp, Oryza sativa
  Intron number 2 from transcript LOC_Os02g57900.1 (locus LO C_Os02g57900) derived from phytozome v7.0 (chr-ID Chr2; po s 35439375 to 35440409 reverse strand)
ccgcggcggccgacgacctcacgcagtacgccgtcatcttcctccccgacgcacgcgacgggctgcgtggcatcgtggaaaagatggcatagcggccgggttcctgcacgagcacctcgtccgaatcggtgcgggttggcgagttcatggtgcccaagttcaaggtgtccttcgccgacagcgtcgtcggcgtcctcgggcagctggggctccggctgccgttctcaccgtagctcaccaacctatccgtgatggtggaagacgacggctccggcttgccgttgtttgtgagccaagtcatccacaaggcggtgattgaggtgaatgaagaaggaagtaaagctgctgccgtccccatggcgatgggccgctgcctccgccgccggtggacttcgtcgccgaccatctgtttgtttaccaggtcatcaggaattacactgaacaaattttattgcactaacagatcattggctgtattcctttctaaaatttgcaggaaatctagaaaaaaaaaattggaacagaagagcacagctaatcttttttttttggctaaacctgttgatgagtgattattactattttgcttatgttacatagtatttaaaattgttcaataaatttctaggtaatctgtctgttttcatcctttgccagacagtattttaatttagctcgcttcaggtttcttttatttatcaatggttctggcattggatatcaaacaagtacactgttttccttttatttatcaatggttttggcattggatatcaaacaagtacactgttttctattaaacatatggttgccagaagaattgaatttagctttctaatgctgaagctgctgaactacaaattaatatcactacacgtggaacaggggaaatcaaatatttttttcggttaattgagccaaaaagaatttctcgctggttctttcaataatgttcagtagttgctgcaccgagtgcttgattttttttattattttaatacttcatatttttattattttcagcttggccaaatt

SEQ ID NO: 11909 - DNA, 662 bp, Oryza sativa
  Intron number 2 from transcript LOC_Os03g05730.1 (locus LO C_Os03g05730) derived from phytozome v7.0 (chr-ID Chr3; po s 2854609 to 2855270 reverse strand)
tccagcttttccgcggcgacactgtgctgctcaaggtttggggatccttgcctctgtaattcttctgttaagcttcaattgcgagggtttgaaggcctaatctgtggtgcttgtcctggatagtaggaactgatggtctgaattgtgaatatgtatgaaaaaagaacttagctttcttgtctctaagcttaggtttgtgtgtctactgttttgtagaggataaattattagtgaggttgaatgtttgctactttctagtttttgcccctgatgttagccttggtgtagattatttattcagattacatatggttagattatatgtattcatgactcatgactctttagcttccttagtactaggttgttacagtaattatgctgtgataagtgatcctctaatttgattgggtacagcttacaatctgtaattatgtcaagattattgcagttaacttctaaactgtgatggctattcactaggtagcttcacaacagtacttatttagttttataatgccatgaggtcgggaacttgggattctgttttgcattgtatgataattcttgtgtcatcaaggcatattttattatttgctgctgacattttggctcactgcatcacagggtaagaagagaaaagacaccatctgcattgttct

SEQ ID NO: 11910 - DNA, 797 bp, Oryza sativa
  Intron number 1 from transcript LOC_Os03g20760.1 (locus LO C_Os03g20760) derived from phytozome v7.0 (chr-ID Chr3; po s 11751090 to 11751886)
cgagccgccgggcggcgccgtgccggaggagtcaggtacgacacggccgccctctgccgcgtgcaatcaattaaacggagctgtcgtaaattgaccgcctttgctacaccttttccgtttctttttgcaatgtggagtttaaatgcacaacctttaatttgttgaaaattgcatgctaatcaaagacctgtagtttactagattcttatactacacatactcctcccgtaaaaaactaagttagtactggatgtgacactatctaaattcattaatagcataatgtatcctatataatcttaatatttgttttttttggaacggagagaggacgttgttactagtagctcaaaactatcaaatcatttgcatctttaatttgacaaactcccgttaggaatcagtactcctggctccacctccacctattccattgtcaaatcaactgtcatctagcactagcacgcgatacagcagaattttactccactgtatgtaaaaatcgagttttctgaagtagtgaagagcaaagtgaatctacgtaatcaagtaggtgtatcagataatgtgattatgtttgtactgttagtgatatattcagtggctagaactttcaaggaatcaaaatattcgaccgaaccaccaccctttttgggtagccgaatgtcggcactgccaaaattaaagcagcacggcaagaaaatgtctgatcaaatttctcatgtatacttgtttcacacggcgagatttgactgtactgacaatgtctcaaacatccggcagggttgtccggcggc

SEQ ID NO: 11911 - DNA, 655 bp, Oryza sativa
  Intron number 1 from transcript LOC_Os01g58690.1 (locus LO C_Os01g58690) derived from phytozome v7.0 (chr-ID Chr1; po s 33925662 to 33926316)
tcggcgatccgcgcctcttctcaccggctgtatccccctttctcctcctcctcctccctctctctctctctctgagttcgtggtttagattgtttctggaatctggttatatctctattttttggtatctctcgttatgttctccgtgactgttgggagtagagtcctgaacggagagaagccaatctttgattcttgaagagcgtggggtcttaggggttttggattggggtttaggaaaggattctgctacgagagttgaaaccccccaatattagggcaaaatcttcagagcgattattatagcttccgttactagcatataattttgatgcggccttcgttcttgtttgagaaccgagcagtagaagcacgcttttggcgacaaaaggctattctagttggaaggacaggttcttgattagtttactttcgttgctctttttgcccaaattattgacaggcatatgttttttattatcattatggaagtagtataacactataaccataagtttttcagtgtgcagctaccctttgtatgactaatgaaagatggaattcctattgtttccttaagtactgttgttgcaatcgttgctgaagtattcctgaatcaggcagacaagaactgtggcattaacaaggacaaaga

SEQ ID NO: 11912 - DNA, 845 bp, Oryza sativa
  Intron number 4 from transcript LOC_Os01g04910.1 (locus LO C_Os01g04910) derived from phytozome v7.0 (chr-ID Chr1; po s 2270923 to 2271767)
aggaggtattgtattcgagatagggatcttaaggaactaagttctagtgcgttagttgctcgcggagtcgctgttgttcatatttagaagccaggacacccttttagccaataatgatatctccttttgagttggctagcgttagtggtttcagtgtcaatatatattttgaatcatcatatcttgcctggatgtcacatttcaattccattactgtgggtgcaacaagtcggttttaaggttgcatgcatcaccaattagattgacatataaaagacatagaattgctgaaactttcaagttatggtgttaacagtacactctctttatgggaccttgaatcaaaagattgtggtattgacttcttactttcttagtggataacttgaagcatttttttgtattatgtatttctttttttgcgaagaataaagtatgctatacatatctctgtatcctggtttacacctctcacttttgctgagaaaaccagcatttttaccagaccaaaatttacatgacaggctgctctgtttagatccctatgtgagtttttgtgattatgtgctgcataatatgataaagagaagaaattttgaaattcagacgtgttctctaacagagatttaaacatacatcaaaattacataccccagttatatgcattggagtttgtcacgaaattgctgtcccgaagaacttgagaggcgtactatcaatttctgtttcctatgcattttctacgagttattgtccttctgagtgaaggaattcaaacaaccgtgatgtgaaaattttgcaatatggcagataaaagctgtggagaagctcatctgtggcactga

SEQ ID NO: 11913 - DNA, 298 bp, Oryza sativa
  Intron number 2 from transcript LOC_Os01g10460.1 (locus LO C_Os01g10460) derived from phytozome v7.0 (chr-ID Chr1; po s 5530331 to 5530628)
accaaacaggtcagctggatgtgtgtttgaattcttgggtttggtttggatcttgttgttctttggctgggtgaatttgctgtggtttcttaatgcaaggagaatttttattgtgtttgtaagggagggttacgtttgtaattgcaatcaaaaggctatggttgtttaagtaagggtgaatatacatacttcgccagtggatttctctcattcttttcgtgcaagtttttaattgaaggttccgttttttttcttttgaaaagttttttcgcaaaatcccaaaagatacagttgtcag

SEQ ID NO: 11914 - DNA, 731 bp, Oryza sativa
  Intron number 5 from transcript LOC_Os03g02980.1 (locus LO C_Os03g02980) derived from phytozome v7.0 (chr-ID Chr3; po s 1212568 to 1213298)
tgacctgtgccgagggctcctacgtcttgatccaagtaagtttgtatttctcttcatttttgtttgtgcaaagcagtgtgtattaactactccctccgtcccataatataagggattttgagtttttgtttgcactgtttgaccactcgtcttattcaaaaaaaataaacttgaatagttatgcactgtagtagattttttaggcatattcactctgaattaaaaaagtcttcaacattaaactttgacaatcaatttctcataaatataagtatttttttccatagcttatgaaattaagataatgcggaagcaactctgggatatgaatttattggtattattcttgtactgcattgcttagaccacttgttctaagctacgtagtatttgttaagtttatttctcaaaatgtttaatttatccttataatgaagtatataatctgcggtcaataatctatctcaattctcaaatggagcctacacttgtaattggactaactgtttgtcaaaacgaacacagtttgatttttttaaaataaaaatatgccttataaaaattaatggaaggaacaatttctttcaagtttcaactgtcatctgtgtaatttcgttaatcattggtcttgatcttattattccttactaattactaattggtgaatcatattaaaacacaatttctattttgcagagaagagaatttcttttgaggaattcttcaatcac

SEQ ID NO: 11915 - DNA, 750 bp, Oryza sativa
  Intron number 3 from transcript LOC_Os02g55100.1 (locus LO C_Os02g55100) derived from phytozome v7.0 (chr-ID Chr2; po s 33739818 to 33740567)
tacaggcccttgcagacatttcggtaaggtcctcctgttgctgaaaagaaactgtctgctcatgttattatctccctagtacttcgtatctgttggaaacttagactagggaagacctgcatacttataaataaaactaataattctgcattggtttgttggaatagaaaaagctgcagtgctccattccattattgcctttcagcctgttcataatatcccacaacaacgatcattaatgttgatgataccataggtgctcaaattgactaacaaagtcttccttttctagaaagggaagaactcctagaatataaaaaaagggcatgtttacctgtatgttgaatcaagttgtatttttctaccacagaatacgagcactcttaagattcagttaactatgccctggtttcagactgtcagttgagttcttcaagaaaattcctcaaagtaacatccaataaatttaccgaaaaaaaacaaggtaattgctatcggtccataactaaggtagttttggatttaagcttcaatagccacctcacatgatctttcgatctctgatggaaaatatgagagcacatcaggacattttgctatcatatttgatgtatgaaataaagcttactctgacgtatccatacgactgttcatttaccagtcttgcgcgagcatcacatcccttgacaattgaagcactcgcgatctctactttttgttacttatttgccccctttctgaagaaacaag

SEQ ID NO: 11916 - DNA, 773 bp, Oryza sativa
  Intron number 1 from transcript LOC_Os02g39290.1 (locus LO C_Os02g39290) derived from phytozome v7.0 (chr-ID Chr2; po s 23722336 to 23723108 reverse strand)
tgggctgggcgggcgtatcgttcctgctcccggaggtaaccaccctcccctcctccgcatcctctcgacggcgcgtagccttctgtccgcctctcgtttccggcgtcgcttcgcttaccagttgctaggatcctcgaggtgtgcggcggtgttcccgtttcgtccgatgcgccgattgagtcttcgattgctattatcataggagatggattgtttcgtccagttttcaacttccgttttttggctccttgcatcgttggtgttgtgttgttatttggtactcgctactccgtatcccagtgtctccacattttcgttggcgttgtgcaaagcaatcatgtcaaatgtgtgggatgtgaagtgctagattgccaaatatctcattcagttctagatttttccaatgaccaattcatatatttgtatattggagtaattgggtttgattgtgctatagcctattgcctatagtagttggaattggttttgttgtgcatggactgtattgctggcagtggcattattgatctctagatagttgattcatatgaaacgcttctgactaggcgatgtgcagcccaattgtgagccacgtctagaagccatttaggtgttgtttgaacagtgacgcatctttggagaaccttacctgcataagttttaggcttcattgctttgaaaattttatgtatgttctttataagaatgcatgagcatatactagactaagtacataaatggtttgcttcattggaccttttcagaagactgtt

SEQ ID NO: 11917 - DNA, 796 bp, Oryza sativa
  Intron number 1 from transcript LOC_Os03g05290.1 (locus LO C_Os03g05290) derived from phytozome v7.0 (chr-ID Chr3; po s 2562633 to 2563428 reverse strand)
gccttcagtaagtcgccgaccttaattttaaccaccttgtgtgttgtcactgccactgcaaatccactccatatactatgatgatactacaaagtccaggacttaattgtggactagtttagcaacgcatgaattaatccctcaaaataacacaagacatgtgggggagaaaaaagtttgggaagatatacaaaacttttttctctccgtccttgcaggagtgagagaaactagacgccgtgctatgataattaagttgaaagaaaattttcttttgagaaaaagtcaaaagttcgtgaaataaaaagtggtatggcttttaggttgcatgattgggcccaaatgaccggtttgcccttactgattacgtggacgaagggatctcagtagttctgtttcagtcaatgatgtggcagtcacagaccatgtgcttgtgccaagaactagaagcaaaaaaaaaacttttcagacaaaataatatggttaattagaattaggagcataaattgtttccaaactccatagcttagcaattgctcaaacatattattttacaacgaaatactgaaggttaaaataatatatatttttttcagagtagcaaaatccactagcttagttaagcaaaagagtaatacaatcagtaacatgaccaaaagaagaacacaaacgagaaatcataagcaaatccacaaaattaaattaccatttcgatctctgaattcttcttacgtgtacctaactgtcatgcgcgtacgcaggcaagctgaccggcggcggagcgacgacccccgcc

SEQ ID NO: 11918 - DNA, 734 bp, Oryza sativa
  Intron number 5 from transcript LOC_Os02g37580.1 (locus LO C_Os02g37580) derived from phytozome v7.0 (chr-ID Chr2; po s 22663557 to 22664290 reverse strand)
ttaacattggcacacaggacttgattgaagctagagtatgtcttttgtgctactattttccttgatgaaactttgcaaacttcaaatagttctcatgacttccttactttttactatttaattattcaattcattatgttcccttgtggctcatcatcctatcaaaattagtaaagcaatagagatttatctgaaaaaaacacattttataatgatgctatttttaggctggcataactacaaatgcaatgtaggcaactaaaaaaaaaatcatggaatgaatgtttgaagttgtattccatgtcaatgatatttaggaagttttcttttttgtattaaccgattattcgatgagtataaaagttaccggtactttagttactttactgtactttatctatccctcatcatgaaaacatgtcatgtgaggcattgacatggtctttcaaatgtaactttgaccactgatttccgttgtatttttaaaactcaataaattaaaatatcatgaaagtattttccaagaagagtctatagatgattttcttgtatccattgaactactataaacaaatattcattcacaaagttttcaaatcctgacttgatgtatgtctacaacacattttttgtgactatatggagtatgactaaattgttaacattgttttgatcactgaaatatctttcttattgcagcctcatctagttcttggtttgttatcccaaatcat

SEQ ID NO: 11919 - DNA, 678 bp, Oryza sativa
  Intron number 3 from transcript LOC_Os01g53250.1 (locus LO C_Os01g53250) derived from phytozome v7.0 (chr-ID Chr1; po s 30596234 to 30596911 reverse strand)
ttgggctcggagattcaggctatcagaagtacaatgtgagtcttatagcttaattattagcttgctattgctgctgtagtttactatttttaggtattgttaggcaattattattaaggcctagtttggaatgtttgaaattttcctagttcctgtggctctggggattgaactatttcctatgattccttttcttccaaatatgcttgtgaagcacagtgcaggataaatgttatagcagcagttgatgcctttctcaaatttttgggatcttgtgagtatgattttgggaaacctatttgtaccttagcgatgacttgttgctatggtaactgcttgtagtgtaataataccaaaggtttagaagttcctttgagttactacaatagcttgagtaaagcatttgaaagcttgctgagggctatggcctatttagtttgtcattctgtactctaaatattacttctgttgcatgttccaccatgctgatatagtggcatcttttgtttccatcaaaatttatcaaagcaaatccaggctagtcctacaaatgtttgtttttcacaaatcataattattatggcttggaaacttgtcaagggttcctgtttctgttctcttcactgatgttcatctgctgcagtttgctgcaaaaaagctcgataaaaggcttttaca

SEQ ID NO: 11920 - DNA, 1030 bp, Oryza sativa
  Intron number 1 from transcript LOC_Os01g01970.1 (locus LO C_Os01g01970) derived from phytozome v7.0 (chr-ID Chr1; po s 525764 to 526793 reverse strand)
ttcagcactttttctggccattctcaagtccccaggtgtgatttggttttgctatgagcttgtttcaactgcctttccacgaattgtgttgtgcaccttggttgatctaaatgccagcctgttcctgttccatttggtttgctgtatcatagtgggcgatttgattaccttgcctgtttttagctgcccgtgctctactattaatcaagtcattgtgtgcttctgttggggctgtacaacctgaatctctttccatttcagcgccatttctcatatgaacttaccaaggtagttgttagagcaaaaatggtgtcggcaattcggccttgttttccctcagtttgttgcgttctagcatctaggatattaggtgtgtgctttgctgtctccattttggacaatgcttcattccctcgattcatctaggatttcagtacgatcgctcttcttcttcaccaatggaacgattttcctttagacaaggaggtcggcaaacccaatgaaaaggtttactactctttcctaagtttatccttaggccattacttgctattattctttttcggcgctggtcctgtttccagttggttgtttcttccctacattgtttccggttggttgcttcttccctacattgtggcttggttgctacgttttagatgagctgtacctttgcagccctaacactaattctttgatttcagagtatgatcagggtgccccttatttcattaatgtaaagtatatgtggttggtgcttaccttattgtgtttggtcgtgtagaaattatgctctaatctggtgggtttggaaaaccacatgcacaggttcatttcgtttcttgtgccacttggtgctgttctggtttcctattggctgcagttcagggctaagctgtgttcttagttgaagtcttgtgtctgctcatcatctactactaattactccgtatgtcttttgtaaatgtactgctaaatggttgtgccataattggtttttgttatgcagcccagggactagagtgttact

SEQ ID NO: 11921 - DNA, 602 bp, Oryza sativa
  Intron number 2 from transcript LOC_Os03g11100.1 (locus LO C_Os03g11100) derived from phytozome v7.0 (chr-ID Chr3; po s 5707188 to 5707789)
acctcaagagtatggacctggccccgttcattttcaaattgcattgtaggagttacttctcatggagcaccgcttatatttgctagtttatgaagtttgaattgatttattttgtgtggtctatctctgcttctttctggccttcacatatatgaaattccaatgacgccaccaactgatagaagtgctatgatgttggctaatcatcatgcatgtggaaagatttgtgctgggcgggggtttattgtgtactattttttatcatataatgctggttggcgtagaaggatgaaacatttatgtagatacatcgatgctttgttagatagcatatggtgtaccctgaccataacctagcatttcaatactttatattgagcttgcacagtatgtaaacctctaggaccaaacaaggtcaatttagcaaaccttctagtcaaactgaagacaaaagtctaagatttggtgtgagctaagcctggaacgttacagaaacaatggtagtgctgacttcttattccatcaatatttcaatgatctgtgacttctgtgttttatcttcaccagagattgggctaggcttgacaggctttggagtattc

SEQ ID NO: 11922 - DNA, 621 bp, Oryza sativa
  Intron number 1 from transcript LOC_Os03g11510.1 (locus LO C_Os03g11510) derived from phytozome v7.0 (chr-ID Chr3; po s 5962906 to 5963526 reverse strand)
gcaatcgccgtcgcccaacctcgctaacttcttcggtaagtgcttctcgctcgtttcattgcttcatcgcacggtggcatcggctccactagcctcagctaaaatccattgtcgcgatttgggggctaggagagacgggcatgggatggagaggtctcacagtggcattaaaaatgacttcgatctgatcaatgatgtgaaccatctcttgttctgttccttgcagaagaagagtgctgtttatgaactcctagcaagttacctgtgcatatttgtatgttttggcagttagcgtagcattgaactgtcattcagtaaatgcaatatgaatggacacacctctcttcagatttgagcttggacattgattcaccctattctcttagcccactcaattaggccaacaaatagttcagagttctgataacaggttatagatttcaattactctgtgacatatcatggtttaatttcatcaatttctttgcactttcaagtttcaacagcaaactatgtgataacttgtattagggttttacacttttactgcatctgggcaatgcattttccagaagagaaacatgcattagattattgctaagataaaccctgtaatgcagt

SEQ ID NO: 11923 - DNA, 785 bp, Oryza sativa; identical to SEQ ID NO: 11317
  Intron number 1 from transcript LOC_Os02g07230.2 (locus LO C_Os02g07230) derived from phytozome v7.0 (chr-ID Chr2; po s 3715541 to 3716325)

SEQ ID NO: 11924 - DNA, 855 bp, Oryza sativa; identical to SEQ ID NO: 9247
  Intron number 1 from transcript LOC_Os02g40000.1 (locus LO C_Os02g40000) derived from phytozome v7.0 (chr-ID Chr2; po s 24190439 to 24191293)

SEQ ID NO: 11925 - DNA, 680 bp, Oryza sativa
  Intron number 2 from transcript LOC_Os02g28670.1 (locus LO C_Os02g28670) derived from phytozome v7.0 (chr-ID Chr2; po s 16956894 to 16957573)
ccacatcaacgtaaatagagatccatcctactataggacctaaattgcacgattttgtatagtttagggtgaagatttgtagtattggggattaggggtgtcatacagactcgacgtaaagttgagagacggctggtgaacttattccttttaaaaataagttcatcattttaggagaatatttcccctaagatgcggttatttgaatcaatgatttgaatttgatttgttttgaatttctagttgaattaagttggagcttgcacaacaagaatttgcatttgaattaatttggcgatgtcagaaaaagaaagtttgaagtgtcccataagatctatcatgatgcaagctttttgtaagtttgtttatggttatgatttttgtttctgaatttaatttgcaaaatttaaggattttgtttatatctttcatgtaatcaaaaataagttaaacaaaatcaactatttaaatactccctcgattttatattatatggagctttgatgtttttttaagtcaaacttacataagctaaaccaaattgataaaaatatgtagcaactcttataacaccaaactgtaaaatcaaagtgtgtttgattcttattctgtgatgaacaattggcatctgagattattggttctgatatttggagataattggcgaagtggttttggag

SEQ ID NO: 11926 - DNA, 586 bp, Oryza sativa
  Intron number 1 from transcript LOC_Os01g46690.1 (locus LO C_Os01g46690) derived from phytozome v7.0 (chr-ID Chr1; po s 26582328 to 26582913)
atattttcggccgggataaagtaggtggtagatttttcttgccaaactttcgcatttatatacacttcaaactttatttttctggcgtgcaaaatagagtaggccaatacatctgatcttcacggtatatggattcagaaattgaagttttttttggtggcaggtgcatcttattttattaggggcacattaagttcatttagtttgaatatgtttcatgttaagggcttttcatcggttaatttgaaggttggatctttttacggtacttgtattcaggaaaaaaaactggtttcttgtgagtatcttgttgttgggggcacagtttaagtccataagttctgaatctatttcacgtttaagggctttgcatttgtctctaaggtagatcttttcagtacattcattcaacaaattttacagaaagagctgtctcttcttgttgggggcttggggcacaccatgttcatccgacacctttttttttcacgtacatgcattcagaaactcgatgcttctttgcggctgatctgatgagcacgtttttgcaggcaaaccaggagggggcgaaggctatcaacgagaa

SEQ ID NO: 11927 - DNA, 657 bp, Oryza sativa
  Intron number 2 from transcript LOC_Os01g46690.1 (locus LO C_Os01g46690) derived from phytozome v7.0 (chr-ID Chr1; po s 26582919 to 26583575)
ggttcaattttccattcatactctttggttagtatgttttgtctttcttttgattccgtttgtccaatgtctcattagtcattaggtatggtgtaagcatggttctttcttaacaaccaaaaaataatttataagtaaattttttatatatgtgttcttagttattaaaagcaaatgctgtgaaataaaatacaatgaaagaaaaatcacataatcaacttcaaaattgagtttcaaaatttaatttttggcttataagtatgataagccaaacaatgaggttatgtgtgtagttacttggggtgaggatcatttaccataatgttactaccattacagtcattagtttataggtttcacccttctattatctcacatgtcattacctataatgatagtgttattatggtagaggatgtgaacccaattacttgatgcatgagcttaaataataaatatgtaagtttataatcttttttttgcaaagtatctaaagtttgtaggatttactagataataatattgaatgaatataatgtgttcctctagaagatattatttataatattttaactcggcttacaacaatgtgaatgatttccctttgttaatatgtcgctaaccattcttttctattcctaaggcggtttgttatcg

SEQ ID NO: 11928 - DNA, 500 bp, Oryza sativa
  Intron number 1 from transcript LOC_Os03g09870.1 (locus LO C_Os03g09870) derived from phytozome v7.0 (chr-ID Chr3; po s 4908859 to 4909358)
cggtggcgccttcatcggatctatcgtcggatgtattattatccccgatttatcggtgtccctctatgcgttcgtgtgtttcagtcgctgctctcgctgtttctattgtggtaatcgcgaattattttttctagtttttgatttttggttcctagggcacagagggatatggactttacagtcttctacccttctttcccatatcgtgcaaacgtagctcacttcacacctatccttagtgtatggttgtaagaattcgtaatacatctagaatgcgtttgataatagcacatcttgtgcggatttttttattccttggcctaaatttggatgtttaggttaatgaagatgcgattagtctttttgttaagtgccatcaatatggattagttcaggtcatctgttgcacctaggtttttttcctcgtgtaaaatcattgtggttttaactggattctttatccaggacaaggtttgttcactaagaagggatttaagggc

SEQ ID NO: 11929 - DNA, 651 bp, Oryza sativa
  Intron number 1 from transcript LOC_Os01g50080.1 (locus LO C_Os01g50080) derived from phytozome v7.0 (chr-ID Chr1; po s 28773381 to 28774031)
cccttggtgagaaggtaacaagactaaaaagtacactagactagtctaaatgaaactagaagaaaacttccattagagcaccatttgaaaagatgcacatgcattgagaatttttttctttggaaatagcattaactagaaagatgtgtttttagtgttactgggttatatatttatatagttcatccccacaaaatatagttaatgttatttctctcttctctcatgaagccacatcatcataattatttgtagtctttagataatagatctatggtacaaattgtctcttctttcttctctcacaataattagtatcaattatacataaaatatgctcaccgtgcactatatttgcaaccacgtgcaaattatataaaacattagaagtcattttgttttggtttaaaaaagcatactgcaacttatttgtacatattaggcaacttaatttctcacagcaacatgtcagggtaattatctagtttattaatagtacgacactctgtttttctaaagagggggggggggtccaatttcagtacatagatttccatgctcatgacataatgcaaagatctgatgtaacactaataatttgactactcatgttcaggtaggaaaatatatacaggttttgacagcctttgt

SEQ ID NO: 11930 - DNA, 763 bp, Oryza sativa
  Intron number 1 from transcript LOC_Os02g37834.3 (locus LO C_Os02g37834) derived from phytozome v7.0 (chr-ID Chr2; po s 22831397 to 22832159)
agatttctctctatttttttaattttgccttctgataatttgaactctgagccaattcctctaccctctgatggaaagagagttgatgtgatgaggcaagacaggaactggtgagcttccctgaaacctgttgattccctggcaacatagatgttttattaggatgagttctcacattaataggttccttccattagggcttttaatgttctaaacttttgattggtgacagaagttacaattactctcatcctctcctgcgaatgagattctattcatttttctgttcctgtattttaagcatgtcagtatgccactactttgttgtccaaaactgaactccaaataaaggtcaaggtggccagcttaggattgaaacaagtttagcagaatctttttaaacaaattatttggtgtttttcagcatacaggtaaacagacggctagacttcatgataattcatgctaatgttgggaggggcaatccactatgctcagctcatggatcttcaggaatggagctgccagcatataaatgacaaacaaatacaaggtaaataggcagaagagatccttcatgtgctttgctctctgatgttctccttagagaaaagaaaagttaatccttccaattatttatttttattcattgattatatgtaattagtaaattgttgtgttgtatatgtattaccattttgacaaaaaaaaagaaagagcactccaattgataattttctgaaccatacaggaaaaatactcc

SEQ ID NO: 11931 - DNA, 994 bp, Oryza sativa
  Intron number 1 from transcript LOC_Os03g16700.1 (locus LO C_Os03g16700) derived from phytozome v7.0 (chr-ID Chr3; po s 9246463 to 9247456)
cgatcggagccagggcgcggatcgcaggcggtgaggtgagtctggggactctgggggtggagaatccggggaattctcgctgattttgccgatatggtgctgggtctcgctgttgagctttgttctggcggtttttgggtccaattctgtccgaattttggttggtttgctctggaggcctggttggggggctgaattcgcttcatttttggaggattttcgcgcatttcgtggttgcttcttcggatttgcgtcgctttggaggggttttggcgtcgaattgggtgaatcgggcgctgagatcggatctggcgctgcagaggtccgccaattcttggtttgttctgcgcctgtggggtttgtacttcttccccccccccccccccctctctcttttttttttaaccgacgggctcgctttccttttggcagttgcttaatcctcacggattccgatgcatgtgagttttttaaagcctttttccccttctctctttgatcgcttggcgtgctggtttacctggcgaatttatttttctttggatgcatttaatacggctgggggaatccatttcctcccccaaaacccaattccttttcttctcttaatttggatcacgggtggtgtacgaattcttcccgtttgcttcgttcttcaggttttgatttgatgcaattaattcgctcttttgatatgctttcgagcgctggtgatttgaaattctaattcgtttcgggcgcccaagcccggatctccagtccagggttttttgggattctcaatttttttgctaattaattgcactgttaaccacgatcgttctctgtttaattaatctcggaagggtttatccgagatttatcccaaagttcttcttgcggagatcccaatgaaatgatttccttccttctttgtaccaactggtttccttcttgccaattgctgatgtggttttcaacaattcctgcgcagatttgtgttccgggacaagcc

SEQ ID NO: 11932 - DNA, 738 bp, Oryza sativa
  Intron number 1 from transcript LOC_Os01g24700.1 (locus LO C_Os01g24700) derived from phytozome v7.0 (chr-ID Chr1; po s 13898933 to 13899670 reverse strand)
taaagaagcatcgacatcgagtactacacaaaacggtaacaaatactacatgtatatgtagttgtattcgtatttgtattctgtgctttaattggtaactgcatggaaatcagttcattttgataggttttgcaaacgtgtatgttcgcgttttccaaagaaggccaaagctttacaagtttgattagaagtttaatattgtgttgtgcattatacagtatttactccttgctagcttctaattaatctacaagacagcagtgatatgctctctatcacttccgattcatggcagatatagatagtgataggagtttctgtattagtggcagacattgaaatattttactcgtcagataaaacagtcaataatgtgctgctccatccatttcaggtcataagacgatactgttttaagtttgactaaaagtagtaacattttcaacctaagacaaatttattataaaaatatatttaattattgttttaatgaaactaatttagtattataaatattactatatttgtctataaacttagtcaaatttaaaagtttaagtcaaaatgtcttataacctaaaatggagggagtagtaattattaaccgtaaataatcaagtaatacaatcttaatgcagatcaagtttggcccttccgagcgtgtgaaggaagtttctggaactcatggcacgctccaaaccctagcggatattctgacgtacctgaagattgtcacgg

SEQ ID NO: 11933 - DNA, 972 bp, Oryza sativa
  Intron number 1 from transcript LOC_Os01g25440.1 (locus LO C_Os01g25440) derived from phytozome v7.0 (chr-ID Chr1; po s 14396489 to 14397460 reverse strand)
ccctccctccctcctcgatccacgcgcggtccgaggtgagttcgctcctgcgcctgtctctacttgtcgcgttagggttcgtttggcggtgatcgggtctgaggatggagagattccagttcttgggaatgggctcgactctttgcgttggggaggtccgtccgtctgactagtatcgtgaatcggtttgattaaggagttttttttttctttggggggggggggtggggggagggagaaaatggtgtgtagaatactagaattcgattggagggacggaattttgcaggattctgttattgttctccgttggccgcgtgctcgctgttggttcctgaaaaggagataattgagtaatgtgatcaggccattttgagtaaatttccctaatgctttagtccctcttttattttttttcttccattaattaagatattaagaaagtaagaatagcatgatttacggaatcccggcagtggcagaatccagtttattgcaacctggagtggaatttcactgaacattttggttcatcatgttgggtgtgttgttactgccgtaccggctcccattggttcaatattgttcgtcatcccaaagtagtaggatgagaaatagtgtaccgttttcccgcttatatgttagtatgctacaataaataacctccaaattctgtagggaagaaaataatattcttcttccatacagcctgaaaataatattcggcttccagaacctgttaaattacgctgcagcctgaaaatgcaacagaacaggtcattatttgctgacctgttgatggaacaattggtagttagaactgaacacatggacaacagatttcctgttgcctgtatacttaatgtatgaatgcattgcatagttcgatattctcgctacaaatagattttttgttcttaaaataattcttgtttatgcactagcttggtacatcaccttcttgaggttaag

SEQ ID NO: 11934 - DNA, 556 bp, Oryza sativa
  Intron number 1 from transcript LOC_Os02g51760.1 (locus LO C_Os02g51760) derived from phytozome v7.0 (chr-ID Chr2; po s 31698448 to 31699003)
ggggtttgatccttgcgacgaggtaagtgttcttcagctttctcgttgcatgatgcatatatactgctttgtttctccagcttgtttgatcagtagaatcgatgtagtatcttgtatttttgttgtgatcttgctcaaaattaatatgggtattggccctccaagaaagaacttatggttattgtttggttgttaacttgttatgcttgaagttctttttttttttttgagaacaattatgcttgaagttcatgtacggaaacggagtcgtatgtactctgtatagttcagtacagtagttggtatggactggagttgatgctgctgactttcattttgatctactacatctgatctgcgaactagatgagagtcatcaggaaaaattgaagaaataataactaaccgtttaacagtacagagaaaaaatatcatactactagtacagaaagattggtactgctataaatttcttactgttgaactgtaatgttctagtagcttttctggactactaaagatgaagcgatttttttctcaggtcacccacgttgtt

SEQ ID NO: 11935 - DNA, 787 bp, Oryza sativa
  Intron number 1 from transcript LOC_Os02g54670.1 (locus LO C_Os02g54670) derived from phytozome v7.0 (chr-ID Chr2; po s 33481315 to 33482101)
acggcagcggcacgtgcgagccgcggtggcgtggggtgggtggggtagttgccggctgcaggcggctgacacacagcgcgacatcatcggaaggggcattcaagtttttgaattgatgacgggatgggaggaccgcgctccccgccccccggtcggacgttggacatggcggcgggcggaggaacccaagtgtgggacccagcgctgcgcatcacaggagaagtcaggttaccatcgtcttcttcttctagaaagggtgacttctgaagaccgaagaggaggtcctccgtactattactacgcgtactactacctccgtgaaaatggttaggcggctgcgtggtgcgtgctaaaatggtccggtgatttcactacaattcaaatgttctggaaatacgagtactcggtagtaaaattgtgctacgacgacttgctacaattcaaagttctggattctctctctaaaaaaaaaatcaaatgttctggaatattacgtagcggtgcttctttatatcttggccgtgagcccgtgactcatcagcatgcgttatgtactcattttgggtgtactgtatcatatacttattttggatgtgttcttttctctatgttctcgacttctcctcactcgttttttacgtgcatgtttcttaaatcactaaaaaaatatgtattttgtaaaattttctagaagaaagttgttttaaataatcatactaatatattttttaaagttttttcagttgattcataattaattaggcaccactacattccatcattttac

SEQ ID NO: 11936 - DNA, 524 bp, Oryza sativa
  Intron number 1 from transcript LOC_Os01g69010.1 (locus LO C_Os01g69010) derived from phytozome v7.0 (chr-ID Chr1; po s 40093507 to 40094030)
ggcgtcaagccggtcagtatatatatatatactcatttctgctcgttttcagatttctttttttatgatgttttaaataaaatccggcctctacatttcgaaggatatacatagccacaatattacatcaccaaacaatcgcggttacaaacaagttcaaaagcaaacaccaccatagaagacaaatagacgacaaacacatctagaacaagcctcacaacaaaagatttcaattaacaattcaatacttggaattcaatactctccaactctatctagattttgagtagaatttcataatggtaactttcaatttttggtacccaatcttcacagctttctcatcaccctctttaagatgcaaaggccactggtgaatccagtgcgtccccgaaaataacctgcattttttttcagttttctacaggaaaaaaatggttattcttttacttttgattattcgttattgctgtattagcatccggtgtttgaattactgtgtcgattaatgacagggttcacca

SEQ ID NO: 11937 - DNA, 983 bp, Oryza sativa
  Intron number 1 from transcript LOC_Os02g56190.1 (locus LO C_Os02g56190) derived from phytozome v7.0 (chr-ID Chr2; po s 34364992 to 34365974 reverse strand)
ccctccttcaccgtcgacgaccgcgaggagctccggttcgtcctccttcctctcctcttcattttactcttgcgaattggacataaggatctctcggtcgagctaaaaaacggaggaaacctgttgttgtttggtgaaatggatccgtggctgggaattcatggacgccttgcttttgaaatacgaattgacaggggaaattggtgcttgttgggcgtttggcactggctaaaccttcgatttagtcatttagaccttgtggcatcattgtcacggccctgtgaattgcattcttatcttccatgatagggatgagatcagctcctgaaatggcttgtccctgcttagtggtaacgcagagacaaaaaggagttcctaacgtagaatggttttttttactgttattgtctatctgcaattaaccattcaccctagatgctttgataactaaaaagtgcgaaactgccattgctcgtaggtttatcaaggggaagtttctggaggcttttgtcttctatttttgtttcctgtcaagtgtcaatatgtctctgccctttttgactgaaatgtgttcttgccaaaatactcctggctggcataggttaagctgttacccggtcctcattctccttccacattggtagcttgacagccccatcttttcgcttatgcttatgcttacgacttttttttacttaaaatctatacagcttattagtaacccaaaaaataatttatggataaaacttttatatacgtgtctttagttgttattttgtaaataaactatgatagaaaacccacaaaattgagttttaaaattcaaaatgttattagcataaacataagcaaaacggttgggctgtgaaatatcaacccatgcctgtccaatttgttcgaggctgactgatagtttcaattgcacttttttttctgcatcaatcttttgcaggaggcaatttgagcgtgccaacctagaagca

SEQ ID NO: 11938 - DNA, 948 bp, Oryza sativa
  Intron number 1 from transcript LOC_Os01g56790.1 (locus LO C_Os01g56790) derived from phytozome v7.0 (chr-ID Chr1; po s 32767894 to 32768841)
tcagcgcgctgcggcgaccccgctgcagcttgcaggtatgtatgttcttgctggatgatcctcggaacattcttcttcttcccttgctttctttagctttcgtttctaggtttgcttctgtagttggtgagctcgggttctaggttgcttctgtagtttggagagctcgggagcacacccggtggatggtgtgattttgctgagttttctgttcttacatgggagaggctagtcaattataggggaatccgctgtgcaggctatagtagtgctaggttgcttagctttatgcttattgttctctttgtttgatcggattttgttctgttgctgggtggtttctggaagagtttagtctgttttggtgttaaaattttttcaagctttcaaagaggttcttttctttctccccttacaaaagagacagtttgagctgttctttcatcatcggagtttgtgggattcaaaagaaagctcttctgtgcagcatcactgttcttaatgcttcttgaaattgtcctgtaacaattactacttggactgatgcttccaacattctcttggtcctgggtctattgatcaccattatggctgctgctagagctggacgcttttgattttctgttttctagtggttttccaacctggtgttcggttttcctgtcttttctccagctaagctcgcctttagttcaccaaaatcaagcatatccgctacaatgacaccgccatcattactttaccgttctatcagtgctcaataatgagataaaaggccgtcctaatcccaccaaactttgatgtttacagcttttgatgagtagttgctatgttattcagaacagcatatcattactcattagtaggatcaattatacacttcactcattaagtttgtttttgattccttcagaaattctggttcaacaccagccacctttcaccaat

SEQ ID NO: 11939 - DNA, 777 bp, Oryza sativa
  Intron number 1 from transcript LOC_Os01g07376.1 (locus LO C_Os01g07376) derived from phytozome v7.0 (chr-ID Chr1; po s 3490136 to 3490912 reverse strand)
ctttctttggcgccaaatccgccgcccaatcccaggtaaaatctctccccttttctcagattaattgaatccgcctctgcactgctagctcgatgaggttcttggagctagccggtgttctcgccatgccctggatttgtggaatcatggccatggatgcttggcgtttttcctttttttttttttttggcctcgcaactctgtcaattctttgccttctgggctccatacttccagtttggaagaagtcgttgtattgaagatggatgtggatatgaaagaaaagaacaggtgaaatggggtgatgactatgattctgtaccctgtaggtgattgattcttggtcctaaatggtgtcctaccactgataccagctaggattgagactaaagctctttatgttgttcatacatcaagtagttggttaggactatgatctgtgctgtgtaaaatctagcagatgtttggaagttgtatcatgggttgatgataagatggtactatctgaacaacctctaaaaaaaaagttatgttctgaactgaacttaggtgagagactaggtactattcattctttgacttggtacttgtgatatgtgacctgaagagtcattcactcttctttccttgacaacctctgttattggctatcacctaatattgctgcatgaattttgtttgttttctattcatagctcagaaacactttcctgattgaaacacactctaatactgtttgcagttttcccaagggtagtttcttggtttagtcaacta

SEQ ID NO: 11940 - DNA, 310 bp, Oryza sativa
  Intron number 2 from transcript LOC_Os03g29194.1 (locus LO C_Os03g29194) derived from phytozome v7.0 (chr-ID Chr3; po s 16600059 to 16600368 reverse strand)
cagaattgcaggaagaatcattttcggtttgttggcagcatttgactgttgcaatgcagaatttgttctgatctgcccgtgcctctcattgttatgattcatgttagattatactgaattgttcatttttgcactatctatcctcactcctcattgcatactgcataggtgacgaagctcaaaaaattttcattagttaagtcatgttgtcctctgcgctcacagaattatttgtatcattaatgttagtttcttctctcttggttcttttaaagtgcgttgatttgaaaactttggtgaaatcgatcga

SEQ ID NO: 11941 - DNA, 1014 bp, Oryza sativa
  Intron number 1 from transcript LOC_Os03g02420.1 (locus LO C_Os03g02420) derived from phytozome v7.0 (chr-ID Chr3; po s 857388 to 858401 reverse strand)
aaccttaaggtagcctccaatttctctcctggatgtacacttctgattccgttgatagtcgcaaattgcctcatggatatatctaaatcctttgtgtagctaatcgccttatggatatatctcagtcttttgagtagtatgtggttgcaaatcctgaatggtgagacatgtccgtgttgcttttcggcatgatgctgcagtgtcaaaactatattttggcattttacttagggcctgtttggtacagctccaactcctaaatttaactccaggagttgagtctggagtggagttgtggagctgcagctccacaactctttcattttgtgagagagctccacccagctccacttccagttttggtagagctgaaactgtttggctgagctccagctccaggaggggtggagctggagctggagctgtgccaaacaggcccttaggataagtgattctgttatccttgtaacattgttgcaagctgtacataattagtacatgcgttgtgctagaattctactccaaatgggagtagaattcaatatggtgctatgagtaaatggagtataatgtccattgaattataccgtaagaagacactgtttttaaaatcctctgtgctaatttcttgcccatgatcagcacgacagttgagctgtctaaccttttcaattcagtacgaaaaacatagatatttgatgtggtgaaagctcacaacttgcaacttttacctgagacactactaatcacaaattcatcatagctttgtgtctgcaaacactcagccgtcatttgtaagtcactccattagtttgtccttgtctagtgagtagtaactgtttgctcactgaccttaaaccatttggcaagaagtattatcagtgcttgtgaaaaaatgccataatcctacagttgtatttttgaatgcttaagctgcctaccatcaaacagaccatataatatgtttccattatctcaggcaagaagggtggagctgaaaacaagacaagacac

SEQ ID NO: 11942 - DNA, 769 bp, Oryza sativa
  Intron number 2 from transcript LOC_Os02g53370.1 (locus LO C_Os02g53370) derived from phytozome v7.0 (chr-ID Chr2; po s 32662650 to 32663418)
ggggaggtaaagactgaaagaagacttgtgtgtgaattggtgtgatggatgtcttacaaataaatgtttgcataaaacaattttgtgcatgcgtttttatatccacatggttagccttaactcgtgtccgtatttacgtttaaaactgttcgttgattgtgagtttgattatcttccttaaataacactttatcctagcacacttattatgattatgagggtaactctagtattggttcgacatgtgtggtccatccaagcaaacaaattttcggttagatcgtggcagcgtgaaaattgatttgtgggacccacataaagtcaatctcaatcttacctacatttgccctccctcttgtgtgaccccacaaaaaatatttttaattggttacgatcacttctcttttgaagtcaattttattaatgatatactatagattctcataatatgcgcggttggaacttttggtgcaaggttcaatttcagtcttacattggagttactttgatgtgtatacacagttagtatattattttttgaaaagaaaatgttccataatagtccaatagccattaggatttaagagaaaccaaaacacgcaaagaaaaggatggcaatagcaacttttctctctcttttttttacactgatttctctctctctgtataaagggatcgaaaacatcgttttcaatgggattttttttactatctaatagtttgctaatgttattttcttttctttccaggtaggcggtttatcgcctaa

SEQ ID NO: 11943 - DNA, 405 bp, Oryza sativa
  Intron number 1 from transcript LOC_Os03g17870.1 (locus LO C_Os03g17870) derived from phytozome v7.0 (chr-ID Chr3; po s 9956383 to 9956787)
tcaagctgtggctgcggctcgaactgcacgtgcgggtatgcttagctttaatggtttcttgcaaatagcatgcgcatgatcggcaactatcttctcctttcttttcacttctctgtcttctttttacacatgaaacctgtttatttatgtaattgtatgagtcagtttacacgcatggtttcttgcgttaacttttgttataagataaagaaaatgaatagaaatccggcttctatatccaagtggatatacacagctaacaattacaaaaaaatttaaatctttttcgatgaccttatgcaacaataacccggtaatcgcccgtctacttacaaccttttgatgtcgggatcatcccactagatgctaattaattgatttgattttgtggccggttgcagaaag

SEQ ID NO: 11944 - DNA, 605 bp, Oryza sativa
  Intron number 1 from transcript LOC_Os01g03510.1 (locus LO C_Os01g03510) derived from phytozome v7.0 (chr-ID Chr1; po s 1413275 to 1413879)
gacggcaaggggaagtccttcgtccgcgctttcgtgtaagcacaacaacgcgcccccctcgatctcttctctttacatctcgatctcacgggaaaggatttgggggttcgggggatgcgaagggttgccaccttttctatattctggatcgtctgtcgttaggagatggagggcgtagaaattgttatcgcgatcttgcaatagaaagtgattcgaagatttgtagcctaaggtaatttttggggtgcttcgcaatggccaatggggattataggataggcctcctgacctcctcacggctcaccccttctatttgggtggtggatgtagattattaggaccacttgccattggcgttggattataagtttacaagtgaaatgttcattatttatcaagttgtaattgatgatcataatgatttttgttggcaccagatggatataccggccctgcaatcatgtaatcagtggggttcatttagaagtttattccatcatttattttttacattacatgtgttctcaattctggtatataaactcatgttcagccctttgaatcttgtaggtgggactctggcagcactgttggtgagtttgacg

SEQ ID NO: 11945 - DNA, 645 bp, Oryza sativa
  Intron number 1 from transcript LOC_Os01g02440.1 (locus LO C_Os01g02440) derived from phytozome v7.0 (chr-ID Chr1; po s 789521 to 790165)
ttcacaaaggggccaggcattctgccagcatcaaggtatccttcatctcatatttttttttcacaagggaattctacaagttatttcttctatttattgtattaataattatgttatggaattcataattatcaagctttttttaaacaattcctacaggatttttacctaaaggaagaccttgatgaaaactgtaatcgtcttggaaaagttctaataactagtacgaaaaaatgaaccaaaccagtggaaggacatgccaaattggaccttcctcaataaataaataaataaaccaaactttctctccatctccaggtttttagttatcttgacttgcgtattttagagcactggaattaatgcagatcactctaaccaaggtcatttcatgctaaatactatcatactaatttgggatgccactcttcttactcatcaaaattggacttaccgacttagacccttgggtgctaatacagtagtgctgactgacacaaaactgatctaaccattatgaattagaggttcctaacaaagttatagaaagttgttttcccttatctttgttattactaaactttgatgtaaactatttttttttcttccttccttcaggttcacaagtcatcctcattgcaggta

SEQ ID NO: 11946 - DNA, 932 bp, Oryza sativa
  Intron number 2 from transcript LOC_Os01g50060.1 (locus LO C_Os01g50060) derived from phytozome v7.0 (chr-ID Chr1; po s 28756811 to 28757742 reverse strand)
ctgcggccactggtgagatatggattacccattttgtttttcttcattccacttgaatctgtgtgtaatttccagttcattctttacatgagctatgaccttataagccttggtaaacgatcccaatgcatccctgcaaaattgctctctaggtcatgcagatttgtcccttgattagcgcgctgatatagtgaatgtgctgcttttctttcttgaattcggttgagtccaacgaaaatgttgctttgctcatagcattcactttttttttttcatttactgcattagcggtccactgtgctgagtggggaatgaggccacacatattgctgagaggtgaacagccagatatcccgacaggctacaatcttatctctttgatgtttggcaatgtggcttatgcctctcggtcagtgtacgcacacagagatgaaatgctttacaatcacgccagaaaagttgcaggcacaggtggtacagtgttgtgggctgatgatattagcaaagaggattttgttttagatgaagataatggttgtgaaattggttcgagaagagtagttattattaaggaaggggctggtgacgtccaagcattgctaggtaagtaatggactgtttttgccctgaactcctgattttagttccgttcatcagtaaaaataaattttcgacaacagaataatctaatacccataacttagaatgcatgtgtccttgtattgctatatttgcttataggttgaaaattttcactttgagtattaggatcagggcagtcaattttgctttcacagtatgttgttttcttattcacttgttaatctgaaacctttaacttgggccccaaagaaaagggaatcttgcatatttcacatggctttgttgtaccttcaggtgttattcggctagtggagtacctttacaatctg

SEQ ID NO: 11947 - DNA, 939 bp, Oryza sativa
  Intron number 3 from transcript LOC_Os01g50010.1 (locus LO C_Os01g50010) derived from phytozome v7.0 (chr-ID Chr1; po s 28728823 to 28729761)
ttgctcgtcgcctcgccaagacccggaattggattgtaagcaccgtgcactcctgttgagatttttcgtgtttatgttttatgtttgtatcttttatgcttaggttgcgttgagcgcttgccatactgtagtcgagtaacaggcgggttgcaaaactgaaatttttgcagtatataaatgtagtcatttatgtaactgccgcagtgtaagaagttaggatactgagcttgagctttttgtggtttagcggtggtacagtggtgctaatgtgggcatccaaccatccaggatagtagaatgtacatttaaattatgttaccgcttatgccctcgatatatctcaaacttgaaatataacttaactcaattgattaacattctctcttctctatatctgagatggtctgcatttttctggtctttcttgttgattttgatagccttttgttcaccatccatggtttctctatttttctggttgccctgaatcatgtttttcgattctgtgatgttctgtctcatattaaatgcttgctttgatctggatcttttttggctgatttggtgaaactcaatgtgctacttcctccgtttcacaatgtaagtcattctagcattttccacattcatattgatgttaatgaatccaaatagatatatatgtctagattcattaacatcaatatgaatgtgggaaatgctagaatgacttacattgtgaaacggagggagtaaatcggcttggtcccaaacaagtttttctgatttatggttttcgtgccaccacttcaacagcagatcagcaatacttcagacactcttcagtgttctgttctatttgcaagtattcgctggtccacatctggagccaattaatgtaacattcatttcatgcactatgtaggttgcactgaagacacttgtggtgatccacaggct

SEQ ID NO: 11948 - DNA, 840 bp, Oryza sativa
  Intron number 1 from transcript LOC_Os01g61720.8 (locus LO C_Os01g61720) derived from phytozome v7.0 (chr-ID Chr1; po s 35711338 to 35712177 reverse strand)
ttaggtttcttggcggcttcagttgggcgaggaaggtgagcggctttcggtggttggttgctttgaggtgaaagctctctcgccttttctcactgtaaaaaacggcatctttcttttggggttttgcgttgcgtcccccggttttggcgttcttcctggctgcgcgctttccgtggctccgctccaggtgaatccagggttaatttcgctgcgcatttgtgatgggatttggccgcaggtggcgagggtttgtttcgggggtgggggattttgtcagtctgggttggtgtttgatccttttggtttgagaggttttgccgctgccagattgatcgagcgaggaaggagaacacgcggaactaggataatttagtggtcaaagttttgcccttttttgtgagaaaggtagtaagttgtggtggagtttggcgactgacgttaatcgtctagctccaaaccatggagttcggttccttgcttctttttttactctgatcggtttaaggcttttgcgtgctccttttttgtcaatttttggtggccatgctgattttctggtaaaattaaatctttgattttacgagtggggatacttgaccggttgggtttgaggcagtatcataatactggcagaacttctgatctttaacacatcttactaaaaaccctcttttctgtgcgcgaccatgtcgaactttttaattctgcagaaaaccatagattttactggtggttatatgatttcagctgatcttttacagccattcgtgtcctgaacctttggtgtctgctctgatgctttcaggctttagctgaagacacaataaaggaacaccaaaa

SEQ ID NO: 11949 - DNA, 895 bp, Oryza sativa
  Intron number 1 from transcript LOC_Os01g45439.1 (locus LO C_Os01g45439) derived from phytozome v7.0 (chr-ID Chr1; po s 25779770 to 25780664 reverse strand)
ttgaaggattgaagctctcttttcctttcgcagaagtaatcgcctgtgttctggcctctctgtggatatgtttcagagcttacctgtagcgtcgagtttgtctgcaacgaaaattgctggtgaatgtttcagatgttatgtattccatccatttgagattctcaaaattggttttggctctgtttaggatgtttaatgcctcaagttcctagttggtccacctatttgattaactccacacatagaagagcagaagttggtacatccttgctgtgcattgttgaaactatttgcccgttctgtagtgatctgaaagatgtcacattctgcgtgcgatcccttctgtaatgaggtcagtggtcgttttgggaaagcaagcatttcagcaacagagtgggatatttgatatctacaggccttagtaatgctcattttacagacttttcagcacaataggttgtgtctgtttccttgcattgttaaagttagaaggttccctatatatatgaaaaaaatgcaatgcggaagaaaggaacagagtaacatatttgaatcgtaaacagtgagctgggtcaaataatttatagctatcaagaaattgtcttgtttgtctttcgggctttaaaacaatgtgtgaactcctcgttttggaagaaaaactctgacatgaaattactatactgttttctatgtacaccgttttccattgaaccgttgagtttgtttgttgtttacagaagctgccttttataatgcgattgttaaatgacttgatgtatagctttatattttctgtgtatctatttgtatttggatatgtgaacatggttggatatgaacttaggctctttcttgattgacttagggtgtaggatcctgattttgttcttgaggt

SEQ ID NO: 11950 - DNA, 645 bp, Oryza sativa
  Intron number 2 from transcript LOC_Os01g42490.3 (locus LO C_Os01g42490) derived from phytozome v7.0 (chr-ID Chr1; po s 24160160 to 24160804 reverse strand)
gcgattcacgcagcatcggccaccacgccaagccggtaacatcttccagagtctgtgatatattctgtctcaatgcttagcactgcagtagtagtagaatcgcatagcaaaccatccagggagcacttctctgaagtaaaaaatagtgtaattgctttttactttttgtgtggaaaaacttttaggttattaatgatcggagtttcttaatatttgatggcttagcacttctctgaagtcaaaatggtgaaagcttttcaatttggtttgtgtactaaactagtaatggattatagtttcacttgattttagacaacagatgtgccatgtggtatgtgatatatgatatatgaaggaaaatgatttagtttatgcccctcaactcctccaaaagtttacgtgttcacacctcaattctcaaggtggatgaaaaccaccactgaaccttctataccagataaattacacccctaaccgatcaagcctgaaacagacttcagcgccacatccactgccatgctagcactgatgccacagcaaggcattggaaaagtgatacagtttctctttccctcctattacctttcccctctctcctcagctaaatcaatatcacagctaactatcttgttctgtgacaggata

SEQ ID NO: 11951 - DNA, 985 bp, Oryza sativa
  Intron number 1 from transcript LOC_Os02g07210.2 (locus LO C_Os02g07210) derived from phytozome v7.0 (chr-ID Chr2; po s 3708799 to 3709783 reverse strand)
cctcctcccgcgcgcggccggcaagaaccagcaaggtgcgggatagccacctgaagttggattggttggttcctttcagttaacccttctagttttctggatttctttgatgcgtgcttgttcttgtatttgtagcagaactagcagtttctgttaaaaagaaaaaaattggggattcagttgaactcccatgctccaatgttaggtctacccatcatctgtacaactttttttgccttgtagttcccggaaaaatggtaattttgtgggtgtcctttttgtccggtcagggagtccgttccaagttgcaagctcagatccatggcttcattggtacagtttttgtgtggtataattcttggacggttagctaaagcttgggtattgttcagagagttcgtagtttcctccagtaaatcggtagtgcaaggaggcgtgtgaaatttttgcttctctgaaaatatcagatttatctcgtttgattagtagtgttgccgtgtgaggaacgggccttccagttacccagttgacaattgtctcgttttcttggaaattagttgccttatcatctggcattctggtgcatcgtttctactacttcagttctttgcgtgtccttactggtttataccaatgagacaatcaatggcatttgtagctcagcgagtttattttgcaacaaatatgctggatacaagaaatcatctggtggagccagatgtgtaatatgtttttttttttgagctagcagctgtgtaatatgtatgctccaatgttgatattagaatatttaggtaggtaattccagcatagaagccattcagtgttgtgtctgaacactttgctgtttgctaggagtacttgccatcagtttctttaatattgtacttactgtccatgttattatgcaaatgtatgctcttaactgttgatttttttttatattgcagcactgattctttcctttggaacctgcagccaatcc

SEQ ID NO: 11952 - DNA, 818 bp, Oryza sativa
  Intron number 1 from transcript LOC_Os02g07330.1 (locus LO C_Os02g07330) derived from phytozome v7.0 (chr-ID Chr2; po s 3772876 to 3773693)
acgctcacttcttccccgacttcaaccgttcaccggtaattcaataacttccctcccaacaatttttactcttgctgcctgacattgtgcataaatatttgactagcatgttattgacacttgcaagcattgtttatatctctatttaaatcttctggcttgatttcgtgctcgcggcattgcaacatatctcaaataattaaatcataggttctgagtttagaaaagagaaaattccaatatatattgctgtatcatctacagctagtagttgcacatacacatatgcaaacaatataatatgtacttagctaaaataaaatacaacactcccatatatcaagaacctaggactggatgagacatttcctagtaatacgaatctagacagcttaggaaatgttccatccaatcctagattcttatattttgggaaggagggagtatcatttactcccactaccttgtccaactaattagcatatatattgctacatgtcaacaattaataggggtgaaaatgctactgaattaccctttttatcagtataccattttcatctagaatttctgaaaaaaaacatattgtactgataacccatgaaaataattacaaaaaaacataattccgatagttctgttctgctatattctgatgttccggtaacactgacatcgtttttgtttctgtctctactcttttgatttcgtttttgaggaaaaaaatgtttttccaactgttttcatcctcttaacaataacatgtgttccctactattgtagcgtataacgtctgattggctgcgtccttctacgtt

SEQ ID NO: 11953 - DNA, 922 bp, Oryza sativa
  Intron number 3 from transcript LOC_Os02g03900.1 (locus LO C_Os02g03900) derived from phytozome v7.0 (chr-ID Chr2; po s 1661208 to 1662129 reverse strand)
aggtacactgcatagttcttgcctcttcgtcttggatctgaactacttttacgaactaattaaccatgtgtcatagatttttgcctgcgcatggaaagggtgaatgtaaccaaggttaatcaaataaagacctggtgaaaggctcccaatcttggaataaatgattgaaagactatcttggaaccatttattagttggaaaattgcctggtttggcctttgaaaattgttaactattacaaagaacctacttagtataagcgtcaggaaaacacttatttgggcatcaaatctgaacaaaacagactcttaaacattttagaggtattcctggatgttttgacttgaaatatctttaaaattccaaatataaataatattttgagattttcttgcactgatttcatagctgaacaagaagaattctaaaccttccactgagggtgtggcctttacagaatattgaaatatgtttccttaaaggcctaaataatcaaagtttaaacttaagtctatcctaaggactgtaccaaaaggactccccgttaactagcataagcaacaatgtcttatttgaagaaagaaaattggattattttggggagtacacatataagaacgttggaatatcaatcattgacttgagatgactctatcatgacatgaaccttatatatatgatataatagtagcagtagtacacgaaatcaaacaaagtctcccatgcctagtaaatggtggtcaataatttgtttctttcctaatatttaaagaagacaaattcaatcaagaaacagaaaagtaggagaaaaacaaaattaactatttcgtttttcctgcctcctctttatataaaatgcttcttctggtaacatcaatttacattttacaatgaacagcttctgtgggtcatcttagttggg

SEQ ID NO: 11954 - DNA, 717 bp, Oryza sativa
  Intron number 2 from transcript LOC_Os01g68850.1 (locus LO C_Os01g68850) derived from phytozome v7.0 (chr-ID Chr1; po s 39998877 to 39999593 reverse strand)
aggtggtctgtgcgtggacgcggctgcggcgtcgagggtggggacggcggccaacgagaagcgctgcctcgtggcggccaccggagtgggcatcgctaactatctcgctggattgatcggattttggaatggatgcaatggcgtcagttggcgtcgagcgctggtgagaggtggacgacgacactgtgcacgggcccacatgtcggctgcatcaagaagaaaggagtagaggcctagatgggggcattctcgtcatttcgaaatttctctcccctcattcattccggaaattataaaataatgcctccggtgtcctatagccaattacataatttttgtagtgtccatcagcagtgtcacatttttacgatgtctctcagccaattacacgattttttagtgtcctgtagcaaattttgcctattttataaggtgtatctgtagatcttgtaatgctaaactatacaaagttttagaaactaatgatgcaagttactcataattatttgatttaagattttcttaaaaaaacgataaagtactttttttatttcaaacttttttataaaggtacaatagcagactataagtcagctataaacatattttaagaagataaaagaggaaaaaaaaggagtagcgagttatagatttgcagctagctgcagcacagactctaagatacaatgtgtgtatgacaggtgagatcaggtatta

SEQ ID NO: 11955 - DNA, 989 bp, Oryza sativa
  Intron number 2 from transcript LOC_Os03g16400.1 (locus LO C_Os03g16400) derived from phytozome v7.0 (chr-ID Chr3; po s 9047444 to 9048432)
ccagattccactcccaaccaccacaacaggatagggtatatggctctatatgctctgtgttctttctcatggaataacttattatgctttaacttcaatcttttgtgttgcttttttggtacgtggattagtacgtgcaattgctaggccttggcgaccttagatgggcacagacctttttcgtagtactgagtacgaactgtactggcctggtggtggttgcaactttgcaattggggcatctgtaccccccaaataatttttctacccccaaataattagggtttagtatgcattaactacttgctttattatgtgaacaatttgtttaattagcctttactttatgttagttggtgttgaattgcatgcactttgcaagtttccttcgctctgtaatctttgcctagaccccacaacattttctctgaatagcatcgtatggaccgttttgtcaacctcttttttcacatatactatagacatagctcatggatcttgccttagatatgcatagagttgaaattgggagttgggagcaaaatatcttttctctttggctgtattggatgatacaagtataaactcactgtagcattctatgttatttggtcgtttgaggacaaattgaggttcctgccaattacatggtatgatgaaaacattgtctaacttttgttaaccacacacttttatgcttatttgttgttacatcaagttcactgtaagtgttgtttccatggttaagaattagctagtaatattctttgtctatacagatcataaaaagtggagaaaagttaaattgcttttgaaattatagccttcacacagattagcacgctatttcttaactcttattcattactgaagttgactttagtatcttcataaaaatcaaactggatgacttttatttctgtttcttgcaacaactaataattttagatgttctaatacatgtctctctacatttaacagcagagtag

SEQ ID NO: 11956 - DNA, 348 bp, Oryza sativa
  Intron number 3 from transcript LOC_Os01g14090.1 (locus LO C_Os01g14090) derived from phytozome v7.0 (chr-ID Chr1; po s 7891376 to 7891723)
aaataagggagcttaaagagcaggtacattttttctgttaccacataaatgtttctttaagcacatgaatgctagatttgctacaatgaataatataatgtgatcgtcctattaagaagttgtaatgcagtaaaattattgttttgattgaaatgctggactgaagtttgttttctcccaacaaaatgtttacatttatctttgtggaacaaatgtatatatattttttactgttccacatactatctgacctttttttttcattcgttctacaaacagaagaaaatacatctaatgtacaacctattttcaggtagaaaatctcaagagggcacttgcagccaaaga

SEQ ID NO: 11957 - DNA, 681 bp, Oryza sativa
  Intron number 1 from transcript LOC_Os01g58610.1 (locus LO C_Os01g58610) derived from phytozome v7.0 (chr-ID Chr1; po s 33884246 to 33884926)
gcaacggggccaaggtcatcctttgcagccacttggtaagccgtaagactcgccatcccgatactgaatgttttgtttttaaccgagtactgaatgttttctcagatataatgttgtttgcatacttccagttgactaaaacttgacaatcaaaatggtcggatggtgaaatttgtaggcctgacagaggttctaggctgtggattcagatgtggtatcgtatatgcgcttctatgagtgcccgtggccattagtggtgctgaatattatactgtactacattattcctagatttactatagatgttatcaggacattacttgattacttctacatcaggaattgaattattgtattcacggacagagaaaagtgtgcaattcgttctattgattttgagatgacatgcatacacagttgtttactttgtattaggagaaattaaccttctggttagcatgtccttggatctggcattattgatttgattatcgtagatgcagttcattatgcaggggtatgtgtaaattgtgctgaaattttttataatttactcctcacctgccttgttggtgaaccttttcttcacatacaaagtatcatagattcatagtgccagtctgatgagtagattcttatgattcagggccgtcctaagggtatcactcccaaatttagctt

SEQ ID NO: 11958 - DNA, 600 bp, Oryza sativa
  Intron number 2 from transcript LOC_Os03g14530.1 (locus LO C_Os03g14530) derived from phytozome v7.0 (chr-ID Chr3; po s 7884755 to 7885354)
ccacatcactacccgcaagtctccctgtggtgaaggtattgtatttctatgattccagctgctacattttttctttttgtttcaagtttattgataagagcagtagttttttaaatgaaagaaaagagtctagatataaactcaatcatgaagtgttgtagcatgtaacatgttgggctccagttatcaatcatgattctgacctttaccaaccttgaagcctctgaacgtacatgtttgtgtagcatgaacaacaaatttctggtttagtttttctgtttctctgtgaatgccatatcaaaaggttttggtcagtaccttgcacgggtacactatatcatgttagtgcttcctttttatggtcttcatacaattatctctacctttttagttgtccatgtcaaactgtagcctgttctctaatttaaggagtgcttgagctagtaatgccatgtctaacttgatttatccttcttgtgaatgctaatattgtacacctgcccattttgaatattcttgtgtcatgagattaacttcaccaaatcacattctctgtgtttatcaggaacaaacacctgggatcggtttgagttccgcatc

SEQ ID NO: 11959 - DNA, 531 bp, Oryza sativa
  Intron number 1 from transcript LOC_Os01g42070.1 (locus LO C_Os01g42070) derived from phytozome v7.0 (chr-ID Chr1; po s 23852115 to 23852645 reverse strand)
gacaccacgacgcaggcggaagtctacagcaccacgtaagtggaacacaaatctcatgagcttatagcaaattaacgcttgattaagctagcttgttactgcatttttgtttttgcttcttgtaacttgttaaattgagaacgcaaaaagtccacaacttaggtttcttgcattttggtatgatgatactcaaatgtggtaaatctgctgatggaattgcataagttgattattagatattaacccacatttcatgaaaaaagtgtaatagcatttgcttatttgtgatatgacattgtaatgtgacaaacattttgacatgacactctaatgtgataattctgctgatggaattgctcaatggtaacaaaagttggtcagatattaggccacatttcatgagaaagtgtactagccttgttcgattgcgattcatcgctaaaatccggtacatatatagcatggagttaattatccatcttctttgatgctgcagaacatcagatcttgtggagggtgttctgcaaggta

SEQ ID NO: 11960 - DNA, 764 bp, Oryza sativa
  Intron number 2 from transcript LOC_Os02g27540.1 (locus LO C_Os02g27540) derived from phytozome v7.0 (chr-ID Chr2; po s 16307570 to 16308333 reverse strand)
cggcacttgcactcttcaagaacaaggtattcctactaatcctaaaaagaattgtgtttttttatgcttgtcaatcaaacttttgagcattaaatgttttctcacatatgtaattaagtgttattatctaaaaaaatgttaagtgactaatagaaaatgaacaggggtattctaatccttactatgcatagctttttggttaagattcctccatatagtattctaagattgagtccttttgttcactttcccaactcatctctctcgttttccatgcgcacgctttttaaactactaaacaatgtgtttttttgaaaaaaaattatatacaaaagttgctttaaaacacattaatcaatttttcaagttttcttatataatacttaattaattatacattaataaaccaccacattttctatgcggggaactccaccacccggacgcagcctaagtcttacgtttttgccagttataattgtcaaagtaatatatggagatctcacagtactatttgagtattcattgtggcttatgagcattgatgtcgtcttttgtcaacatgtgccaatattagtacgcgcatttttataagaaccttttgtttgggatatttcatcatatctttttttgtagcaactcttttgtcattagttgcttttttagaaacaatgtacctcatccaccttatatttgtgcatgttgacaatcttctcataacaactgtaggtatttgtagatagttcgaatactgatttggatct

SEQ ID NO: 11961 - DNA, 982 bp, Oryza sativa
  Intron number 2 from transcript LOC_Os01g09500.1 (locus LO C_Os01g09500) derived from phytozome v7.0 (chr-ID Chr1; po s 4849945 to 4850926 reverse strand)
gacggtatgcacgcgcttgccctcttgtaatcccctttctcctactgctctctggttattatgtgttagtctggggggagtagaaagaacagtttttattagttaggggtataatttgtgtcttagctgatagaatgtgcagttggtgattagtgcggacctgggttgattgtagttgcatgacaggcaatttagtggtaagccgagttaattttggatttaacaactgcaactacaaggaaagaactctttttttgcactgataggcgatctgaattatagtgatgtgcagtgtgaaaatcactttgaaattcattattgtcagcattgtcatcctgagtagattgccaattatatgggtttggaggacaataaggactaagctctccagtccatttcttgtcttgaaaaatgaactccatatcatcctacagaatatgatggtaactttaataaaatttgtgttgttatctttgtattgtaagaaaggatgtaatcaaaatacggtgaacaaagcccttatagagtcagtccggacatgttcagtattgcagtctcatcgtatagtatctttttctcaggtgcctcttaagttttttctctctagtataatcttccattgggctttcaacttctggaagttgtgctgatttgctgcacacaatgatacccgagatttgttgattagctcagttggtgtctttgctctatttcccctccattcatgtaaatgatatcaagtttggtggaatgctggtaaaaatcctcttctagctgcataaccaataaagcatctgcaagatactacttacctacatgacattacaatcataactaatctcccaatatgctgtgtattcatacgtaatagataagagaatccagccttagattctaactttgtgatcatgtatggcttctgcttgtgcccgtgatgctattgtttcatatctgtttcccaatagtcgataaacaggaaaca

SEQ ID NO: 11962 - DNA, 583 bp, Oryza sativa
  Intron number 2 from transcript LOC_Os03g20450.1 (locus LO C_Os03g20450) derived from phytozome v7.0 (chr-ID Chr3; po s 11585785 to 11586367)
gactgaacttgacctcagctgcaatcaacttacaggtaaatcagttctcctactatccatcgcatgcttctcttaagaggaattatatttagttcacgctttgatatgtagcttgtgctgtgctatcacaattccctggtgcttgaacagacaaatcatagtgattagacatgaaaaataaatgcatatttcattcattccatactgttttgaactactcctccatttcaaattacttgcattttagctttgtactaaatcaaacatttctatctttgaccatcgatgtctaggaattcttatagtataacaccatttgaattatatattatgaaagtatttctcaaggtgaatcgaaagacatgtcttatgatgttaaactatatgaatttctaaaagttgatggtcaaagagacaaagacacaaatgtttgacttgggacaaaactaaaatgacaagtaatttgaaacggagggagtagttaattgtttctaaacgatgtattgcactaaccaatcatgtgattaactctagtttctgaattttcttgtcttacacaggtccaattagacgtgtaacatca

SEQ ID NO: 11963 - DNA, 969 bp, Oryza sativa
  Intron number 1 from transcript LOC_Os01g19290.1 (locus LO C_Os01g19290) derived from phytozome v7.0 (chr-ID Chr1; po s 10910611 to 10911579)
gtcttcctcgcccccttcgcctactacttcgagaggtacacgtacgtacgtatgtctatatcgttacgcatcgtgctgcgctctagctagctacttcctttcgttccctcgacgatcgattccttccttgtgtttcttgttctgattagtgaatattatattcattctttcatggtctttttcttttccctttgaattcattcattcctgcatgtgtggggagtagattcaaagaaatgtttgtttttttttcagatggcaaaataaatgattcttttagtgtcactggcatgttttgactcttgatttgttataccttcatcagaagaaagaaaggaacggactttaattcagtacatctctgagatgtctttttctccttatatcagaaacagggcatgcactcctactgtatttaatgaaaatgacatagtctcatgctgatttcccttcaaaaaaaaaacaggggcaaaaattaatcaatacagggtgttctcaatattcatgtaacaatgctaccagtagtttcctcttgtagaggatgctcttcctgacttcttgtcctgtcgagtttgttttgctctgcgtgattacgaaagcaagtcaaatttttgtttttttgcggctaaccattcaattggcatacttatggcttcgctgtaatttctaaatatatattctccatgtgaatgtactacacctggtgccaactgggattacaacccccaaggagagcttcattaactggacttactaacctcattgaatgtcttaaatgttcatgcactaagcaacatatgaggctgatctcacataaccagctgtatctagctcttgcgtggaatcaatcaatcaatttaataaccaagattttgtttgttggaaatgaattaaccgttttgaatcaagtttgatattagtggttttaatcagtactcaacctacatggatgcatgcaggaagagtggc

SEQ ID NO: 11964 - DNA, 515 bp, Oryza sativa
  Intron number 1 from transcript LOC_Os03g26930.1 (locus LO C_Os03g26930) derived from phytozome v7.0 (chr-ID Chr3; po s 15399396 to 15399910)
gaggtatgttaaattttatccataaaacataaagtgcattgtactgcatgagaaccagtaaagtgcactgtactgcatgtaaaccagtaaaactatgtaaatggcacaaacaaaaaggtgcaaacttaagattgagcatattaggtctattttaaacatattatttcatcattggctgcttggtgagatctaaataattcttggttgcttggtagtttgaggtattcgtaggtgtcagtgtggtgtttttgttttttgttggcttctccagtgaaacgaggtgaagctactggacttgttttccaaaagaaaaatctaactcaaagaaacatgagcaggtcaagttcataatatatgttgtttaaaatgtttgaaatgatgtagcaagaagctccacacctaataagttttaagtccaggtttctcttctttaagagaaagagacctagtttgctcagagtagcatacccattggatttgcaggccctggttgttcgtcttttggagctggagcc

SEQ ID NO: 11965 - DNA, 615 bp, Oryza sativa; identical to SEQ ID NO: 9549
  Intron number 1 from transcript LOC_Os02g35420.1 (locus LO C_Os02g35420) derived from phytozome v7.0 (chr-ID Chr2; po s 21283986 to 21284600)

SEQ ID NO: 11966 - DNA, 642 bp, Oryza sativa
  Intron number 2 from transcript LOC_Os03g11819.1 (locus LO C_Os03g11819) derived from phytozome v7.0 (chr-ID Chr3; po s 6181789 to 6182430)
tgaacggtaacggaaaatatggcatataatatgttatgataaaaaaacccacaatgtaaagcagtgaagcatctaatctttctcaagacggtaattcgtcatgttattaaaataatatggaccatacgatttctccttcggatgttttagaccattagatctgctaattgatgaaatctctttttggccctttagaaaacttatataagcttctgtacttccacatccttgaattttcttttcatcttttacatttttccccctttctccctgtttgttgcgtcgccttccctcgcgagacaccgcttcgcgcctccgccgccgtcatccgcctcctcctctacccatctccgccgctaccgctgccgccttgcaatctctactcgcctagccgtggccctcccagatatagtcaacacagcaacgagaacatatgcatgggtttttgccgtccatggtaaagaaaggttgtgtttagatccaaagtttggatccaaacttcattcattttccatcacatcaacctgtcatacacacccaacttttcagtcacatcatattcaatttcaaccaaaattcaaactttgcgctgaactaaacacagcctttgtctgcaatgtgcagcagaggaatactcagtgc

SEQ ID NO: 11967 - DNA, 509 bp, Oryza sativa
  Intron number 1 from transcript LOC_Os02g47744.3 (locus LO C_Os02g47744) derived from phytozome v7.0 (chr-ID Chr2; po s 29185642 to 29186150)
taaaggagccagtaagtattttgtaatccacactttcaggcataacctatttctaaactctcatcatcataactggatgacctgttcctctctcttattaaaaacttgcagtttgtggcctagtcaactatttgatgttggccaaaatgtagacgtggcaggactttcattttaattggaagtcctgaggactaagatgaaagaacaaaaatctgaagtaaatgctaagaatttacaatgttaaaaaaaaaactgaactaccaaatcgcattttggcaggaacaaaccatttagaaatgttcagcgaattcattttgtatagcttttgaagttctcttgaacaattagtcctttgagaaaagaaagttatggaatgatgccattggaatgttcaccaagaaagagaaataaaacatgattttctacatggaatggaccattgttataataagtggtaatttcaccatcctacagggttaccagaaaagaaattccttagactgtttgga

SEQ ID NO: 11968 - DNA, 615 bp, Oryza sativa; identical to SEQ ID NO: 9549
  Intron number 1 from transcript LOC_Os02g35374.1 (locus LO C_Os02g35374) derived from phytozome v7.0 (chr-ID Chr2; po s 21265934 to 21266548)

SEQ ID NO: 11969 - DNA, 725 bp, Oryza sativa
  Intron number 1 from transcript LOC_Os01g42790.1 (locus LO C_Os01g42790) derived from phytozome v7.0 (chr-ID Chr1; po s 24351057 to 24351781 reverse strand)
cacccctgtccaggatcaaggcaagaataattgcagtaagcaccaattaaactgttttattaataataaaaatggattatatcttctgtctcagtgagtacgcagccaaaaaaaagtcgtagaaaccaaaaaaaaagtctttgaagtaaaaagaaaggaataaacaaaatgatgtgatagaaaagaccccaacttttgcaatgaaaatattaactgaaagggaaactcttttaagcatttaggtggacgtctactggtttcttacatcccaactaaatgttagtatgatttttttttaaaaaaactgataagacatattaataatatatcgctccataaacatgtaagttagaattaaatttttataaattataaaaaaaaagaaatttgactattggatgtacatatactggagtttaatttgttatttttattataatttatagaagtcgaatttaaatttgcatgtttgtaaagtgatatactacctattaatctattttattattttttaaattttttttaataatcatttgattggcatgcatgaatcacccaagagatttacaacccatcttccaaccgaattacgtttccagaatcacataaatcttgcatcttcatcatgtcgttcatggcggccggggtgatatgaatctatgatgtgtcgtgtgtgtgtgtgtggtgcagacagctgctgggcgttcgcggtggtggcggcgacg

SEQ ID NO: 11970 - DNA, 531 bp, Oryza sativa
  Intron number 4 from transcript LOC_Os02g04840.1 (locus LO C_Os02g04840) derived from phytozome v7.0 (chr-ID Chr2; po s 2237737 to 2238267 reverse strand)
gctggcattcgatcggtgtgcgtcaccaatttcaggttagtgtttctgtggttgcttcatgctaggggtcaaaaggagcaatgaggatgtagagtgagctttagaattattagttacagcctttgtgggttcccatattattccaagtttatgttaacattttgcttggggttatatgtttcatcagtgcatagttgctacagttacctgacttttatatgttttgcctgctaacattcatttcctgatgtaatcagtactaacgctgaacacaaaagttatctactaacccacaagaaatctgcagctctgagtgatgctaacaataaattttagttatggctttacccgaaattgactagttgtaaacataattttttctctccatttatttttataattcgggctattgaagaaatttacatggatagttttatttgcagtttttcttgcttcttttttgagtagttatttttgaatcaaagcacggtctttaattttcaccttctatttgcagctgggacttcattt

SEQ ID NO: 11971 - DNA, 414 bp, Oryza sativa
  Intron number 4 from transcript LOC_Os03g11450.1 (locus LO C_Os03g11450) derived from phytozome v7.0 (chr-ID Chr3; po s 5899910 to 5900323)
gttctccgtattagaattcggtgggttattcattttgtttcaatgcaaaacctgatttaagttagcatgcccccttcttttactctctggtcgatatgacatccaaccaactaagcgcgtataatctctgaagaacatttcctcgaagtcatgttgctgcgtaccaggtacatgccgggcgtagattatatttagcaaactgattcttagtttgcatataatattcagtttaacagtatcccatggatcagtatctagttttttatgtttttcctggttttttttattggacgatcctctttcagatcctcccagtgaaaatacattgcttttaatcaaacaagataaactcctgaatttaaattcgtttatttgtggtttatcacagagaatcttgctcaagaacttgtcgat

SEQ ID NO: 11972 - DNA, 718 bp, Oryza sativa
  Intron number 2 from transcript LOC_Os01g57082.1 (locus LO C_Os01g57082) derived from phytozome v7.0 (chr-ID Chr1; po s 32984309 to 32985026)
cccggaggggctcgagggcctcgcccactttctcggtcagtccaccgttcgcttcctctctcccgacctcgtccccttcatctccgcggggaagtctagttcgcgaacttagcgagaaaatctcgggaaaagttccgagttccgactgctgtcgtcctttcttagtttctaaatgaaaaaggctatgtctaatgacgctagaaaaaaaatcccctaatgatttccacctattaccgacagttataaccagcccggtgcaagcttttattttatttttctggtttcaagtctgtttggattggactctactttttttttttaaaaaaaggcaaagaatatccacttagctttctaaattgtaaatataatttctaaataatgtatatagagagagagagattaaatacataaagtctatactagctaatacatatatatagaaagagagattaaatcaaatttgactgtaatcaaagcaaaaatgtcgccataattatagcaaaaccacttatttttgtgaagaaaatgctgacttgttcaaaattcagtaaccgtttaggcctcttttggaacacatagatttcacagaaattatatagtatttcacacaatttaagtttaattcctgcaggaattaagaaaaaaatcctgcattgaccatagttttttatctgttctcttgtcttgatttattgtcatggtcttgtttgcagaacac

SEQ ID NO: 11973 - DNA, 617 bp, Oryza sativa
  Intron number 12 from transcript LOC_Os01g57082.1 (locus L OC_Os01g57082) derived from phytozome v7.0 (chr-ID Chr1; p os 32987926 to 32988542)
aggtaattgcaaagaacatggcttacgcagtgtgtaaatccatgttttatggttagaagttctgatacttctacgacttctgatcttttcctctagagttcccaaactacccaaacaagagttattccacataattgagtttctgatcttttcatatcttgattggaaaagttttctttaggaacgtcagttgacctttgttgggaatattttacaggttttaatcattcagtgaattctataaggaatataaattttggttaacaaatgggatatttaccgaataggagtataggacctgttagttttgagaacttatgagggttcaggacagatgtgcttctaattctggacaatagactctatcaactacactacaaccatttgcatacaagtcacgttccaaaaaaaaagaaacatttgcatatgagtcgtactttcttttagcaagatctcattatgtttcaagttatcatctcatcatcaacaaattcaaacatcacttatttatagtatcaagctttttctacatgtcttgagcatattgggattgatttaaatagataaacttaatgtgatggtaacatgtttttgaatgtgttagcttgtggcgataa

SEQ ID NO: 11974 - DNA, 999 bp, Oryza sativa; identical to SEQ ID NO: 9422
  Intron number 2 from transcript LOC_Os02g52140.2 (locus LO C_Os02g52140) derived from phytozome v7.0 (chr-ID Chr2; po s 31913363 to 31914361 reverse strand)

SEQ ID NO: 11975 - DNA, 775 bp, Oryza sativa
  Intron number 3 from transcript LOC_Os01g52810.3 (locus LO C_Os01g52810) derived from phytozome v7.0 (chr-ID Chr1; po s 30380748 to 30381522)
aatcagggaattcaggtaagatcatgacttccagcaatttggtactatacaacgaagttttgtccaattgtcctcttcaatatgtatttcagtaatgctgagtttattttctaatttgtcaaccatagcgagagatatcagtaaacaaatatcgcaattgtttttgtcgaactgccactgttaataagagttctggagtaatatatatttataataggtacacaggatggttaagtaaatgtacttatttagattgctatgcctaacatccttagttcatctgatgttgctacatccttcttcaactttaaggtctgctgtgcatctttgtattttgaaatcatgggccattgaaaatgtagcactagcaattactttgtctcttgtccagtaccttttctagatttctattatgtacttgtttgggatgattttttttgttacttcgaccaactagactctagagcgctgtgtgtcttttgatcaatgctgaacagtgcttataaaataattgttgtaaacacagtgctgctttgatcatgtatttgagtctaacaatctctagatgcaccatgcaaaagtagtttttttgttatgctcttatagctgttagacataagaatttccttactgttcgactaaaaaattctctttctacttcgataaaagaaaaacttgatgtgaccaggcatacatgtcatcagtgcttcatacagtagttgatctatgaaatttctttagtttcaggtataaaaacgacttggacttctatttc

SEQ ID NO: 11976 - DNA, 462 bp, Oryza sativa
  Intron number 2 from transcript LOC_Os01g59900.1 (locus LO C_Os01g59900) derived from phytozome v7.0 (chr-ID Chr1; po s 34639705 to 34640166 reverse strand)
tcaacaaatcagactctggaaattcttccattaatgtaagtatttgactgcagccttgttcaacctaacttgttcaatataccttgccagttgtatttgttttagttgtgatatctacgcacctaatttgcaatagctactcagtttcttttagcatttttttaataagcacattaaaatctcactgccttcttatatcatgttgtcacttctgctttaagaattggatagcatcactggatgaacagtttcagttgttgtgctgaactgctgatgccacttgtatcatgtcccatcaaaatctattccacttgattttgagtttatttgaaatcatcaatgaccataagatctcagtgggctgtatgtgtttttttcttcccataaaagatggggccaaattgtgctttctaacatcacatatatgttcatgtgcagggcactccaccgttggtttctgca

SEQ ID NO: 11977 - DNA, 516 bp, Oryza sativa
  Intron number 1 from transcript LOC_Os01g59900.1 (locus LO C_Os01g59900) derived from phytozome v7.0 (chr-ID Chr1; po s 34640537 to 34641052 reverse strand)
tggaggtggtgattgctggttcttcgaggaaagaggtattaaaacgatcccaatttattgccattcgctgttattgatgttatggtgtttatttcattgaaatgtgcttctatttcaaattttgatcattagaatatagatttatgttctcactatttattgccttgtaattcacagcatgccaatattatagggcatattcttatatttacccttgtatttgatgggcaaataaatcttgtgcttgattttttgtagagatagaacaggatagacatttaagcagttaaatgccctgtttgtctatacctgtttcctcaaattaaatgaacttgctatttaagtcaaatatacgtttgcagtcatgaaaatggtcttataaagctgtgttaactaaattagatagtgtttcttgtcattataaccgcataaacagactctcatctaacattctaacttcaacccgttttcttttcggcagaaaatcatctcctgaatttggaattaagcttgtgg

SEQ ID NO: 11978 - DNA, 883 bp, Oryza sativa
  Intron number 1 from transcript LOC_Os03g18040.1 (locus LO C_Os03g18040) derived from phytozome v7.0 (chr-ID Chr3; po s 10043659 to 10044541)
ttcgtgacacaaggatttagaggtgggacgggaaggtgggtcttttccatcttatctcaattctaattaattttttcttctaaattttgcactatcatatgagaaatgaactatatatattaagcaggtttttattcagctagcaggattgcccacttgtatctctccaaactggcatcactgccaattttcaatctggcaataggcaaggggaaataatgcccgaccgctatcattgccggttcttgaatcggcagtagtagtgattccataaaagaaaatgtagaagaacctgcaattgattagggcaaattgatactattgttcatacaaatacacaatattcatacccatttgtatacatccattcgtacccacacacaacattcatacaaatatcccacagattcaaaacaaaacttgcaattgctggtaagtgatattgcaattcaattatgcaaataaaatatctatatatctcacatggctattcaactttgcaacaaacatccagaactaattaacttgttcaaacacacacacagtgtcggtgacatcggcagagagagagagagagagagagagagtcggtgacatcggccttcagtgcctcctctagatcggtagctcccagatccactcccaccggagaccggctggcctagctccctcctccaccactcccacgacaactagatcagagagagagaaggcttagagagaaagagggagagcagaaagaggatagagagaaaatacttagttatctcctgttgcagctaccgtcagcgccactcccgttccatcccctcccctctcgagctcaacgtacgcagctgatgcaaatccgttagaaccgccactgcctttggaaaacaaagga

SEQ ID NO: 11979 - DNA, 636 bp, Oryza sativa
  Intron number 1 from transcript LOC_Os01g74110.1 (locus LO C_Os01g74110) derived from phytozome v7.0 (chr-ID Chr1; po s 42905098 to 42905733 reverse strand)
ctccgtctttgaagggatcgccattggtgtctcaggtcaggacaaagcttgttgcaatctgattcatttaaattcagttcttttaactaattaaattcagtttgactgattttttttttgctccaagtctctgggacaaaattctgtcagtgtgcaattaatgttcattgctagctgactcatttttaggccaattgttatgctaaaacctagagttgtttgttctgtctccagatatttcgatctctttgatttggctaattgatcatctcatctcactagttacttgaattatttgtcctcttgcttaatcatttttacagctgataagttacaaattttcaaggcattaattaatttcaatacaatattagcctgttgttttagcatgatcaaaattacgggatacattatacatagacagatgatgtaacgattaattgctagctagctagtaaaactgcatgtgctatataatttgaacgatgatatggtttcttgaaaatcttgagtgattactggaagaaaaggaacaaaaattggaatgtatatatggatgaaataattggactctctgatgtcaatatgagatgaattgcagcgagcaagagcgaggcgtggaggaacctgtggacg

SEQ ID NO: 11980 - DNA, 753 bp, Oryza sativa
  Intron number 1 from transcript LOC_Os01g39000.1 (locus LO C_Os01g39000) derived from phytozome v7.0 (chr-ID Chr1; po s 21925988 to 21926740 reverse strand)
tccatttgctgctcatatcaacttatcaaagggaggtaggtaagatatgcatatgccccacatgctcacatgcttgtgtttcttgtcttgtttcttttttacttttgtttttgttgtgttaccctgaaagtttagtggaatgaatgagtttttagctgggtcggttgaatgatgagtttgttagggtgttgtttgccatgagttaagggcatatgtgttgttcttggtcacctgattagattagaccatgttttttcttcatttgcaatagtttcggcacatttggttgggattcctccctcaaaatttcagtaactaggaagaaattggcctgagttatgaatcagtagaaaccatgttgcaaaaccatgtgtggtccatttttctctctctctctcttagtccaaacaacacgtgaactagtatgaattgaagaaatttctgggttttgtgtagtttttcagatgaaggagcttggcagtgctgaagttagcatgaactgcattacatggctgttctgaatatgatccaggcagttctaagaaataaagaaattaatcttaggcaataaaattgataactagatttgatagatggtgcgataggtcttggcgattgcaacaacaatatatcaagagtcaatacaaatatacaatcatctctttgattttgtgaatctgattctggtggattgcttacattttctccctttctacatgaactgttgtagtgcaagaggaagaacaaaacaag

SEQ ID NO: 11981 - DNA, 968 bp, Oryza sativa
  Intron number 2 from transcript LOC_Os01g02050.1 (locus LO C_Os01g02050) derived from phytozome v7.0 (chr-ID Chr1; po s 569669 to 570636 reverse strand)
accatcgccgacacttaccacaggtgcttgccctacacattcacattctcaaattgttttattaattaattggaggatcacctcttccgccgccattagaatctgcaaactcacttcataaatcatcataatgtgtttatcttaattactccctattaacctgaatttatcatgcatgtacggccctcaacacatttgttgtaccactccattttcagaatgtgctacataccattttttttgtctgaatatgtgttactacaacttactgctagtgatagtgaggactgcattatcatatttggcgcgaacaatttgaaagccaaacactgaatttacagtttgtttgtcacacttcaattaaagaatactgataacaacacgggagttgtcttctgtttggggtacctatttgtcatatttgggaaatataagtatacctgttcgtgatagggatgctacattacagtagcacagatgaatctttgattgcaatatggaatccaagaattccggtacatatgtgtacggcattacaaagtcggtccaccggttagttgtttccatgtgaccctcctcagacagaattgattgaaggaaccttacgctcgcacatggtagcttcattgtggtttcctcagatgttttgtcgtcagttgtccgactgtttttggaacctagcaaggccattgagcatcgcacttattgtcgcaattacctcttattatggtagtatgtcaagttttagaacagctgagacttcatgcatatgcttaagaaataattaccatcagcatgttgcagacttgcagtacatctttttcatttcaggaaaatgttagtgttgctacgttttttatcacctgaactagaatgtttaccaattttgaaaatcacccaaaatctagagcttggcatttttatgtcttttagggttcgtaaagcacgcaatttcgccgacctgtcga

SEQ ID NO: 11982 - DNA, 843 bp, Oryza sativa
  Intron number 2 from transcript LOC_Os01g70580.1 (locus LO C_Os01g70580) derived from phytozome v7.0 (chr-ID Chr1; po s 40869347 to 40870189 reverse strand)
aggtgaccgatagtttccagctttatttatccccccccccccccccccccccctactgttctttgtttgcatgtgtcctctcctcgcgcgttttgagtcaggcttggcggtcatgatggaatgcgtgggaggcgagtgaatcttgttttcgttagtatttcattatgcagaggagtgaaactgtaaatgttgtcatggaagcgagtactgtctagctgaaccagataccactagttaagtgttatttctcgatatgtttatctcccatgctttacatgtttccgttattatatgtttaagcaaatgctgaagttcccctgatatgttcaagttgagtaatttagtatgcaacaccttatagatgttaatttcctgttgggttatggtttagtgctttagctaacgaagtgctctttcatttgatgaactctgttaaaagttttgttcttatctgcatgattgctagttttgttttcggtgagcttagaataacattcttaaattagccgaagttgccctcacagacctgaatgtacgcgatattgcgccaaaggctatctgaagccacacaaaattactcaaaatctgggatgaactacaggtctaaagcagcttcaacttgtgtcttcttcactatgaacttttttttcctatctttggttgccaaaggtttgggagacatttatgcatccaacagaggagcatggctagttgatttgccatacctggtagttggcaagagactgttttctttaaattgttggttgggtttaaagacagcttctttgttgggtgttcatatatttattaatttgtgctcatcttcctgcaggtacaagccag

SEQ ID NO: 11983 - DNA, 469 bp, Oryza sativa
  Intron number 1 from transcript LOC_Os01g02920.1 (locus LO C_Os01g02920) derived from phytozome v7.0 (chr-ID Chr1; po s 1073208 to 1073676 reverse strand)
cgtctccgagcagttcgcgatcgctgcacccaacggtgagtttcatttggttcatgattgagcataattcagcaaaaaaaaatttgcaagttttctgaattctgaattatggtgcagttttataggttttcttttgattcttcctgcatgattcagaccaaaactttttgattacatggttaatcgggatcactttttcgaggatttttttttgaataattctgaatcaaacgagtatgtaatacatgcggaattcgtcgggattctaagcacgcgtttgcttgtttctgcacgtaaccgcaaaatcagggcaccgatcaccatcctgaatccaagctcccaacttattttcagtgcatcaccttacaatattcagactttttaaaagaaatttaaacactgaaactgatcaaattgaactgcacatgatgcagcaattcggaaaacatcaccgggacacgcctccccg

SEQ ID NO: 11984 - DNA, 1055 bp, Oryza sativa
  Intron number 1 from transcript LOC_Os02g16450.1 (locus LO C_Os02g16450) derived from phytozome v7.0 (chr-ID Chr2; po s 9392280 to 9393334 reverse strand)
tcgaggacctcgaggagcacctcgagttccttcatgtgagattgcgctcgcctcctccccttcctctgttcttctagggtttttttttgctctggattggttacctggaggaccatgtatgagttgttgcaatgaatgggggagtgggggaatggatcctcgtcaggctgggggagagtgcgttgttcacgtgattgcggctatcatttagcttcgttttcattgcgcggcctgtagactgtaatttgagatggggctaatgatttcaatttcttcatgggagctagcttctgttgctatccacctggcgcttcgtttgatgtttcgattggatgttgattgcatcatgctgttcgcatggtaggatcattgagttgctgctcatgagttatgctgaattatgtggtttgttaatatcatgtcatgggtgctggattttggcctttttctttgggtgtttggttgtgcatatgcttttgactataaatttgctaattaaggcgcaaatagattggaaatgaaggcatgtggatgttaaaaaagtgatagtccacatggctttattctcttttttgttgtttttttagttgatgcttgctatttgtctaggcaagaaaaaacatcatttgttctgtagtcatttgtcactggataaaagttcatagcataaaaccatgattaatatgatacttgaagatattatttgttctataatcattcatcactggttaaaagttcagcataacattggccaaggtatgtaagagaggctaattttgctgtagtaccttaccagaatgaaacagagtgaagtagctcttgctttgtcatgttccattttagttagttctgagcataatttggttactgtccttttatgagtggtgggttggaaacctgtgcatacatataggcaatgcacagttccctgtgtgtttagctaattcagttctatctttcctacttaatggtatggttatgaagcttgtgtttcttagtcgttaatattgttcttcctccacagaccgttcaatcacaacagcgggcagagcagg

SEQ ID NO: 11985 - DNA, 917 bp, Oryza sativa
  Intron number 1 from transcript LOC_Os01g68060.1 (locus LO C_Os01g68060) derived from phytozome v7.0 (chr-ID Chr1; po s 39567577 to 39568493 reverse strand)
cgcggatcgccgacgactaccactccgtggatcaggtatctgcccgagcatcatatcctgcggttctgtagattcgtgtggaatttggatattcgatcctgcttttcggagcatcggatttggttgattcgaacccgctcgtgtaggcctttctcccttaatcgcggttttttgtttttccatcttaggattgttagcgaatcgctcgttaccgatttgcacttcatagttggtcaatctgtagctgtagccacttgaaacttcagattaggatgatctgtagtggtggatcgaattgatgtttgtgcaaaaatcagaaggagacgactcgttaagcctgctggtcaactgccaatcactgttgatgaagaattaaaaaaaaatgtttgttgtgaggttgggcattattggcggctccagctttcggccaaccatcattattggttgtagttggtctcttttgcttggtcttctcaattctcaaagatcttatgagtacgcaaattagcattaatcaattgagtctggcctctgtacttcctgaatgctccttgcctcaatgtccaaaatgcggcaattggaggatgtttatttttattggtgggataaactggtccaccagtttaatgtttcacacttccaattttctgcttacattactaactccatgtctaagttttctgaatgttttttttttattttttgcgtagcacattacgctattgttcacaattagttgtttatcggtaaaagttgtttcatatgttgtatttaaacttttctaacatttctgtattctggcctcataaccattagtataagaatcaggcacataagcaaacaatccagtttctattgtgttgctattattcccatgaattggtttgctcaggattaatattaattgcaggttactg

SEQ ID NO: 11986 - DNA, 874 bp, Oryza sativa
  Intron number 2 from transcript LOC_Os02g56760.1 (locus LO C_Os02g56760) derived from phytozome v7.0 (chr-ID Chr2; po s 34792938 to 34793811)
cgctactggcgctggatccctctcaccgactcaaggttcgctcgatcatacatacatcgatgatgtcgttgacttttattttattcaattttttatgtaaaagtataagatataaattatgcttaaagtattttgagtgataaaaacagcttacaacaaaataaattatatttttgcataaattttttttgactaatgcaaatagtcaaacgtataataaaaagtcaacggtgtcatctattaaaaaaacgaatgtattatttttctgcctccttttccaatcctgctactctttacatcgtgcactgcttgcataaattaaaaaaaatgcaacttcgtttcgaaagaaaatggaaaaaaagggaaattctaagtataaataaatcttcttataacatatttaattatatcgaaagatcaagagtccaatgatcaagtcttttctattctcaatcatgatatcattattaaaacctctcatttacccctgttgtttcacacacgtccgtgttcttctaggatcagagtaggtagcctttacttgcaacttgagcctgtacgatcaataaattgaaatactttacttgaaacatataaatcgataatgcctgcatcttgttcatcacaacaacaccggtttcttaatcagctgtatatttcatggtcctaagctatctcgtgagctatttggagctgaacagaagctgatgacaaatccttagttgatacggcaaaatttatatggaagttgaaattcgtaaatactatgttgtatggttttctttggctcaattgtttgtattaattcttctgttactttgtcctgaattatgcaacaggttagaaggtgctgaactcctatctgtttgctggt

SEQ ID NO: 11987 - DNA, 968 bp, Oryza sativa
  Intron number 1 from transcript LOC_Os01g16870.3 (locus LO C_Os01g16870) derived from phytozome v7.0 (chr-ID Chr1; po s 9636811 to 9637778 reverse strand)
gtcgcctccgttcttgcatcgttttctttggtaaggcgaggagtcccgcttttcattttgggtggagggaaatctagggttcttggcgggggggtttttgcagattggattgttgtgtatgcgggagcggttgggcttgtgttgtttggtgcggttcttggtggtggtggggtttttcggggaggagaggagggcggattccgtggggttttaccgtggaagtttctgttcttttgtgttcttttgcggttttcctctgttcttggtttaaagatcgctgcattttgatgcattctattaaggagtttgatttggggttttctttctttttttcccctgatttcgttcgttcttcgttgcgttgttctcggggctttttcgtcttttgccgtttatggtggtttgttttagatgttttttttgaagatttatccgaaacagtgtttgtgcgattctttttcatttttgcgttctttcttcgtttgatatttctggtccttgttgttttaaacctttattttttttgtttgggagcacctccttttgatgcttgttttggtggatatctgcctgtgtagttttgttagggtttaggggtttttgggaaggtttatgatactgatcttgactgggaaaagaagatttgctgattaagaaaatggctaagtttcttgtacttaaaaatgggtaggttgtgtttgttgtagttttgaaagtctgtaggctggatagactcttctcctatctttttggaagaaaaattaagaaaatagttttctaattttgcttttcttttctttttctggaggaaaaactcttgacccagagcattttcattgtctggtatctgttagcatgggttttagtttcctttccttttctgttttgatttaccttgttaattgttgaatgagttatgtattttgtgtgcaggatagggcagcgctttgacagctttggggagttag

SEQ ID NO: 11988 - DNA, 568 bp, Oryza sativa
  Intron number 1 from transcript LOC_Os01g08950.1 (locus LO C_Os01g08950) derived from phytozome v7.0 (chr-ID Chr1; po s 4492734 to 4493301)
acggcgccgtcatcgccctcgacggcgagcccaaggtagcacagccgctcgcctccccctttctaacttaacttatttgaaaaatttataaaaaaaattaaaaaaattagtcacatatttataatatttatgttttattatctaatactccctccgtcccagaatataagggattttgagtttttacttgcaacgtttgactactcgtcttattcaatattttgaaattattatttattttatttgtgacttactttattatccacagtactttaagcacaacttttcgttttttatatttgcaaaaaaatttgaataagacgagtggtcaagcgttacaagcaaaaactcaaaaatcccttatattgtgggacggagggagtaacaaacaaaatacgctgatcattaaagtttttcaaataagaatgacggtgaaatcgttgaacataaacagtataattattctccttctgggacatttaacttcatttaattattcctcttttcttctgtttcttgcggcggcggcgtaggggtcgtggacgaagccggcggcggtgatcgtcgc

SEQ ID NO: 11989 - DNA, 709 bp, Oryza sativa
  Intron number 1 from transcript LOC_Os02g43950.1 (locus LO C_Os02g43950) derived from phytozome v7.0 (chr-ID Chr2; po s 26538289 to 26538997)
gcggctcattgggagggagcggcggcggcagcacggtagaggagagggagctgcggcggcgacggcgcacgcgaggggaggaagcggcgacggcgcacgcgagtggagaggcggacgaaccgacgcgcgtggggagaggataggacaggtggctagggtttgtaccggttcgcgaaatctaggccgtccgtccacaatccgacgatcgcacgggcgtggaagggccggcacagcgggacacgtggacggccagatcgaccctacggcgagatcggacggtggacagcagcggggaccggtgcataattaatcgaaaggggaaggttttttttttgcaaaaattgctgacgtggcgcccctaatattacgtcttcaatttgagaaacgtctagaggtcttccgactagctccacaaggtagtgaactagacgaccaggattcaaagcctcgtcccttctaattatttaatattatgtccattctaatattcacatctgtttttcttcaatttgatctagttgtatcttggaaagtggcatgtatatatataactctgagcgtaaagatgctgcaagttttatgtcaaggagcccatttgagtccagcctcacatcaccacttgatctagttgtgtttgtaagtgtgtcatgtatactcctctgtaagtgtcatgcatgtatactcctttctataatgtatataggatctc

SEQ ID NO: 11990 - DNA, 402 bp, Oryza sativa
  Intron number 1 from transcript LOC_Os02g07590.1 (locus LO C_Os02g07590) derived from phytozome v7.0 (chr-ID Chr2; po s 3929720 to 3930121)
agcaacagccctgttcctgctccttctgacctttggtgagtctgatcaactacttcctccgtttcatattataagttatttgacttttttcttagttaaacttttttaaaatttaattaagtttgtagaaaaatataataacattttcaatacaaaacaaacaattatcaaaatttaaatgttagttttaatgaaagtaatttgatattatagatgttactagtttttcctataatttgatcaaacctaaagaactttaactaagaaaaaagttaaatgatttataatatgagatggagtattaaacaaagacatttactaacctaatcatgtttcatttgttgagtacttgtcttctgaattttgattaatttatatattatcaggtggtgaggccaagat

SEQ ID NO: 11991 - DNA, 937 bp, Oryza sativa
  Intron number 1 from transcript LOC_Os01g48530.1 (locus LO C_Os01g48530) derived from phytozome v7.0 (chr-ID Chr1; po s 27833181 to 27834117)
gaagcttgatccacagaaccggcagccttaacttggtaagtcaagggatcgatgcatatacatatgctgctaacatagagtatatgcatctatttcgtctttcctgtgtggccattctagagagaattaggcgtttctaatttcttgtggtttttggcatggatcgatcgagcaggaggatgcacgggcgtccacatcctcgctgtcgtcgtccccatcgtctcccttccatgctaccgccgttagctcgtctccgttcccaatccatccaaatcttgcggtacatggacaaacttctctgagttctgcatgtatactaattgtttcaggaagaatttggcatctaaaaaattgagagatagctatcacatatgagcgaaagttttagtgaatttttctttggatgacttgcggtttcatgtactaataactatgtgccacacatgggagaaaattgtttcttcttaatttgttcagtaaaaacaggagattttatttttgggctcaactacataagaagttactagtgcgagaaaattagccctcgttaattttgttttgtttttgttttccctgaaaaacatgtttatgtttgatctttgctgcactgttttcgttagctctacatatacgcgcatgtataatttttcctcttcattatttgttatttgttacttgtccatcatcatgttctctttttgtctgtaaagtttctcaagaaaacgtttcctactatttcaattataagaaccagtatacgtgatgattttttttcaaaaatcatctggttgggtgcttgccgtctactagcagtagtagtcactagctagtactgtatgaattatatatataactaccaatcagtgttccatttccatgcgtgtgaacttcatgctgagaaaaatctcttatgttatgccgactttatcatgtgtag

SEQ ID NO: 11992 - DNA, 733 bp, Oryza sativa
  Intron number 2 from transcript LOC_Os02g25080.1 (locus LO C_Os02g25080) derived from phytozome v7.0 (chr-ID Chr2; po s 14551969 to 14552701)
cttccagctccaccactcccacttctgcctccagagtaagtcatttaacacgagccttcacattcgtcgcttaatatatgtcgaattgcacttgtgagtaagggtaaagtgaatctagtaagaaacgcatccaaaagctgttgcgcaccttaagggaacatagaactagaagaatggtatgcgaaactcaaaagaattgtagcattatttcgagtgaaatgaaattactgcaggtatatatgatagtttggctactactattattagtgaaaatttattcaggtcttcctgaacacagtaaaatgatgtgtagtatgaactttcaacttacaacccataattggttaaattatactgatgggtttatacggaacatagttaattatggaggttgcaggttttaatgccagtgtaatgatgctggtatccaacagttctttgtttacctgagtcctattatctcccacgttggaccatataaattactagttgttacatactaaaacatgaataagttcatgtttttctttacggaacaaaggatatgaacataagtgactagaaatgctttcgttgagcccaggtgactactcactattaagtcaaatttccaacattatcttgttaccttggtcgattgccaatacatagttgagtgatctgattatagaagtaaaagctgaatcttttgctggcaggtttgaacaaaaacgataagattggagacgtggga

SEQ ID NO: 11993 - DNA, 920 bp, Oryza sativa
  Intron number 1 from transcript LOC_Os07g09120.1 (locus LO C_Os07g09120) derived from phytozome v7.0 (chr-ID Chr7; po s 4762894 to 4763813 reverse strand)
aaggtaattcatttgattaaccttattatgtacttatgcccctagtcctatgttgtataaaaatatatactccctctcgttttactcttttcttagtttaactttttatgtttgacaaagattatagaaaaatacagtagtattttcaatacaaaacaaatgttttataagaatatattcaatgttagatttaatgaaattaaactgatattttagatgttgctaatttattttctataatttgatcaaaattaatcaactttgattagaaaaaaatcaaaacgatttataatatgaaatggatgaagtattttctaaaatttcttgtaatattgttttacttaattagataccttgttagatagttattttatcaaaatgttatttaatttatacctataattatgaagataaaccgctatgtaattcactccataatctgtttcttcaaacgaacctcgttggtcccacaaaatcttgctagttaatctttttttaaataagtctgcttttcgtcctcaacaatacaaccagacgtgctgacatggtatttttgtctaagtcagctacaaagtagccttataaagttccagatctgcaagatgcttttctttagtatcctgaacattatgccctcaacattgatatatatagccatatcacaaagataggtattgaggtgttttgtgtcggtttgtatagatggaggtcgttctgtagttggaagatgaaaagtagattgaggcagataattaaggaacataagctggtaaacttattgttattctaaaatattacaaaagctttggacacctggttgcttgttaattgtttatacctttctaatccttaattatacgcttatatatgctcttggttttttggggcctttaatttgcagtgccttgagaacacaaaaa

SEQ ID NO: 11994 - DNA, 918 bp, Oryza sativa
  Intron number 1 from transcript LOC_Os05g46560.2 (locus LO C_Os05g46560) derived from phytozome v7.0 (chr-ID Chr5; po s 26895989 to 26896906)
tgccatctcgcggctgaacaggggaggggatcctggtgagcatccgcatcctctttctgatgatccatctctctcccccgacctacctttgcctggaatttgcctgcgttcgttaaccctagcttctcttctagatctggaagaagctcttctcttaatttcagatccttagccttaatacaattaacagtttgtttgtttgttccccaaaagtttggggttcaactgaattgaaccctcgtgtcccaagttggatccgcccctgcttgtagtagggtgagtagcataagcaagtttagcctgattgataatggaatagcagcatcacacgttttcgctttgattcttttctttcagtgaaactctgatatcatgatcctataactgctaaatgaatcttctgacgaagcgcttggtgatgcctgctaaaagagcagttgttgttgctgctgctgctgttacagtgcaggctttttttttcagctagctagtttagttgtattcccattgttactatgttttggcggatagaacttcagttgctagtatgcaacactgcttacattattctatttaaatttgcagctattgcctcatcttctattatagcaactcatcctataactgctgaatgaattttcagagaaatcacttggtgatagctatttttcctgctattataacaattgttatttttcctgctgttacagtgcagagtttattattctttttgctagctattgtttaggtttactcccattggtactatgctttggtggatagaactccaagtactagttttccacactatttgcatttttttaaaatgttgcagctattgcctcatgttctattattgcaatcatcctaataattgatcatctgtcatttaggttgctgttactgccatattttcac

SEQ ID NO: 11995 - DNA, 673 bp, Oryza sativa
  Intron number 2 from transcript LOC_Os06g45110.1 (locus LO C_Os06g45110) derived from phytozome v7.0 (chr-ID Chr6; po s 27281940 to 27282612 reverse strand)
ggaaaagtttttacaggttggtaaagatatatttgttgcatttgtgctatttaagagtataaatcattcaatggtcatgtcgtttcctttaactgcaaagcaacatcagtttcttttcagcataaatacagacaacaagttgtttcagtggttaatgctctagtattgtttttagatacatattactgaaaaatggcacttaatcaatatgttgctgttctttatgaaagttgtagacttgtagcagtgcttcactattgtattatgaacagcattttaaatttgatagatactgaactaacataataaaatccgtaggtaatgtcttagctagcatcttacaagggtcattatatatcattgagagaaatgctaaggatgatttccattactgcacaagaagtcaaactagtggatatttccttatactagttaacaaaccaactagtatattataccgcaagtccgcaataactaacaagtgtactttacaagttactacaatctacccccagtttcaaaaaaaaaaaatctcccccctcttctctcctgaacctctggaagtatatatatattgtgataatgcctgttgcttttataattcatttaaacctaaaaaatcttaataattttgacttctccaaacagggtcaggagggaagatactccatct

SEQ ID NO: 11996 - DNA, 616 bp, Oryza sativa
  Intron number 1 from transcript LOC_Os06g45110.1 (locus LO C_Os06g45110) derived from phytozome v7.0 (chr-ID Chr6; po s 27283075 to 27283690 reverse strand)
ctcgcattgggcttctggttgctcggatagcttgggtaattcttctccgtgcgtgatttagcttgattttttttggtggttccgattttttacgtgagcctctttttggtaaggattgtggcttaggctgtgtgatttagcgtgggcgtggttggtgcttgtggtggcgaagctgtggattggatcgagttggaaatggcgttctgggttagcgaattggatcgggatgatttggtcgtagtttgactttttccgcgagccgccaccatggacttgagcaacgctgcctgcccctgtggaaatcacctgatttcaacgcgtagatcacctgtttccaaccaattgcaaccgccagcttttgctagattcatcgagcagtttagaaatctccaaagtatgggagctggtagctcgcatcacagctggtcatagctgaatcgcgtactagacgcatcaagatttgtgcaaaaacaatcattggccaaatggaatgttgtttgtgattgtgcggctgaattctgtcccttatctaggagctttcttgattccttgattaatgttgtgcttacttgcaattgcaggaaggtgtcaccttgttagttccctcaaatttcat

SEQ ID NO: 11997 - DNA, 962 bp, Oryza sativa
  Intron number 1 from transcript LOC_Os03g44500.1 (locus LO C_Os03g44500) derived from phytozome v7.0 (chr-ID Chr3; po s 25047811 to 25048772 reverse strand)
cacgccaccctcctcggccggcagtgctgggatccgtacgctttctatctagtatcatatatatgcctaataatttctgcttttttcaaatgtcgattggtcgtgtctcgtggatattaagcgacgctcttgggtgatcatgatggcaacctggagctatttttattcccagtttgcaatttcattttgaaatgaatttggaggcttcaggagttttactgagaaatcatttgctattttgtgggtaattcgggtcggtctatacctcgatggctggaagctcatagctggcttgagcctttaccatcagaggatttaaataggcatagcatcatttcagacaccattttgacttaggaattgcgcttgagctgtttctggaaccgaatatcattggttgaattagtgaagatgggtgctgatggctgattccagatgccatggtcatgggagctgaaatgttcgaactgtttcatatatcagtcgtattgcataattttgaattcttatttttgaacgtatcccctgattcactgggcatgcgctttcatggacctctcatctaaagtttctaactatcttcaatgttatgcttagcaagttggaaggaacatttactgcattctagattttgtgtcatcgtgttgcacattgtatgacagtaggagaaaccttttttttttttgtttttccttttggcaagttaaagtaggtgagcggaacttctaaggcacgactctgatatgaaattgaaggttttcttttttgggagctatattattgctgatgtaatctatttaaagcatatatacaaaactagttgctccattgtgtacaaaattgttttcggttaaaaaaatgttatctggtatacaatgctatttttactctccagttagtcacaaaggtggattattcattgatctctccttggtttataggtcttgccggtgccacagcag

SEQ ID NO: 11998 - DNA, 747 bp, Oryza sativa
  Intron number 2 from transcript LOC_Os07g06820.1 (locus LO C_Os07g06820) derived from phytozome v7.0 (chr-ID Chr7; po s 3324784 to 3325530)
acacagagaaggctgatcgtgctacagtagaacaggtatacacattttcttagtaggttgtatccatttcactcttgtgcttcttaaatttactatgtgctgcctgcacttctgcccccttttgtgtttaatagcaaactaaaaaagcatccatctctgttcatccgagtttgctcttattatgtgtacaccaactccgtgtgttatatattatataatgccttgtttagctgtaccgcatggacaataatttggactgtatcattcaagaaaatcgctctagtgcaattgactgctttggtaggaagttcctaagatgtattttttttatggcctgttgtgttcacaaggttggtaggcagtagtttttaatataagcttgaacaacactgacttaatgcctagtgcatttgctataatgttgttaactagcatattatctcatattttcatttctcctttatatgtcatccattaatacttataatctttgtgtgcttgatatccataagaatgctctcttagccatgtgattttcttatttttgaggttatgattcaatgaaattttcagtggttatagctgcagcatctatctcttgtatcctatctagagaaagttatgatcttctagaaaagtgataacatgttttgacttatatgattgatgatatttttgtgaaatgatttttgacaactagacgggattttgtttgttcacatgcaggctattgatccaagaacacgc

SEQ ID NO: 11999 - DNA, 688 bp, Oryza sativa
  Intron number 1 from transcript LOC_Os06g28960.1 (locus LO C_Os06g28960) derived from phytozome v7.0 (chr-ID Chr6; po s 16506039 to 16506726 reverse strand)
gcttcgccgatctggccaggcacgtgcggagcccggtgaggagggaggaagatggggacggcctccgccactagctctctccctgccagccaccgtcggtcgccgagctctccgctgacccgcagtcgctccgacccccgcccgtcggagccaccgctccagcgcctccagtgcccaccctcccgtcgctgctgccattgcctcttgcagaaggccgaagcggagagagagaaggggaagagagggaggaagaagagagcgaggatgacatgtagggctcacatgtcagtgggccccataattttgtttgtgtgaatgaaaaatgggtcccatatatatgtttttaactctagtgccacctaagcgcgacgtcaatgccgcagattggtcaacacagccatgtagacgctatgacaacaaaaccgcccactaaaaccactgagggaatcaaattgcaacggtttcaatagttcgggggttgagatatccggttttgtggtttaggtcatggattagactctgatcacttttaagggagtcaaagtgaacttattcctttttattttgcttccctccgatgttgcgcggttgattttcgtacctcaatcgtaaaatctccgtcaactcaaccctaatttttatgtaaaattagtctgatattcatccttaactgcagctagcgctctcc

SEQ ID NO: 12000 - DNA, 806 bp, Oryza sativa
  Intron number 4 from transcript LOC_Os05g26914.1 (locus LO C_Os05g26914) derived from phytozome v7.0 (chr-ID Chr5; po s 15570807 to 15571612 reverse strand)
ctagtaaatctgaaatcaagagtggtaggtgtggttttatttgtcagtttagggcatgcagtgattggtgctccgtacaatcgtaggagtattacccagctttgcttcttctctagtttgagcctggttgtaggtttgtaggtaccctataatttaccaaacaaaccagactgctttcatgtggctattagtcgtagattactagttttaaatcatactgttcacgtgtgaaacaaaatatatgtacaacagaaactgttaagcttcccagggaagatatgaaatatataactagtctttttcaaacttggccatagtgagctttatggcccacttgtttgttctcgaaagctttactattcctactagtaactcaaatatttgctatttcatctaatttgaaggctatctcagcaaaaccccttgaactattctaagacaagcctatgctgtcttcagtatcattttctgcaactgatcatcttgcgttctagactcgatactgtttatatttctgaaaatctattgttggcaacttctcattgatgcattgtttgtatggccctcaatccctgccctccacgtgtgtgggcagaaattttgaacaaaaatcccaacccacacccgtagataatctaggatttgtcctatccaaataatgcctaaggggatattatgttagaaatccttcagagtcaattttgatcaaaatatgtgtagtagtttaatgttgctttctattgtagttctaaaatggtccttcttttccagcctataggaagcttgctaggagctaccatcctgat

SEQ ID NO: 12001 - DNA, 959 bp, Oryza sativa
  Intron number 1 from transcript LOC_Os05g04830.1 (locus LO C_Os05g04830) derived from phytozome v7.0 (chr-ID Chr5; po s 2326568 to 2327526)
ctccgccgccgccgcctgctccctccccagtcccggtacgtcctctctccaacaaagtattttctacgcctataagtatctgatttaaatagttttataaacaatttaaaaaatttaataagatagaattatgataatacaagacactatataaactgtagacataaattcaatctacacaagaagatttaaatagttttacatgttttctgtagacttatctcacttcaattgatgttactttttttttgaaaagaaattctataactatctgagttatatatgtaaaaataacggatgccacatggtatatctaggtatagcttgcaccaccatgcacgtccatgcatggcgtcaactccaaacaaacaaaaaatctacatacacatgcatatctcgatgatcaccctgcatgccttgccggacatggcatggccagctcgacggcgacgacgagcctcgagtagctagtcttcgtctggtcaagtagggcaccggatggatcgatttcatccatagactaatcccaattcaggagtaatcgatctcttggttactgtcacaatcaaattaattactcgatcgattagcttaactaattaaccaaccaaccagaggcagtaatatataagcgtccgtcgccatcgccgtcgtcgtccggctaataatctctccgtgccgcttcttctccggcgagcctgcctcctccacgttgttacctccgctgccgtccgatgcatccatccatccatcgccatccaaccacccgtatcactgctcatcatcacgagagcatatgtagtaattaacgacctgaaaacaacctgggaaattaaattaattgattgattattattaaacggatcaattaattagcacttgaaatttagttatttgattgtttaattagctgctgataattagtaatatttgtgtggtgattatattaacaggagcgg

SEQ ID NO: 12002 - DNA, 575 bp, Oryza sativa
  Intron number 2 from transcript LOC_Os05g03190.1 (locus LO C_Os05g03190) derived from phytozome v7.0 (chr-ID Chr5; po s 1292102 to 1292676)
tgttcagccctgaatccaaggagaagaaggaggaggtaaatgattcttggggttcgtttgaataggcccttttgtttcgaatttagaaagttcaatctggattcgatcaggatttgtagttttccgtctgaattgcaaacaattctgtttttcagtgaggtctcaattgtgttgtgataaaagtttcaattttttcttgttccaattagcgatgagcacattggttctagttttggacctggttgatatcaaaatctcacttttattgttactgctttaagggaggcgctcttttggtgaccattgcacataatttcaaaatcccaaggaattttcacccatgtcatggtttcaattggcattctttaattgccattcagtaatttgagaagaatacataacatatttcctcttgaaattgattgtcttcactgatttatatgaccaaattatcatattatcttccgcaattactatgtcttactccaatttgagctgaactgcaaccacaactcaaactttgtccattgaaatgaacagagactgaggagaaaattagcagctagtaacccgaa

SEQ ID NO: 12003 - DNA, 981 bp, Oryza sativa
  Intron number 3 from transcript LOC_Os05g03190.1 (locus LO C_Os05g03190) derived from phytozome v7.0 (chr-ID Chr5; po s 1292895 to 1293875)
caatcaagatccagaccgccttccgaggttacctggtaatgtgaaatagctcttgaattcagctatctgattgcattttcattacattttactcagttgtctgagaattcgtcgtggctatttatttcatcagctgctttcatttaccactgtgttggtgcaaatattacaaaggtggttgtgttgagttttttatttatgctggctgctgattaggtcattgcaatttgaggttagacgctaaaagaacagttcttgtatagttttgtgattttgtctcctcatcaacatgactgcacatgaaagcaaatgtctgctggtggccaactggccatcctgagattttttttctcttttcctgtagaaattttaggtattggcagctcaccaatcaatcaaccggtagttggctggttgctgttaatttgaagtgagactcttgattgaagtatcttaggtatttacagttcctgtattcttttcataatgttgtgtggtaaaaacaagcttctatgattcaggggtaaacttttcttgtgtgacctgtgcacctggggtaacttcaaacttatagtttggttcctctcctttgaagtagtcgttttgttgtttatttgtttctgcatatgtttgttgacatgatctacgaaaaaatcttggcaagtattagaaattagttcttgatcaactggcagttggtggaagccacctttcattactaattttgattcttaatcattttttgatgttgatggatttgttggtcaggcttattgatgccccttgtcccttcatacaaagataacatttcttgaagtcgacttagcagcagtatattctcttccttggaaaacatgatagcaaattttaaaacttgacctagcgagaagtaaaaattttgttacttctataatatattgaccatttcatcgctgcaataatgcaggcaaggagggcattacgagctctgcggggacttgt

SEQ ID NO: 12004 - DNA, 695 bp, Oryza sativa
  Intron number 2 from transcript LOC_Os05g32270.2 (locus LO C_Os05g32270) derived from phytozome v7.0 (chr-ID Chr5; po s 18751129 to 18751823)
aatactggggagctgggacacaaataaactttcctgtgagtcatctatacttgctaattataattggtttcttagcttccatttagttcttctacaattattaaccacacactgccttttcttcaagaccttcatttggttaaatttaatcatttatattttgcatcacctgagctcaatttcgaagactgattctcttaagatgcaaattgaaaaccaaaagatatcttagagagtgttgtaccaaactttggatcatactagtccaaacatatcctatgcaactattgtgtgatgtttgaaaaatctgaatactcttgactattatattatgttcttttgtatgcaaaggttagggatttattcagtttacacttgacgattcggagatggatgtttgtgtccttgacaaaaaaaatctcttgttttcagaaaattcatctctgagcatataagcgacattgaaaaatcattgtctcagaagaatattggcaaaacaaacatatgcatacatgccatctcttcagtttggtatctatatgcctatacatctcgatggaaaataattgcgatgttgcttatgaattattgtactatgttttttccattctatattttgcactagttaatttgatttgtggtaatctttttcaggcttatgttcattatgtatttgcttatttaggtctctgatt

SEQ ID NO: 12005 - DNA, 993 bp, Oryza sativa
  Intron number 1 from transcript LOC_Os05g48450.6 (locus LO C_Os05g48450) derived from phytozome v7.0 (chr-ID Chr5; po s 27716402 to 27717394)
cctccttctagcttccaccgcatcgtcgctcgccggtgagcatccctccctacccacacctcatcaggtattctgctttatccctcaaaaagtttgggggttcaaccgaaacagggttagatctgcctctgcccagctccacctactttcaagttgttaattttgatttccgtttttagcatatgtaatttggttactgaatctcatccaaacacccttatagaacgaaaaatgtaagctcacataatttgtactcatccaaactcacgtaaatttctttaagaagaatctagaccacaaactacccatagtcacacaaaatatctttttatcaacttatattcttataagtaatttttattccacaaaatttctaaaggacatactgtgacacttggcattaatctaatttaacttttttttctttgtcaggttataaattttctaagacatttgtgccacttggcatgaatctaatttaacattctttctttatcaggttataaattgaaaccattgaacgtactttgtcttcccgtccctaaaacattgtgatatatctataatattttaatatttttaattttaaaaataatttaaactaataatatagatatttaaattaggtaattaataaattcaaatcaactatagtttagaataaaaaataaaatgatatatgccaagtacaatctaataacaatagaatgttagaaacaatatgaattcaatatttttataaattttaagtacgattcatatataaaactaaagaaaaatatagatttatatataagtgagaacataataaaatgtaaggtaaaattattaaaggaaaaatattattaataaacaatgatgttgatgtatttctaaatattttcacgtattatttattaagtgtcaatgattgaaatggatgatttaccccagccactgccatttgaggcccacacagcgttggccccaccagtcggtctcacatcggctaca

SEQ ID NO: 12006 - DNA, 880 bp, Oryza sativa
  Intron number 2 from transcript LOC_Os03g55110.1 (locus LO C_Os03g55110) derived from phytozome v7.0 (chr-ID Chr3; po s 31348019 to 31348898)
aaaagctgagatcatctccatcctgctcgatcaaggtatggggatattaccctttgctttttgtgtaagatgtgctatctgtactgcaagttctactgtttgttagggacattaaatgatttttggggaattatataggacagcttgatattttcacatgagagtggtttgtgttaagtgcagtagtagcctagttgggcttaattgcgagcagcatgctctctgagactggagaatttgttattgctcactgaaaaatgttccttctcaacgatgatctagctgatctcagatatattagatgtactactattgctaggcgaaataggggttcatgaattctgtaattcctttggtcctgctgaacatcctttgcagttgataaaagccaataatcagggtgtctaattggctgtgttggaacggtgtgcatctgtccgccataatgaacactattgttcaatgacaatatttttcactataagcttaaagtactaaattctaatcaatgtttgtgttggggagagactagagttcattgattgggcggtgcttaatttgctcagggtcaaaacttgccatggataccaaagcaggttactaatgccgcgctagtgtgcatatactgcaagaatatttagagctgacatgcataactagagaaggattgttttatagaggaattttgacatttctatttttgaatattattgttctttgtgaaattgcctcagttgccatgtagtagatatgtctttagtagcaagcattacagtggcatctttgcttttcttctgtttaacatttaaatagtcttatatttattatttgtatgttcttgctgactggtgtaatgataaatttgcaatgtcaggtgcta

SEQ ID NO: 12007 - DNA, 722 bp, Oryza sativa
  Intron number 2 from transcript LOC_Os04g47550.2 (locus LO C_Os04g47550) derived from phytozome v7.0 (chr-ID Chr4; po s 28012726 to 28013447)
atccggtgagggtttctccaaaccgcccgctacaggtaacgctgcctaaacttgcccttagtctcaacccctggatacaaagcatgcgcttctttacctttgaaagttcaagaaatacagtgaataagataaggcagatttatttgtttcgcttttggtacaaagatgtgatttttaaaagaaactaacagggtataacaggaatgcctattttctactgtgatttttcgctcagttgcatcacgtgaataggattacagtaaacgtgttctcaatcagtatttgatctttgcgtttagtcgtctctccggatctgaaagatttggccttcacctggtaatcatttcgatgcattcatttccctatccaggaggtttttgaaccttgatccacttcaatctccaagcaacagtctaaatttagcttcaaattttgggttacctgtatctttttttctttcatgaaatggaattatttccaagcttgtggtggcgtctgtattgggtttctttctccaagttatattaagtttggcttccaaagaagaacttatatttgctttactacaaaaaaatcatcggaaaagggctcttctgttgtacaccgatttatttatttgatgcatgtatataaattgctctctaatgcattataaagcaaatagcaattgatgtttacaatgatcagatccttgttcaagtggccattggtcagacctccca

SEQ ID NO: 12008 - DNA, 443 bp, Oryza sativa
  Intron number 2 from transcript LOC_Os05g39510.1 (locus LO C_Os05g39510) derived from phytozome v7.0 (chr-ID Chr5; po s 23122521 to 23122963 reverse strand)
ggaggtaaaggtaccactaaaaatcaaagtatttatgtggtttcttcaaaaaaaaaagtaatcttgacgaaagataacctcgtaaagagaaaacggaggggaaacaagcaatgttgttttttaatgcacaagagaccatctaatatattttatttgactgtcatgttgcacgttttgctcggcgatgtgtcttctttgccttcaatatcccccctccccacaatgcaaaagatatttttggtaactggctaaggggagtgcctagacccataaaaagattgattttatttggagctagtgctctatgttggttaatttggcgatgccgtaatgatatagtttttaaccataaaagaatgcctaacattatgcatgttatcttcatgtgtttcaattggctccactcttggtgtatgatgctttcacaggaacaacagaatact

SEQ ID NO: 12009 - DNA, 679 bp, Oryza sativa
  Intron number 3 from transcript LOC_Os05g47970.1 (locus LO C_Os05g47970) derived from phytozome v7.0 (chr-ID Chr5; po s 27445410 to 27446088 reverse strand)
ccgccattggcgagacgacggtccacgtcaggcaggtctgtcacttttgcttctgttttctgtcgtttaagagcttatgttttgatggttgatacgatttactgtgttatggtactataatggtttggggcgcatcagaatttagccgtttctccgattcaaaaacactacccacaattgtattgtgatattatcgaattattattaggctatgaattcatatgttcttcgtatactacctttcgcctgtattcaagcatggtaacttcatcattttccgttagcatattttccgaactggtaagcagtgtgtgttttgcaaaaactttttgcatacaaatttattctaaaaaacaaataaacccaatttttgagtttataataattaattcttaattaatcatgcactaatgacttatattgttgtgcatgccacggagttgccacacccaatagccggaaggagcacaaccctctagattatatcccatctagtactggttgctatatcttgagacggaggtagtatatgattacagtcacagatgggctcatttaatgtgtattatttagttatccaacttgaaaggtagaagtatgctgtagcgaaataggatctaccagtaaggcagtaattagttctttgtttttgattgttttatcagtctaatcagaaagc

SEQ ID NO: 12010 - DNA, 695 bp, Oryza sativa
  Intron number 1 from transcript LOC_Os06g04580.1 (locus LO C_Os06g04580) derived from phytozome v7.0 (chr-ID Chr6; po s 1989268 to 1989962)
agccgacgaggccgcccgaagactccgacaagaaggtttacctccctttgcagtggcgtgctcgtccgattcttctcttgtgattttgcgttgaggggtgggggtgctactagggttttgggtggcacaccagtagctatgctcggtgcctcgggtgaatcaaaggaagtagacatcacgcccattcgttagtaagcagtgaacatcttatgaatgttcaattgtgcaatcgagtaaatgactaggatacgattcaatccaagacttatctaaccgattagctaagctgcatcggactctgctgtttgtcatttttagagttagaattgagaaacagtggaccagaatatctattgtttaactgattactagcttgtggtttatatacattcctttgcatcatcataccatgtcttattcttcacaccaattaattgcttagtcgtctagtatatgatatcaaacatacagtcaccttcttgaagtatgaaaacaaggaaataaataagcatccaacaaacttcaccctctgtttttttgggaagcctaagtgaatcatccagggtgattttgttacaccatatgcttcattttagttagttggtatactttatggattaataataagctttaatcaattttttacttgacatggtgttttactgattttttctcacagaataaaaaactcaagg

SEQ ID NO: 12011 - DNA, 435 bp, Oryza sativa
  Intron number 2 from transcript LOC_Os03g49620.3 (locus LO C_Os03g49620) derived from phytozome v7.0 (chr-ID Chr3; po s 28250961 to 28251395 reverse strand)
ttgtgcaagtgtaagtttattttgttgatgttttgcttcacttttattttctctccattttgagttaattctatatttacgtatctcttaaacttatatggcataatagttcttgatttatgttccacattcattaccagtgagctccagaagcatctgtttgagcacatgattatgatttttttgatgcacttgcacatgctatctgcacttctttgatgcacgagcacatttcataattgaactatatgaaaatggaaaaatcatacaacatgctgtttctttaaatcttcttcacaccatctgttatttctggcaaaacaacatctagatggttctgttgaccccgttatgcatgttccatatctaggttttttgtttgttccaagttggtgtgcctgatgacagatgccctcctgcagaacattggcatct

SEQ ID NO: 12012 - DNA, 971 bp, Oryza sativa
  Intron number 2 from transcript LOC_Os03g50880.1 (locus LO C_Os03g50880) derived from phytozome v7.0 (chr-ID Chr3; po s 29062804 to 29063774 reverse strand)
ccaggtaaagggaacttactcattgcattaccactaaatgagcctttctctcaaaagtatgataactctgccaatagaccattttattgttcttgccatgttcctcgtaaagaccgttttatcttcagtgagtttatttagaaatgacttaattgggtatctttgacttcttcagttataatccttggtaacacctttatttagtgtttgaaccatgcaaatgattaacaaaacgagaatatcctgtttgatgtttcataaaatccaaagtgcttgatggataattgtagcttcacagagaaatatatctaattggcttttctagcagaataaaccattgtctttgttgattaatcacatcaacaaacaaaggacacgttgtaaatcaatttgtagtatggcatagcatacatcaatcttagttctatggcgcatcaaacaaactcggtttcatggaaatcagaaaacaactctagaccatgctaaaaggataaattactgactgaatgatacgaacctggagtttattcctcaagcaaatattcatctataatttccaagtcagttctataactttaatacatgtcctaattaagttccttttgagcggtcagaaaccaagtgtattatctttattgctaatgcaggtcttttgcatttcattacttctttctaataaattagaatggaaaaatttaggattccagattcagaacggaagatattgtagaagaaaataaaaataaattaggattgaagatcttgacctgcctaaatcaacagaaactaaggatcacaaacctgccatcaattaataatgttatatgtgaatgtaaaaatgatatccgacttgcaaaatatgcaaaaagaaactcattagaatctaaatgaataggctgttacatattagcataataaatgacttcagctggattgcagtgaacattatagaatttctctgtttgcagtac

SEQ ID NO: 12013 - DNA, 842 bp, Oryza sativa
  Intron number 1 from transcript LOC_Os05g14750.1 (locus LO C_Os05g14750) derived from phytozome v7.0 (chr-ID Chr5; po s 8378966 to 8379807)
tgttgtctgaagcccttatcaagatttgattccaggtttgtatttccctatctgatcttcaagttgttttcttctgataatgaggttccccatgctgtggtaccggttttatttgatgttgatagccatagcctttcagaatttcctccataatgagtagtcttagcgcaatgcaatttcaacatcccttacaggattcaccatagtgcaaatgacctaaaagtttcgaaattatgagtttaatacatttaaagttgtaaaagcttgctaaatgttcagtttcaaattcattttagatttcaataaacaaagaataagcacaatcaacctaaactgttcatcaagtggctagcaacttgtcaaggaggcctgagagtagcagaacattttttttcatttctttttgataaatgaagctttcttaatctcagacaatttcatcccggtgataaaattatactaagactactcctaatttaagtttttccttttttttaaaaaaaatagattagattaaatccggcctctgcacctttgtggggtatatacagccaaacaaagtcacgagtacgtaagattttgccattacatgggaaaaaaaactaagtttaacagatccggaaagaagaacaaaagattaagcttcgattcttcttctaaaattccaaccaaaagtagagtaaaactccaagactcgttttcttcttcagttttacctgcattgtaatttttttttcattttccagtttttacactttcactcaaattacctatcaaattttgacattctgccctgtgaagtttcagattacctagaaactcaagctttcaataaactaaca

SEQ ID NO: 12014 - DNA, 441 bp, Oryza sativa
  Intron number 1 from transcript LOC_Os04g42634.1 (locus LO C_Os04g42634) derived from phytozome v7.0 (chr-ID Chr4; po s 25043197 to 25043637 reverse strand)
cgaaggtgaccgtaaggtggggctaaccaatttattggttgcttcttagaaaagccaattgttctgctaaaatagaaaagaaaaacaaagtgcttcaaagttttcctattacttgcggtgtacattcatccaaaaaattatacagcttggaacacattcctaggtgtgccattcatttggtacatagctaataaagcattggagaatgttactactctggattattcacactatccttatgtagatgtacattcaaaataagaaaatggaaggacatccaaaaaagggcaaagatataaagaattataatattgtaattatgcatgtggaccacagatgcatgcttgtcatgaggtacgttgttttttccctctagttggtgggacaaatgtctttgtaaatacaggcatctgttagaggacgtgtattgcaacaaacagc

SEQ ID NO: 12015 - DNA, 585 bp, Oryza sativa
  Intron number 2 from transcript LOC_Os04g36070.1 (locus LO C_Os04g36070) derived from phytozome v7.0 (chr-ID Chr4; po s 21854145 to 21854729 reverse strand)
gagttcctcggcctcaaggaagaaggcaaggtaaaaaaaaaaaaaaaagtctctgctaatcataccacttaaaccaacgccattaccgtccataatcgccgccgatgccctgctgctgctgcaagcctgcaagaaacgaggatcagatcattaacaaatggcgacgccatttttgttttcctcctctcgccggcggcgctgcaccgccggccgtacgccggccgtacggcgcgcgtgcgcgcgtgagggtttctgttcctcctcgtctccgccttttgggagcaaaaggtggcctcttttcatgggggagagagacatgcagaggaagaagaaaaaaaatactactaaaaaagagagaaaaactcgccgtcttacagcagcctgacagagctgtctggtgtcttgatgacaccaagcttgggttaatgggattggttaatggcatgggtttgattcttggtgtgccctgtgagctcaacacaggagtggtagtgacacggctgggtgtaattacagctaaccaggatgtgattggatggctaaataaactctttttaatatcatgtgcaggagcaggccatcgac

SEQ ID NO: 12016 - DNA, 993 bp, Oryza sativa
  Intron number 4 from transcript LOC_Os06g13640.1 (locus LO C_Os06g13640) derived from phytozome v7.0 (chr-ID Chr6; po s 7555729 to 7556721 reverse strand)
agactcggaagagtaagaattctttttttttttacttaaactataattttaagaaaaatgtttagtagcatgcaagtataaaccatgcttgtttggaggtggaactggtgtgcgtctttgggaacaaagggaaataatctgttgctgattgaaagcactatgtggttggcacatactgatacctcttaaatatgtgcttatcttcaattatgatctgcattggaggcaactcacatatatctaacttattcaacccttgcaagtaagcagcttcccagttgtgacctaaccatttcttttccagtggtgcaagaaaaactgatttgcacgaattcaaaagaactattgcttgatctatgtgggagattttctttacatcttacttggttggtcagcatagttctagaaaatagccaccagaagttttgatcccctttaaatgtgatgtttacactaaatagattagcaagaagcaaacacatgatatgaagtattggttaattaagttgcacaaaaacagtgactgctatcggcagacatcattagcagagttggaggatggaaccggatttttgaaatctgatcatgggagctgtggattcgcttgctagtgatgacataagtggtgctccgcgttgccaagatgcagcttgctttgcagggagacccgggaagggatagtagtaatacacttttagttagtaatatgcttttcagctaaacatggtaatgcaagtcgtgactgagttttgtgttccctaactgatttttttttcttattatcatcttgcactcagtaaattcatcaggttcaccatagtaaagtatcacccaaatatgaagtgaaccaggccttgtaaaattaaatttactctgtagatggtctgagttctgtcttccatattaatttggtattaatgaagttgacttaagttaattttgtttacaaaacatgcagcaaaggagctcaatagtgaaatattgaaacttcag

SEQ ID NO: 12017 - DNA, 521 bp, Oryza sativa
  Intron number 1 from transcript LOC_Os04g44980.1 (locus LO C_Os04g44980) derived from phytozome v7.0 (chr-ID Chr4; po s 26428128 to 26428648 reverse strand)
gaagaaaccatcttcagttccacgcacacaaggtatgtagcagcatactagcattagcagcatattagcatgcgccgtatctgatatctgtcattctgtaaggggttatttcggtagaatccgaactttctgataggatcgaaaacgcaatcactcgtttttcattcaaattaaaaaaactgaatctttagatatttaacaaaatttatccagattttatcttctttttattggtttatcaacggattttacaaaattcaatgataccactcatgaagtcatgagtggattttgatccggtataaggattgtgaatccactgagagattaattagacccttgccgtacgtgtaggactaggacatcttactagaatctgagctccactttctataattttgagtaatggccattggccgctaagcgagaatgcatactgatatatacgtactagtatttgcaattcagtttggttgccgatgctaggattgctgtagtcaccggcgggaacaaggggatcg

SEQ ID NO: 12018 - DNA, 580 bp, Oryza sativa
  Intron number 2 from transcript LOC_Os05g33010.1 (locus LO C_Os05g33010) derived from phytozome v7.0 (chr-ID Chr5; po s 19291856 to 19292435)
aggtaattgtgctaactaaatgtgtattttgtgcaagtggacgtgagttgctggcagtactactccatccatttcatattaagacgttttagcttttttcttagtcttcatattaagacgttttagcttttttcttagttaaactttttttaagtttaaccaagtttgtagaaaacacatggtgatatcttcgacatacaatcaaaatatactcaatcttaagatttaatgagactaatttgatgttgtagatgttgctatatttttcaataaacttgatcaaacttaaaaaaagtttggcttaggaaaaagtcaaagcaacttataatatgaaactgagagagtaaaggtaaaggtaaacatcatggaacgatcacaaccgacagcgttcgtgtggtctttgattgtctctgaaaatgttaccttttgaaatttttagtgtacagctggatgagtgccagattgatcttcctaatgcatattattttttttgatggttaaacttttccccctgctatttataagccgttgttattacattgatctgtttgttgtacagatattatctggtaaccaagga

SEQ ID NO: 12019 - DNA, 669 bp, Oryza sativa
  Intron number 2 from transcript LOC_Os07g05590.1 (locus LO C_Os07g05590) derived from phytozome v7.0 (chr-ID Chr7; po s 2622554 to 2623222 reverse strand)
cgtcgatttagggacaaaattatccaaacctggaggtaacaagttttttttttcactattcaaattaagatgaaaattgagggtgacacttaatttgcacgtttacttcaagcaaatgtttatatatatgtaactaccccatctacacattatatatagttacttataatatgtgtttacgtcacttataaacattgttacatttacttttaaagaattatatatatatatatatatatatatatatatatatatatatatatatatatatatatatatataagatgaatacaatgaaaaaagacaatactagtaactattcaaatggagttgaaaaaaacaatgcaagcatcatctacacctgatcatcgacatgaaaggaacggccgtgaaacaggaaactaacatgactatagaattaacatactttagagcaacttgcatgttttgtgttctgaggaagaattaagtagtcactcgaattgttaattaatttttctagtaataaatagaaattaatccggtatgtagacaactaaagtttaaggaaaaaaatttaaattccagtcctcacaactgagaaaaattacagataatttatttagagtgtatatgcacttgtactagtaattaatttgcgtctgtcttttttttttttgaattgaaggc

SEQ ID NO: 12020 - DNA, 683 bp, Oryza sativa
  Intron number 1 from transcript LOC_Os07g05590.1 (locus LO C_Os07g05590) derived from phytozome v7.0 (chr-ID Chr7; po s 2623281 to 2623963 reverse strand)
aaagagtggtggcgggtatatcgaactcaaaaggagtggcgtcttttatttttcgtttttaagggggaatcggatctatatcgaacttttttttccgtttttgagagggaatcggataggagtcgaacttttttttattatttttttcgctttttttttctttcatccgtttttttgatcggacaattatttttgggaatcagacaaattcattttttccccgatttttcttttaccgcgtcatatttggtttttcttttcttttttcgcacgttttcttccgcccggtttttttggatcggacaattttagtttttttcgccggtcttttctcgcccctttttctggataggacagatttgcagatttagtttttctttttttcgcacgttttcttttgcccggtttttttatcggacaattttggttttttttcgccggtttttttgcctcttttttctggacgttttctttcgctcagttttttagatcggataaatttggtttttttcgcccgatttttttgacggacaatggaagcacctcttatgttttaagtagtagagatagagatatgttaattttgattaatccagatcgaattaattaacatatttaaatatatgtaatgcatgccacgtactgcagattattggacggtttggattatcatcagcacagaa

SEQ ID NO: 12021 - DNA, 428 bp, Oryza sativa
  Intron number 4 from transcript LOC_Os04g31971.1 (locus LO C_Os04g31971) derived from phytozome v7.0 (chr-ID Chr4; po s 18978255 to 18978682)
catctggaaacctaggatctcacctacaaaaataggtaatttttgccaactgcttgacattaattggaatatcccctttgtatataccagtgatcaattttggagctccagacaatgaaaccatgccttaatatccctgaaagagtgcattaggtgaatccagtgattatcctggaagtcatgagcatggattctgatgcttcctatttctcctccgataatttcaattaaagacgtgttttctctagcattttgaatattgcagtatgccaatgacttagttactaatgatgtagtgcataaattttatggcaagttctgttatttcttttcaattggaagtaatttgcttgaaaagtggttaaaggagaaaatttctaatgcactgtttggtttctcaggaatccaggagttggagccattcgaac

SEQ ID NO: 12022 - DNA, 656 bp, Oryza sativa
  Intron number 2 from transcript LOC_Os07g07950.2 (locus LO C_Os07g07950) derived from phytozome v7.0 (chr-ID Chr7; po s 3994255 to 3994910 reverse strand)
ctgattctgaaaccacaacccaaggtatgattaatgccccctttttggtgttcaaagatgagtaattgcatgttgcagcctccctctatgcaagatttaatttctgatgcatttatttgggattaaaagtactgtacccacaaatggaaaatctccccctttaccctttgcttgctggctgccctggtgtggtttgggcaagctgtttatctgatccaaagaaagctgatttgcttgtgactcctctcctactttgtttgtttgttttgttctgcggttatcatctccttatccgatctttcaagtccaagatcgaggtgttgattctcaaagttagatgagcaaactaattgacctgtcacaatcagacgcctttttatccttcgttgatatccgctaagcttacgtatcagtttccagttttgatttgttcatgcacaagtcctcaaaaggtcacagccaaccaaatcaagaatctttttgccacacacacaaactgcagcaaattttgtttacctgcatttgtttgcacgtttaatgtgaaaatgagttcatcgaaaagatcagagggaggcagctttttctttgttgcgtttgctgcttttgtttggttctttgctgagctgagctgaggttgccgtgtgatccaggtaggg

SEQ ID NO: 12023 - DNA, 621 bp, Oryza sativa
  Intron number 2 from transcript LOC_Os04g34710.1 (locus LO C_Os04g34710) derived from phytozome v7.0 (chr-ID Chr4; po s 20844129 to 20844749)
atattggtggtatgtagaaggcaagaaagctgttctgtaataatacttatgtttttaatagtacttgtgtttttttcaatgcatatgctgtatttatttttagaaaattacttttgagcagttaatcactcttttaatttcatgtttgatctgatggtcgagagaagccggggtaggtactaggtaagatcatttagtgtttttacttcaagcgtatcataaactctgctcatatacatatttttctatgtggtacttgcttaaaggggttgtgttaattaaggacaatttggtgagacggaattggaacgacagcttgaggtgttgcttttgtatgaataatgagtctattcaacatctctttatagattgtcattatgtaaaattcatatggagagcagttcagttttcttttggttttaaccttccaattagtatatctcatatttttgataggtggcttttgggggttgacaagaaaaagagtaaactgatacttgtcggagctttggccatttgttgggctctatggttgagtagaaatgatatggtttttgataaatcactatatatttcctatatgcaggtaattttcagggcaactcattggcttcggtttta

SEQ ID NO: 12024 - DNA, 1031 bp, Oryza sativa
  Intron number 1 from transcript LOC_Os05g36110.4 (locus LO C_Os05g36110) derived from phytozome v7.0 (chr-ID Chr5; po s 21348053 to 21349083)
cgcggcccacctcgccggcgaactccacccgcaaggtctagatcggtcttacccttccttctgccctcttaccccttccttcctcccggacggattaaagtattaaaccctaatggttgcttggatctggccgccgcgcgcctgtgctcctgctgcgttttgatttttgatgtccagtcttctgctacttagctgtttggattggaccgttgacctggccctcgcgttctgtggcttgatgggatgaacatggcacataatgcgttgatgcgcgtgttttatgcatggatttttatgtgcttcaaaacacttcctgatgatgatgatgatgcttacatagatttcgacatagtattggataaaatgtaaattctgactgttgtaaaaattaggtacgaaacacaaacaagaggatttaaattctcgagtgttgatgttggatagtttgtacattagtgtgtaggagaggagtgccctcttgccgtggacacatggatttaaagtttagatgattcttgggctaacggatcatctgggttgctgtattgacctatagttattactgcttctacacatttgggaattgtctactttagagcatgccttaaacactttctttttgtcataagcagggattgcgtatactaacagacctaaaatcttatgatggaatatgtgtctgacagtacgaatttgacaaatggcactaaatttgcccctacacgttggtccctgagtcaaactattattctaatgttgacacttctgaaaaatcacatttgagaattattacttgtttagttttgtatgcagtctgatcatgttttccatctttgaagggttatttcttatttgataaatattagattctgttgacttcactgggcaaattagacaacctggatccagaattattgtgttaacaaattttctgttttcacccaaatgagttatacttctcctgtccatgcatgtgctaaattatcttcaaaatagtagttctgtgcttaaccttgtatgattaaacaggc

SEQ ID NO: 12025 - DNA, 735 bp, Oryza sativa
  Intron number 1 from transcript LOC_Os06g20270.1 (locus LO C_Os06g20270) derived from phytozome v7.0 (chr-ID Chr6; po s 11629460 to 11630194 reverse strand)
ctgctctcaactctacggcaaagacgtatcttaaggtatttgtaattacttttgtataattactatcgatttaccatacatgacccctgttagatccaatagccatgtagatgaataaacataagcaccaaatagtttttatagaaaacaagctaattaaaaaccatagaaaaatagggaatatttttttaaggaaaaaatagatcataattatgacactgatgaaattatcgttgccaacataatcactcccatcttcatgcgccacccatcccatgtgttcatagccactagttagattagtactcctaggaatgtttatgttcgtaggcaacataatcactcccatcttcctgcgccacccatcccatgtgtaataaaaatacaatatagcatagttaggtgaaagagaaattatattcatattaacttaatactcctgggaatggtccggagctgcctattgctttattttttaggtttccggttcgctgaacaacattcaatttgatttacctatggagattgtagaaaaattaaccagtttgcaaatgaagtaactgaaatgaggagtggatttgacaacatcttaatggtccaagaactccaaatgcaacagattgctgtattctcttttgcttttttcataatagttcaacatatttttatataactatgtacaatgtattttttgcttcaggatttaactgacagtgtttcacgatatccacgcaa

SEQ ID NO: 12026 - DNA, 698 bp, Oryza sativa
  Intron number 3 from transcript LOC_Os05g43240.1 (locus LO C_Os05g43240) derived from phytozome v7.0 (chr-ID Chr5; po s 25097320 to 25098017)
gcgtcgtttgttctggtcatcctataaattggcaggtgtgtgcttcttgttttcttaataaacccatcctgtattagcagattggtaatagcagaaggaggtggcccaatcttaaattcttaattcaagtgtctgggcctatttgggcagcgagatatggtacattcttgtttgctcatgatcttgtgtgcttagttgtgtgttaaattttataaacagatgtatgccggttgccaacaatgcaaaagtgaaattctaagaatgcatactatctgcagaaatgctatgatagaattgtccagaatagagctagcctaatactattgtgacaaataggacttggagtaattttcaagcttgcaaagcctcgggcagttgcttaatcatgggatcatagtgacatgtcgaacttttgtttacgaagtttgcaattggacaactctagattcctagagtttcttcggttcaagaacagaacccacacatcattgctatgatgctatctttttttaattgaaaactctgctatgtgaatttcatgacagtgttttggtttatctagcgatgaagtgcagaaatattattttcttgatgaactgtagtttctagaactcaaactcagatgtcatggtctaatgaaactttggtgtccatgtctaatagagtatcaaaagcagcgacgggaagagccccatagt

SEQ ID NO: 12027 - DNA, 898 bp, Oryza sativa
  Intron number 1 from transcript LOC_Os05g41140.1 (locus LO C_Os05g41140) derived from phytozome v7.0 (chr-ID Chr5; po s 24031610 to 24032507)
ctccgtcaccgacgccctgttaacagtgaaatttggtaagcccaaatttaccatcggcttagagtcagtatcggcttcaaagttttagaatcagccgatgggagtcaagtcgccgcgatgtcgtgttcttggtggagtcggatcaatcaaatgaatcttatccagaagagaccgagttcaaagagaatgcacatggcaagttatctattaattatgaatagtttgttagtttccttttatctttagaaaagtgtgtttagtgtcctataaggactttatcttttccttctatctttaagaaagttgctttcttgtctgacaaggacttgtatcaacccataggtataaatatgtacacccggggtctatgtaatctatcctcacgatcaatacaattcggtgcatcgccaccttttaccttttctactttattttatcgaccggcaggacttggcacctgacgtggggctacatcgttgttcgatctccggcgaagggataagtccaatgttccgtcggcccaggcaattgtctcatctacatcggcgtcgttcaaggctgcatcagtatattcgacctcttggattgctctggtttggatgatatatttgcctacctatttatcatatgtctatgttaatctagtcttagcatatcaatttagctctatcggctgcttctcgttttagggtttctgccggtatcggctaaatcgcgttgctatattagattagcttagacatctaccacactgaaaactcaatcaacggcttgattgtctagatattatttttcttttcatacttagtgttgcatcagttaagtttgatctactaagtcgtgtttagaactataatctatagcctgcttcttgattgccaataagggtttcatcggg

SEQ ID NO: 12028 - DNA, 903 bp, Oryza sativa
  Intron number 1 from transcript LOC_Os05g06460.1 (locus LO C_Os05g06460) derived from phytozome v7.0 (chr-ID Chr5; po s 3318520 to 3319422 reverse strand)
gtgggcacggcgcggcgctccacgctgtcgaggaggtaagtgcggaccatgtttactgttcggtgtagagctctagccgtttctcgtcggcggcgctgtacccgtgatctattgacatttgaactgatgactgtatagaatgatctatgggatttccggtattatggagctgcgaacttaagtacttagctgaattcaaaatttcaaatgaactacttcgctagagctcatgctttgttgaaatttacactgcgaaatggtaactggaggtttttgttagtaagtaatttggtgctagcacaggtaaactgtttaaattgagtgctatcttgagctttgctttgggacttcagtggttagtccattgcagtgcgctgatagtctattaaatttatgctgagactatcactatgaaactagaaaatcttcctttctagttgaaatatttttttttgtcttgatggattgatgatcgtagaggtaaagaatatataatgtgcaactcaacgcatttgtaaaccaactctatcttgaatgcagcaccagcaaaatagtgacaactcggttgttctggtggttatctatttacaaatttcaatgttggcacactttggccctgttggagcctgccaagtgccaagcagtagcagtttagttggattattggcttacttgatatgttacttctttgttgatatatccgacaggccaacatacaaaaatgcacacacttttttgtttacaatccaaggcttttctgtagcatataacgcaaataagattgcagagttataaatgtaataacctgttcgttattactagtccactactgctgtctcaatgtgttaagtgttaactggcccaaatttgtgcagggtttgaaaactgcaattattgagggag

SEQ ID NO: 12029 - DNA, 818 bp, Oryza sativa
  Intron number 2 from transcript LOC_Os05g30280.1 (locus LO C_Os05g30280) derived from phytozome v7.0 (chr-ID Chr5; po s 17487898 to 17488715)
gacaccgagcatctgggacacctacacacattcaggtctctctctctatatctctcaatttgtgttggaacttggataattttcagcacactgataatgctgcgttgctatgctagttttatttctccatcgtataatcagggttagtaatctcgatattatgatttttggcgggggtggctgaaagaagcgaaatctccgaaatttcggtactttttttgccgaaattttttaatactttgatgaattttgaatgaatttgaataaaatttgaccaaattcacaaaagattagaaaaaactaaaaatctcgggcgagatatgtgcttgccggtgggggccgaaatttcggaaatttccaaaattgcaatcacttagattgcagttcacgggattcggtgcagagaggggcaaacactttgactacaatgtgaaatccatttctttagggatgcaagtggacaagcacaaaaacatgcttgcttgttcatttcttacataatagtataaattttagaagaaaaaatgaataagaagtgagataagggggcaaaaaaaatcccgcttgcctactccgtttgcatccctacatttcttttctggatagctcaactacgttttgtttttttacagagatgtacatgataaattatgacaagttatgttatgctacgcataagaatgcagaaaatgtgttttttttataaaaaaaaatcatggtttgttttttatttatccatgttaagttacttccattattaaaaaagaaagaatatgaatttgacatgtaatctgctgcatcagggaggcatccagaag

SEQ ID NO: 12030 - DNA, 951 bp, Oryza sativa
  Intron number 1 from transcript LOC_Os04g34230.1 (locus LO C_Os04g34230) derived from phytozome v7.0 (chr-ID Chr4; po s 20561578 to 20562528)
ccggctcgccgttgacgagctccggcggcggcgaggtgaagggagaggaggggggtggcggcgcgggcggctagggtttcgccccccgagccgcccgcgcgagagcgacgcgggggagagaggaagagctcatctgtttccaacgttattttgttgctgggctggccaaagattaggccgactaaatttctttaagattaagagtttgtacaactgtacaagtgttaaatatttcgacaagaagctgttgaaattgaatggagtttgccgagaggcaccctcccaaaagcaaaagagattacacctctgttgttataacgttatgcatgaaggtattcctgtttctcctttgcatatatagttaactagtttattcacttcctttcttcaaagtagacaagattgtactaagaaggagcaaggggagtcacatagtttctcctttgtgcctttgtctatattttgtgtgttacatggaattgtgtttgactaggtccagctaagtcacgcaccaactattaaaggtcaaatttgtaggtccttgccagaatgtttacagtcgtccatgatgacctttgagctgtcttatttctgaaacacacaaatccatgttccagcttaatctctattcttgcgtatgttctttatagtattattaggcagacaatagatggtgctgcttgtggccccccgatccccagaaaacccactgagatgcagcccacttgccacaagcaaagaagcttccaattgtgcaccttctggcctttgccaaaagcatttgtctcaactggttgtcaggaccaatgggatagcccgtcgtactaaaccaaataaataaatgaaaccatattatttgttgtgtcgaagagtctataaatacttcatcacaaaccagcttatggttctatcttaggaagaacagggcagacccacgcaactaggtgagcc

SEQ ID NO: 12031 - DNA, 898 bp, Oryza sativa
  Intron number 1 from transcript LOC_Os05g46395.1 (locus LO C_Os05g46395) derived from phytozome v7.0 (chr-ID Chr5; po s 26829159 to 26830056)
ctggtaatgatttgggtcatcccctgtgttttgcttctctcgtgttgatgattttgtatacctcaccaagttagcacattttactcttgttttttctgctcccaaattggcttgttcgtctgctcgccgttttcttgttctcgtctcaaattttgtccgatttgttgtcccctctttctaactttttcactgtccatttctgtgttgaattttcaatattggttctctactgtaggattaccgaaaattgtatcgttctgttttttctcccctttatctaggttgctttttctttccagaatagatgagttaaattgaactgaatatctaccttcatcttaaattcgatctgttaatttgtctgattcttgcccgattttgagttcgttcagtctgaattttttttaaggtttcagtctgaatttttgaaagcaaagtggtcgcaaaactcccaaaagtttgcaactttatctggctgatttcctcggccccttaaaattgagttgcattttagtggtgtctcatcttgttccggtcatttgatcgggcagctgagaagattttttttttttttacttttgggtggagggtgaaattgagctaaagtttgttgaacttgcccttctcctagttcgtacggagaattaaagcggaagatttgtaataaaatcttgagattatttttagaccaattggtctgagctgaatagctgatctgtcctcaaagcaatttcctctgcaattcttcactattccaatctgattgaaattctagcaatttcccttcccaccatgaatctttcttccttcccttctgctgctgaatttctgtgttttttttttcttttctttttttttttgttgctgtgacacgtgcagggcgagctctggtccggca

SEQ ID NO: 12032 - DNA, 761 bp, Oryza sativa
  Intron number 2 from transcript LOC_Os07g01590.1 (locus LO C_Os07g01590) derived from phytozome v7.0 (chr-ID Chr7; po s 366571 to 367331 reverse strand)
gacgctagctagtgttggtcaggagcaagcagcaggtaattaagacgggaaccgggaagagagacacgtacgtacaaatgtgtctacgggaagatatatatattgccggccggcaaaggaggtactccctccgtatttaaatacgtacgacgccgttgactttttaaccaatgtttgacctttgattttattcaaattttttatgcaaatacaaaaatatttatgtcatgcttaaaagaacatttgatgataaatcaagtcacaataaaataaatgataattatataaattttttaaataaaacaaaaagtcaaacgtttgttaaaaagtcaacggcgtcatacattaaaatatgaagagagtatattattgcggtcgcattgcgtctgcctgcttagcttagattctactatttgatgattttcctgttgtacactcaaaagatagatgtactttctattcgaggactaaagttctttcttgaagtaggcacgtcccccttaattatattaatgactctgactccagactaaagttttttttatcaaattaaccatgtactccagactaaaagttcttattatatattgtcgttcatcagtcatgcattgcaacaagttttaacactaaatattttcactctcaggctgtgtacatccattgtggatgtagaggccgaattttaattcattttctaaaaaaaaatattttcactctcatttataggttgatatcattctggattgcttgaaggaaacagg

SEQ ID NO: 12033 - DNA, 733 bp, Oryza sativa
  Intron number 1 from transcript LOC_Os04g41910.2 (locus LO C_Os04g41910) derived from phytozome v7.0 (chr-ID Chr4; po s 24649478 to 24650210)
gcacgtcggcccctacgcgctctccgagctgcgaggtatcctcctcttcctcccctggacacccacccttttccgccctatcgactagtgcgaatgggggcgtgcccccaccttctcgtagaatctctagaaactttcggagcctttgctccaatctgcaaggcccccctagcccttgtctggcgttcgctgtgtgtattatcgactattagtcatgatgttgaacatgtagtaaggcgaggcgaatcctagcttcgggtactgttggattggggcgtgttacaatgagatggtggtttaccgttttgagctgtgaatggatgttcccatggatttgggtgtaatgttgttagtagctgatcaacagtatcgagtctgatatttgaggtgatatgtggtgtgtgtttgtcatatcacgggaaaaccagttagttgttttttctgtcggttgcgtggtcaccactattccgtatagttttttactcggaagctgggcagaggcagtaggtgcatatcggaggagctgttcgttgaggcagattgttggagctagggttaaggtcatgcaataaattgttcatgtttgtgtggcaatatattgtcgcagttaacctcttactcttgtttttccttctgaagatgaccttgattaatctggaataatgtttcatttcctatctttgttgtgatctgtacatgtggaattttgctccatctgcagaacattttgcta

SEQ ID NO: 12034 - DNA, 330 bp, Oryza sativa
  Intron number 1 from transcript LOC_Os04g22320.1 (locus LO C_Os04g22320) derived from phytozome v7.0 (chr-ID Chr4; po s 12624806 to 12625135 reverse strand)
gtggtagactgaagaggtaagagcgtctgccaaagtgcgacatatattctaaaatggcgtgaaaggtttcaaggagctacaccctctgtcttgaaaagaatcaacttctagttatgaacttgtcaagattcatccctagatgttcgtttatatgggatggaggaagttgtaaaatcaaagcgtgtttgattattattctgtgatgaacaattggcatttgagtttattggttttgatatttggagattattggcgaagtagttttggatatgattgattttcatgtgatgaacagggtttgctattttgtcgggtctggtcagaccgggc

SEQ ID NO: 12035 - DNA, 875 bp, Oryza sativa
  Intron number 2 from transcript LOC_Os04g51780.1 (locus LO C_Os04g51780) derived from phytozome v7.0 (chr-ID Chr4; po s 30497782 to 30498656)
ccactcacttacaggattccaacgtaagctttttcctcctaatcctgagcaatctgttacggcatacgaattcactgcctagaatctcgagcatttgtttcacatgccttcaccataatcaacatgatagtagggaggaaatctggaacaaaattagaaagggttttgagatcgggatgcctagttttttttttcggtagggctttttgtaagtaaagtaagagcagcgactactacaaacacaaagctcttttcacgggtgacaatatcttaaggttttcattaaattatacttcatctaccttattgtcctattggcaacccatgaattgacgaaaatattcatgagttccttatatgtcatgctgctttatctatgaatttactttgattaatgcccaactcagcaaatttgtatacagaagctcatgcgtctgtggttatgaaccacagcacatgctgaagaactccattcatctgccttatgttatgagatatgttgatgccaaaatgagatattgatgtttaaccttattcctcaaatgtagatacattcttgccttctatacgatgccatgaactttccattactatctgacttggttaataatgagtgacagctcaaaagtttaaatttattgcccatgttagtgaatcctaaaatctactccgtaccttttttgagagaacaactaaacctttgctgtttcataatatgtttattgccttatcatgctgatttgggggttcctagaaatggtgcagaacattaatgtgcgttccacaaagttagtagtgagtttattctttccttgcttataccatcctttgtattgttagggaaagtgtcggtgctgtggctggtgaagagcaag

SEQ ID NO: 12036 - DNA, 875 bp, Oryza sativa
  Intron number 2 from transcript LOC_Os04g54870.1 (locus LO C_Os04g54870) derived from phytozome v7.0 (chr-ID Chr4; po s 32449952 to 32450826 reverse strand)
aaccctattccttggaaactgcagtattgctcagtgtaagtttttttggtagcagtatctttcaaagcagatgcctggatcaatttttttttcaatgcgtgtctgattcctatcactaattctttcctacctaactataaattctttaattcttccttttgagttctacacttatccatcttaaatctatttacacaaatgatcactgatcacggtcctggactaccatattccgctctcaactatgcggttgaactctggtttcacaatggtgaaatcctggaaatttataactgttaccactaaacaaatagtgaaaacagtacttctattttcagtatcaagtactccctccgtcccctaatataagggattttgacattttacttgcattgtttggcattcgtcttattcaaaaaaatttgaaattatttttttttgtgacttactttattatccaaagtactttaagcacaaatttttcgttttttatatttgcacaatttttttgaataagaagagtggtcaaacaatgcaagcaaaatattaaaatcccttatattaggggacggagggagtatataatatgtccactgttcactattttaggtgtcagttggaaaaaacgattttaggtatcagaggctctttcaatttgatatattccaaattcagtcacttaggaagctaccatatgcccacatactctcttggaactacttagattactaatctgctcttggaactacttagattactaatatgtcatcatatctcttttacattgtcaaacaccaactttctctattgttcatttgatgtcactttgcatcattacagggggctactattgtggatcagccagtttgtatagc

SEQ ID NO: 12037 - DNA, 664 bp, Oryza sativa
  Intron number 1 from transcript LOC_Os06g06160.1 (locus LO C_Os06g06160) derived from phytozome v7.0 (chr-ID Chr6; po s 2854603 to 2855266)
tcagattgccaacactgcaaccttctgaagctcaggtacttagtcactgctcagctgcatcatgtttatctgtgtgtttcttcagagttcttggcttggctcctctggtgttcttgtgctctgggttttggagggagaagataatacttgttcatctgccatggatgatgagcagagggatggatgagccatggggttgactctctgggtgttcttggtttcttggctaaggttataggaaggaagtctgaagcttgagccctgtcagttctgtaagatttgagctgattcttggcttccggtttattgccttttgttgtttgattttagtcgaattgttttggggaatcattcatatttgattcgagaagacttcaggatagaaacaaaaacaagggttcatttctcatgcttgcttctcatgtttctgtcaattgacagaaatattaggatttgcttcttttctccatgtaaattttgatttggttaatgaacactcagagagattcagaatgagccaataaacttggttcatcaggtgtaattttttatttcggcatgttgcaccatcttatacttaaaaacaaaattaaccctgtttttttaatgatttttttctgtgatctaagcaagggggttggacaaggattaatctgtgaggctc

SEQ ID NO: 12038 - DNA, 1006 bp, Oryza sativa
  Intron number 1 from transcript LOC_Os07g07900.1 (locus LO C_Os07g07900) derived from phytozome v7.0 (chr-ID Chr7; po s 3957535 to 3958540 reverse strand)
cagcacaggtaaaatccaaaaagaaaaaaaaaagaaactctgaattttgatgctctgaacatcgaaatttcatcgttgtaagtaactgagtatgattgattcacttgatatttttgctgatatttgatatttgaaaagatttggagaagtagtttgatgaaattctgtcggtttggtcagcattgagtgcattgtttgttgcggtttttatgaagtttatttttgggtgccttttaaaaattacttccatatgtaactcctgttaagagataatggaaatgctttttaagtatactagataagatcatggtcatactttattgtcaacctacttagtgcaaagcgacgtctttggctgcaattgtggtggtgctcatatggtctattgtcatccactccaataagatttctttttttttcttttcatttggatgaaagctaatgtaaatatagtttagccacagcttggtaaacaatttgatgcagcattgctgtcattgtgagccaatgagtgacatcaattgatctcaggttgcagaaatttgattgaattctggctcatttttttgtggtccctaactcaaacattgataggactgtagatctggggtctccaatctttgtcagtcattagttgccggccctgaaattttttttctatgaatgtgacgtttccttctccttaagttcaggatgagagttcaggatgagaatgagatggatcattagatgttgcctccaatattctctgctaattattgagtcattggatgcattaggccaccaatcagttgttttcttctgaattttcgtaaaacaatacccgattttcgaccaactgatcaacatatagtacatatttgattgaatgataatattgtcatgtactccattacgacaaaggcatactgttactatcaaactgcacacagcttttgcactgtgtgtttatcgcgtcgtgataaatagtatagtttactgattcaccattatttgcctttcagag

SEQ ID NO: 12039 - DNA, 735 bp, Oryza sativa
  Intron number 3 from transcript LOC_Os07g10150.1 (locus LO C_Os07g10150) derived from phytozome v7.0 (chr-ID Chr7; po s 5451893 to 5452627)
tatacctgctcaaccagggtgacaccttcaccaaggtacaatgctgtatacctcatcttgctttggtcacatcttggcttagcttgcggatttgaattgatagcgtctccatgttatacacatttatgaagactagcaaaataaccgtacgttgttatggaatttagaaaatcatgttggcacattgaaaaaataaatctattttcagtttagagcttaattttagaattaaattagatgtttctttatctagccgcaaaaaattttagacggaccgaattgacttatcattactgcataattccctccattaaaaaagttacatcatcaacggtccatgaattctaccattgtatttggttttgagaatgatgggacatgtgggtctcacgtcatagttttagggagttggtggtgggtctgaaaatcacatgtattattaacatgtagacagtgttgagctactacttaagagagagaaagtgagtgagtggtggtcagtagtcatagactaaaggcccaacttttgccttaatgaactggttacaaacattagttttaaaagaagaatggggatcgactggtgtgcataagtgcatgttggtatattattgttttctctcatagatgtgagtaagttttgaatgtgttgttcaaggcaatatgctcgtcacatgtaaatgagtgagcaattttgtaggtggaggccacagaggtcttttttgcgacgaccaa

SEQ ID NO: 12040 - DNA, 772 bp, Oryza sativa
  Intron number 2 from transcript LOC_Os05g22940.1 (locus LO C_Os05g22940) derived from phytozome v7.0 (chr-ID Chr5; po s 13019518 to 13020289 reverse strand)
ctcagggtttaagctcctctttgttaagtgggacggtatgcatatgcattgtgttcttttaggtttaaattctggttacggtgccacacaacaagtcgtagatgctcattcttgttcttttcatggggcttatggaattgatggcacatggcacacctttctcctttttccgtcatgcatgttagtgccatattgtctacgcaaaaaagaatattctgcatatttgtttactcactatttttttccaagagaattgggttttgccatgcttcaaaaggaacatttcaagctgaaaaagttctcccgatatggaattagctttagagttcaggggaaaaaatatgttgttgctttgtgcttgtcaagtaaccacagttgcacaggttttgactgacctcatgctacttgacattattcaccatgataaagttttaccttttgtttttttcctttcactaggaacagaacgaattgtttgcataaccaatttgtagatttgacatggggaaatagcataactgaatatatctcaacctattactaggcaaaataagaaatgaacctaagccttaacaggtttgcatcaaattatcctgtgcaaaatgaacaaaggtggcacacaatgtacaagcttgcatttcatttttggatcctcaaacgtcttaaagacttttgcataaagtatttgatgagtaacgagctggaactaatcattcttatatattttcatctgtcagatttcacacatctggggatttatcttctctttgta

SEQ ID NO: 12041 - DNA, 705 bp, Oryza sativa
  Intron number 3 from transcript LOC_Os04g47059.1 (locus LO C_Os04g47059) derived from phytozome v7.0 (chr-ID Chr4; po s 27746600 to 27747304 reverse strand)
acctacgcctttcgacccggccaagggtgcgtatctcatctgctaattgctgccagccaacgcacacatgcatgatgagatgatccgttgatctgccctacacatatgactgatcacttgtcggttgatctgctagcaactccaataatacgtttataaaaaaaaaactccaataatactccgtaggagagaacacaaagcttatagctgggtataagctcagtgacgcagtcagaaagatttttaagcccgaacaaattttgatataactagtatttgctattaaaaattttatttactcattaatattgaaatttaatgtagttttcaccagtgagtccgggaagctgcccaggctagccgggcggtggcttcgccactgcagcctagcaatgttcataggcggatctaagggtggttccggtgatttcgggaccacccaaaaaaattcagcccaatgtatatatatacatatgtgaaaaataaacttttgaaaaaaaaactcatttcatcaatctatacttttaactttattgtatttaaggtattttaaaaaattatataaattagatcacctatataaagatacgtcacttcaccactggcaatgtctctcatgagtcccatgttgacaagaatttgctttaccgtgttgttgttattgatctgctggggtacattctgtcaggttacccggcagaagct

SEQ ID NO: 12042 - DNA, 1014 bp, Oryza sativa
  Intron number 1 from transcript LOC_Os06g29810.1 (locus LO C_Os06g29810) derived from phytozome v7.0 (chr-ID Chr6; po s 17162685 to 17163698 reverse strand)
gtagcgttgcgtcgcgccgcgtctaccctttccaggtgagcctccccgattacatcgctcgttctagctagctagctagctagctcctgtgttcttgctgtttctttgtttctttttgcgtttttaattttcctttcttggatctttctttgctagctcgttttgatttgtgtgcttctgtatttgtgtgttttgtgggcgaaaggggggctttcttggttcttgttccgggcgattgttattcttgttctggagaatcggattacgagtgtgccttgcagtggagttttgtaatgttaggctccaattgagcaagaaaaagatgaggttcttgttaaattctaggttatccagctcttgtttggttggctggtctggaactctgaattccctctgtagctttttactaggtaatggaatcccctttgtaatgcaaaatgtagatgcctctgccatggctatgttttatctttagatgtccggaattctcttctaagggagcctaaacacggcagttcagttcagattaattatgggtctgggtttgaagaaaagaataaagggagtgaaataaagaaacaaacaggtctgaatttgtgaccctgtttagctgaaagtgaaactgaaaaggggaacagaaaggaagaattgaccatcgatttaatgttaggtgttactgcatatgtgcaagcaaagattgttcttttggcagtggataatgctctgatggtctctggccatgatcaagtggttgtttttctctgcaggatgtggtttaccttttgctgttggtcaaaaggaacttgtgccaccactttctagtttgtttgttttgacacttggtgctggcaattcggttgctcacgggctgatcaattccttttgctgatttctttttgagagaaatccctttttctttttcttttttatatatatgcctttttatcttgcaactcattcatttctcatgtttctgaaggtaacctggataagacggtggaggagctatcaaat

SEQ ID NO: 12043 - DNA, 1057 bp, Oryza sativa
  Intron number 2 from transcript LOC_Os04g58480.1 (locus LO C_Os04g58480) derived from phytozome v7.0 (chr-ID Chr4; po s 34602969 to 34604025)
cgaatacctcgccgtcgaccacgatcaacacattggtacggacaactgtaattttagtgtcagtgtctgcacggtttttgttgacgcgtcgccacgctttaagcacgttatatgcagtccgcagcggcacccgacaacacgtcgtcgcaagggaggtagatgtaccgaatgaacacccaggagggaccccgtcagagtgaacgcgcgtcagtttatcctagtctcggcaggccagctagaacattctctaacatcatagagacgagagacgataagcaattgggggttgagaggtgaatagacttgggtacaagtagcaagaggaagggagatgtagaatgtagaggttagggcattcacaatgtgggaatatgggtgggtattacgacaccaaagtagacctcatacattgtgaggggatttttagggtggtctctagctaaagttgtccatatgcttatagcctgctcttatggcattaaaagaataaaaaataacttcactctctcaatgacaaagagaaaagaagagatggatggagagagaaacaacgattttttttaaaaagtgtgggtcccatcttaaggttggtcccaccttaataccaccctagtacatacacactgctgatgcccttatgggcaatagattgattttgatgattgattggttgttttttcaatctgccttagcctctatagttataggaggggtgatcttacgtttacatgactctttttcacgtttggaaagctttacaatcaagaaaaccctaagattaaggaaagaaaaatgaaaaaactcaattcgattcgaactatgtgctgaaggtctgaccgcccagacatacgtggtctgaccgtagtttattgtttggtctaaccggctatacattggcggtcagaccagtcttcacgggaaagctttggtatttttcatatttggtttgaacttgctataaatctaaactagtgccaaatttaagcgttaacaatttcattgggttatgagttattaactgcatagattggaccgacacggagcacggcgaaccagg

SEQ ID NO: 12044 - DNA, 793 bp, Oryza sativa
  Intron number 1 from transcript LOC_Os03g55280.1 (locus LO C_Os03g55280) derived from phytozome v7.0 (chr-ID Chr3; po s 31453896 to 31454688)
gctgccacacctctgcaccgccacgccaaggtatctcacaaccacctttatctttgtttgatggtaatggatgcttcttcattgagaaatcagaactaaggtgccaataaatcagaaaaaagaagtgcccaatttcattaccagaaagtgctactacctcaaccaatgaaaagtatctaattccacttgcgtgtaacaaaactgatctcacccctggtatttgagtgcctaacgcaaaagtacaagtgcgatcttttatgcaaatgatatcttaagctaaaggaaaaaaaccaacacctttgtaagaaaataaaacagtgtggatgaattctaaaatttgtgcaccagaatcgtgtatgtattcattggataggggaatcttggtttgcagtttgataacaccacaaccacttcatttccagaacatttgtggttagctttgtgaatattccattatagcagtttgagcaaacaaatatatgcattgatcatgcttctgcatttcagatttaaaatgtcatttttctaaactatgatatcactgagttcctagagatgaaatttggtaatatccttattacgatagattgattcatatagataattattcttatttctgccccattgtctgctgaattcttagtttgcagtctgtgagattgagtatttctaaaatatgtttatttctgcttgagggtgtgcaaagcatatttgatgtgtaaaagtttgcttgcttggcgcattgatgggtcgaccaacaaactgatgattatcaatgtggcaggtggtaagg

SEQ ID NO: 12045 - DNA, 988 bp, Oryza sativa
  Intron number 1 from transcript LOC_Os07g10920.3 (locus LO C_Os07g10920) derived from phytozome v7.0 (chr-ID Chr7; po s 5977102 to 5978089 reverse strand)
agggtttgctctctcgatttcccagattcttttgctctctttttcttttgatgagagagagaaaggaattccccatttcagttgggactaatttcgagttccaatccactgttgcgcaggtatgtggatccaagaatttcttggccgagccgatctggaggtagttgcggctaggtcttgcgcaactggaggcgaaggggatctgctccatatggttgtggatcatctcatctggatgagcaatattgcaaaagcgacaacaacttgggtcttagcccgtttggtaatgtacccttatctatatagaaaaaaaaaaaatcccttctctggaagaaaaggggattcattttgactggatcagtgggaagcgatgcgcatttttcttcaaattttgagtgagtgttcctacacaaatttatgctatggttgttgaatcttttagcccatgtcaacttgtgtgggtagttgttctaaaaaaaaaaaacttccgtgggtagccatttttctaatcttgaaggctagggggaagagatgtgtactccagtgcaaggaaaaagcatccaccttgactcgctgcagaaaattccatcatttctttaatagtgaaaaagaaaaaaaaaacagaacagagatgaccttgattagctgcaggaaacttcctttcatgagtcctcactcgttttcccaacaactcctctcatcatataatagttcatcagaattgtttcttgccacttcatacgttgatagtattcctcctttctgaatctttgatatttttctatctggaacaaggatgccaagtttcacatcttcaacagatttgtctattcgctttgcaaccacagaatcctcttcgtacgatagccacagcttctctgatgaacccggtaatgtctcccactaaatacaacttctggaggacatccctgaagatgcacacgatccaacagatatcggcacctggattcagagggcagacttgcag

SEQ ID NO: 12046 - DNA, 941 bp, Oryza sativa
  Intron number 1 from transcript LOC_Os04g10380.1 (locus LO C_Os04g10380) derived from phytozome v7.0 (chr-ID Chr4; po s 5605238 to 5606178)
ctttcaagctgtaagaactgcatttatttgaatttcgcctgttctactatgaattgctttaccacataacaacctgaactttatacataacttaatgttagaatatgagtgatatatagataaataaactgaacactccgactgacaacttagttgttttcttatgaacattattaggtagtgctatctcagaaatgtttagagcattttgatgatttaccatgccatttccctatataaagcattggattgatccgcatctagaagttttagttggaattatttttaaaaggaattggaaagccgtattctgtaggtttgatggtctctttcattccgtatacaatttggttcaattgctttgctcagctgcttgtgacttgaatgttatcttacacaatattttgctctatcagacaggcttttacaatattgttccttagaaaactgaaacccactcaaagttgaatccaagttgttgttaatccaaattgcattattaatgtcattttcccctataacatgattcagatttcgtccaactctgtgctcctatgctcctatccccatgcatcccattaccttcttccatggcaaccacctctgcgctcccccaccctcattgacttctgtgcacctccagcaacatgaaaaatgctcatctgctttccagtgatattgctctgtccacatgagattgctggtttaggtttcaacagcacttggtattgaatagccctataggaccagaataggtttattactcatcctcaacttgattaactgttagttaacaattgttctaaatacaaagttatccttattaactgtttgtaaaccttcccctaggagttttactgaatcaaaccccatacttctgttctatgctttctgtggtgatctgtgagatccaactccttattctaatgccattcttagat

SEQ ID NO: 12047 - DNA, 1011 bp, Oryza sativa
  Intron number 2 from transcript LOC_Os05g01780.1 (locus LO C_Os05g01780) derived from phytozome v7.0 (chr-ID Chr5; po s 471785 to 472795)
acggaggtcctcggcaagggcgccttcaagacggtgtatccttcttcccacgctcgatttctgggctttgacgtgcgattccgtatggttcccgggccgttgtgctgcgtctaagattcgattttggtgcagctcatggtgtttgtttcggttctggatgcatttttttcttggggaggataaataatcttcagagctttttgatgcgctgaattcacattccttcgactttttttacctctcctcttttgggatttgaatactagtattttgttttgttgatttcaatgtgtgtttggcattgcctgctatgattacttgaatcaacattgccaatttgtcatgtcaagctcccattacctctttctagactgaatggatctctttcatttctctcttcttatcgggtgcatttgattggttggctagtgttccaatcaatttacatcctcctatgatctatctcacatttgttctaattcaacaactgatttgagaaatgcacagggaagctgctgtgaatctttggttggttgttttgtcatagtgtgttttagtatgtcactcagaactgtccacgtccattaaggcattaactaccgtcaggattccaactgctcttatatgtaaaactaaactatgttgctactttacactatatatgcagaagggtaatcttcatgatgactaccagcttgatagaataatttcatattatcatcatgtatttgtagtgttatcaaggttatgtacttatgtcgttttcatgtgcacagttcatttacttatgaatgtcaaacctgatacgatagcaaaacaaacttcttcctaggtgtttgcagtattagttcttttttttttaaaagatgtttgcagtatgctcaaaacaaagcatgtatctttgtgaacttctcctgttattttctccaatttcgacatggacttgagatccttaattcaaattttactggcatagctataaggcttttgatcaactggaaggtctggaag

SEQ ID NO: 12048 - DNA, 941 bp, Oryza sativa
  Intron number 2 from transcript LOC_Os05g48020.1 (locus LO C_Os05g48020) derived from phytozome v7.0 (chr-ID Chr5; po s 27468105 to 27469045)
acctgcccaagctgcagcgcctcgcgctgaagaaggttactgatctatacactcccccttcttagtttgggtgaatcatgctagatctgcggatactgtggcccgaggactcggtctctccttgttttagtgtagtactcgtagtagcttccaccttaccgcggatggtggatgtctaaatttaggatgactgtaaggaggctctcgtcgttgaggaagtgatttgcatgggccatttgatgttgatggaatggaatttaggattggtggactatgtttgattttttggggggaaatttggggtttcgactgtctgggactagacttttctaaattttactatgaacgagtcaagacttttcattggattgctagaatgaacactaatcgggtgaaactggggtctagatagtctcacagaggaactcaccacatagtcgtgtggttacacattgtattctgtaattggcgtcaaatatgctgtgcacaatccatatgaggtctcttcatcgtttcagtagcctgtgtttattaaagactagatttatttattttaattaggctattgggtaaaggtgatgcagttgatgttaagccttccaatattttctgttgacccagaacttaatgtactctacattttaacttgacattgccatagtgttaactttgtaagattgttgttcccttgctaaagatttctgtccacgccacctgcatgtttgcactaggcaatgtgatgtccttgacactctttcttcatacatgcctgtgttggttatactatatttttaaaacatgcttttacattattcaattatatgatatctataaattgtacataacagtttttcacctagaattttgaagaattggttttcaatattttgttgcaacttgcaacaggtcaaagggctcacaaaagaggaactcgcgacccg

SEQ ID NO: 12049 - DNA, 926 bp, Oryza sativa
  Intron number 2 from transcript LOC_Os05g07000.1 (locus LO C_Os05g07000) derived from phytozome v7.0 (chr-ID Chr5; po s 3676179 to 3677104 reverse strand)
ggaggtgagcatattcctctgctctttcatcgatgcccctgaaatggaactgcatccattacacttgtagaaactagaaactagatatggtatttatttgtcaagtcttgcttggtttgatttccacgagcttatagaaaacttttcaaagctagtgtctgctctgtgacttgcagactaattaaatatcagtattcatcctagtcatgggtacttcaggttcaccaacattgatgtatatatcctagagtctattctaatagtgttattttgctggcaatgttttcttgagatcagtgttgtcctatagtcatgattcacatggtacctacttgagttttggtttgtggctctgctttacttacttgtaagtagtactcatctgttgtgacagaaacacaaactttgtgagacactgttcctatgtaatgtgccttgtagctacatcaatgcaacccttgtggagtcttcgtcttgcgggaatgttttactttctagcgcttgagatgtccagctgcaagcatctaccccatatgttccctacgaacaagttttcgcagtttttgttgcaagaatgggacaagttggttttttcaactgtttacataattctgttaggattgtcctcttttactggtggaattctttgctatttgaatgacaggttgcattctatcacatgtacagaacattttttttgaggttttgacttggggtaatcttgttgagggagggtgccctgagtggacttggtgacggttgcttcaagtttaaagcacactttgttaattttccttagaaaaaacatcagagttcagtaatgcttgactttaaccacagactagtggatgttcccattacttgcatcttgatgtcattactatttctgccaaccatttccagggtgcgatttgtggatctgaaga

SEQ ID NO: 12050 - DNA, 482 bp, Oryza sativa
  Intron number 2 from transcript LOC_Os05g08800.1 (locus LO C_Os05g08800) derived from phytozome v7.0 (chr-ID Chr5; po s 4838098 to 4838579 reverse strand)
gcagtgacctctgcttttatcggtatattgatgcagctaccacaatcatcttatgatattactttatatttctaattaagatgaaagtgctcttagtttgattgttctgggagtttggagaaattgcatttttgatgtgttgacaagtgttgaaattttctttaagagattgggagtagcatattttagaatttgctgattcatcttttcttctttttctcaagtgaatagattgaagatagtgtattgtagaatttagtgttttgtttcttattgaacttgatagattggaaggctataatcgataattcggttgtttgtttgtttgagaccaaggatgcattctttaactgagcaacctggtaatgaaatcgagcaaatctcagactcgtgaaagctcatgtttcatagcaaacactgactaatctgctgaaatgtcttctgcagaggtgagaaggcattctgcagcggcgactgcaggg

SEQ ID NO: 12051 - DNA, 1038 bp, Oryza sativa
  Intron number 3 from transcript LOC_Os05g04330.1 (locus LO C_Os05g04330) derived from phytozome v7.0 (chr-ID Chr5; po s 1967529 to 1968566)
agcctgccctgctgcgtgctactgttaaggaggaggtggtgattttgcttccaaaccttctggtgtattaatctttgcttggagtagtgttttgcatggcatgctaaactatttggatgaatcgattatgtatattacattattaaaacaagggtgaaaaggagtcaccgtattttgctttccatgcctagaagttatcatgttattcacagaaaaaaaaagtatctatgctgttgactgtggtgtggggtccatattattatagttgaggttaaaacaaagtctccatgtcaaatacgattaatgagtaatggcaattacgcgggaaatttgggcagttattattttagggccaggcgggttgagcgcttctcatttaccacttgtagagtgtggttttattatggcggcaatgtgctgtctgttatgtcgtgcttgaagtggaaagcaaagctataattttgtgcacaggcttccagttgctaatcgctatatgcacctgagttgtttgcattgtaccaagaagttatttcttgaaacaacaatagaatcatctgtgtctttgggcactagacccaaattcaatataattctagattgcaccccccctctcccctaccctgtgagctactttctaactgagcctctttttttggtattgtgctttgatttgaggcgaacacatctgccaaacaccaaatcaggatgacttacaaatacaaccaattttaatagacttgacgtttgttttggatgtaatctatattgacagtagtacatctaagatgcagttgattgatggtgttaagtatttgaaagtaactgggtgttgacctaaccataggtatattgctaacaaccagaggtccacaactttaaatagttaatactccttttgacatgttaacttttcctttggttccttttaatattttattttatttatttttgcgggggttccttttaataaagttgtgataccaacaaaatgttcttcacatatattgtaggaaggacagccaagctcttcctccagtc

SEQ ID NO: 12052 - DNA, 747 bp, Oryza sativa
  Intron number 2 from transcript LOC_Os06g40650.4 (locus LO C_Os06g40650) derived from phytozome v7.0 (chr-ID Chr6; po s 24231717 to 24232463 reverse strand)
actaccgctctctgaatcaagtatgtttttgatgacatgaccttgtttaacccatgaattttgatatttgctttgcgggcgtttggtatgcgtgctatcgattactagtagcttagttgaatggcatcagtatcattcatctttgatgatatggcatagggaaatgtttgaataagctatccttttctaggatattttcgaggagggttccaaacaagagttgtattctcttatggaaaccactatatatattgcattaacaaagaaaccactatagattctcaatggagctttctttgactatggtattcatctcagtcagttttttgtacgctggaattcaccctttttagtacacacttttaaatgatttataagatatccagctgctatttattttccagtacattttcagttaatggcttgccatctttaatcatatatgtgttgtttgagccaaagactataacaagctttccatttcctgttatgtctcctacaaaagataattccttgctataatatttatgtgctgttgatgtgcttatcattgtgttcaatttatgtatttttcttagtttcatttccttcatagtgcaccagagtatacgtactactttactagagtcttgaacaatctcttccttttgagtactgtgaacttgagattggaagtacacgttttcatttttatcgatatgtactgttacaggtgactgaagctttggcacaagcaggtcttgaatc

SEQ ID NO: 12053 - DNA, 841 bp, Oryza sativa
  Intron number 1 from transcript LOC_Os06g40690.1 (locus LO C_Os06g40690) derived from phytozome v7.0 (chr-ID Chr6; po s 24252811 to 24253651)
gcggcgcacctccggtacatgcgcgccagctcgctctcccccggcggcgcgagcaggtcgcggaggcgccgcatcgccgagccgtcgtcgtccatggctggggctttctaaatttttttttctctaattgctattgttgtaccgatcgatcgctttgcctcctgagatcccaactcccaacctcccggccgaatttgtaggcagccgatgcccgagtccgacggcgcaatgatcttaatttgcgagtcccagtcggagtagaatatatgagcaaaatttggaaggggttagttaattgtactaaatccgtttcgatctccttgaaacctcctccgtgcggtgggcatgtagttgtcgttagaaaccgggtcgggtcatgaatacccggctcagatatttacattaatgggtcatcactatatatgaacgatttttgttattcctttgtcgcgtgattttttcttacgcctcacaaatttttgtggctgttagatgcttagctagtctgttaattcgtagagccatactattttttgtttgccatgtttttatatttattctcaatgaattaactatcgtgtcagtatacgagtacttatgaatttttacagtgtttttttatagcctataatgtaattcttaaaaattacattgtaatttttcaaacttatagtgtaatttctttgtatcttacagtgtaatttttaaatttacagtgtaacttttgaattgtaaataagatccagtcttctatttaatgaggatatgctaaacattgtcgcttagataatttgtgttgcaaatagcctgaatagaatactcaagtgttccctagcccaac

SEQ ID NO: 12054 - DNA, 1034 bp, Oryza sativa
  Intron number 2 from transcript LOC_Os04g01230.2 (locus LO C_Os04g01230) derived from phytozome v7.0 (chr-ID Chr4; po s 177123 to 178156)
ttgacgcccaccttactccattgggctggaaccaagtaatttcagccttctctctctctctctctctctctctctctctctctctttctttctttctttcacaaattgatctacgtacttttcctgtttcaatcatgctagtctgggctcttagttcagtatacaacacaaaggagtggatctcttaccaccctacagtgacctttccttctttctgatattctattgttcacttgttcaatcaaaccaaagtaaatttgttgcacaaaatgaatattggaatccacactcacttggtgtgatttcggtattaactcatcctcatccatgataaataaataaataaatagaattctgaagacgcttacactctccattttcacatcactaatatttgtaaaactatgatggtctgatatttgaaaatgacattagtacatttatcatgaaagacactttcatatggttataaaaaattgaagataacataaaatatgcattgtggaccatatcgatgacctagttataaaacaaaaaaaatgaacagaagtagtatgatgcaaaatgtcttattaagtaaaaatgaacagaagtagtatgatgcaaaaaatctttaacagaaagattttttttatacttttagtttgagatcataaagtaaggcctgctatattcgttttacatccctgaaaaatctgactttgtgtgacgagatcatcttttcattcataaactggcttatgcaaagaaacactgtattgcgtttactgattttgtgtgaaacttccatgtggatggatgaagcatggaaggttatatttttagtcatgaatggtattcatgttcttatacaaagtagaaatgtctggtactccaggcatatcagatgcaaaatgttatgttagtgtatatatatctcctagcccctacctgcaggaaaacagcgcaaaaaaaaataattgcaagttccattattagtttgtttgtgtacatttgtaggttgactgcctgcgtgagcacgtgaaaaaaagtgg

SEQ ID NO: 12055 - DNA, 1055 bp, Oryza sativa
  Intron number 1 from transcript LOC_Os03g58520.1 (locus LO C_Os03g58520) derived from phytozome v7.0 (chr-ID Chr3; po s 33318022 to 33319076)
ggcggccggcgaccggcgaccaacggccaggacaggtctaaaattttactgcctcacttgaatatttcgattactgaatctgcagagaggaagcgtattattccctctttttagctggatcgagtgggttaaagcaattacgatagtaaaaaagagaggagggttaggatgcagtttttaggggatcgaatacactgtggaacagaatgctgcattttgctctatctgtttattactagtacttgttgaaggatggaattgtaggttttcccctttataaattggatagaggacttatgcggattaccatatgttgaattattgtgcaagattttttttgttaattgttcaaaaccattgaaatattgggtgcctctaatagtggaggatagatcattctgttacaggcaggtcttctgtaggcttaggtttgggggtcctctactttgttctgggcttgtggctgtgtagtaatgctagttgctaggtgcctgaccatatgcttatcaccttagaagaaaagctgcttcaattctaaattctaacaaggtaattagtggtaaatcatacttattccattcaaagggctgtgaccttttgaagtcactcggtctgagatgaaaacccagagaaatattatgaatgaatcctgacctgttctgagaacaacatcagcctttgttttgggatgtacttaagaggaaagcaaatttttggcctttagatttaattctgttctatcatctatctgatgacaaatcaacttagtatgattttcttttatttgcagctgtcctcaaatccatccctacattccaccaatgtatttaagctgttgaccacttgcacttgcacttgctctctgcctaaaatttgatgtataggctttatataagatggtatattgataataaactactgtttactaatcaactactaggctcctagcatgctttgatgtgtatttgccggcacccctatcaacatgcttgtgacacttttatttaatgttaacccgtttctcttttccaacagcttgtgcttatactgtcctg

SEQ ID NO: 12056 - DNA, 678 bp, Oryza sativa
  Intron number 1 from transcript LOC_Os05g31370.1 (locus LO C_Os05g31370) derived from phytozome v7.0 (chr-ID Chr5; po s 18169538 to 18170215)
caccggcggccacgagcacaaggaagcgcttggtggtcaatgagtcctagaaaaggacaaaaggaaaaagataggaggaaaaccgagagaagagagaaaaagatgagggaaacactgaccttttacgtgggttctctcttatcaattgggttgataatgtattttaatgcgtccactgtctaccagtaaagaccacactttttgagtatcctgtagcaaatttttttcacaacaaaaataccttgtagacacattttcttaataggcataggcatttgcctcataagtgccttttgaccaatagtgcccgtcccacacccacatgcgcgagcgcccacacacacacacacaaatgcctaccattttctaaaaggccaatagtgggttttacaaaaaaaaacaaattgagttgaaataaactaatcatttcctctaacggtccaacctagattgttcctcctttttccttgaaacaaactggagtagtagtcaacgaggaagctagggaaacaaagtgggccttaccgaccagtcttccttagccatcgccgttatataaaaggaccccgtttagtgtgagtgtgtctgtgtgagagtgtctttagcttcaattccttcggaccaacttaatctggcggcgcagggttcgggcaagctcaccatagtggcggagatccc

SEQ ID NO: 12057 - DNA, 469 bp, Oryza sativa
  Intron number 3 from transcript LOC_Os04g42720.1 (locus LO C_Os04g42720) derived from phytozome v7.0 (chr-ID Chr4; po s 25098552 to 25099020 reverse strand)
gtttattgtccccaacatcttcatccagctgtgtaagtttcttttgtccagttcatgatcgtttgtttattcaacgtggcactctgctcagagtgacctgtaccacaagtgtagttgctgcagagaatgcaagatactagattttagatttaatggcattgctagatgtgcaataatcataatacactgcaaaaatgcgttggtagctgatgtatttcaacttaagataagcatttcctccctgaaaaataggtagctgcagctaggaagtatagcaattagcaaggacaaggccgcaaaacacagatctttgattagaaattactagaatatttgccatgaagatcattttccaatcatatcttcagtatactttccaattgtaaattttcacctgagtaaataattgtaagcattagtgccctgaacgagacctattccattttctgttgcaggtgaaattgctcga

SEQ ID NO: 12058 - DNA, 645 bp, Oryza sativa
  Intron number 7 from transcript LOC_Os05g39650.1 (locus LO C_Os05g39650) derived from phytozome v7.0 (chr-ID Chr5; po s 23212446 to 23213090 reverse strand)
ggcaaaggaactttcaattaataaagttgggcacggtcagtatgccaagtagaaattggttatacatgtgtgtagtttgtagaatgattgattgagtcttgcaagattattgtgttgttcatgttgcatgggttggaaccagatgccacttgctatacaagttgtaaattgtctagcaggatgagttgttgtgagaaacagtcggggattttcttacttaaatatagaagtcgaaaattgtaatagacttctctgattgctcaaacaaatatttacattacatctaggccaaaagataacaaagctacatcctaaacaagattgcattcgatccagaggtgctggtggaatagtcttataaccactcatgtagcacttttgtggataatactgttcttctgaacataaattttattgttcaaccttgctatttctgctgtttgcatttccattaatctgggttaagacaaattttcttgagtttggtttatttttgaatttgcctgtttggttgctattttctagttaacgttagttagtattttccatgctttgaaaagcttatattgtttgtatacttgtatatttataacaatatatcttgaggtattgccattcactgctcagtaatttttgcagcgttac

SEQ ID NO: 12059 - DNA, 847 bp, Oryza sativa
  Intron number 2 from transcript LOC_Os05g39650.1 (locus LO C_Os05g39650) derived from phytozome v7.0 (chr-ID Chr5; po s 23215793 to 23216639 reverse strand)
acagattcttcaaggaggagggactgcatactcaggtacaccatacatataagcaaactaactgaaatctacacaaaaaattaattttctaacatctggtcgtctggggtagcagcaaattaagagccatgtgaaattagttgtctcctgccgttgttggtatccaggtcaaaagatatagtacaggttcactcacgggctgcacttttctttctctctctctctctctctctctctctcttttgggggcactcatgcgatggctcagtagccatagccactctttttttaggaagaagaaattttgtgtcttgctcctagtcacaaggtaaacacaacattacaagataacaggatgtttaatagccttgggtgcttgcttggttttattattttcaaattttagtagattcatcaactccccaaaaattctgaaaatccccactatttattggatccaagtacttggatcaagagagtgactgaacttttccctaagctggctgtaaaatgcagtacaaactgcacacacttttgttggcatcttggcttctaccaatgcttcttgttggaagtgtttgatgcagaactagagaattttttctttggcattgttgcagattataatcagcaaatatgaatttcttttactggaaatcagcaaatttgaatttaaggtttggtttttcaaaaaaacagttgtcactgtcattccttttaattctacgtgtgaatcttaaatatatcgtattatatgagtgatcgttcatacatatatcttatcttctctttcttttttttccattattgagtattgccgtagcgtggtgccgccgcccatccttga

SEQ ID NO: 12060 - DNA, 996 bp, Oryza sativa
  Intron number 1 from transcript LOC_Os03g43930.1 (locus LO C_Os03g43930) derived from phytozome v7.0 (chr-ID Chr3; po s 24654171 to 24655166 reverse strand)
cccaagcagatcaaggtctggttccagaaccgcaggtgcgtgccttctccttcttctctccacttctctcgatccgctgctcactgcttccttccacatgaatttcgctttcttggcttctcttggctcttaagattttctgtgtttatgttttccattaaagaagaaaaaaatatcgtttcttattagagggaaaaaaatgttttggctttcatctttcttgtccttttcaggattcgtatgtttggtttagtatgtggatgcaggcacctagtaatagattgttgtgccaaaatctgagtttcgcgttggctattttggtctaagatgcctgagtttttcttttttgtgatcgagttctggtctattctttgaatgccatctcgaattttcttttcttattcttttttttttgccgtttgtgtcgtggtttcgtggtgggggacgcagaagcggatgagtcttttcactcttgagtgctctgctttgagctagaacctcgcgagctgatgtgattctcagaggctgtcttgacatttagacatgattgctaatcttatgttggttggcattgcaagagcaactgtaaaagcaaagttaaagggtcatcttacccaacgcagcggtcagatttaagccagatttggtgttgcaaggatgtatgcatcatcatcttcagctgagaaaaaataataataattcgtactattatttgttcctgcttatcagtcattagttgctttcatgccatgaaaatgtgcagctgggatgccttgccctttacctaacacgcttgatgcctcacctgggatgtgatatgcctgttctgaggcacagcattgaatcgaatcttgtacattaaggatcgttgccacagtttcttccttgcaaatgatgtttttgtaactgtgtggtgtggtgtggccgacagttgatgatgtttttcctttgtgatttgcaggtgccgcgagaagcagcgcaaggaggcatctcgcc

SEQ ID NO: 12061 - DNA, 522 bp, Oryza sativa
  Intron number 1 from transcript LOC_Os04g31390.1 (locus LO C_Os04g31390) derived from phytozome v7.0 (chr-ID Chr4; po s 18599135 to 18599656)
acgcctcctccgtcctcttcctccagcagctcaaggtactgggatagtgggatccctttcaggattcaattctccggtagatttgcttccggtgttgtctatcgtgctggatcctgtatagttagggggtaaaagaagccattgatatgtaatcgatcactaattttgacttgtgagtagcgggcgcactctcctacgaccctgaacaatgcgagacatttttgtatacaatttgcaagtaacttgttgaatcatttggttctctgaggcttagggtcagggtttgaagaataaaatttcggttgctgatagttttgcaagtaccattagttgtttcttttagtcttaatgtcttatagacaaaatggctttcttttcttttctcactaatatgcctgctaaatatgtactggttgttagtattatttttaatgccttcttgtgtattgcatttactaattgcattgttttatcatgataatagaagctaactgtggtatttaacaactgagcagcaaagga

SEQ ID NO: 12062 - DNA, 723 bp, Oryza sativa
  Intron number 3 from transcript LOC_Os06g42630.1 (locus LO C_Os06g42630) derived from phytozome v7.0 (chr-ID Chr6; po s 25633945 to 25634667 reverse strand)
tcaagctgctccaacaggaagacctggaaaaggtgagcattcaccaagccatcatctttaccttttttttttttttggaatacgcaaggagcgtatctttgtattaagaaggaataaatgtatgtacaaagtgggccgaaaagacaaagcgaaggggacagggtacaggaggagaaccaagaaacaaaagcttaatctccaactaaattttgcgacccttctccactaacatgagctaccaaaacagggattgcagctctagctagccgccacagctccgcttcacccgtcataacccttgcaacttccgcccaagttctgctcttctggttgattacctgcttctcttcttcttatgataatgcactctggccttgtttgatttagattgttaagcggattatcgatcgattggattatggggataagttaaatgctttaagaaataaacttaaacaaataacttaaaacaagtggtaacgtatttttcgaagagtggagcaaataaccccgtttcaatagttcgatgaatgagatgaaaagaacagggccgccttcagctaataagctagtgctagtagtactatgtatttgtggaattgataggctattagctctgaaggtgatgcagttatatgtattatgtgctcacagcatgctctttcttttgctgtcaacattctttcagaaaatccctgagaagtttgtgcagcaacacctgac

SEQ ID NO: 12063 - DNA, 991 bp, Oryza sativa
  Intron number 2 from transcript LOC_Os03g55380.1 (locus LO C_Os03g55380) derived from phytozome v7.0 (chr-ID Chr3; po s 31497099 to 31498089)
ccggcgagccggagccgtccttgatcccttaccaggtcacgcctcgcttcgatttctcgattggttgcaatgttgcattgatgttgtttatttctgacggatattgacgttttcttagaataatagttttgggttgaggtgactagcattggggcggtagtgttcttcgtgaattttacgtcacgatgagaatcctctgttcccattatttgttttgtttcgatagttggtttgttgtgatggacacttgcaggggaagtaatttgtttggtgtaaagtgcctgccaaatccgaacttactctctgtatgtataaaagagattttgatgtgatggtgccacggtatatttgctagtggggaattcaggttgttgtgagcatgcagatgtcgtgtgcttgaatgtgatggcttgatggtatactcgtatgcgtgtggaatgtgtgaccgccgcgcacctgtgttagtgacattacataacttacgagtgaaacaagtttttttttgtgagaatcacgtaatgtgcatgaccaaaatcagtttgtttttctaccagttgaactagtctgttaatttgaggtttgtagtacttctacttcacctatactccgtattggacaatgtgcacaggctgttgcctatgtaaggaaagttattagcaataattgatggagctgctagatttcatgccctgtatggctgcaacctgcttatttattgctctaagtaggtccttgggttaattaatatactttatttgatgtgtcctagccctgaagaacagcccactagtccttttactaagtatgcggtgaacttcttttgtgtctgtggtatgagcttacttatgttaaaccacaatctcagttgcattaattaatgctgcttatcaccttctaattttctattgtaatctggttggtggtgctttagtaatgtaaagttgactcttctgcagattttgagttggcaacctcgtgcactatattttcc

SEQ ID NO: 12064 - DNA, 647 bp, Oryza sativa
  Intron number 4 from transcript LOC_Os03g50040.1 (locus LO C_Os03g50040) derived from phytozome v7.0 (chr-ID Chr3; po s 28546878 to 28547524 reverse strand)
ggcaaaggaactttcaatcaataaagttgggcacggtcagtatgccaagtagaaattggttatacatgtgtgtagtttgtactatgatgattgattgaatcttgcaagattattgtgttgtttatgttgcatggtttggaacctgatgccacttgctatgcaagttgtaaattgtcttagcatgatgacttcttgtgagaaacagtcagggattttcctacttaaatatagaagtcgaaaattgtaatagacttctctgattgctcaaacaaatatttacattgcatctaggccgaaagataacaacgtaacatcctaaacaagattgcattcgattcataggtgctgctggaatagtcttataaccaatcgtgtagcacttttattggtaattcttttcttgttctgaacataaattttcttgttcaaccttgctatttctgctgtttgcatttccattaatctgggttaagagaaattttcttgagttagtttgtttttgaatttgcctgtttggttgtttttttctagttaacgttagtattttccatgctttgaaaagcttatattgtttgtatacttgtatacttataacaatatatcttgagatattgccattcactgctcagtaatttatgcagcgttac

SEQ ID NO: 12065 - DNA, 810 bp, Oryza sativa
  Intron number 1 from transcript LOC_Os06g35910.1 (locus LO C_Os06g35910) derived from phytozome v7.0 (chr-ID Chr6; po s 20950621 to 20951430 reverse strand)
cgtccccctcctccccggaggagccggtgactgaggtccgtagcacttcgtttttctcctaattttgtgcggttttcggtctttgcttgtactagattggagtggttgcgtgtcagggttcgtttgtggtggattgagggtgggatttggaggagagggcgtgtttgattgattggttggggatgcttatttgggcgcttcggattgaggagtggagagcatgcggtgaggtggtgctagctttatactagtaaggaacaatttgttacatgcataatgctgctggtgtggctagttgctgtttcatgtgtggttgcagggtgtagagcagcaagcgtcaaaaaactctaattgagtagttgaagtttgctaatgctgtaaagtaaaaaggtcgtatttggattgatacacggatgtacctttttcaggcaaattttggactctagtttatatgtgataactactttggtctgtcgatttctttagatgcatatgctacactatgaagaaagataaagagatgtgtttactttttctttgtatctaagcatgatttgcgtatgcttgggaatgcctaactaataatcaatgcgtggaagctccttgaaatagcagcactgggatatacttcatcaatctctaatagcaacacttggatatatttcatcaatctctctgtttctttcccgaaaaactatttttatattttttgttaattaatgtcgctgtggacttagctgactgcttcttgttataatttatcatgacaaatcagggaacccacacatttgagcaagggccaaaggttca

SEQ ID NO: 12066 - DNA, 550 bp, Oryza sativa
  Intron number 2 from transcript LOC_Os04g45930.1 (locus LO C_Os04g45930) derived from phytozome v7.0 (chr-ID Chr4; po s 27015597 to 27016146)
cgacgctgcagcgaacggcgcgagccacggtgaaggtattgcttgcttcttcttcttctttcttttttttttttggtatagatcgtttatgttgggttgtactatgtcagttttttggtatattaagatgattgctgcattagtgtatttttatgtggggtgcaatgaacgtccgaagtagcatgtcatggatgtcttgttatattgactgttttccatttaatcctggttagcattgcttatggtcgcatggtttgcagttggaatattagatctatgagatcatttagtactgttccaacggttggtctttgattcagtctgagtacatggcattgcccttcaacaaacagcaacattgatctttcctagttttatgcaagcaaaacatagtgagaaccactcttaataaaacattgaagatcatatgtttatggcaaaacataaaagatcgtatgtttatactttatactcatggctgtttttttggctatatttttattggatagcagttgcccatgtagtaaggttgtacttatttcatttttag

SEQ ID NO: 12067 - DNA, 793 bp, Oryza sativa
  Intron number 2 from transcript LOC_Os03g56970.1 (locus LO C_Os03g56970) derived from phytozome v7.0 (chr-ID Chr3; po s 32437742 to 32438534)
ttaagctccgaatttttagggtcatttggtatgtctatgaggtgcccatagcgagtttaaacactttgcgtctaacttgctagctatagtctctaggctaactgccattatatggtcggattttgtcctaaatttatgtttcagtcaaactcttgtgctattttttggttatttgttgaatagctcaattgtaaagaaaattctagttttggaccaaatcggtatatgctctgcgttataaagtttaaatctaactcgattttaacgtgctatgtgcattataaaatatttaaaatttaaacatgtaatatttaaacatgtcctattgaccattgttcatgcttctgctcaagcaatgtttgttagctaagctgcagttgttcctgcatatcatttcaaaattacgatttactgatagatatgctacctgaatatcttgcattccttctagtgaatattttccagacattgatattgcacgaacgggaatgggtcctttgctccttttactagcatatttagacatttcatgattgtgtgtgattgcagtgctgtatcttgtgttgctctatgtaatcttgatggttgcatgaatccatagaccaaataaatgtcagtagtttcgaaaagccaagctgtgctaaagggaccctaagtatgcttcgccgttttgaacttcaattcaaattctttgttactactttacgaagattgtttcatttgacttcgctcattatttttattgtgaatgcgttgatttaactattattctgttgtttcaaattttgacagc

SEQ ID NO: 12068 - DNA, 914 bp, Oryza sativa
  Intron number 2 from transcript LOC_Os04g27800.1 (locus LO C_Os04g27800) derived from phytozome v7.0 (chr-ID Chr4; po s 16255275 to 16256188 reverse strand)
ataacagaatagctttcgtacttgaatttggagtggtaagcattaggagcatggttaggcatgttagtattatcaaggattggtctagcttcttaggtcaagcgtggtaaattgcatagtttctttaacaaaatatgggtgatccatgtttgacttgtgggtttaacaatgttcattgggaaagtagggaggcatctacctattgaatatagcttttctacatttaataactaaaataatccaaagagttagtttgggtcagagttgacttggtctagaaagaaaccgtgtttcaaaaatgtatggttaactaattataattaggaagatgtttatgcctgcccaaccgatcacagctgctgtttactgttttgatctctactctgtaccaaacttaccacatgcattcttcttgaaaaacaaacaccttcttttttgttaatgttaggtgtggtagcattgatttgaactcagttcaatccaagtatatagatcatgatatctccaaggaagaaattttttctagcttggatcctttagtgcagttggtagttgaagtaggaagggaagctactgctgcatctccacctcagtttgtagttcataaagtagaaattgtcactggtaaaagggaagcatcacctcctgagaagaaaggtcatggctagcatctctttgattccttctataatccaatataatgtctgtcacaaaaatatccccttaagaatgttaataagatgtgagatttttactaaattggccataaacttgctcaaagagtatatgttccttaaaatcctactcaactcacagatttgcctagcaaaaacagttactagttagaagcttctgcaactctaatgcaatgttgtgatcttttcttctgatcctttcttcatctgtcttgcaga

SEQ ID NO: 12069 - DNA, 959 bp, Oryza sativa
  Intron number 1 from transcript LOC_Os06g27760.1 (locus LO C_Os06g27760) derived from phytozome v7.0 (chr-ID Chr6; po s 15719074 to 15720032 reverse strand)
gtcgccgcagggtcaagcccaagcccaagcccaaggtgccgtgtggtgcttcaccttctaacttctttacctacctagtgggagcccgttgttgcctgcttcctttggatgcaagggaattattcgcgagtggaaatagaaattgaattaatggtgattagtttgtatgtgcattcgatgcaaacaaggagggagtttgattgatcttaaaagatctgctgtaggccgtttctatgtctaattctttccgcatttaagaacattttagaaaattactagaccgtaattcgggagtgaagcccctattgcccgctcaagtttgcaactaagacatttttataagttagctacatagatcctgagtggttttagctattttcattcaaacagttatatgttactcacaagtgtattcaccagtcaatagtgcggacattctttataggtgtgaatttcggactgtgtacctcaaagacaaaaaaaaaaaaagaaagaaagaaagaaaagaattctgtgttttagttcagagtacagaacatatagtataaacacacatcagttacaaatctaaggtaatcttaagagaattgtgcattcttgctatatcctggtagagccttacaagcatttgtatgcagtgagtcactgagctgactagtatcgattttgtctatgccagcagctccttcttttatagtttgttagaacaattgatcttcagggttcacaatgtggagcaaatctttaagagaataatgcattgatgttctgctttcttatggagcaaatgcttagaatgccgcctggcttgaagatatttttttatcatacgctcttaactctgaagtactccagatctgtatgtagccaggttccaacaattgtttcaattctcactaatagccaaatattcatttcttctgaggcaggtaaaccgaactacagtacatctctgactg

SEQ ID NO: 12070 - DNA, 776 bp, Oryza sativa
  Intron number 2 from transcript LOC_Os03g44320.1 (locus LO C_Os03g44320) derived from phytozome v7.0 (chr-ID Chr3; po s 24910623 to 24911398)
tgttttccaggtgggtctcacttcatttttctgacttgaagtgccacaaagatgttatgcgagatgaagatctagccaatatgccgagtggacgtcacttaagccataaccgggctcaatactaccttagagactgtatttgcaccggtttttgaagttagggaaacttatacctcgtggttgatgaatgtgattggatcgagggcaagattggagggacgtaaatagacttttcttttaggaccacctatacatttggcgacaaattttctcctaaaaatttgacagatgtaattatagtacaatcgtagtgtaattacactgtaacttatatgtaattacactgtaacttgcatgtaactacagtgtaacttgtatataagtttcacgtaattttgaatcgttaaatctattacaagatttgttttggtgaggaagaaaaaaaatcacagcacacacatatgtgtaaggatttgttcccacaacctctattttaccgaaataagacatattacagagagatttttgaaagttacatacaagttacactatagttacagtgtaattacatgcaagttacagtgtaattatactacgattatactgtaattacatctgtcaaatttttgggagaaaatttgtcgacaaatatatagaaaaatcgtttctttttggtattaggacaaatagaatatatgggcccagtgaactcaggcccacttttgtattgggtccatctagattaggcccattttaattattttatgctggacagg

SEQ ID NO: 12071 - DNA, 521 bp, Oryza sativa
  Intron number 2 from transcript LOC_Os05g37130.3 (locus LO C_Os05g37130) derived from phytozome v7.0 (chr-ID Chr5; po s 21638353 to 21638873 reverse strand)
cgacatccacgttttcctcctcttccaggccaacggtaacaaaaaagaatttgaattttattctacttcgaaattttgaatatgcaaatttgagtttcatagaacaaagagaacttctaatggccatgtcttctcttattgtcttaccagaaaaaatatccgtgcgttgcaacgggtgaaaactattttaattttattatagttaagatgaaatttattgtgggatttcacttggatatatatatttttagaaaatcatgagctgcaattaggagtctgttcgtctaaagttatcatgcaagttttcttatacaactccttatgtatttccaaaagcgaacgaacttaaaaaccgactcatacatgaatgacatatcaaagtaccaacaaaaacatcttcaatttttatatattgtcttattagaaaacgtacattttttttttcgccagaccttaatataatggtaagtttctgattgcaaattattttgcttatgttcgttctgcagagtacatttctg

SEQ ID NO: 12072 - DNA, 971 bp, Oryza sativa
  Intron number 1 from transcript LOC_Os05g37130.3 (locus LO C_Os05g37130) derived from phytozome v7.0 (chr-ID Chr5; po s 21639893 to 21640863 reverse strand)
cttctccctcctcctcctcctcctcctctcagcaggtagggatactcatggctccttcgtttcattccattcgtgcgttccttgcgtgtttttgtcagtgtggatcatatggaagactgaaacacaaggatcaaggatcgatggtttagttccttgtgttctctgtttcttcttctccttctcgtttcatttcgaagagaccattgatggcttggagcgctttgagtgcagttttaagaatttaagggtgtttacgcaaaaaaataaaatagaataaaggagagtaaatttgagcgtggagaaatgcgacctttgtactaccgtgcaaaacagctgtgctggtgttatcgtctacaggaagtgaaaaacagtgaattgaatcaattgatgatgatgcagttgtctacaatgagcctatgaggtcgttttcttcgattaatcaagcatgtttcaggcggctggtccgacgtgtactggatagtgaaaacattgaatattccgcaccacgcggtgatcctgatccttttgctgaaaattttcacggccatttgatttgacattgtttgatatttttttctccctttgattgcaagctccgtgtttctgctcgtcgaaaacgacctcctacccaagatcatttcatgtagtttaattatgtgatagggaaacttcccccctggattaacttcttactatctcttacgatatttcgaatgactggttaaaaaaaagatatttcaaatgccttgctgattatagcaattaactgagcttgaaatggtaagcatcatgttcagacatgataagctctctttccctgacaaaaacaagtaccattttttttctttttacgtaactggcataaaaacaggttaaatgttgccgatgcagcgctgctatacaaaaatgcaagtgtaaatttcatttttcatttctgccctccttaatcttggtattaatcaccgcagcca

SEQ ID NO: 12073 - DNA, 773 bp, Oryza sativa
  Intron number 1 from transcript LOC_Os06g07070.1 (locus LO C_Os06g07070) derived from phytozome v7.0 (chr-ID Chr6; po s 3359743 to 3360515)
ctctgctgcgggaggaaaggctccggggaggatttgtaaggatttcttcttctttctttttgttttttactcttgactgcttgttcttgtgttcttggggcttgttgggttcgtggttgtgggagcgcggggggtttggcgtgattcgtggtggaggatttgggaattctccccgattttgtgcgctggtctatcgattcttatcctgggtgggtttggtttagtttggttagatgagacgggatgaaacctagaggctagagatgatgtgcagtctggttgctccagtgattgggtactggaagttgtctgtttggtactgaatttgataggaaaaacgataaatcttggtttagttttggaacaattctgtaaaggtagtggttttatagcagtgtaactagtggaatttttggggaaacagagacagtctactgttttagactgtcgaaatgtgtgatgttcagtatggaattccttttgtagctctcatatatgctgttttcgaatccttttgtgtgaataatcgattttacaaagtgaatgaaaatgaaatatgctccgataatactgtaggattaaatgctatggtaatttggcatggtagttttctttttgatgcatcatcaggatgtgtcagtcaattcgagtgggtaccatatcagttgaagggaaagaaatagtttgaattgttactttacctaaccgtggtgctaaaacgtggtagactggtatctcatattctgtttcatggcttcgatttaacaggagtg

SEQ ID NO: 12074 - DNA, 533 bp, Oryza sativa
  Intron number 2 from transcript LOC_Os06g07070.1 (locus LO C_Os06g07070) derived from phytozome v7.0 (chr-ID Chr6; po s 3360648 to 3361180)
gttctcaggtttctattcttgacatctcagtcgatttgatctacatgtcatgtcaagaaatagaatttcaactgtctcctttagatatcttgctttgtagttggcccagccaggaatcatcattaatttgcagcgttggaaaatcttattgatagctgtctcactaagtaaccaaacaactatcagctagaattttttattcggttgcagagcattgatctttgattgcattatcattaagtaggtaggatatgttgtcataggcaggtcaacttagacaaaatttggaagatggactggctacaggtttgcagatctgtatcttgtacaataaaagaaggctcaacatattccctgtcatggctgcaactaagttgtatgtcttttaaaaggactgttaaccgtaacctaccacaattttgtagcagtttgcccgtctgaagattcttcttctataacaaggtttcttgattatttcaattgctaatgtttttttatacagattgctgttaagaagttgaagtgcgcaaaga

SEQ ID NO: 12075 - DNA, 506 bp, Oryza sativa
  Intron number 2 from transcript LOC_Os05g28520.1 (locus LO C_Os05g28520) derived from phytozome v7.0 (chr-ID Chr5; po s 16643865 to 16644370 reverse strand)
aaggcgtgcgccctgcagctcggtgagaacgattgatgttttcttggctcactttcatgttcgtacatgccctgaatttcagtctaaattttgacaaaattcagagactcttaattataggcagtagtaataaagtttattttcaaaaaaccgcaataatagagtttcctttaaggaaataataattcacagtgttataattaggttgcagcttgggcataatttcttcttctcttccatcacaagtttcccctgcatttgaacaagcataggccaaatttgcctgaattatccgtgaatgttcatcacaaagacatttttccatagaaatcaaagtagatatagaatggtaggaaaaaaatttgtgctaggaatgttgtcgtggctgtcagagatggacagctgaacaaccaaccattcgaccccatccgggctgcacgcatgttcttgtccaattgctcgtcaactttagcctcatctctgctcaatcattcgcaggttgatcc

SEQ ID NO: 12076 - DNA, 778 bp, Oryza sativa
  Intron number 1 from transcript LOC_Os03g38970.1 (locus LO C_Os03g38970) derived from phytozome v7.0 (chr-ID Chr3; po s 21657376 to 21658153 reverse strand)
cgccgcaaatcgacggcgcgcccaattatcgccaggtgcgttgctcctcgttcctaatctagtaataatctggatggtttccggatcagtccgccgcgcgccgcgaattccttggtttccctggcccccccattccatgcgttcgcgacgggaatctgcagcaatttttggctccaatcttcacgaccacggaagaaacctgccttgcctgtttatgtctcttacatgttttgtgcgctgattgtctgctttatcggtaaccttgtgcagcatgaccgattcttatgtgcgcatcctatgataattttggtgttctttccggaagtgcctttacttgttttcagaatagtaaatgtaaatctcaaaataaattagtacaagaatgttaacacttaatgctatgcaaattgcatttggatttcttgatgatttttgttgatcacactgatgaacatgagcattaacacttccaatgcatatctatctgggctgtttctgctaaggcatcatagtcttcgatgatagaagatataacatttaaagaaaaacaatgtgaaggccgcatggaactttgtatgaactaaacaatccatctgacgtgtttattataaactcttgaatgaatagtcctacaaaatgtgttctccaatttgtaattttcttgtgtcctttttatccagtaaagattcagcaacagcctgggttctcaatcatctataattttctgtcatttactcactgttgccaactgtttttcaggcgggttctttacgagttc

SEQ ID NO: 12077 - DNA, 408 bp, Oryza sativa
  Intron number 6 from transcript LOC_Os05g05530.1 (locus LO C_Os05g05530) derived from phytozome v7.0 (chr-ID Chr5; po s 2748673 to 2749080 reverse strand)
aggtggcatttcaaaccggtatgcttcgttgtgtcaactaaacaattgtaggtcatgtaaatagaacaattgattcattttttcactatattataatgataaagaatatttcattattagcaaaagattcatataatttctgatttgattattcaatatatccgtggcaacgcgcggggtcccggctagtatttcataggtttagtccatggtatcttctacgcacgctgcaacgcattatctcttcttggtttcattcctatattgcattcatacttatttcctttttagttctagtacaaccatgttgtgcttaaccgaaggaaaactgcaatcaagttcatctatttttttcctcttatattttgtacaggtttcttgcaggaaagaataggttgagcgaaggta

SEQ ID NO: 12078 - DNA, 894 bp, Oryza sativa
  Intron number 4 from transcript LOC_Os05g05530.1 (locus LO C_Os05g05530) derived from phytozome v7.0 (chr-ID Chr5; po s 2749905 to 2750798 reverse strand)
ggtaagatgctatcagtcaactgtgaatctattatgtacttatgttgtttcatctctacaaagccaaaaaatgaagttctccctagacacacccaaaccttccaagtagagcaataattttattagcaagcattatttccacgtatctattgcctctttgatttaaatagtaatccaagataaaggagttaatggaataaactaaatgggctgcttattttgtttaacgtccatagatttgcaagcaggagtccctcaatctatattttctttgcttggcaggagttacatttttttagatgacatccagtagggattcagaccactggagcttgagggatacacaccattcagtaatttgagaaattgatgtttcctaaacttatagattatatatgatactaattagttgtgtttgtcgtttttgagtaatcagtaccatatgtaaaatgtagctcaagccattttttgtgcttttacctctcctatcaaggtaggaggactgatgttggtatttgggaacgccttttcattttctttatgtaatgagaattaatatatttccaactcctaattagtaaatcacaacaagagcaaagcattaaggatataattacccaatccaagaaactagacaattggaataactaggctaaaaatgtaatatgaaaatacagaacattcaatgatgtgttgggaggatcatttccatccactgattgcatatgctaattctataatctatcatctcttttttcaaaaggtccttttggagattcttcatatggttatcctgacctgctaacttttatgatttaatctgtatgtgctgctgctttccatgtttctgcaaatgcatatgtattgatgtgctcttcaatctccatgcagagt

SEQ ID NO: 12079 - DNA, 787 bp, Oryza sativa
  Intron number 3 from transcript LOC_Os05g05530.1 (locus LO C_Os05g05530) derived from phytozome v7.0 (chr-ID Chr5; po s 2750815 to 2751601 reverse strand)
tgactttgtgagcagctcagtttaatagaaccaaggtacgttgtgctcttctccttttatttaaatatatttgcagattttcagaattcttcagtagcttcatttgattttctttacaatcttataggtaagatggttgatctcgatcattgtttcaaatttattgcctacaactctttgaaatagaaggtaaattaatcagacgctcgtctactttatatgtttgtgtatgtcatatacttgatgaaatgcttgatggacttagcccgtcggtatgcattattggttaagcactcaaaactgcacactgttgtcacttaattttagatttctcatcacgttcagttatataagagtcaggccataaaagatatggcagctattaactatataatattttgacccaaatggttcagttctaaagcacttaaagatgattattgcaggtattataggccaacacaaagtttgtttttgttatctcttagttgcttgcagtatactcatatcacattgaagccaagttatgctatgtattaccttgatttggtcatgaaatttttctctcaattcaggaagcatttttattcaacgatgtatgcactttcactgctaaactactatgcagtgaatgtgttcatgattgttttcttctgatcctagcacatttcctgagatatccttcaaatatgatgacttcaaattcatcgtgtaccttttttcctctctcatatttacattgttatgcctaggacgatagcttcaatttaacagtgcaccttcacta

SEQ ID NO: 12080 - DNA, 868 bp, Oryza sativa
  Intron number 3 from transcript LOC_Os06g10160.1 (locus LO C_Os06g10160) derived from phytozome v7.0 (chr-ID Chr6; po s 5196589 to 5197456 reverse strand)
gcgacttcaaggcctccaacattcttctcgacaaggtaaatcacacagcaagcttaatttacagcaaaattcgttggtgttgaccacatgatttgtgttgcaatttggggggattacaatttgagagcacagtttaaaaattgaatcattgttaagctgcagagtgtagggcaagtaggatgaattgagaatgtagtagtggttgtttattttgtatacgcgacacgcccaatcaggcgaatggatcgcacgttgtcaactgtttccagccgggtcaaaaatcgtagcttccaacagtaggattaattaaaataatgcgacaaataatgcgacaaattagcagcaaaacctttgattgtttattacacaagccggtcgttgggcgtagaactgattggctttgtctggttcgttaggaacccacggtttttttaagttcaacgatccaaactgccatactggctttgtcgtgtcagtacggtacatgccaaccactaccacaacgccacagcaacatcaatgaaatcaaaatgcacaacaaaatcacaagttctttttagttttgaacgaagttgcaagaatatttatgatcttaggtcccatttggcataactacagctttcaactctaacttacgtagagttagagctgtcaaacggtacagattcttcaattttagagcggagttagcggagctgctccataaatttatactatagaggtgtagctgggtttttgtcgctccacaactccactccatcttaatagacccattaaaataggcacactttgatgccaaatttgctgacttgtcaaatgggaaaaatttgcaggattacacggcgaagctgtcggactttgggctggc

SEQ ID NO: 12081 - DNA, 831 bp, Oryza sativa
  Intron number 4 from transcript LOC_Os04g32180.1 (locus LO C_Os04g32180) derived from phytozome v7.0 (chr-ID Chr4; po s 19122632 to 19123462 reverse strand)
gtggtacacaggtaagtacctttttggactgcaatattaagctttgttctaataatttcttgctgcacatctagaataaagaccctggtatgagtgagttgtctagcagttatacaaaacattgagaagcccatagttggtcggtaccattctaaaggtttcttcattgacaagctcaagtgccgtagctgatctagatcagcttggcgccgtcgtcttaggcgcagtaatttgaagaacttgcaaaaagaagcactctacctgagtcactactgttatcagttaaagcaaaggttcatgggggcatttcagccttttgtagagtattttaaagataaatggtgactattcattatattgcatagcatgaacaactgactggtgtttgaactatcttaagaacttccaatcatattctttttacaaattattgtgtattccaaatttcaaattagacaccgccgccacccaccacctcctccctcccccgcctagatgagttgaattgttcaaatttttgaaatattggtaagtaaatatgcggacacctaagataaatttcaaatttttacttttctgcaggttgcgcactggtttgagaaaacaatcggtgatggtacttgcatattagtttctgttgcgtcacctatgggttgttgatttattggactgatccaagtcactcgtttaaaaatgattggagtgtgttttaaagcatcctacctgaatttgttgtttacttcacaaatcgcttgcaatagtggatgaatggtgaggacatgaatggaacataaccctcttgctttgcctttcaacaagtgcagtcaagtt

SEQ ID NO: 12082 - DNA, 805 bp, Oryza sativa
  Intron number 2 from transcript LOC_Os05g19370.1 (locus LO C_Os05g19370) derived from phytozome v7.0 (chr-ID Chr5; po s 11248605 to 11249409)
acaaggcccgccgcctcggctacaaggccaagcaggtcgcttcccttcttcttactagactgtccccctctctcgctcttactactgtgcccgcggatctgtatcaatcgacgatggatttcgccttggttgctgctggtagccgtctaatttgtagagatttttagatagatttgcaggtccagccgatcatcgtgaatgcggaaaatgtgtagagccatttattttattaattctgcttgtatgccttcaatgcaagttgaaggactggtctggtttctggaaatggaagtttagttttgtcgtgctgttttttatctacttaacctagatccgccatatgttagcaggcagagcatcagttaaccaccggtttagttttttatagtggcgcttaatgcgccattttcatttgattgtatcactgcagtagcttaggttctctactacattttaaagggatgcctttgtcaatgtattaacattccttgtgattgtatttgtcttacaaaagacatgttttgatgtgttattttacttggaattgacatggtacattggttgtctgtgtttatactgcattgattatgtagcatttagcaatttaatgctcaaggttgataaaactgtattgtgttgtttgtactattagtttgctaatgatactctagcacaattttgtatggttgctccaattgtttagccaaaatgtattcacatgctgctgtctgattcacttttgaatgttttggccctataatccaaatattgtgcataactattttttgaccttgctttcagggct

SEQ ID NO: 12083 - DNA, 717 bp, Oryza sativa
  Intron number 2 from transcript LOC_Os05g07632.1 (locus LO C_Os05g07632) derived from phytozome v7.0 (chr-ID Chr5; po s 4099728 to 4100444 reverse strand)
tccctcccctacctggtaaggtgttcgtcgaggaggtgagcttttcttggtttttgtttgattcatgggtgtaaagataagagttttcttggttaatttcttgtttggtttgaagaagtctggcttgccctaggcgcaaatgtggtattaacttcgattggggttggatttgctctgtgcgacctccggattaggcagggattcagcttgctctgatgcttctttagaatacaaactgcacatctttgggagaaatcaatgccatttaagtggttcatgggttaatttccatcttttcttatcttggttgtactagtggggtggaaagttagctcatgcttcttccatttcggagcattggcgagtttcgtctaaaacagggcaagtgactaagtgagtttcatttgagtttgatggttccctttggtgaattatccccagtattgctgttcttgtagttggtgggttcgatgatgtagtactcttagctaaggagtagatttttagttctgttgcttggaatcttggtagtcagttaattaccatattcatatacttggatcacttatgactaacatttctgaacgttcccaagctatggtttatattattccattacatgatacactcttcgaggataagagctgtttacctttcatttttgtaggccaggactaattagatgtgcatttgttttttaggcaattggagctgaat

SEQ ID NO: 12084 - DNA, 919 bp, Oryza sativa
  Intron number 4 from transcript LOC_Os06g21099.1 (locus LO C_Os06g21099) derived from phytozome v7.0 (chr-ID Chr6; po s 12186640 to 12187558)
agcagctgagacgccattgtaggtaggaagcaagcaagaaaacttaatcgtttcaagtttcaacctctgtatcatgatttagtagagaattaagcattctgcaatgatatgatctacagatcatactcctcagtccatgcatccctccagcttggagcagccgtacatgcactaattgaattgttattattatagagagcaatcttctattgggtcataacttcttgcttgcgttcctgcatgagtgaagctaaaatggactcttgcattgatgcaaatattatctttagctgaccttccattttccatcagttttgaatgcagtctttagctgacctttcatgttccatcagtttccagttgtgttatcgtgctctgtcaaccatttccatctatttatttcttcttttcggacatacaagtatgaagcattttctgtgtaaacatagtcatgtttcgtacatacgtcttactgaaatgtaaatgtactagattatatgtgaaattatagattgggtggttgacaacaaccaaagaattggttgttgcccttatgtcctaatgaaataacaagctactaaagttacagtatgtttgaggttggtaagtccaaacaactaacagtattgatctttcgaaaggatagctacacaactatctagatagtctgaacatggaatggaattgtttcagtgcaggatgccaacaatgatgtggctgtagactagtgatgtacaatctgtttagacggatatgcttagttcagtggtggcattttgtttttacttttttatttttgggttgacctccagtcaccgatgagctgtggtagattcaatttaatcgccatgacttgtttccttatcttttcttttttaagaaatttaatcttacacattcttgtggtgcagtgcattgg

SEQ ID NO: 12085 - DNA, 643 bp, Oryza sativa
  Intron number 1 from transcript LOC_Os06g40790.1 (locus LO C_Os06g40790) derived from phytozome v7.0 (chr-ID Chr6; po s 24336255 to 24336897 reverse strand)
cacagtaatttagtactacatggttatggccaaatgtgttgtatgattaatctcatcacatcctaagctgacaaactagttgacagacacaacatttttcctgccagcatcatcacacaagcacactcgtccgtttttctaggaccagacagtttgccaatacaaataatttcattgttaggtaaggtgatagctcacatgctatgcataatctcatttttctttctggcaaggcacttccattgttggctcaatatagttatcctcctttgacccagttaacttcgctcccttgtttccttgctgtgtgtcagttagctcttctggttaggcgtcaaatgatggtgttcgtgtcttctattaattgatttaattactgggtattttatgttagtggacttctaagaaagcaaactttttatgttctgttgaaacaataacagtcagagcttaactttcattttttcccattaaaaaaaatacagtgcattgttcaatattcaatatgagttttaatactcaacacatttgttgaattgacttagtaataatggtcgacaatgctattaagaaactgctaagttcttcttttcttcttgctcatacagttcttgaaacataaagatcagaaggcattgtattc

SEQ ID NO: 12086 - DNA, 755 bp, Oryza sativa
  Intron number 1 from transcript LOC_Os05g14980.1 (locus LO C_Os05g14980) derived from phytozome v7.0 (chr-ID Chr5; po s 8500130 to 8500884)
accgttgaaggtgagggtccctcggagttttcctctctaagatttactcaattggtctggttctgtactgtcctgatttcggcattgtttgggctccgattcgagtgtcgcggtgcggcgattgggcggctagtgttccggttcgagtggtgctacgattggctggtgcttgtttacggattagggcattgggttcccaattgatcgcgcaagatttgttgtaatgcttgcggcaattcagcagttgtcaagttaactttcccagattagtcttggcattctgtgaacacgacttgcccaaaagcgtatctgtttatatcattatatgtcacttcaaaagagagagagagagatagagaataatcaaagtgaattagatcctccaagttagcacccttgtgttgggtcttatgtttttgccagtagttttttaagggtgattgcattgatgcagtctgccattgtttccctggatttcatggtcacgactgtagcagaagtgagttctatgtctctatgctatccatccgtttatctaactatttttcttcgtcatctattaagcttttcagcacaggttcttatgtgaaaagatttttgtatgagccggaatcctttaatgaatacctagatgctagagatacatctttcttaactgattgggagttttgcagcattttattgggagtttatttatatcttgttttatgttctgctttttaggattcaagcacagccaattccaaggggtataa

SEQ ID NO: 12087 - DNA, 845 bp, Oryza sativa
  Intron number 1 from transcript LOC_Os06g04980.1 (locus LO C_Os06g04980) derived from phytozome v7.0 (chr-ID Chr6; po s 2194392 to 2195236)
caagcgccgccgccgccaagtccaagttccccgtaaaagaacaccatctccttccttattttttcgattatttgaatctgtatatatctatagtatgtacacaaacaaacagaaccaaaaaacaaaagattttactgttgttaagtggtaccaatttttttttaactaccttcatcccaaaaatataaaaaattagtaatggatgagacacatttttttttccagattaatacgtttttatattttgggacagatagaatagtacaaattttcatacctcagagtatcagatataccatcttattaaaaacttgagcatcataaaaagacatgtttttattgagtgcaaggtaggagatcaaaagaggtggtttatctatgatcacaatggctggtggcctccaccttcttgttccttttgctatttaactagattgacccgacgtacatgggtagagaccatactatttattatgctatgtaaaatatgaaaaaaaaaactatatacatgctgaacttcaggttttccccttaagttgataacaagttggtttcttttacaaaactgttagtattgttgcacaaaaggggacaacagaagaaaacaaagataacggattgccatgtgtgcgatggtgtgcttgcttgagttttctgttttattactcaaatgtatgtaaaccaatgttttcaaaatcgctaatgtggcataatcagatgcttatatggtataatcggccacttatatgacttgagtagtataaggttggcgcatccgttccttgtacacggccttgtaaagcttttttaaaacactgatgtaaaccatgcatcttgtgctgcag

SEQ ID NO: 12088 - DNA, 581 bp, Oryza sativa
  Intron number 1 from transcript LOC_Os06g35410.1 (locus LO C_Os06g35410) derived from phytozome v7.0 (chr-ID Chr6; po s 20637268 to 20637848 reverse strand)
acgcagccatttccaggagcttcaggggccttcaggtacgctgcctacctctgctctgctctcctctcatcgaatcaaatcatggcaaattaagctcagtttgatcatcacaaaagcgtccccaaattgcatcccattttcatcattttttctagtccttgacttgttttggttgaagtctcatggtatgatgggctttcttacaaactcggattgcaatgatatttcatccaaaaaaatatctgatggtgcgttttttttttcaaaatgaaaacaaaaatgtactgatttggcatggtcattggaaccaatgcgctctcaatgcaataaaaaactgaatggaagtcagtctagcagcttgaatttccattcaaatgaagtacggttcctgtagaaggaatgatcaggacctagcagcattatatgacacgctgactgctgacatattataaatcgtattgcaaatttagatagaacaccggtaattgatttcttcatattctcgtcgaatcagtcgacctgataatcccattttgtgaattgaaggaactgaagcaaaattctgtaaggacggagaaagc

SEQ ID NO: 12089 - DNA, 873 bp, Oryza sativa
  Intron number 1 from transcript LOC_Os07g08200.1 (locus LO C_Os07g08200) derived from phytozome v7.0 (chr-ID Chr7; po s 4181660 to 4182532 reverse strand)
tctctgctgggaggtgattctctaatgtcctctttgcattgcagtttacggtattttctcaattgtgtttcccatgagcaacccatgaaggtttattctgtcgtgtttaataggacatatagcaacacagaatcattcttataatttggctataagaagatgcaggatttattaaaataaatataaaacattttatgtgctgtcttgtatagatatgtgttcaggattgtgaagttaattcattcttggttgtgtttactaggataaaccaatatacggtatgtgtgggcacaacttaagtttggtcaagaattttctctttgctaatgtgaatgtgttacacttcacatgtgaactgtacaataacattttttttcatctatcatcaactaatgccattattttgtcattgcatatccttgaattgatattgatgtatagatttctgtatcaatgaaagaaaatacctgttaaattctatgtgatctagcgttgacaccatgacaaaaccatctgtttggatatatttgcagtagtgtggtttctagtaaatggttaatgttatcagtgattcaagtgtccatgatgagatgtttatatatttgttggatcagatttctgttaatatgataatactggctcttatgattgttttgacttatattgtccatgtgaagatgttaagtatcactcctatccaatgaatctattacctgaaatgtgaaagcaatatgcatgtggtcatcagtgacctgtgtttcatttacttttaagcttagtcatatgtggtcattgatcagttttgatgccatacttaccaatggtgttgttttgtcagcattgagtactggcctgatccacaacgaggaatca

SEQ ID NO: 12090 - DNA, 952 bp, Oryza sativa
  Intron number 1 from transcript LOC_Os05g50120.1 (locus LO C_Os05g50120) derived from phytozome v7.0 (chr-ID Chr5; po s 28658684 to 28659635)
gatccgagcaagaaggtggggatggccttctcttctcttctcccctgaatgcttttcttggattcttgtggtttcttggattcctctgaactgttatttactagtagtaactgtttactgcatgaatgaatggtaaatgctctacatggagttgcgatctctgtttcatgagattgcgttgttgccggttagtgtggatctggttccatctctcatttgaacgatacgtttgcaatccatggcatgttcattcacatgcttacataagccaacgcgcggaatcattgctgatgtgatgctgatatagtacttacatgagtgctgtcaattcaggaatccaagataaccgagtatgtcaattcaggataactaagtatgaatccaagataaccaagtatgccaattcaggaaccctttattccagataaaggtagagctttacggaaactaaaggcataattctgcgggcagtagttcatattggaaaatggggcctactgcttttcttgcttctgtctcgtttgggaaaaaccaaaattcagtaacagctgcttttattttgacttttcacaatgtacagatttattttcgttctttcagaaaaaaaaagggggggggggggggggggaagggcgtacagataaggtttgtcactgtacttggaagaatcagattgcaaaatttattgatgctcggtcactatctaatttacatatctaatgcaatctaaatctgcatgtctttagtacattttacagtagtcctaatgcccttgaagttccttttcttatctgttgcacatcacattgtttgtacccgggtgttttcaaggcacaaggtttcgttcccaagaaatatgtcatcaacccgttcataccacctagcattcagtactgttactatagtgaactttaccttcttccattccaggaacctgacttcttcactgaat

SEQ ID NO: 12091 - DNA, 888 bp, Oryza sativa
  Intron number 1 from transcript LOC_Os04g38550.1 (locus LO C_Os04g38550) derived from phytozome v7.0 (chr-ID Chr4; po s 22723896 to 22724783 reverse strand)
gaccgtgcaagggtatatctatgctctgttttagtatgtactacctgtaatttgtagtttttgtgccgtgcttctaggttcagatttagcatctacatatggtttgtgtttgttccaccatgtcgatttcgcgccttttttcaaacaagttttcgcgccttttctttgtttgaaccctttttttttaaaaaaaaaatgaggcacaatcattttgcgtttttgtgctcgttcagtttctagtgcgatagcacatagcgtatattttttttctactcaagttagattagttgaagtaatgttctttcactttggaacggatgatttttccatactgacgctggaattgaactgttcatatgagaatcctataatattattgtgtgattcctatgctcgaaagggaaactaatatgtataatagtagtgttcttaaccattatatagttccaatcaataggtacttcaattttacacaacatatatggcaacatagcaaatctgaataaaggatacagtaagcagatgccacaaacaactcaaagttacatgggccccaaattttatcacaatctaaatatggtgtgggatttccaagttggtactttgtgatcaataatagagggattttgccatccttgaagagataccaaaagatactccacttaagattgaaaataagctggaccaaattaactgaaaagaagtgaatcatatacgaggatactttccacattgagctttaggccttgttctcctagtagttttttctttaccgcgttttcagcagcagtattgattgcttggtatcttctgaagtgcacttaccacagtttgacccccccatccactgcagagggaggctctggagatactgagaaacaactcccc

SEQ ID NO: 12092 - DNA, 831 bp, Oryza sativa
  Intron number 2 from transcript LOC_Os06g19560.1 (locus LO C_Os06g19560) derived from phytozome v7.0 (chr-ID Chr6; po s 11138216 to 11139046 reverse strand)
gagattggggagattggaaagatacgcaaaacgaggtgagctattagcttatgattagttgagtattaactattttaaattttaaaaatggattaatatgatttttttaaaacaactttcctatagagttttttttgcaaaaaacgtaccgtttaatagtttaggaagcgtgcacgcggaaaacgagatgttttctctctcaatctcctgtatcacccgggaacgaacgaagcctaagtctataaaagcgagtcagcactcagcagttgcattgtactatatatatacacagtactaagcgtacatatcacctatatttatatttactgtacttccttaatatcaaaatataatgatttttaagagttttacatgatgataaaaaaataggtgaaattaaatgaggaatgtttgtgatcggttaagattagctacgaggtggaaaaataaacacggaagatgattatgtatttgtgattggctataacaagagagtaaggtggtgtttagatcagagacttaactttagtccctgtctttagacactaatttagagtattaaatatagactacttacaaaactaattacataaataaaagctaattcacgagacaaattttttaagcctaattaatctataattagagaatgtttactgtagcatcacataggctaatcatggattaattaggctcattagattcgtctcgcaaattagttcaagattatggatgggttttattaatagtctacgtttaatatttataattaattttcaaacatccgatgtgatagggacttaaaagttttagtcccatctaaacagggcc

SEQ ID NO: 12093 - DNA, 916 bp, Oryza sativa
  Intron number 1 from transcript LOC_Os06g21620.3 (locus LO C_Os06g21620) derived from phytozome v7.0 (chr-ID Chr6; po s 12473968 to 12474883 reverse strand)
cgtcaccaccaccgctgtcttctcccattgtataggtatccaaactgagattgcttgatccagtgattgctagagtgttgattgatgaatggcattttgtttggatgtgtgtattgctgtaattgtgtgctgatgatttcatagggtagattatgaataatgtcgatttatgttggtataacacaaatttttgacttctgaccttgggtaggaacagtaccctgtggatgccattcatcatatttacaactgtctttgaatatgccacgtcttttcttgcatacaaaatcttatagagagttttgtagtgctcaatttttcacttcttttatgtttgtgagaataaatagtttagaggattatgggtcggaattatattattttttatttgtttctctgtttgccactgtaccacctatgcatgattaagtacttatctaatctgttaatgtacagtcaaaatgatgtgtagcgtttatgtaataatcgagtccatatacaggagatcaatatatatttctcggttttggcgatgtatagatagatcctatatttcttggcagcaatcatctgtttgtcttgccttcttcctcacactccacatgtaaatgtcttgattttagtgtgctaggtgctcaatgaaattcccatgtgaacaaatttctgtttttgtctatcaggctatgtgttcatcaaagagaacaaagggaagttagaaattagaaatagtacagttcctatatctagcaggtgtgatcttcatttattatttcattctttgatctctattgtaaagggttgcatcgccacatttgcataaagcgaaatgtgcactgcagtatgtagttaagtgcttttgagcaatttattattatttaggctttactttgaatgccaacaaacctacagctgtatc

SEQ ID NO: 12094 - DNA, 945 bp, Oryza sativa
  Intron number 1 from transcript LOC_Os07g07740.1 (locus LO C_Os07g07740) derived from phytozome v7.0 (chr-ID Chr7; po s 3889958 to 3890902 reverse strand)
gctcctcgatagggcacaacagaaggtttgccaaggtggattcctccttcgcttgccctgttgactagtgcggaccagcacggcgtgagaggaagattagtgttgattgtctcttcattgctgtcatgtaatttgcattcataactgctgatcgaggcgattagagaaaaagattaatctttgactaaccaccaagtgagtgctagtgctagttgtgtcaaattctgccaaaactatattcaaattataccaaaactatcatatttgtcaaagtttgtcaaaaatatgataagatttaaattatttcaaaaaatttaagctcaaaacagtttgcagctttatgtgcaaaatatgggtgaaaacaccagtgatatctacaggtaggggtaaatatgcaataagtaaaggcatatatgtattttcgtgctcgacttaacaccatcatccatccaaaacaaagggcaaatctctgctccgtttcagaaaagcagaggccaaaatgcaaatcgaaatgctaacccctaaaagataagagcaaaattataattgaactttaaaataggagtaaaagtataatagccccgaaggagaaaggtttttttttctttccaggatgaatcactaagagcttgttcactttgcttccatttcaatcttatcaagttttgacattgtcaaattttggtaaggttatcaaaattttagcaaggttatcaaattttgacaaaatttcatacgtacttatcaaaatttggcaacaaactaaatgtagccatttttttttgataactttgcaaaaaaaaatgataaggttgaaaatagtagcaaagtgaacgagctctaaatctggcaagttaaccaggagaagaggacggtgagaagaaaacctctgcgtttggtggttgtggaggtgcagctgccaaggctggagcagattgtgaaaga

SEQ ID NO: 12095 - DNA, 941 bp, Oryza sativa
  Intron number 1 from transcript LOC_Os04g39330.1 (locus LO C_Os04g39330) derived from phytozome v7.0 (chr-ID Chr4; po s 23227937 to 23228877)
caccatcttccttgccgggttttccgtcttgagtagtgagctttaggctcgcgtcggcgcgtgacgtaggcgtgccgcactagcttccgtcatcagactctgtgttaagttgtcaacttatattatcagtagaaaaattgccagctcaaggtccatggggaggtggcttaattacaggcctaacgataacgatatacagctagcctcgacgcaattaaattggacgaagtgtttgaggtggatcggtgaatttgaaaggctctccgttggagaaatgaaaaaaaaaagaaacaaatcagttttgctctgtgctgttttgtctgagtcagaaaaatgggtttagctgatgcggtgtcctagaggaggcaagcatatgctggtgaggtctggcatcttaaaaatacaagaacaaatttaaaaactccggtctgtggatgaccggatatagattattttgagtcacgatacagccgtgctaccatcatcgcaagattcctttgaatctttgaccagcaccatccaatcaaatcatagcacacattcagttattggcaaagccggatcgatctatttgatttgttatctaaaaaaacatacagtagtttgccataaaaaaaaaacatagcagtacaatacatttgtcgtcgtacagttttcttcattttgttgtcttgctagatagaagtagcttctaaaatcccaacacaacgttttttccggattttttagtcgcgctttggttaatgaaacaggtggggggaaaatcatagccccggaacggtattgggctactggcgccaacgtgcgaataagtccattttgtcaccctcatctattgcgcttgtgtgaataacatctctcaacaggaaaactgggtataatgcctccttcttctttgaaaaccagagcaaatcaccttcctaggtggttttgctggcagt

SEQ ID NO: 12096 - DNA, 935 bp, Oryza sativa
  Intron number 2 from transcript LOC_Os06g38080.1 (locus LO C_Os06g38080) derived from phytozome v7.0 (chr-ID Chr6; po s 22522428 to 22523362)
aggccctcaaggtatgtgctttctttggtttgtgtatttctacattgagatattgatacatttttccttatatatttttagtccttggtccacttgcatactataagaaaaccacaacaatgatatttgatcagctttgttatttatcaattgtataatattgtcttatttgtttaatgtatgtcctaaaagtgcacaagtaattaacataggaatatagaaagtatttttaccactgaaatggatatcctatacatcatttgcatgtcatctaactagttatgaaaatttattagactatctgacaatataaataattgtgtgctatattattttacaatcatgcaactttaaatttaatctaaatgagttaaaattttatcgacatatcaatattattgattttgttaagatcttttgataactacttaggttgtgttcggaggagggggttgggaaccactcctccctggcacgcaaaacaaagttcattttattgcatgattaattaagtattaactattttttttaaaaaaaatagattaatgtgatttttcaaaacagctttcatatagaaagtttttgtataaatcacaccgttttgcagtttgaaaagtgtgggcacggaaaatgagagaggtgggttgggaaatggggagaagaacacagccttaattggttgccatttcggagataggagaaaacaaagggagatatccccttaattagtgaaaaactagctccataaaaatgtaacttcagaataaataattaaatgtaactctacttttcttttcaatttctcgaataactctagatgtattttcttgcttatatagatattgttttctttttcatattggcaaggatcaataccaaagtgttttttttctataaaagaaaaaatcattcatattattctgatttgcgtgcag

SEQ ID NO: 12097 - DNA, 685 bp, Oryza sativa
  Intron number 1 from transcript LOC_Os04g55290.5 (locus LO C_Os04g55290) derived from phytozome v7.0 (chr-ID Chr4; po s 32685595 to 32686279 reverse strand)
gcgtcctccttcttccaccgcatcgtcgctcgccggtgagcatccctccctacccacacctcatcaggtattctgcgttatccctcaaaaagtttgggggttcaaccgaaacagggttagatctgcctctgcccagctccacctactttcaagttgttaattttgatttccgtttttagcatatgtaatttggttactgaatctcatccaaacacccttagaacgaaaaatgtaagctcacataatttgtactcatccaaactcacataaatttcttaagaagaatctagaccacaaactacccatagtcacacaaaatatctttttatcaagatatattcttataagtaatttttattccacaaaattttctaaaggacatactgtgacacttggcattaatctaaacatatagactattgtttaacattgcataaatattgacttaggccgagtttagttccaaattttttcttcaaacttttaacttttctatcacatcaaaactttcctgcacacataactttccaacttttccatcacatcgttctaattttaaccaaacttttaattttagcgtgaactaaacacacccttagcaaagttgagctacaaaccaaaccaaccctcgtttgcccaattggatttcagcacagttggtgtcccgttttgattcttgaggccc

SEQ ID NO: 12098 - DNA, 1035 bp, Oryza sativa
  Intron number 1 from transcript LOC_Os06g01730.1 (locus LO C_Os06g01730) derived from phytozome v7.0 (chr-ID Chr6; po s 425262 to 426296)
aagattaagagaaacaagaaggctccagttcaaaggttagttcaaggctccagttcttaacctctattagaaattctaaatcctgaacaagaataaagagagagtttaggtcaaatatacaattcaaaagaatacaagaaattgctgaatatgtcaaatgaaacaaggtaaatgaatcagtacttaacattccactttgctggataaatacaactcagaactgaaaatttcatatgtttgctctgtaaatatgaactatgtattgttaaaagtaaaactaaattgcattcagtactacaaaactgcattctggatgattgtattattgtgtactattgatgaataccaaactaactttataaaaaaacatgacagattgattagacttccaaccttactgaattttactctgaagatatcacagttatacagttatacagaaatataacaactaggccatatagcatatcctgaattgtgatatattcaattttatcagcataatcaccatattaaactaatgacaaattcaattctcaatgtcaaccagttgtctcatacaactcaatatttcataaagctcaagatctcatacagcacaaacaaaaaagccaatttataggaactcacaaatttcttaacatgttacagtaaaaaagtaataaaattacatacaagaatcactgtaattctagtattaactcactgtagtaaaagattagttcagaaaagtttagctcacacaatcatgcacaaattcaggaacacattcaagatatgttttacactcaagactatctcagtttaatgtttctcccatcatcagacaacaaatgaagatttcagataatagatcattgttgatttgttcaatgtctcaaaatagaatataatgaaactagttacagtgaacttctattacaaatatatagagtgaacactacaatttcaattgaacatacatgtaactacaaagaaacaatgtaaaattcatacgaaatcaagatctaatgcagtttcaatctcaatttcaag

SEQ ID NO: 12099 - DNA, 968 bp, Oryza sativa
  Intron number 2 from transcript LOC_Os05g07720.1 (locus LO C_Os05g07720) derived from phytozome v7.0 (chr-ID Chr5; po s 4153647 to 4154614)
aacgtcgtctcccccgcaccatactactccgtaatttatcaatccgatttcatcacttgcaatcaaatttgttttttccttttccagatgagaaattttacagttcttgaaaaatgtagttttatcatttttggaaaagtacttggagatgccatgttttctagtggtatcttcatccttgaaaaaggtagtttttcgttttctcattagaaattttagtgtccttgagaaaggtagatttatttaatatctttaagaaagtacatggaggtgccaagttttattttataaaacttggtaccaaaattcttatttctagtgtaaaacttaggtactacgaggtattttctcagtatccgtaaaatttcttcctcgagaaagtgtcttgagatacctaaatttcacattaaaagttttgagaagtacctaattaaatttcacattaaaaattgataagtacaaatataagttttatgctagtaaatgtgatacctctaactacattctcaaatatagtaaaattactcttttctgattgatcttgatagggaaactattctaaactctcgagaggtgacattctctcatagttcgcatatcatctaagttgttgcgattttttttaaaagaaatacatcaacaagatagactgatattaccaactcgaaatgatagaaatggtaaagttaaatactccctccgtttcacaatgtaagtcattctaacatttcctacattcatattgatgttaatgaatctagacatatatctatctagaaggaagtatgaatgttaatgaactgtgggaaatattagaatgacttacattgtaaaacggaggaagtacgattgatcttgacatgatttaatctttatttttgtttgacacaatatatcttttgtgttgtgtggatgcggcgtggcggggcgcagtcgtacccggcggtgacggatttcctcaagtcggg

SEQ ID NO: 12100 - DNA, 782 bp, Oryza sativa
  Intron number 2 from transcript LOC_Os06g29540.1 (locus LO C_Os06g29540) derived from phytozome v7.0 (chr-ID Chr6; po s 16926603 to 16927384 reverse strand)
aaattgataatgtgagtcatttttttcgtctgcataaaatgctgacaacttgtaggaatgttaatcttctaacaaacctttgttcctatttgcatcgataacttgcctacgcctacgtcgagattcagcagcaacagtttgattaggacgtgggatcgggatattagaaggctgctggcgtggtcgaccacgacgacgtataattagtcgagaagaacctgccgtattatccattctacccgagagcataaaccaaggaatcctataagtcgaaagaaataggtgtactataactgaataaaatcaaactgaacttatcttgtaaacaattgttgaacttacaaaaagataataggtcaaattgagcattcatcatcaagagtagaaacaaaagccgggggaaagcataagggagaagaggcacatactagatttatctttcctgaatgaaaatccacaggagccacataacaaattcaaaaggaaggccgtcggtaccacataaacaaatacccttctgtagacatgagagattcaaactgatgaaaaaacctatcagaagatcattgtactccgaataaatccaataatatgtacctatgcaatggagattcagatgaaacgaagcagttggtgcaggtggattgcagaatttcattggcaatataagcgaagggccgcaatgatatcgccatggcgttatgagcaaacaaaattaatgtcttgatgacggtgatgaagtctggttttagtgggcggcggtcgttaagcttctctcggat

SEQ ID NO: 12101 - DNA, 904 bp, Oryza sativa
  Intron number 1 from transcript LOC_Os06g39900.3 (locus LO C_Os06g39900) derived from phytozome v7.0 (chr-ID Chr6; po s 23724781 to 23725684 reverse strand)
ccctctcggccgctgccgggatcgcagctcgcaaggttcgtgaccccttccgattttgtgttcattttcttttctttttttctcttttttggtgttgttcctgtgcgggaattggggaggaaaaggggaggggagaaggggtggagccgcggtgaaattttggggggtggtgattgatatgctctactgtttgctttggtcccgattgaccagttcaaatgttcttgctttggtcggtgctcgggtttgatttgacgcttggtttagatcgtcttggtgcgcgtggtctggtatcgtcgtggcgctgttcttgcgcctcttgtgttgtgattgctgttgtttttctttttggggggaatcgcttggttggagttcgtagtttgttagagttgctgttttgggggtggtgtatttctcttatttttgtttggtttgttcgatttccgggcgggatagttgttctgattttgctgcaatctgccgcaaaatcgctgttgctgaggtgatggatggtccgtgcggttatttcgatcggcctatgtgatccattgcgagttttgttcttgtaatagatcgatagacccgtatgctccggatgtaatgcttccgatttccacaacctaaattgcgttaagtagtgatctatatagggcaatagtcaaaacaatttattgattcacgaatccttgttcatagcatatttcagatttcgcattgcaatctgttgtgattttagcaatgttataaactaggatacgtttttttctgtgtaatctgcattagaccttgtagaagttgaaaaaaaaattgtattgtgattcatcccgtaatccactttgctagattattgattattactgttctttttttttgtttgtgccagttttggaaaggaaacaggttg

SEQ ID NO: 12102 - DNA, 722 bp, Oryza sativa
  Intron number 1 from transcript LOC_Os04g46130.1 (locus LO C_Os04g46130) derived from phytozome v7.0 (chr-ID Chr4; po s 27149136 to 27149857 reverse strand)
cagaggcaagacgttcaacatcggcgatacgctatgtaagtgaaaggcctaatatattcagttatcacgtaatccttctagtacaacgctataaagtctagatgggattagacttattctattacaacgctataaagtctaaaatatatacacttttattatttcttttagataagatggatatatacattgatagtgtttacgtgctaaattaaattattaactgaaacccaaagaattattttaatacattggttgtttgtatctatatactccctctgtcccaaattataggacgtccctttttaagaaaaattaactcggtagcttttgactaataatcatactaattatatcatcatacgtgttatgtcaccagattaatattttgaagtactttcatataatattaatttcatatttgttgagaacataaaatgaaataaaataatgatcaaactatgttattgaaaaccgtgtaaaaaaaactaaaagctttataatttgggacagagggagtagttttttggttttcttcatatggtggatgagttaatttattgttgatttcgatagcaaagaaatacatattaaactttcggatgaaagaagtatatattgtacacgagtgggtcccattgttcagtggctaactctcgtgtggtcgtacacgtggcgtggtggcagtgttccagtacaccagcgcggggcactcggtggtg

SEQ ID NO: 12103 - DNA, 963 bp, Oryza sativa
  Intron number 1 from transcript LOC_Os05g07050.1 (locus LO C_Os05g07050) derived from phytozome v7.0 (chr-ID Chr5; po s 3713309 to 3714271 reverse strand)
ccccccgagcacgtccgcaaaatcatcaggtagtctccaggccaaggcgttctaggctcacgctgtttcttctggatgtgttttggtgttgcggtgtaaattaccgggttcagtacatactaattatcaaattattgactaatatacgaattaacatggaataatttagctagatttcaataagctacccagggtccggtgaacactgctagtggtgctttgtgccgtaggtagacctgtagttgtttgtagcttttgtcctaggatttaggggatgtttctaggacttaggggatgtttttagggcttaggggatgtttgtgtttgtcctcttaactgagtctatttgtattgcgagtgtataatttgatgcgatgtttgaaatttatggctgtaaccgtgttaagtatttaggcatggacttaactgtgacctgctggtttatcttagcatcatgttggtgttgctatcagcttcttatcttctatggttatgggagtatgaaaaaaaaggtgaaaaaatgggtctgatcggtgcagctgctgttggctgactgcagcgtgcggcttctgccagcacttctgatcacaccctattaagctgctttcttatagcattggaaatggaatactgtaagtcaagttgtgatagctatgggaatgctacagtttctctgattgcttcaactcaattatgattgtagatattttgtactctagttatggtgattgttttgatctgctagttgttttggctgttgattctagatctctctttatgcttggggttgatgccgtttgtgtctggtactctggtcctctgttactaggaatgggggcaagtggatgttttgcttcagtttgctgtcatatatctcatcttcaccatcagatactatctgggctgtaattcatgagtatgttgcagacaattgatgattctatttcttgctgatcagggacc

SEQ ID NO: 12104 - DNA, 728 bp, Oryza sativa
  Intron number 2 from transcript LOC_Os07g04550.1 (locus LO C_Os07g04550) derived from phytozome v7.0 (chr-ID Chr7; po s 2006971 to 2007698)
tccttcagggccctctcctgaagcgatccgatacagtaatttcttgtcttaatttttcttctccatattgcgtaattatccccttagcattttctcctgtttcttgatttctgccaactataacctgctattgttactgtggctgtggctaggatgatgaattaggaggatttatatgttgttcagtatactttaagcttctgtttgttttgcgttttaggagtttctgacattttgctatctgaacttttactttgtcgattctggttttaagtttagctatgaagtaaaatccataatacagtgggagtgacatattgtagaaaaaccataatagagtgggagcgacatattgtagaaaaggtagtaggtgcctgtgttacatttgtaggcagtgtccaagcacaaagtctcatgtatgtcagttggtttgtgaggttatcgggatgtttcctgcctctccctgttatctagatgcttgtttgcagatcagaatgcagggatgtaattggcaactttggatttgttttgtttttttgttttggtgtagatgtaaatatgatgtttcttaaaacaaatgccggttccccttttgacttcttgataaattttcgtgtgtttgtagtccattagtcatttatcttctgcttttgcattactgaatgtactatgccagtcttcctatttccccttgataaacttcacactttcaattgtcagctaagaaa

SEQ ID NO: 12105 - DNA, 969 bp, Oryza sativa
  Intron number 1 from transcript LOC_Os04g56110.3 (locus LO C_Os04g56110) derived from phytozome v7.0 (chr-ID Chr4; po s 33233673 to 33234641)
aagctcaaggaagttatctagattctactagacaagtaagccttttttttttctctgtgcccagttgatctcttcttcatttggttttcatagttcagttgtgttgtgatcttcttctgtgttcctcagctgcaaaccaagttctactggttgttcttctccttttcagtggaatcagaccaagccttttacgtgttcttgaaaaacatcgttctgagtcttgtagacaccataaacaaacacagttgacatgtgttcctgtcatgcaggccacaagtgattcttttgagttctgagatgattttgttcatgcatgaagtcctttctgaagtttattatggtgaactaaatatattttctgtaatccttaaatttaagcacgtggtgtagttccatctgttggcacatttgtaaacttaattcgtatttttttttgtcttcacgccggccgccgggcggctaaatccgtacaaagaataatcgcccacactcacccacacacacacccaaaagaaaaaaaaaaggctccaaaacaaagcagagttgttagttgttcctttcttttctatgaggaaatcaaaagcaaactaactgtgctcagctcagattaattctgaattaatcaaactaatggtggaactggtgaaatgtgaatagtacaaactatcaatgttaccttacaatcaagatatattactgctaattaaaatgtgcaatgatatctctgatttttatgcttgtctgatctatgcaatgacgtactagtacgcaaactccagagtaaagacaagctcaattagagaacgaatgtgagcatgtctactgctgttgccataagtaagtaccaagattaattagtactatcaccatggcaaaataaaagaccaagattttgcttatctaactgttcgtctcacctcactggtttcttcagtatcgtcagtctcggcaaccgcggctgcagtagtg

SEQ ID NO: 12106 - DNA, 1049 bp, Oryza sativa
  Intron number 2 from transcript LOC_Os04g27960.1 (locus LO C_Os04g27960) derived from phytozome v7.0 (chr-ID Chr4; po s 16335994 to 16337042 reverse strand)
ctgctgcctcagggtgttcggcgctccccctgcaggtaatccaagggattttgcttgcaaaaaatttatttgtcttggatgatgctttcttcatggtgccaaagttaaaatttgaattgctgtataaactttgtacttaatttgaatggctacttcagagatggagtagttaatcaaattgaacttaggtattctacttgcaagatgttctctcttttttccgaaagaaagtatataacaagatgattagattgcattaattgtttagggctttaggccatattctttttagctattttacctattggaatataaaatcaattgttcgtcttttctcgtcaatttaagttttagattggttcaaatcctgtaaattgtagcccacttctgtttcgtgcttgaggcttgaggctgtctcgcatggtggggagtgttagaatatgaagtgaattgctcgacttttctcatcagcttaaggttttttttattaaattagtcggtgcatgtaactcaatacactatattattaatgatgtggattatgtgctccatgccttaaaaaaatttctcaaaaaaatgtactatatttttaatatatagcaccattgactttttagataacattttactattcatcttattaaaaaaattttataaattcatttgcattgttgtgacttattttatcttcaaataaacctctaacctgagcttatatacttttacatatttaaactaattcttttaatacgatgaatggttaagccttatgaaaaagtcaacagtgacatataaataatggaggtagtatttgttaagtttatttgttaagatatttaatttgtatcgatttacataatccactacagcaattcgaacaatatatattctgaaattgggcctataatatctcttattaattgctcttttaccaccattggtctgccataatcttctagtttcagttttaattttgagttgtaaataacgtcttcttttagctatgacattcagaagcgggcagggcaacagacacttcacgtaagccg

SEQ ID NO: 12107 - DNA, 402 bp, Oryza sativa
  Intron number 2 from transcript LOC_Os05g37120.2 (locus LO C_Os05g37120) derived from phytozome v7.0 (chr-ID Chr5; po s 21634282 to 21634683 reverse strand)
tagcggctgtcgatcttgcatgtaagtggaatccttcgcgtattgcaccgtgatcatggaattttttgaatattgcccccctcccctctgcagtttgtagtggtgggaatttaattttgcttgttatataatgtaatcttacccaagtaaacccaactatatgagaaacatagagaaaggagagaaaaaaaatgaaatcgtgtagctcaaatttgtatgctgttatttgataatatctgcaggtatgagtctaggagctgagcattcgatgattatttagttgcatttcatcttcaaacagtcccctcagttcgtgctcatatgatttattttcagaattgttattgtagtgtttgaatgtattcaggttctgaagagttcctggagcttattaagagtgca

SEQ ID NO: 12108 - DNA, 876 bp, Oryza sativa
  Intron number 1 from transcript LOC_Os04g36780.1 (locus LO C_Os04g36780) derived from phytozome v7.0 (chr-ID Chr4; po s 22022056 to 22022931)
aaaggtccgggtctccccgactctcctgaaatttcatcccatttcgtgctctgcgaccctactgtggttaaaatttcaagctattttttgctcttgttcggtgccaaaaggattaggaaaatttagtcaatttcactgttgtttttttgttacggggagaaattctcactgttaattacctcagaaaaaaaattaccgtctagcataaggtcttttcacacaaaaggaaatgcatcgccaatttcatttacttagaagaaattaaagttagtaataagcgagactgaaattccagcacttgcatatcaaaaatgatttaatgaacacctttgaaggtagagtcatcgcatcagctgctactacaatttactagagatatatttctaaatgaatcacttgggaagtaggagtaggcatttaggtgaatgagtattagtcaaagcaagcttcaattaaacaatctcatttcgttaacatatggcagcagcatagaagtttctatttccaatcaggttgcctcttctgaacatttgcatgcctttagtacacagtttcttctattactccactatcaaatcatccatgcttaaaaatttcatggtaagtgtattatgtcattgtttcgctgcaattgtgaggcctacaaagcaaataaacctatatttctgctatgacttgaaaacacatgctcacatagcatcagtaatatgggcaaaatgatgtttgactgtgcttgaagcctgacgtggaagttggaacaatgaactctagggagttcacattttttaacaatggagaacataattgccatctaaatgcatctttcctttttgcaaaacagagtatcaggaaaaaataaagtcctgcaaagaaaag

SEQ ID NO: 12109 - DNA, 846 bp, Oryza sativa
  Intron number 2 from transcript LOC_Os04g10300.1 (locus LO C_Os04g10300) derived from phytozome v7.0 (chr-ID Chr4; po s 5559921 to 5560766 reverse strand)
ttttcaaaggatccaagacacatcggagttggagtgtgagttgtacatttttttgcttgatattccaaaaagggcagcagtagggtcatttcggattaggtcatatccctaaacccaccaagaaacaccgggttcgctggatttggttctgttgggcatcgcccgtcaacaccatgtaaaaaaataaggcatgccacacataaactagatggagaaattgatggatgcacaaaacagatacatagatacaatgtttgcaaaggaacgtgcgatgtggaaaataagccaaaatcgccaaagaaaaagagcatacaaaaccaaacgttttatagggagtgcaccgaaataataaaaactttgaactatcaaataggatattatcatgatagtcacatcgttgggagattcatacacatgttacatatacaatcatcatgaaaggtcaaggcataataagctaagaagttacaaaactcataatgtatagcaaatgatactacctgtatcaacagggtccaaacagacacttcttccagaattgttttctgaaagtaattatcttttctactctattcataaccgaaaatcatttatagcctttttgggacctaacccgatagagtagtaatgttctacataatctttgactagtgtttctctatacaaagcaggactatcatcggacagtagctccttgatcgggccgaacatccttgttgacgctagattgttgggaaaacacgcgatggatactcttggccttgaactttgtgccaccaccctatgttccacgcttctgaacttgtcatttgagattatctggacattggttatatatattcagaa

SEQ ID NO: 12110 - DNA, 726 bp, Oryza sativa
  Intron number 1 from transcript LOC_Os04g45510.1 (locus LO C_Os04g45510) derived from phytozome v7.0 (chr-ID Chr4; po s 26741210 to 26741935 reverse strand)
agcagcagagttgcatatcttgcagggtttatcaggtaagctctatataggtggcttcttctcttctgagctcttcatttttatttgattttccttttgctagtgtcatttttctgcttctagaaaatggagaatactcatgaatgtcattctgctcctgtttcaatacaagtccttgacctgttctctaactaataaggagctaggaagctttgatctgcagaagattttccggcactatacggcatgttgttgatcatctgacaatgttgccacaatttcatgaagttctctctgtaacctttgtttctttcccaatctaacaaaatctcggccggcaatcttcagtcagcccggcgaaaacacgattccatagagttatcttgcggttgaatttccaaaactgaagaatttaatgccgatctttcagatatgatcagtatttcaaccatcggtatatgaaatcagaatgcgctaatcatcagtataagctgaaatggaaccaataatgcatcttactcatgtgcatttccttgtctgttataaaagttatgccctttacagctttactaatgtctaatgcatgaaatagcagaaattttctaacacctggtgctactgtaatgcagtttgcggcgtaaaaggagcagtgtgtagcaattaactgaaactcaaatcgtcgaccgctaattaactgaggtattcagacaaagaataacaggcatc

SEQ ID NO: 12111 - DNA, 510 bp, Oryza sativa
  Intron number 2 from transcript LOC_Os04g48750.2 (locus LO C_Os04g48750) derived from phytozome v7.0 (chr-ID Chr4; po s 28888647 to 28889156)
catattgtaggatatttgacgggtctattgtaagctccagcttgctttacatcctttatgttctatatctccatggcacatttgttgtgaaaaatatcccacttgattagttatcatgtcctttactttattctgttgttatgttacatgattttgcttaaaggtttctaaataattcttgtatgcagtttctgcagctcatacatgtaggctgtccacaaaatatacacacatctaatgagttaatttactgcatgatttgtcattgacctgaactgatcaaaagaaataccacttcggtagaaaatagcccaagtgatgctgataactgaattgttcaattcttgacattttatttgctttcttctgccatagtgcttatattaggaagaggatatgcattcatgctacccatgatatttttttcatactattgttgttgttcttttgttttcatgtataacattttcagattgacttatagtttggtttttcttcatgccagctatt

SEQ ID NO: 12112 - DNA, 732 bp, Oryza sativa
  Intron number 1 from transcript LOC_Os07g05450.1 (locus LO C_Os07g05450) derived from phytozome v7.0 (chr-ID Chr7; po s 2508693 to 2509424 reverse strand)
caggtgaatgatttttttgctacttcctccgtttttaggttataagatgtttttgactttcgttcaaagttaaactgtttcaagtttaactaagttttttaggttataagatgtttttgactttcgttcaaagttaaactgtttcaagtttaactaagtttatagccaagtatagtaataattaaattaccaaaatatttttaataagttaataattaaatatatttttataataaatttatcttgagtaaaaaacattaatatttttttctacaaacttagttaaatttgaagcagtttgactttgatcaaagttaaaacgtacatcttataacctaaaacggagggagtatataataataagaaccactatatactacaataacattatctagtactcatatacgacatgattgtatcatatcataggacaaaccttgggtttccgtatctaaatttgaccgtccgtcttatttgaaaaaattataaaaaaaattaaaaaggtaagtcaaagtattaatcatgttttatcatctaacaataatggaaatattaattataaaaaaaatttcatataagacgaacagttaaacgttagacacggaaaccacgatttgtctttttctgggaaggagggagtatgtggcagttcgccagaagaatactacctgagctccaattccatgacgtgtttgagctttgcttgtgagggtcgctgcttgagcggcccta

SEQ ID NO: 12113 - DNA, 886 bp, Oryza sativa
  Intron number 1 from transcript LOC_Os04g32190.1 (locus LO C_Os04g32190) derived from phytozome v7.0 (chr-ID Chr4; po s 19128750 to 19129635)
acgcagttcgcctccgtcgaggacgccatcagcaggtacgcgtgcttcccctgctccgatcaatctcctcttcctcctccatctcccgtctctccgccgcgcgccgcctcgttgcttttctcctgttttttttttttttggattagttcctcgctgcggtgaacaacacccaaattgatcgctgtcgagttgcgtttgcaagatttcgtccgtgttttagggggattcgcgattgtttaaggttttcggtgcggcgaatctgaatttctgatcattcctgtactgcacacgattcgttagatattacattctccgaagaagcgtttcttcggaggaattggatcgacgacagccaaacttctagtgcttgcaaatcaatccacgaacaattttaacgcaaaaaacattgaggagtttcagaattgttcgctgggtttgttcattaatctcccggtgatggatgaacggggaaaagggcacgatcggcaactttgatttttccgtttcatcgtgtgttctgacgaaatgctttggaacctaatgtttggctaacttcattgagaacaatgcattttgcattaacagggacattgatccttgattaataatgctgattaggtgttttggttatgatcaatttcagatagtataatttctgtcaccgcacattagaacatactgtatgtgatttgaaaccaatgttaagtttcagcatataaacttctgctgtctctgttaggattatgacgttgctaattatgcgccgttgctttcatccagctaactacactgaaaaaaaaaaccatatacagtgactatgctgttcatggactgatttgatttgcccgcaggctgcttcggaacgaggaggacgtggtctacgtgg

SEQ ID NO: 12114 - DNA, 838 bp, Oryza sativa
  Intron number 1 from transcript LOC_Os07g01860.1 (locus LO C_Os07g01860) derived from phytozome v7.0 (chr-ID Chr7; po s 515363 to 516200)
cgcccaccattcccacaatcgccttcttcccccaggtgcttgctttgcttcccccacttctcctagtgctattgctcggttcaaagatgcaattttttttttaccttccttttctgttcattctgctacatcgagatttttttaattgtttgcatttctctgtacaatcagtagactatcagtcttgatttgacttgtgtgtgcataaaagacttggtctttggtgtttgatatgtgtaattgaaggcttataaacccataattggtgtgaaagatgagtgaagttgcttggtctcagaagcttccaaaatcttcatgtcagggttgtatggatgggtgctatgcatgctcctggtgttccttcatcctgcattgaattgctaggtgttgatgacaattagtgagatctagctttttccccaattttgggccaggtgccggattttacaggtgcatttagtttttgtgagagtgagatggaagtttttctctggaatctttagcagctactaagatttttttaaaaaaatctgtactagtgctaaatagctgggagttggtcgcagcagccgacaaaagagagagagagaaagagagccattacaccctgtagacagattattaagagcctggttttggataataaatctatctcacaaatgttgacagcactaattattaaattacaagaaggttctttccgagaaatgtggctgtttggatgaactacgacattgacatatttgttttttctttgtttcatttaatttgtagccatttgaagatgtttttttaatcggaagatcccttctaatatttcaattctctgaaacagccc

SEQ ID NO: 12115 - DNA, 833 bp, Oryza sativa
  Intron number 1 from transcript LOC_Os03g40540.1 (locus LO C_Os03g40540) derived from phytozome v7.0 (chr-ID Chr3; po s 22537224 to 22538056)
aaggcccggaggctcaggtatatgctatattactccactatgaaacaagcaccaaaccaaagcaacacaacaactaactgcttcttttgacatgctacctgacgcgccatacattccttcccctgcaatctctgcatcatgcgtgtgtatatctatctatccatcatatgctctgctctctgctctgcaatagcaagcttgaagctttggccatggggggagaggcagaggaagaaggagctgctgcagtgctgctgctttgatgatggtgatgatgatgaagatgtggggagagagagagagagagagagagagagagagagagagagagaggaggtgatctggaggaagggagggacctcggagctgtgtcccccaaaagctcacactcatcactgttccagctgggagatcctctctcccttccagtccaccaaaaagtgcccaccctcataacacacacacacactaacactcttacacaaaagatatgattttttttcatcccaaggaaaaaaaaggagcgattttttttaattacatccatccccacttggccccctcctaaacttttctcccttcaatgatcaactaaaagagaacatccacagcacaaaccaagcatttgtttttcttctccttgttgcagaatctgtactactagcagcagcattcatccatcacaatcattcattcctccatttccttttattatcaacgagaaaactaatcaaacactaataccactagcagtagcagcaatagtagcagtagtactaaaagcgaaagattttgcaggtacgggagcgtgttcaggacgcacatcctggggt

SEQ ID NO: 12116 - DNA, 668 bp, Oryza sativa
  Intron number 2 from transcript LOC_Os05g11550.1 (locus LO C_Os05g11550) derived from phytozome v7.0 (chr-ID Chr5; po s 6532612 to 6533279)
cctttaaaggtatgttaggatttgatccacttcatgtcctcatcctttattatgtcagaactgcatgtgtttttgagttgtaattcagagtttcaaatgttgacataagtgagttacatgctaataacacttatttagaataccaatcaacatgaaattgtaatagttgttgatcaataaggcttttagtattatatctactccctccggttccataattatgacttttggacaaggttgaggtcaaacagttagaactttgactatcaataacgtgaaaaatatttggtttgaagacactagaacatgatgcatagattattcttaaacagtacttcaataaaattaattgtttacatattttttgtatatattttaatagaaaatcatagtgaaagatatgttttggagaccatgtcagttgtccaaaacatcaagaattatgtaacgggagggagtatctgtttatgtactctaatgtgttatattttatatccatctgagtggtagcaggctattgatattgccctcacaaaataaaagattcgggctctcatgctgtatgcagcatttcccaaagttttctaaaggaatatttccctggtggataatctttctatttattttctgcagcaaacaagttctccctggctatagagctctatagt

SEQ ID NO: 12117 - DNA, 962 bp, Oryza sativa
  Intron number 2 from transcript LOC_Os04g13230.1 (locus LO C_Os04g13230) derived from phytozome v7.0 (chr-ID Chr4; po s 7323527 to 7324488 reverse strand)
aagtgtattttctctctatctctctctataggaaggtacattaaaggccaaatagctctcaaaataaccctgggatccaaacaacttagggctattttattggagagctattatcttgtgctaaaaaatagctctcaaaataactcttggctagttctccatataagccagctataaacatattttaaggagataaaagagaagagataaagcaacgggctacagattccaagatgcatatgtgtatgacaggtgggaccagacattaattatgtagtacatgtttataactattgtataaattgactatagataatttgaagtcaatagttagctatactattaaacttgctctaagcagtccagaaaagaacactttaatttgaatagtacattttgttgtattctcgtgtgctcccttcgtatatatataaaaaaaaatctaacattggtactccctttgtaaaaaaaaatacaaatttaggattggatgcaacacattctagtactataaatctagatagatgtatatctagattcgtagtactaggatatgttacatctggtattaggttggtttcttatgggatgggaggagtacttcgtccaatcaaagataatatagtattttgttgtgtatttcgtccaatcaaagaaaatattggtgtgaaatttagtggggtagcacaactaaaatattggtatatttttaagtattttatgaggtttgagtttcactttggacaactttttattacctatgttttgttttgatcaatatttttttcgcgaatacataaaaggattgcatgtgaatatattagaaggaaaagagtttttgatacacaacgcaaccagtgagacatgcctatccaggagaaggaagaaaaacaaaaactgaagctatgaaaaagaaaaactattcaggcggccaaacgcaactctaattagtgggagaaggg

SEQ ID NO: 12118 - DNA, 672 bp, Oryza sativa
  Intron number 5 from transcript LOC_Os06g02555.1 (locus LO C_Os06g02555) derived from phytozome v7.0 (chr-ID Chr6; po s 887829 to 888500)
tcagcgtggatattttcaccgcgaccttaagcctggtatggctggtgggctgttatttttaaacctggcatgctttctaatgcttgagactgggagttgtttatgatgttctgttgtgcaatgcggcattaagtgataatgacatcaaaacatgtctatttaattagtgctgtatagatggggaacaatgcatttagctgttgacactgcctgaaacgttttgatttgttgcaacaaccaattctgcattgatgatgcttcttgtttgatatgtgtttcaacaagcaattttgcattgatgctgatctgtttcatcaatcaattttgcatctatgatgcttgaagctgtcttatatttcagttcttgtgccccctttatgcagtgtgatatatgcatttgttaagcaagcatttgaagcagagacctagaaaaatgcaaacataaagttgttgccctaaataattactagtagagtacttaagttacctgtccagaggagcaaaagagctagaagaagcaatgtggcatcaacctttgctaacttatctgcaatatgttcagttgggattgaccatgattattgttgttagaatttaccaactatcttattggtcctgtaactttatgatatttcagaaaatttgctagttacaaaggagctcatcaagata

SEQ ID NO: 12119 - DNA, 636 bp, Oryza sativa
  Intron number 1 from transcript LOC_Os05g31770.1 (locus LO C_Os05g31770) derived from phytozome v7.0 (chr-ID Chr5; po s 18444466 to 18445101 reverse strand)
acaccatcccctggtgcacccgcgacatcatcgccgtgagaatccattctctccgctcctattcgaatcccctgctgtggggagcttttttctagtactctaatttctaatttaatttattcaatggggggaggttttagttctagcgggagatcccgcgcggtgcttgaggattagcaactccgaggattggagggttgtactggggagcgaatggtcgagtgtggagtggttttcatgcttagtttaggcggcatggcagcctgcccccatttacagtggcttgtttgttccatcatggtggtgctgccgtcggctgcccgtgattagctcgcgtgattgtttgttgcaacgcggatgagtcaaggcggcttctctttattgagctgtgtgattttgattcctttttagcggttcacaatctgaagagtaacactggaactatctctgattcaatcatcactgcaactattggctaagaaaatgcacatatcagtctcactttacaaaaaaatcattaccctgtttgttactagatacattccaaataatgtttaggcttacacgttcgcgctcagagtttctatggttgtatgctttattagggctgtgaaagggaggtagctgaggctgcaa

SEQ ID NO: 12120 - DNA, 584 bp, Oryza sativa
  Intron number 1 from transcript LOC_Os07g07250.1 (locus LO C_Os07g07250) derived from phytozome v7.0 (chr-ID Chr7; po s 3595085 to 3595668)
gcgaggccatcgacaacatccaccagaaccagcaggtcaggcccaaacttacccccacgcccccctcgatctagctgcagggcttgcggcttactagatctgttcatcgtctagttggtgttagctgtatgtaggttttgagtagcgttgtagtttgcagatggcgatgcgaaggttgggggattggttaagtatgttcacttgttgggggcacagttgaatgtgtgatgtgggggattgggatgcaggtgcccagcaattgtgtactgtgtacatagtcgataaatccccaattattgaattaaaactgcgggagaaggatatctgatgattcttagcttcagatgttgtttgatcttaatatggtgtatatggttagaataattgtatattgccatcaagtctgggggatgttctgatgtcttgcatccgtttatgtgagggacaactcttgatattccccttcaattgttaatttttgtagttaccatatgccaagtcatttaggttgctatgcagttaataatcgtattcttgttaacattgcagattggtcctgatcagattgagactctgtatcagta

SEQ ID NO: 12121 - DNA, 528 bp, Oryza sativa
  Intron number 1 from transcript LOC_Os04g01150.1 (locus LO C_Os04g01150) derived from phytozome v7.0 (chr-ID Chr4; po s 114984 to 115511)
tgggcattcatccctttcagctccaacccctacaggtatatttgtatgcgttcatccaattcaactatcatcattccatcttttctttgccattatcttgttttggcgtcaacattatcacataaaactagacaaaaattcaatattaccacaaacagttgcctagccttttttttgtgctgaaacacatgcatggctttgaatttcaaattcaaagctcataattttatataaatttatattctaacatgtttacgaaacacagtaattcattatcgaaagcgcataccactgaggttatcagaattttacactacttcaatattactctactaaaaaaacaaattttcgtatatcccttaatgctctgcttgttttgcacaaaactttcttctagctttgggaatgatttctcaaattatatgtaggataattttcatgtcatcgtctggacatatataatttcatattgttcaaagacatgctctatgcttgactcttgttttgcaaatatcctgattgcagttg

SEQ ID NO: 12122 - DNA, 1055 bp, Oryza sativa
  Intron number 3 from transcript LOC_Os05g34170.2 (locus LO C_Os05g34170) derived from phytozome v7.0 (chr-ID Chr5; po s 20142875 to 20143929)
ctgcttccgcaccctcaagctgacgactcccagctgtgagcatatccctgccattgatacctgttcttttgttatactactaagttttactgaattagattatcatttctgcaatattatgagaaatttcagttcactaagtcatcttgaagtgctttgtgctttatgaaaaaggtcgttgtatgtcattttcgtttcactagtgcgaaactactgcttcacatatccaaaatgttgtgaggagcttaatcatcttaattaggtgatgccagctgacttagtttggttccttgtaaaggattattagtgttggattcgtttataccattatatgtagttggtgtgcttgacttgtttatccaaccaaccaccagtttaaatgagctgactgaactaaatctcatcaaatctcttaggccgagtttagttccaaactttttcttcaaacttccaacttttccatcacatcaaaactttcatacacacaaacttccaacttttccgttacatcgttccaatttcaaccaaacttccaattttggtgtgaactaaacatacccttagtacataagttttgccttgtagttgaaataataactgcacttattccacatactgtgttacataaagggagtatgaactgttaaatgttactagaaggtctgatgctgggtatgacttgagggttgttttctgcaccattttccatatcgctaatacttctgtagcttggagttggggcatgttttccagcataagaatgatatccccttaattagaaatgtgtggtaatgaaaattcttgtagtgtcaactgaaaccaaaacatcagttcagttctgaacttctaaattctaaaagcaaacatgctactactttatttaatttgttttttctgctgatgtattcttttggtgatcttttatctagtaacatttgttatgattaaaagccaagctgatatgtttacttattaggctcttgctgtgctactgctcatctgaatcttgatttttgcggacagttggtgatctgaaccacttgattagtgccacc

SEQ ID NO: 12123 - DNA, 848 bp, Oryza sativa
  Intron number 1 from transcript LOC_Os03g37950.1 (locus LO C_Os03g37950) derived from phytozome v7.0 (chr-ID Chr3; po s 21076895 to 21077742)
accgccggctcggcgtcggcgtccgagaccgagtagtaatccacagatctcctcctcctgttcttctcctccaagaaagaaatcttgaaagccccccaacaccagccgacccctaactcgatctcgtctccgtatatacactgatctccctcccgccgcgagtgtagcagcagctccgccgccgcggtgagcaccccgcacggcacatcctctggcgcccttttcccacgcaattttggggttgagttgagttactagagattttggttgcgacctagggtccgggagttagtttgcgatgcatctatatgaacaagggtaattgtatatttgtcctcttttttgtgtgtgaattgatactcttgaagattgtgcctttggtgcatcttagatgcagcagctggtttaaccattaactgataaaataccccctgatgaattcttttgtctattcagggacagaatatcttgataacctagaatttccttggatttgccttgcccccataattgggatttgggaacaagtcttggcatgcccgtgagcagaatattttgcaacacttaagcaaagagtgttatacaagtcccagtcttaacatgtagctgtagaggatagaaattgttcagaggaagttgtttgattatataatctgttgttatagttctctgagtattggttgtgcaatgtgacagatcacagatgtaatgagaaccaccaaactgaaaaataattttcctgatttactatgtgtactttggattgttttcacgtttgttctggctatttctgatttgttttgtaactctcattgtaacatttctttcattttactgacagagcgatc

SEQ ID NO: 12124 - DNA, 776 bp, Oryza sativa
  Intron number 1 from transcript LOC_Os04g16736.1 (locus LO C_Os04g16736) derived from phytozome v7.0 (chr-ID Chr4; po s 9107125 to 9107900 reverse strand)
cggggaaaaaagggcatttacttattatagaggtgcgatttgactcttttttttgtttttttagccctacctacaccccggttttacgagaaagagtgggggttcgcggagagaaaaccaaattagtaagggaaacccacgcttagggaaggtgaggtgaactaacaactccttctgtcgtgtatcctcgactgacgcggcctcggatgcttcaattgtagattttagtattgagcgaaaggttacacctacaggataggttctgtattacaggctaatcctactctactagtactaataggtagcataggggataaaagcactacacctagaaataggaatcaacaagagaaaaactttgttagaaattaaccctttcctgattggtatcagggctgggaagaatggttgggataacaaacaaccatcaagtttgtactttggatacccctataaccatcaaagatcgttgaagtggctaattcctctaaataggaggcgttgagaacaaagaaattcttggagctatcgttttcctctagcattaatagaattcattggtgttaagaaaaacctcttgtgggaaggttggctagagatttcttggaaaaataccagcccctttcggtccataatgagatggaactaattctatttttattctctagattttttcgcttagtactatgtacagaagggaggagccgtatgaggtgaaaacctcatgtacggttttggaacggagattttttgaatagaacgaacgaccgtaacgg

SEQ ID NO: 12125 - DNA, 947 bp, Oryza sativa
  Intron number 1 from transcript LOC_Os04g52580.1 (locus LO C_Os04g52580) derived from phytozome v7.0 (chr-ID Chr4; po s 31076249 to 31077195 reverse strand)
ccgcgtgctacctcaagctccacgacttccacaaggtctcgcttctcgagggttctgtttctctctctctctctctctctctctctctctcttctttgacttgagtagatttgagcgcccgttgccgcttccaagtgttgtttagagtaataaaggcttaatttgttagtcatcgatgcctagtcgtggtttgtgattccagttcaacggcggggtttttgatttacctgtgcaaactctggtttggggaggtcgggaggagaagcagattcaggaatctgttcggttggatgagagattcgattatagccaacacgaactctcatcaatcgtggcttgtttactatattgtggtggtctgtagattgagctcaaatcctgttaaatttcgtgctgagtgacactttgcaatccatgtactgggcctaatgccttgcttcgtgaaaaacctgtgtttccttcccaataatagtagttcaaattgatctggcacagatcgatttcgatgtagtgaaccacttggcgaatgattaggctactattgagtatttgaatgaactttctaataatcctggtaggtttcaatagtctatagaatgcatgatttctatggagaaagtttaattgcggcatccaaatttgtaggataattaaacctctgttttgatgaccaactatatacaggggcaaaatcatgctccctttagaaaccagcattagttaatgagacaaaattacggttcatttcatctgaaatacttgtggggtagttgatgccttgatggtctgatgaaaactgcagtaggctgtgtgtttctccggaataagttggcacctgacatcatttgtttatttttctatgttatcatcacttttaccagcgtgttttttcttcttttcaaaattctgtaggctgcagaagagtgcacatctgtccttgagttgga

SEQ ID NO: 12126 - DNA, 537 bp, Oryza sativa
  Intron number 2 from transcript LOC_Os05g06270.2 (locus LO C_Os05g06270) derived from phytozome v7.0 (chr-ID Chr5; po s 3190491 to 3191027 reverse strand)
ggtaattacttattcatttctgctcaatctactaatttgtccttgtttttgttgccatgtactttatcagaacacatatcagattagtaaaatcagtaaacaatggaaaattgtgttgggtaccaaaaaagacattgtacgcatccgtgtcctattctgctaccatttttaccaatactgtttgtccacgtttcctttgctggttttatcatgctctgttttaacctgatgctataacaactttcacaaatacaattttgtatttttgtttatgctataacaaaaaaaatgggaacctgatggtgaaatcaataataagcttgtaagcatgagtgtcaggctaagatcttatacaggcaagaataaattcctaaaattacttcaaattcaaaatcttcttttgtagaagagactattgcattattatgcagcttctgattttcataaaaatgcagcttctgattcttcaatgacgaatatgtagttatgactaccttttttttttttgcagatctggttctagatctagagctccta

SEQ ID NO: 12127 - DNA, 738 bp, Oryza sativa
  Intron number 1 from transcript LOC_Os05g01620.1 (locus LO C_Os05g01620) derived from phytozome v7.0 (chr-ID Chr5; po s 370182 to 370919 reverse strand)
cccaataacgctgtaagcccccccccccccccccccctcttatattgagattttctatggatggtccttggctagtactagctgtacttatattgagaggcaaagttacatttaggccttgtttagttcgcgaaaagaaaaatttttgggtgtcacatcaaacgtttgaccggatgtcggaagaaatttttggacacgaatgaaaaaactaatttcattactcacctggaaaccaggagacaaatttattaagtctaattaatccgtcattagcaaatatttattgtagcatcaccttgttaaatcatagcgtaattatgctcaaaagattcgtctcgtgatttacatgtaaactatgcaattgattttttttcgtccacatttaatgcatgtggccaaacatttgatgtgacagaaaagttggaagtttgaagaaaaaagtttgaatctaaacacggtctttgcaattagtttttcattttatctaatttattgctctatacatgtgtccaaagattcggtgagatgtttttgggaaaaaaaatttggaactaaacaaggccttatacctcctgattatgccatacactatgaaatgaaataccctgatatatatgcctctcaaatacctggaaacatttctgctttcattcattcatctttgtttttcttaaggccaatccatcggtattgacaaataatgtatctttctccattaccagcagtgccaagtcgtcg

SEQ ID NO: 12128 - DNA, 977 bp, Oryza sativa
  Intron number 1 from transcript LOC_Os07g10600.2 (locus LO C_Os07g10600) derived from phytozome v7.0 (chr-ID Chr7; po s 5754007 to 5754983 reverse strand)
agtaaagcatcttctgctctttgtttctctgcgttggttgattattattttctctctctcttttatttttgttggcatttagatttagatttagatatgcaggtttgattctggtgatgtactgtacttgcatgtctgctgtgctgtacttgaatgcatctcttcagagttcagggttcagaattcagtttgtatgactgagattaaacaaggaaagcacagattcactgatttcgtaatttctcactgttgtttgctcgacttttcgttctgcacccagaaattttcttcttcttttttggtggtagcagttctggacatctgaaaactcctgatgcattgcacctatttcatcttattagaatagtactaggtttttatcatgtgtattgaatgtgatgctttgtggtcgcccatcaggccatcactatataggctacttcaagccatgccaacttgtccatacgtattgtactcccctcccattaatattccaaagacccagcaataaatataagatatgagctttttctaccattcccatgtcttttactccttctcatttgcttttatttgttactgccacaaagtatgctcgctcatctttctgaatcaataatgagagtgcacccacgtcatcttctctaatgtttcatcacctttgtcacctctttaatccttgatttctcgtgcaaggtcaaactatgctctatggttaatcaaggaaaggagtacatactgtggcaccattacagaattattaaaacaagcttatcctcttttaaactatctctatctatgccagttttagcacattctattaagaatttgtcaatacattcaatatttaccctgtataaaaaacatatcaactgcttagcaagaattttattgacactcagaaaaaggatttttgtgctcagaacttggcctgtattttactgttatttattttaaataaattggttttgcaaggt

SEQ ID NO: 12129 - DNA, 317 bp, Oryza sativa
  Intron number 1 from transcript LOC_Os04g47670.2 (locus LO C_Os04g47670) derived from phytozome v7.0 (chr-ID Chr4; po s 28099061 to 28099377)
tctcaacaattatcagatcgtaatattcgttataagtatatttatatcacgcagcttcagccttcagactttaagtttttgctttatgtgttgatgaccaatagtaaagaatttttttagataataatagtacagaaaatacaaattcaaaattattgatgagcctatcttctacatgccattaccaagaaagacatataatgctatttcagatattgacctattgtaaaatcctgctcatttctacttatcaagacgataaatgtgtttcacttgatgcaggaataaaagaataggaggggtgccgattccctcca

SEQ ID NO: 12130 - DNA, 662 bp, Oryza sativa
  Intron number 3 from transcript LOC_Os03g51140.1 (locus LO C_Os03g51140) derived from phytozome v7.0 (chr-ID Chr3; po s 29254368 to 29255029)
gggtgaagcttgtccttccttcacttcttaaggtgcggatgccttgtttgaaattaccttactgattctaacgcctttcatgtcttgtttgaagttatcatacctcccatatttgtacaattggtcacttgctgttgcaatccactaaccaaaccttctgccattacatctagatttgatgcattccattattttcaaggttcagtttgatttgaatatacacggcatctagcaccagaaactactagttgcaagtaatcacatgatttcaacttaagtattttgcataattctgtgggtttgtgaagcattttgacccaatgactggagttctttgaaacgaattgtaaacacctaagatttgcggaacttacacttcatttaatcaactagagactagatagagctgcccgtctgtgatgaatgatattctgtctgtgcccttttttattcgactccaatgtttatgctgtttatgtgaatttttatatgtaatattattgatttaatagttcagataccatctggggaaaaaaaatcagatatatggtcacctttatttccctgaaggtgaacttagggggatatctatttatttgctaaataatttcttaagatgtgcatatgtggataattatcttccagggcctagaagataaagc

SEQ ID NO: 12131 - DNA, 903 bp, Oryza sativa
  Intron number 1 from transcript LOC_Os07g01770.1 (locus LO C_Os07g01770) derived from phytozome v7.0 (chr-ID Chr7; po s 458161 to 459063 reverse strand)
ttgtgcttcacctggacaatcaggtagcctgcctcttcttttctttagctatatattaatcgttaaaatctattaattctccgatttgttcataatttttgagatccacaagcacaaggacttgaacattgacattatatatactgttttggatgtgctgctatatttttaagtagttaactgtagatgcactttaatgttttatactattgcaaattaattttaactgtggggacaggacagtaaacaaagcccatgtttagttcgtgtgccaattttttttaaagtatacggatacacatttaaagtattaaatgtagactaataacaaaacaaattacagattccgcttctaaactatgagatgaatttattaagcctaattaatccgtcattagcaaatgtttactatagcatcacattgttaaatcatggcgtaattaggctcaaaaaattcgtctcgcaatttacatgtaaactgtacaattggtttttttcgtccacatttaatgctctatgtatgtgttcaaacatttgatgtgacgaaatttttggaagtttgaaggaaactaaacactgtcaaagtacaacaacgttcacctttcttttttttttttacaactatcgaaaacagaaaagtaatggtaatgtgcacaaggaatccatttatttctttacctgattatccaatagtactggtatgcccagtaaagaagacttaaattacagatagactaaataagataacgagttgatgagatgtgatgtgctaacctatttgacaacaacagttctttaattatagcgtcaagtttcttcatcaacattttgtatcaactctaatttgtcattttatttgcctacacagaaattaaagacaggtgtggtaaagaagacaacaaa

SEQ ID NO: 12132 - DNA, 779 bp, Oryza sativa
  Intron number 1 from transcript LOC_Os04g24274.1 (locus LO C_Os04g24274) derived from phytozome v7.0 (chr-ID Chr4; po s 13893674 to 13894452)
cttaggggcgaaggtagagcatgggagggggggggtgcctagaaacccggttaagaaaaaaaatagctatacctcaccgattttcaccatatgtgcaccccctaaatacaaacttaggcacccgtatcagcttaaacttgatctaaagtagagtaaattaagtaagaggcaccctcctccatttcgttctagctccgcccccatgctcctgcctccttgtgtgtggagtcgtcgactctcctctgcatttgatcaaggaaaatattcatcaaggaaaatattcaaatattcatcaaggaaaatattcagctaggatcgtttcatgatgtaatttatatataatcacattttgtcaccctgaagaatctgaagattggaagcttcatcagcatttgccatggcccataatccattcaagcagagagcagttgctatgaagtcagtgcttggataggctattctgaatttttctttttccatgatagtttccagaaattgcaatagcatatctattgattttttgtgcttaactttatatctattagagagacaggatgtttcgtggaggggatgtctgcaagtgatctgaatcatatacttggtgtatttcgcagagttagtttagtctctaattggagatcaggacttctactgagattttggaggaaaattattactagtgtcttatgaaaactctaagcttcatattgttaatggagtatatctaaactctgtgatttacagtatactcctacagtcctgctattactctcggtagt

SEQ ID NO: 12133 - DNA, 896 bp, Oryza sativa
  Intron number 1 from transcript LOC_Os03g40410.3 (locus LO C_Os03g40410) derived from phytozome v7.0 (chr-ID Chr3; po s 22451357 to 22452252 reverse strand)
ccaccggccagatccggcgcatcttcaggccaagggtgagctcgtcgccctcccctcttgggccaacgtggattcccggtgactggatccgattcattcagtaaaataattggaggaatccctccaaacggatccgatttctccctgccatgtcgcccttgggtgagtaataataagcctgcttttatttaaccttgcaatcaaatcacactacgatacacagcgactatatcggatttctcaatccttccaaaatgagtgtttgttgtctcctttctgtgataaagatgcaatttttccccctaaaatctcacatatagcttctaaaaaaaagcaattttgtttcgtaaatttcgcatgtaccttctcaagaatgcaacaaattttgtacaatctcacgggtagaaaaaaaaactgctatctttaggcgtttaatccgtccaaatcatgagttgtgtgatgcggatcgttttccagaagactggtagtctgattctaattctgactgccccaatctttgtgcaaaatcgttgtgttcttcgtgtccgaattggatccgatgtccctttccaatttgggagaccctgcttaccagaagggattccttgtccgaactatggatgaatttgatttgttcgttcttatatatgaactagtaacaaatacagttcgcatgtagattatcttatttgtattgaatataattcacaatatgcaaatgtttgctgcagcaggaccttgtgcaagccccagctggtccgacctctattgatctcctcctaatcatcctggaacgactggagcttcctcatgcacttgccttcgccgcagtctgcactacatggagttccgccgccacggctgccggtgtcccacgttctcgcactccatggatc

SEQ ID NO: 12134 - DNA, 995 bp, Oryza sativa
  Intron number 2 from transcript LOC_Os05g15150.1 (locus LO C_Os05g15150) derived from phytozome v7.0 (chr-ID Chr5; po s 8591407 to 8592401)
ctagactggagattgcattctggtcatataccaaggtactagatttttgctttgattgtgataaatctacaggaacgaattagattgtagataagaatcacagttttcaatagcctctgtttgcctgcaaattatcatttaaatatcaaatctcgttgtagcaaacttggaataatcccataccttcaattgtttttgaaaaaccaacctctttgcatgtatttcatcagaaaatgtttaaactcaggtctgagttattatttcagaaattttagtgaattagatatgaaaagtgaaatagggacgagatggctaatattgaagtagatatggactatccatataaacgaatagatatttcaaaattgaaattcgaatataatcttgccattaaaactagactaccaaatgtgctggggatggggatctgaaggtttacagcagtgtggccaacttccaaaaacaaaagctttaaaatttaaaaagcatgacaacctgaaacatttcctgaaaggcatgtcttttctgtgatagttgtgatttagtgagaactttcaacaaatttgctctgtacatattattgaatcaaaataatctactcatagatggtattgtctgttaccctccttgctttgttggattttgctactttgcatcaactatagctttccatatacttcacaagataactatttatctgatctgtttcatgcgactttctttgtcttgcattatgcaaataattctaacttttttgccacaatattctgttattctgttgtttactctcagtaaccactttattttctatcacaaatcaaagctgttcacaagtacagtttatttgggggttttgcatactgcattttaaatcaatctaccattggaccatacactggattcgtttgtagtttgtttcaggttttttgtacattacaaaaaatgtttatttctgtatttaacacccttttgttggttcattaggaaaagagaaa

SEQ ID NO: 12135 - DNA, 827 bp, Oryza sativa
  Intron number 1 from transcript LOC_Os04g52920.2 (locus LO C_Os04g52920) derived from phytozome v7.0 (chr-ID Chr4; po s 31339661 to 31340487)
aaaggattcacaaggttcaggtatgagctctacccaaagccattgcagtagttcgttttagccgagctcttcattactggttgctcgattcctccacacttcattttagtcactcacaagtgactcttcttaaatcccttaattgacatttcccattgatttcgtgaaagatttcgttttcttgatatagtcactcttgactcatttctaatttactttctattctttgtttcttcagaaattatatttcggcatgcccatttcggctgcacaccatttaggaatgttgtatttcgattcaaactattgtcttaaagttctaagaagatagtgttgaaataagacggcttgggtataaaatgagaaaagtattgaaggatagtacattttaggtcattctcactgaaagcgaagctaacgaagtttgtttctacagaaaaaaaaaacaactcttcacttaggtagtgcaaaacctcattctgaagaatttatcgttgaatacatgctaaatgggactacttaattattcacttttgaaaaaaaaaatacccttacaagttacaagttgttccagaccagagtaaaagtagcaacaaattgaaccttctactaacttctcagaaatgattaaaatcttggcaggatacaggtgttttctgttagcggttctaacttctaaagaattctacaagttctttctgcaatcaccaattttaagtttaatttgagatacagtactttgaattaatagaacttccatggagaaagacttactggctgctttgttgttcctgtaggctggtgcactttctccgacaaagctaagg

SEQ ID NO: 12136 - DNA, 996 bp, Oryza sativa
  Intron number 2 from transcript LOC_Os05g19030.1 (locus LO C_Os05g19030) derived from phytozome v7.0 (chr-ID Chr5; po s 11043632 to 11044627)
accaaggtactacctctcttctgttaaaacttaaaagtgatgtccttttcattttcactttcactgaactgaactcaactgtgtgtcatgctcacgtccaacttaaattccagataagttttcttcacctcacggattcaattttcagcaaaataacatgtgattatttttatatattcctcactgaaaaagtacaaatatgattgctcttatacgattggtagttggtatggcgccttctgtattagattcacagaatattgtagcatgtcgcattcatttggtactttgctttagcgtgtggagaagcagggatttgtcccatcctccactacgttttctttatggattttgggtggactatgtccaaatttattatactaggatgcgtcacgttcatccaaaattattttgtgagatggacatttatggtgtctattattctaaagggttttatcatatctggttagtcttcatatttgaactgtttggggttattcactttgtagcctatttcaaccttacggtttaaatttggacattatcaaattttgttagtgttagatatatatttggtttgaagccttaccaacttttggtagaatttttaagagtgcaaatatctagaattatcaaaatcgggtaatggaacattgataagaatatatgtttagtttgttgaatttggtaaggctaaaatttggtagggttaaaagtggtacaaaagaaccctttgaatgcatcttcaagtgcaaaggtcagaattttgtttttttacaaaaaaggttgaaatgaagtccttttggatggagaaatgaagtactactagaagtatatctgactggaaaagttgcaattcgatagactgaccatgtcagtttcgaaataggagtaacattttttttcgtgaccaaaattagtagccttgtaagatcttctgactaaaaatgtgtaacgccaggtgccggaatcaccaaacttcaaggtgagggtgac

SEQ ID NO: 12137 - DNA, 776 bp, Oryza sativa
  Intron number 3 from transcript LOC_Os05g43300.3 (locus LO C_Os05g43300) derived from phytozome v7.0 (chr-ID Chr5; po s 25127211 to 25127986)
gtattagaggccactaggtaattaatcatccttgagctacatgcttggtagttcaaaatatttaatgcacagtcattgcctaatctctgccttttttttatgccaagtattagttgctttagcttgcagcatcttcttgctttactgcagcacaagtttttcttacttgacttggatgtactattaatcaactcgtatgatctcttgtttggagttctttttgtacaaatatttttgtaggagtatcatatatttacagaatctctcctcatttaatgttgtgttggatctgtctccttgaagtgcttattggttgagttgaattatttattctattgactggttattttcttcctatctgatcaaacctttcactggatcaacttcagagctcaaaatggatattttagcagaaacagcacatttgaagtcaaagcaattagatttagatgataggcatgtgcttaggctaaactatggtttctttatttactcctatagccctatgtttggcctgccatgttcctttgaaaagtacattggtaattacttaagtgcctaaccggagaagttcaagtggagaaaatgcttatagtttcgatccaatatggtctcttatatcttgaaaaacatgtttataaccagttacaattcaatccctgtatttaagtagatgaactctgtttctctgacatcaaaactcaaaatgaggtctagcttctgactctccactaaatacaggaaacagagatttgaaagggttacaagaaacttga

SEQ ID NO: 12138 - DNA, 778 bp, Oryza sativa
  Intron number 2 from transcript LOC_Os04g53780.1 (locus LO C_Os04g53780) derived from phytozome v7.0 (chr-ID Chr4; po s 31864553 to 31865330)
ctgctccggtgaacctcaagtcagagaaccctcaggtattacatagccgtctacaacaatttgattaagtttatagaaaatttaataatatttataacatcaaattagtttcattaaaaataactttgaatgtatttagatggtatgtttgttatatgtgagaaatgttctgtattttttttatgaacttatcataataaaacataattagaaaagagttaaatcatcttatagtataaaacggaggaaggggaaacatattttaagattatctttatggatttagctagatggtggttgccactcctcaagtctcttatggttgccaggccattaatgatactaagtattcctccataaaaatgtctctttgcacttcactcttcattgttggcttatgcttacatttacaagctaacatttaaaatttagaacttaattttaagtttgatctttttctcatcatagtttatttttatttactaataagcgatttaaataagcgaaacaatgctactttctgttgcgatgacacagacacatacacagaatcacatacacgcactccttctgtctcatagaaaccaatcagtactagatgtgacatatcctaatactatgaatctgaatatatctctatccagattcgttatactaaatgtatcataatcagttatagattttttttttgtacgaagggagtagttttgttttttacttggtcagcctgatggtaatgacagaaagaactggtggaagccggtgtacgaggcactct

SEQ ID NO: 12139 - DNA, 704 bp, Oryza sativa
  Intron number 2 from transcript LOC_Os05g43380.1 (locus LO C_Os05g43380) derived from phytozome v7.0 (chr-ID Chr5; po s 25163654 to 25164357 reverse strand)
cttgaagctgtaagaaacctctgatcctttttgatttttgtagttctctgtttcatacgattctgggaaggtttagacattttagtgaaaaaaaggggagaggaaatggaaatgtttggtaccatgcgattttcgcagctatgtgcatccattttggttagtggataatagagatagggatttgcgcgacgttttacgggtatgatcccctctgactagatatattgctcgtagttcaaaaacccctttgttgttgggttctatagtacagctatttgaatggattgcggttctattctcttagtatgtgtaatttgagtgctccatgtggtgtgtaatgtgtttaaattgaataaataattggaatcccatgctctgttataatattatatgtttataccttttgattattagtatgatttcccattgtatgttacctctagtactcctttgatatgtgcaactaatggcggaaagcttacaactttgcgatcagcctacaaaagctactatggaagccatagttcttctatgttatcaagaagctgtttttcttcctactgcaaatattatggatagcaaaacgccatcagtacgaatatatgataagtttaaattgatttggatctctatgtctgtttggttgcttgtgctttcatgaactaagactgatattgaagcgtttgcttatgcagctattgccc

SEQ ID NO: 12140 - DNA, 428 bp, Oryza sativa
  Intron number 1 from transcript LOC_Os04g14204.3 (locus LO C_Os04g14204) derived from phytozome v7.0 (chr-ID Chr4; po s 7958692 to 7959119 reverse strand)
tccgggccctgacgtccggtgtctagagctctacggcaagtttgattcttctccatcccagttcattatttttcttgtgcctatttgattttgactacgatgcaagagcaaactattagatgttagcgagcctgatctacctctgttagtccaccagctaatttgcgttcccttccagatttcgtagggatacggtaaaataatttgatcctattgttgtgctttcaaccataccattacggtttcaaccttatgattgatccaaggctaaccatttggaagcatcaaatcatatattattattatttttggatgggtccatgaccttctctcagtttttttttcttttgctgttctaacatcagttctgattggcaaaattgttttttacagaagctaggaggggagcaaaggaggtgctgggactg

SEQ ID NO: 12141 - DNA, 343 bp, Oryza sativa
  Intron number 1 from transcript LOC_Os05g40290.3 (locus LO C_Os05g40290) derived from phytozome v7.0 (chr-ID Chr5; po s 23614080 to 23614422 reverse strand)
gacgggctgcacggtacggacggctgcttctctcccgggcgggccatgtcgccgcaggtcaggccccccgtcccgcccgacgctgccagcggcgggtaaggaccggacgccacgattgggttttgattttgtgttttttttttctttctttgttcttcttcttgcgcggagaacacaacagaaggaattatttctttctctgaattgcggcttgttccttgtgtttcttgtggtgttggctctgctcgggatggatggatggattggattggattgcggtggtggtggtggtggtggtggtgaagcaggcagtacttggcggagttgttgcaggagcatcaga

SEQ ID NO: 12142 - DNA, 992 bp, Oryza sativa
  Intron number 1 from transcript LOC_Os06g50370.1 (locus LO C_Os06g50370) derived from phytozome v7.0 (chr-ID Chr6; po s 30492319 to 30493310)
cttccgcggcgtcatcaccttcatcttcgccataggtcgctaattaatctctctcttgctattcaatttgcttcttctgaatcttctttccaatctcccttgtttgctttctgctgcctgctctgatagcctgatctacaccgtcttggtgtgggtctgtgtgatccagcttcatttctgcttaatttcatcttgtttatgtgtttcagtgtctcgcatgcatatatatatggcacgagctacttcagatatatattttcccctttttctttttcttgccctccttttcttgtcctgcttcatttccatttcttggtccaagaagaaaaattaagggggacattttttatgcatgtttcatcaccaatactcaactcattttcacattttcccttttcaattcccttctatgatgggttctctctttctttgtggatgaatctgtgtgaagagagaggacatgacatccatgcatcggctgatggagctcaagctgctcaatcagcgctttgtatcatcttggtgtatttgagtcttaataaagcttccattatcttaaaaaaatcagcactttgtatggatggattttacagtgctcaatcttcagagcactgtctgtatttcctttttcaaggcagcatatactgatacttgcttaattggttctcccaacgaaaatacagattttttttgtcggcactgttaatttgcatactgttttatttccttctgagcaagtgcaaagtaatagatactaatattgtttggtcatatacgtgcagaatgggttcttgcacagcttaaaaccacaacttcttttctctgaacaatgcttttcagagtgtgacatttgtctcgttttttttttgttcaatcttgaagcctgaatcttgaaccggaaagctgtggtggtagctatgaatgttaattaacatggatgtgtttgtgtgtgtgcagctggactgtttcttggagcggtgactggcgggctg

SEQ ID NO: 12143 - DNA, 791 bp, Oryza sativa
  Intron number 1 from transcript LOC_Os04g39450.1 (locus LO C_Os04g39450) derived from phytozome v7.0 (chr-ID Chr4; po s 23316516 to 23317306 reverse strand)
ggtggccgcggactcctctcgccgctctcccgaaggtaaagccccgatccaagcggtaaaccctatctgtcagtgcagtgagtgatctggtgttctcgttcgctgcatgttcgatcattcaaggtgtcgtgttcgctgttgttggatgaaaagcattagatcccgaataggtgaacaaaatggttctttggtgatgttcaattggttaagctgctgatgtaaatttgacgaaataaacatgctactgttgtttgatgaagggtaaattttcttgtacggagttttgtttcttgagctcttattttctgatgtcctccgaacatgctaaggtatcaagtactccatctgtgacattatgtatccatgttctagttgaaaggaactcaagaagaaagaaagaaactatttttaatttcttttgaatgttctgttatcggaggaatactccatatttcaaggattacccgtgtaaataaatggattttcttggatgtattgcgagggatgcactttggcatggatcacctatgtaaataaatgggttttgttgcatgtatcgcgaggaatgcactttggcatctatactccaatttccccccttctggaaaatgcacatgataaagttttgatttaacctgtatatctatgtaggagcattccttgctaataaattttgcatggagtgtaattgtataactactagaattattttttttatcaaaacaattgaaagcaaaacagttaactgtttacctattatgttgcttcagctttccatctccaccggtgga

SEQ ID NO: 12144 - DNA, 394 bp, Oryza sativa
  Intron number 1 from transcript LOC_Os04g58555.1 (locus LO C_Os04g58555) derived from phytozome v7.0 (chr-ID Chr4; po s 34629143 to 34629536 reverse strand)
cggccagaccggcgttatcacaaccgtcgatcctagtaagtactatcccaagacgttttgacctttttcctaaaatttataaaaaaatctagcaatatctacgacatcaaattagttttattaagtctaacattgaatatatctcgataatatgtttatttttattgaaaaactattttttttataaacatgatcaaacttaaaaatgtttgactagaagaaatgtcaaagtgacttataatataaaatggatggagtatattaatttatcttctacttaataacaataatagtgtagtttcattaattaagtttaaatgtccttttttttatttattactagtggtacatgatttttttttctcttgacaggttataagagctgcaaatttac

SEQ ID NO: 12145 - DNA, 974 bp, Oryza sativa
  Intron number 2 from transcript LOC_Os03g40080.1 (locus LO C_Os03g40080) derived from phytozome v7.0 (chr-ID Chr3; po s 22261146 to 22262119)
ctcgagggtaaatgacatgatatctgttggaagcatctatgcaaaatgacatgatatctgagttcggctgttgtagcatccacgaacaacttgtacacagttagctttccagcacaaatagcagggctaaaaggttcacatatggaaattaccagatgttttatttttaaagttgtacttataatggttcaaggaaaaaatgaaacatccatttccctattgttcactagcccccccccccccccccccaaaaaaaaaaagtatgatctgatcatactggaaacatgaaaggtctcttaaattaaaagtattctgatgatttcggtattttaaccttaagcattccagttaagtgcatcaaagaatacataaatagtctgagccctgcaccaattaagccttactttttggtattgttatgttagaaatgctatttacagataactcagatctcaaaggttgggtataaaatgttgattgatgctaatgtgacgaaagttgcactccccatcatcattctctttaagaataactttttacaacctttctacagtctaagatgaaattttgaattaacattaaactggtgggtaagcaattcttttcttgagaaggttaaaacttaaaatgatatttttttatcgtgaattacactaattagttaaccatatgtaactttgttcaatttgagtataattttaccaataaaataatgtgaaaatatccaacgatgttaattgtaacttaatgattaagaaccttggcatgtcaactaaccttcctgcgccatggttgaatttactttagccttcttagatgaatcatgaatgaaatgaattcttttaatcatgtgttaatttataaaaaccaaggttatagtgatttatggttttttgttctctaagactcttctgcttgtttcttgtgcaaactactcaggagccaggacttcctaggatcgtcataagatcaaa

SEQ ID NO: 12146 - DNA, 268 bp, Oryza sativa
  Intron number 2 from transcript LOC_Os04g52020.1 (locus LO C_Os04g52020) derived from phytozome v7.0 (chr-ID Chr4; po s 30718209 to 30718476 reverse strand)
atattgtggaggctccccttgaggaaagagtaaaaagtgactttctgctactttactttatttcaagatgcattattgctttgctcttttgtgtcttctctgtatcagtgttctctttcatactctgattgcttatcaagaaaaaacattctttgaattattcctatgcattgatcattgttacaatattaatattaaacttaagctagttggtttttcctatcgtatagctcatggtaaagtttccatcttattggtaatgcagaat

SEQ ID NO: 12147 - DNA, 413 bp, Oryza sativa
  Intron number 2 from transcript LOC_Os06g51160.1 (locus LO C_Os06g51160) derived from phytozome v7.0 (chr-ID Chr6; po s 30949454 to 30949866 reverse strand)
tgcaaccgaaagatacccaaccactagctcaaactgtatgttgttcacaaaattgtgtttttatctggacaagtcagttgcgctgttttggcttgtcacagctcttttttctgctgcggtaatagcaagaaattgcgaaggagcagctaccagacactgggtcagaaatctcaaatatttcaaccacaggaactttggaaaccagaagaaacgatccgattaaattaaagagagtggttgatttcttatttttcttatatcataattataaatgatgatggatatttttacctgtatgttatgttcttttttataattcctgtttgattaactcttcgccatcttactgtatccaatataccattatggttcctgtaggtattccgacgcaaaagaaaggaggataggaccca

SEQ ID NO: 12148 - DNA, 841 bp, Oryza sativa
  Intron number 2 from transcript LOC_Os05g05690.1 (locus LO C_Os05g05690) derived from phytozome v7.0 (chr-ID Chr5; po s 2831719 to 2832559)
gacatccctttccctgattggtccttctggggctggtaagaattaaaaaatactccctccgttttagattataagacgatttaactttagttaaagttaaactatttcgagtttaacttaaatttataagcaaatataataatatttataatactaaattagttttatcaaattaataattgaatacattttcataataaatttgtcttcggttgaaaatgttacgttttttctacaaacttgatcaaacctgaagcagttagattttgatcaaagttaaaaacgccttataacctgaaacggagggacggagggagtacttactttgtcttattgcttgtcttcttcccagtagtacgacagtagtactattaaaatatttgagtttagaacatgatttagttagaattttagaacttttaacatctacaatttcccaaaaaaaacttagttcatgaatagaaaatatggtatgtttaaattgacctcaaaatgcactttccattatatcataaatttgttacattttatagacatattctaccaatgttatgattagtggccaaaattttaatggtttactaaacatcgagtatttcccaccagagagagtagtattatccgttgggttctacaaaatatcaaatatggtgtggaaaatcacaaattagagagaaaggattatgcattgatgtttttttaagtagtgattcgctcgggttccgattctatgaccgatttgggtaaagtctctgtttttcagcaaatgtgagttgaggttttatgtatttttacataatatataggcctgaaacgaacatcgagccgtggagcaaggagt

SEQ ID NO: 12149 - DNA, 403 bp, Oryza sativa
  Intron number 1 from transcript LOC_Os04g32850.1 (locus LO C_Os04g32850) derived from phytozome v7.0 (chr-ID Chr4; po s 19664475 to 19664877 reverse strand)
tactgctcattggtaacattcggcaaatttgacaggtgagctcagtattttaaatcttaatgtagtactttggtgtgctaatctttgctctgttcaaaagagaattctggtttctttgctattttgaaaagagaattttcgttacaggacttcaacttccataatacttttttttataattaaggcatgatatatatcttctttctgaattccacgggaattgcactttttcctgagaaatttgtaaagagcatgcctgttaattgcaaggggcccctaactctgttatgagaaaagagaactatataagatgctcaataagcacctctttttttttttctgttaactgaccaaagcctgtctatctgcatttttttttgttttttgtttttcttgtgtgcag

SEQ ID NO: 12150 - DNA, 556 bp, Oryza sativa
  Intron number 2 from transcript LOC_Os07g04700.3 (locus LO C_Os07g04700) derived from phytozome v7.0 (chr-ID Chr7; po s 2089419 to 2089974 reverse strand)
cctgggaatccgaataactgggataaacttgcaaggtacttgactctttgatcaaaacataaattacccaattcaactcgtcttctataaaatatgctcttgcatcggtatataatgtttttatgggttctctagggtttatacttccttaattgttgtagctgtagaagaaatttaagctatgtaacacacttgctacatatggtgttatcttcatcagaccttacttctaaaacatggaatagaatctgtgcaaactatatttgttccttagagccaccaatataatatatataattgaagaaataatatgatgtaactaagtctctgacgtatagatatatagtaagtaaattacatgtggagaacagccatgtcaagttatttgtgtttgttctttttcagctgtacatatcaatagttcagtacataattgaaaaaaaaacatgtacagtctttgtgtaattcttgatgcagcaaatgagtgtttcattgtactcgaatgagtccttagtattttgatttgcttaatgcaggtacctccagtgggtcagag

SEQ ID NO: 12151 - DNA, 870 bp, Oryza sativa
  Intron number 1 from transcript LOC_Os03g42790.1 (locus LO C_Os03g42790) derived from phytozome v7.0 (chr-ID Chr3; po s 23834418 to 23835287)
cggaggaggaggtggagcaccgcgcgatttgctgggtgagttctatctataataccctagcctatatatctcccgttctctctcgggtgggaattaaaaccctgcagttcttgtgattgaacttggcactatgatcgatcgagttccgatattgggggagggatcgcctactgggtttagttaattcctttggaattccaaccaatgtgaccaagttaattttcatcatatattaattattgataacagcagttgattgtatcgatttggttgagagaatttgcagccctttgctgggtctctttcaatctttgatttcagtagtaagaattatttgatacacttctgaaagaaaaatgttctaaacaaaatagttgattcacttctgaaagaaaaatgttctaaacaaaatagttgattgaatcaaattcgcatcttccactgcaagccatggtcttttgtgaaagtaaatggtccgtttatacaagaatattgcattgtttcaataattgttacttatgagagttagttttagctatattttatcctgttccaaaataattgttactggatatatcatatttaaactctgattacttgtattcttcaaaaataaatataaatgcttaaaaaatgtcgtattatcaaagtgtgttgtaccacaaacataagctttaagctttcgtccactgtagtctaatcatttaaaagttgttaatggtcaaaatttaataataagtactatttgggcatgaagtattatcttttctttttattaaagaaaatattcacctcgagaagaaggctgcactaatcaagtaccctgtttttgcaggccattacaaaagaatcccttgcagctgcgcaggt

SEQ ID NO: 12152 - DNA, 848 bp, Oryza sativa
  Intron number 1 from transcript LOC_Os06g10920.1 (locus LO C_Os06g10920) derived from phytozome v7.0 (chr-ID Chr6; po s 5705877 to 5706724 reverse strand)
gcagagcgcggcgaggctgactgctgttactgcaggtaaaatgtttgtgatttgcagtatgagattatttagggatgcaagcggggcgggtaagcggatttttttagcccgcttatctcacttctaattcatgttttctttcaaattttgtactaacatataggaaataaactaacaagcgagtttttatgactacccacttgcatccctaattacatttggaggcggttagattaaaaaaaatgtaggtgttttggtgtgatttgcagtttgtgatcactggaaaactaaaatgaattgtgcacgtactttgttgtggtttaattttcaactggtaaatacgcttggaagaaactaagatatgatgtacttgtccatcttttagcgatttgagattactcagttcaatccctgcatggaacaaacagatttcacgccaaacagtttaagatcccacagtgatcagagaagttgagaactctcccctcatttcgggtttatttattcggatttggtatttcacatgcgactgatttttggttttaaaccccttctagatccacctgggccatgattttgtgggccaaagctctttcatggattcagaaatcctacatctgggccataatttcgaatatcatctctggtggattcagaaattcttaaatttctacgaatttgaaatcctaaattgcgtgatgtaaacttcaaattgcgcgcgcggagctaaaattaagaatctcaattcacctggtatgtttttgctaaaaaaaatttacagtttgttttgtcacgtctcaaaatcaaattcaggattcacgaacgcctccaaacccagcgccaccggc

SEQ ID NO: 12153 - DNA, 873 bp, Oryza sativa
  Intron number 1 from transcript LOC_Os05g46720.2 (locus LO C_Os05g46720) derived from phytozome v7.0 (chr-ID Chr5; po s 26980990 to 26981862)
tcaggaccactcgatcgatttgccaggccatgtgagtacgaattactaggaaatagagtatttctttgcatttaagaccaggatgaatcgatttattgggcttaaattagtgggttatcttgtgattacctgtgtatgtggtattgtacgattcaaatatattcatatttgaattcttggatcaattcttaatggaggatatggcaaaagagttcgtgagagtatgcgattgcactgtttataggatttggggatttccccattcagttaacaccaacggttacctatcaaaatcgaatgtttgtaaaaaaaaaatcatgcagaagtccattcactctccgttttttaagtttcttgctcatcttcgatttttttttccttttgttggtctcactagagggcataatagcttatgcttcaagttttttcaaaaaaaaaaaaattacggggaagctgatgcttcaagctaattatgcattcaagaataaccacaaaaaggaaagctacaaaccaacacaaagaatcagcacattttgatgttgatgtcacatgtataaagcattaaattccatttaataattcatgtgctgttggtattgccttgcacaaaggcactggattaattgatcaaatgggtcctctttttataaagtttatcttcttaatcttcaaatgaacacctatactcacattactgttggttctgaaactaagttaattttacgttctaggtttagttccctgtaaagctctattatttgtcattctccctaagcggctaagccacctatcagttgccggtaagaaaaaaagttcataccgtcataacatgagatgctattgctggtgcaggttttgaaggttttacgcata

SEQ ID NO: 12154 - DNA, 1005 bp, Oryza sativa
  Intron number 1 from transcript LOC_Os05g23320.1 (locus LO C_Os05g23320) derived from phytozome v7.0 (chr-ID Chr5; po s 13251308 to 13252312)
tagattgcttaagccagcagcaagaaagagtactggtaagcaggccaaatatgtggctggtttcttgttttttccctgtaatttgtacatagattaatgtttccttgcaaaacttgtgcctgcattcttggttcttgccataatttctttgggagcggatgagaggagatgagacaaggtcgtccttgctggaccgtgtctttactgctatgatctttgctggttgaggcagatgtggtggatggcttctcttgaagaggtcttgggttcacatggccattgcttgcctcctcctttctccgtgacgtcttcttcctgtggggttcttccctttggagcttggcccctacctactcaggacaagcgtgtagatgcaggcgtgaatagcctttgcctgtgctcccatgtcaatcaagtgttctgtgctagattggtcccagagatggtgcctctctggtgctaatttctcttgagggtgtttctggtttggattactgagttaatgacgccatggctgggcagagtaggatgaggtttcttgcttcttcctctcttgagtttgttcttgggtaattaatccttttcctgggagcaacttgtgagttgtgactgtttcttggtttcctccgccttggttttaccccctttttttgcgttttttcgaggcatcgatttctgagccggataagtagttgagctgctggtggctgaattattaacagtccaattaattgctgacatcccaagatgggcagttcttgataaccccagtaatttaatcgctcggtttagtagctctggtttcaattgctcccacatggagtaacaattcattagttagagggatttagagctgaaacttcttctcaaaatcgcagttcttggttgttgatttccctctgttcatcgtggaaacgtgttaagctcaagttcttgcaatttttctttgctttttttttttgttttgtagaggaaaatttcttgattaggagatagtacaaggtt

SEQ ID NO: 12155 - DNA, 911 bp, Oryza sativa
  Intron number 2 from transcript LOC_Os04g56580.1 (locus LO C_Os04g56580) derived from phytozome v7.0 (chr-ID Chr4; po s 33552837 to 33553747 reverse strand)
taatcctcagctacactggctcgtcaccttctgtatgcatcgaataggttctgcttgtgtcattattggttactgacctatagtctcccgtaaatcggcgaatttgatgcatgtgcttcaagaaggatgttttacttttgatgttctgatgattatagctatgaatgtttgggtgtctgggaggcgacagtagttcaagctcttttcatgagatgttttggatggtgttttatgaggtgatctggagatgtagccttgtgcttgatctagctaggacccagcagttggtgtctagtcgtttctgtcctagtttagctagctgtttttattttcctataagactctgtttgtttggctttcctcacaaagccggtttaatgaatgcctgatttccccccaaaaagatgttttaccaactttgatgcaacgcccagggatgcatgtcctatggccagagctgcactcttgaaatggcaaatgtttgtatatgtaaattagaaaatcccatacagctttcatgtagtcaaatagtttcactttaatattatataattcaaaagaaaataatcttagttgtgtgatcacacaaaaagaaggggtggtggcggcgccatcttagttgtgtgatctgcctgcccggtctagttttgtttttttgttcaattccttttgctgtattgctacaacattgttgtttcctgtaatggaaagagggagagcaaggttcttctgttttttaaaagaagagaggaaaaagagaaaataatcttatcttgacttggttgactaaaatttttagtttgtgaccaaagtattatgtttccctcgtatgatatgtttacaggaaaaatgttttgatgatgttttcttgaacagcttggcaaggttctgcgagtcaaaaagattctaaa

SEQ ID NO: 12156 - DNA, 1018 bp, Oryza sativa
  Intron number 1 from transcript LOC_Os04g40310.2 (locus LO C_Os04g40310) derived from phytozome v7.0 (chr-ID Chr4; po s 23781002 to 23782019 reverse strand)
acgaggtcgtgcccggcgtcgtcgagagcctcaaggtacgggccaatctcgcgtgacgcgcgctttgctctgttgttgtgtgttggttggagaatcgccacccgtgcatcgattttgacgtctaatgtgttccttttttgtgatgttattattatgctgcaatttcgttggcgtaattgctggtactgctcatacggatggtagattttgcagatcatacttattgtatagatgagagtatcctattgcaaaactgcgaggctttgaccacattgttcattttgattgggatttcactagcctatgatctcaatatgtggtatactgaattacagataagtccacggttagagttatatatgcaatttctagtgaagttgcatatatctaatctgcagaattgttgtcttataaggatgggatggtgtgaatgttttaatatatattgttgtcttgttgacctgatgtttggcatctgctttggttgtccaatcttgagatgtggattagcaggcgttttatcagtacagaccagcttaatcgaactcacggtttgttgtttgctgtttgcctggtaaagcgtttggtacaatctatgaatttacattatttgcgtgttgattaaattgtaaaacgtgctagtttagttcctgatttgtttattctgcatcaaacactggcctctttaagaatttaatgacgtgattatttggcccagactgttaatatgacgtgtaatcaggtcagcttcatggatttgggatgtagggaatggaatagagggaataggtagactgatggttaaatttattgatttggggcacatggactcatcagatatgtgcttatttcttttctttcaattgaaccattgattagttttgtgttacatgattgccaatggaatgaaatgcacccttttttttttccagttctctgagcttcttttccatcttagtctcactgactaacttttgtcaggtgataacaaagttttgctctgagaggattgccaaat

SEQ ID NO: 12157 - DNA, 519 bp, Oryza sativa
  Intron number 1 from transcript LOC_Os04g52400.1 (locus LO C_Os04g52400) derived from phytozome v7.0 (chr-ID Chr4; po s 30954400 to 30954918)
aggccgtcgccgccctccgctcccacggcctccgggtgagccctaagcccctctcccttcccgcctacgctacctaccacttcttctctatttaggattaaaaattgtttgttttttttttcatctcccagtcagtctcgtggtgctgctggtgagtcaaaatctcgatagagagattgatgttttcttgtctgagtccatcaatagatccgagtattcgtgggggaaggctaaaaccttgtgagagttgctagcgttaacgcgtctatatacgaggagcatactgaaaatttttctgaagcgtgctcgcgctgcatataaggattcctcatgactcatgcagatgtgatttatgcttcatgttcatgtgcctgactagtgaaataaatatagagttcatcatgcttccctctgatttcagtgctgatctttgggggtaagctagtcctaatctgtaagtgtaaccctgtagtaattctggcttgctgtcacgttcacaggctgttggttttgagggag

SEQ ID NO: 12158 - DNA, 842 bp, Oryza sativa
  Intron number 3 from transcript LOC_Os03g40150.1 (locus LO C_Os03g40150) derived from phytozome v7.0 (chr-ID Chr3; po s 22309748 to 22310589)
tctttattagagtatttatggttgttaattttttttgtctctgatgcatgttccatgttcaggttcagtattcaaaatgagaaaagtactgttatgtttatggttgtgatttgtgttcttagccctagatattgtttatgtggactagatgtgtgattcatttcattttagatatatctttttatgattgcttttttacatttgtgaactagatctgtgcttttgcttttgtgaactagatgtgtgcaatgtacatttgttgacccttctgtatatccttgatttgcatgttctgtgcactgattgattttgtagtaatgctttgatgtcagtttctaaatctatgcaagaaaatgctatatgctatttaggtggatgtttatgcactgattcaggatgtttttttttctagaaatccacaaatgctatatgccatttgcattttagtttggtatttttaatctttcaatgacaaccttacatgaggaaataacacaagttattgaagatttctgtactagaatgttttttatagtagtcaatttttgtctcttcattttgcatgctcaggtttagtattcagaaggagaagagtattgttaatacatttgttcagaaggagaagagtatagtattcctagtcatcactatactctgatatatgacatgagtttgtgctacacatttgacactactctatgaaaataattatttctactatatgaaagtaatattattttcatatgacatggtgcatttaacttgtatgttttattctgttttgttatatattttagtccataatacttatgttttgagatcttttttctctccttgcagtc

SEQ ID NO: 12159 - DNA, 572 bp, Oryza sativa
  Intron number 1 from transcript LOC_Os04g17479.2 (locus LO C_Os04g17479) derived from phytozome v7.0 (chr-ID Chr4; po s 9553502 to 9554073 reverse strand)
ggtgggagaggacgccacatatcagatccagcacggtaccgatcttcctcgtgttttttttctttttttgcggagtagcttcctgttgcatctggtggcgtgttaatggccggcacatctcactgtctcagcgcgataagtttgcagcttaaaagatatgtgatcattatgatttaatctacatttgccgatgcggccggcgccgggtttcctactcgccaccgtagagccgtcctccccttcatgctctgccgacgaccaccacgatggttgtgttgtcatgatttatttacagcccatgaggcaaaaaaacaggagaaacatggaagtcatttgatatttgattgcacattggggcttgatccttgcattgtgcttggtgagattgaattttgttcttttcacttaattgcacgctgctaaaaataccgtagataaaagtaagactattttgaacacattgaacgatggcattttaacttttttacgggaactattatcagtatgaacttagtttcttatggttccttgtttcaggatatcggcaggcactactggtgagtgtctagatc

SEQ ID NO: 12160 - DNA, 528 bp, Oryza sativa
  Intron number 1 from transcript LOC_Os06g05300.1 (locus LO C_Os06g05300) derived from phytozome v7.0 (chr-ID Chr6; po s 2384032 to 2384559)
agttccttcaattgagttctccgactctacctgaggtaagtccgtaaatatatagattcaaagttcttcatctaaacttttcggatttgctatcttacttactttcttggactcgtatttttcactttttcgtttgtagaatcttacatcaagatttatattcttacatataaaacttgctgttacattcggttatagtgcacttacactcctttacagtatactaaaataagattttataagatttacgatttttttgacatttttgtccttttgttttatttcattcaaatcgggctatatttattagttaaaaaatttgtaagattctaaactatagttctgtcgaaagattaataggtagctcctaacttttttttctatttaaactatgattcataaagtaaataaattccaattgaatttgatgtaattaaatctataacagcagtagtagtacttcaatatcactcactcagtaagtgaagtacaggtgaagctatcccgtgtggcggctgacgtcatcaa

SEQ ID NO: 12161 - DNA, 746 bp, Oryza sativa
  Intron number 1 from transcript LOC_Os04g27480.1 (locus LO C_Os04g27480) derived from phytozome v7.0 (chr-ID Chr4; po s 16070788 to 16071533 reverse strand)
gagggcgctcggctcggcgcggctcacgcgcacgggtgcgctgcgcacgggcagagcgggggagagggagagagagagagagagagagccggggagggagggggagatgggccgagagggattcggcccatcgaacccgagggaggcgaatcagacttttgtggagggatttgatttggaaaggatttggattcgggattgaacttgacaatagatcggagatttgagatctgagatggcacggacacttggcaacaagcagggaaacggatttcgcaaatagggtttttaagagatagttttcccgctaggcgccacgacggaacgggcgctacaaatatcctgtaaaactgaccaatttagtgacattaagagaaccgctacgtaaactatgtttcgaagttctacaagttcctaaaatagaagaggtgatgtataaaacatgtcacgatttaatatctagatcaatccatttgatggattaaaatttacaaatagatgagtgaaaagcggcaaaacaaaatagattgaagtatgatgagttttttcttatttaccgttgtattttatgaatttcatttgtaaaaaactgaatcgattctgagctgaaaggctgacatgattgtgtgatatcacctcctctatgtgaagtactttctacggaacctctacaaatttgggagtgtttccataatggatatatgcaactaattttaatccatattacaaatttcccttatttgcag

SEQ ID NO: 12162 - DNA, 431 bp, Oryza sativa
  Intron number 3 from transcript LOC_Os06g14040.1 (locus LO C_Os06g14040) derived from phytozome v7.0 (chr-ID Chr6; po s 7825121 to 7825551)
aagtggtctccgaacagctcacaaggtttgcattattgctttctctggtaaaattgtggagccaagtctcctctttctcactgcagcttttgatctttctgatggaatgaaatatctatttgatatggcaaatctgatggactgcacatgctgttgctaatgatagctaaagacttcttcttttttttttttgagaaaatatacagcttccgataataaatagcaccaatgcttgataagctattttcctctgctatcagtctattatatttgacatccttgcactttatacacaaaccaaagttttcaaaattcttattcagcaactaccctgaaatgatgttgtagttgctgttcccatgatttgttgttgtgattatcatcacctgtttctttttttttaaaataataggaatatacaattttttggc

SEQ ID NO: 12163 - DNA, 714 bp, Oryza sativa
  Intron number 3 from transcript LOC_Os04g55650.2 (locus LO C_Os04g55650) derived from phytozome v7.0 (chr-ID Chr4; po s 32939176 to 32939889 reverse strand)
aagccggtggcagagcattccagctctactcatcggtaagtcgatttaacgttattgttcaaattcgtttggtgatcctttgctaagttctaacaatgtgtagtcggtagtaagttttgctatctttgatagagaaacaaataggcaggctcactgattgcttttgcccttgcctgctttactttgctttaatcacggttattgcactaaaagaaatgattgtgttgtcagttgcaagtcgcaactactaagcaaatcttattatcattttgtccagtcctggcatactttgttaatttgttatcatccagataatctaatcccatttcagctttccactaaattagtacctcagtgcacaccatttattcatagaccataaaccatgttcatttgttgctttcctgcccctgctttgtgaaacacttttaatggaacgagtagcttttgatgtgttcccaggtccgtagtggagtggtatgagccatcatccagtgtcatccacttcgaaacccaattagatagggaaaaagattatgattgttttttcccataaagcaatactcaaatttgaaacatgcattgtactctgcttttgttaaataagttaatcctaaattccttgttcttttcaattatgttgttatttccatgacttgggcttgcactgattgccatttcctgatatcattcttagggtatcttcacgggtaa

SEQ ID NO: 12164 - DNA, 287 bp, Oryza sativa
  Intron number 4 from transcript LOC_Os05g47690.1 (locus LO C_Os05g47690) derived from phytozome v7.0 (chr-ID Chr5; po s 27261179 to 27261465 reverse strand)
ttggtaagtatcgctgggacactgaatttcaacaagtcaaaaacaaaattaggacataacatttttttttgaccaagggcaagaataattaggacagaacatggtaaatgcaatgacttatcaagcactcatgaatgtaaaataacaacattttcatatctgcttagtaaatgcaatgataaatcaaacaggcatccttgtaaaataaaatttttcatatgcattaacaatttactgtgtcttcttgaccagggtttttgtgtgctctcactttgcctgcgctgtat

SEQ ID NO: 12165 - DNA, 876 bp, Oryza sativa
  Intron number 1 from transcript LOC_Os06g01980.1 (locus LO C_Os06g01980) derived from phytozome v7.0 (chr-ID Chr6; po s 550736 to 551611)
gatatcggcgccggaggttgtgtccggggtctctggtatgctatccgattcttttcatgaaaactctgaacttagctaaacctttgaacatgtgttacaagcaagaacaaattagtttaacttactaaccaccaatcatgtttgctgctgggatgcttgaggaatgctaaattttgcaaatgctaatgtggtgttttctgaatcgcaacttctcaacatactagcaaatttggtaacctgttgtgtcgatgtctgcaagttcaggttgttcgttttaataacttataatgcaatcctcacttgataaatggaatttcatttgttaactaatggactctgaagctattagtgttcaatatgtacaaatagaccaggatcactgtttttattgctgcttcttacattagtcgtttgatctacttcacttagttttctttctcattagggaaggagtgcccgcaagtctagccgaacatagaactggtagtttctgcttgatgtcagtgtggcatgagattgatcctctatcaaattaggttcctgagttctattgttatactggtaatagtaatactctgccttgcaatgaaacataacacataggctttaaaggttctgattgctaatatgttctgcgatgacatagctccactgagatatgatccttagttgaaaccatatcggtcaagctttgtccttaccctgcataccaaatcagatatagcctatctcctattttcttttaccttttttaatatatatttcgtccctactcttagatagatctcttctatcagtagccatataagggtacaccttgtaaaccctcgttttcttgcaggggcttctgaggaaaacatcagaagcctgtttaag

SEQ ID NO: 12166 - DNA, 740 bp, Oryza sativa
  Intron number 1 from transcript LOC_Os05g38730.3 (locus LO C_Os05g38730) derived from phytozome v7.0 (chr-ID Chr5; po s 22667242 to 22667981 reverse strand)
ttgcaaccattccagaaacaaggtttgtgcttctggattctctggacagtgataatgtagtgttttgagtacttaactacgttgactgatattttttatctgttgttttggacttatgttgctatagaattatactttcgggcaaccagcaccatgcaatgaatgaaaattccagcttacaccttcttaacagtgttatcttctgggtaatttatatcagaagtgttatgatctaagcaaatatcgcaaaaaaataatttatctataataatagtaagatgccttcagatttatataattggatatgtctcaactgtcttggacatatgttaatcttattgggcagtatatggtggaatcatggatgtatcatttcatgaagaatatttaaaatcctatacccttcctccgatttctaaccatgataaccctagaaaataattaagatgtgattattgggaattggtttttgggtgcagaactattcatatacttaatcaaatgtttgcattacatagatactgggttaaaagtgatccatctaattttgccacaaactactatgcccaaattcgtgttgtaggcaaaattaggattccttcctttcactaaagaaagttttgagtcattggctcattgctgcttctgtgctatgcagaatcacatatttctgaattaactttttgctatttgttttccatatagcagtgcaaacaattcaagtccctccttgtcgacat

SEQ ID NO: 12167 - DNA, 393 bp, Oryza sativa
  Intron number 5 from transcript LOC_Os03g50850.2 (locus LO C_Os03g50850) derived from phytozome v7.0 (chr-ID Chr3; po s 29035913 to 29036305 reverse strand)
gcacaaaatctgaaaacctccaggtatgctgtatgcattttttgcttagaccaaaaacatgtcccctgacctgaattttgaattaagaatgtgcatgtcatgctgcttaggtctgtttgctttcttttttttttcttctggtggaggtttagggtagaaaggaccttacgtaattttggaataataggactatatgtgctcaagtatttgcgtaattaatcgtagtttacttctttatcctgtctagtatttgtttcatgcgttctgcattgttttggatgtagtactctttttttagatatgcaataatatgagttatgtaaaggttgtttatttataattttcttaaatatgacaggcaatacagagaatacctggagcatattttggagt

SEQ ID NO: 12168 - DNA, 963 bp, Oryza sativa
  Intron number 1 from transcript LOC_Os03g61810.1 (locus LO C_Os03g61810) derived from phytozome v7.0 (chr-ID Chr3; po s 35036456 to 35037418 reverse strand)
gaggaggctcagggtacgctatgacgtcaatgatacgggcacaccagtggttgcttgctgcggcgcttggggggcgggaactgttggattttgtttcctgctttgtgtcttgatgatttggtctagaaaaggggggcgtgagtgagatgagatccaacaagtttggagttctttgaggatttggggccgagagatttgctatctacctgttaggagtattgttaggagtaggatggattttcgattctgtgtttggtgaattaaccgactgctgcaattgggataggaagagattgctcatttctgcctcatgggtaggctgcgatggactttcttaggcttagttttatgtgtgattgcggtaagaggggtaggatttaagagttttgagttgctctgggtgattgcaagacaaacggagtgttccatgttggctgatgctgatggtgacttggtgttgaaccatgctatttatttcctttctcatgcacaggagtatagatcatgcacttcatgtcttccaaatttgtcatactatagttgttatgccgcttctggcatgctacttactttgcttccttcctggaactcattcagaagaaatccatggtttcaattaaaccaaaacaggattctgcatttgtcagaattaggaactgtggtggtttctgcgacatgatgcaatttggggactatagatatgtggctttggtcatcatagataggtcttacatgggggcatgggactatggccatggaagtaaatcttgttctgttgtcagctatttaccatagttgtgaatggcctgcatgttgatttcttcagtcctccagcctaaaattctttaatataatcacttcttgttgggaggagctgaaacaatcatttccaagcagtcaaatgaattattttcttcatttttaacagttgtggaatccaaggacggaacgatctcagttgct

SEQ ID NO: 12169 - DNA, 906 bp, Oryza sativa
  Intron number 1 from transcript LOC_Os03g51640.1 (locus LO C_Os03g51640) derived from phytozome v7.0 (chr-ID Chr3; po s 29550130 to 29551035)
ctgcttccgtcttcttgctcgctggtattcaaaaggtgagctgttgttcttgccatgttctttatcagagatttttgatgtatgtgggagcagattcttgagctccttgaagtgaccatgggtttgggtttcttggatgtttatgtggatgaggttgttgggttgctggtgtgtgtgtggcaggctcgcggtccttcagctggggctggatgtttcttttcatggatttcgcaagaaatcccaacattaggactggtttatttgcggattgcgtcctccaaaaatcgaatctttgctttgataatatcgtgttcgaggcatatattaagcggctttggttttcgcgctgttggctgattggggaactcgcctgttttaggcagtttcaagcaaactctgttaccacatcctctttggattatcattccttggttatatagctttctcctaatacggtatttgtgttccttgattgtttagcaatgagttttgaggtggtctgctagttgccttatggaaaatattgtatttttgcctgttttattaggatgctttggccttgatttgtgctgtttcttgggactgctaatgtagccacgcacaaccttttttcgttttgcagtagttggtttccttttaagaaagttgtctttgttagctgtttgcctcacatgccttgattaaattctaaaatattgtacacaattcctaggattttttcccctgtatgcatcttgactctttttttcctttcaagatgaattgttttcttcaatcaagaagagtaaatggatacattgtagtgtttttatcagtatatttgtctttagatcaagaagtgtacttatttcttgttaataccttaatgtaggaactatcaaggtgttgagtggagatattgggggc

SEQ ID NO: 12170 - DNA, 1056 bp, Oryza sativa
  Intron number 1 from transcript LOC_Os03g61730.1 (locus LO C_Os03g61730) derived from phytozome v7.0 (chr-ID Chr3; po s 34989478 to 34990533 reverse strand)
cgtccgccctgctgcttccgccgcatcgcatcccggtgagcatcccgtcctcttcctcattcatctctctctctctacccacccactttttttttcttctcgaatttgtattaaccctagcttctgttctagaaatttgcgttagactcagtactaataacagtttctttgctcccaaaatttttcgtgggttcgactgaacccccatgtggccatgtccgttgttagatccgccactgcgttatatcctcgtgtttttgattgggtggcttatcaaataataggtttctgaatgtattatacaaatatcttgtgcaacctacccttttatggttgttattgcctttatttaggtctttgctttgatactcttttagtagaaaaggcttgcgctaacctcgaatcagtattctgttactaatgcttttaggtctttgctttggtactcttttagtagaaaagggcttgcactaacctcgaatgaaaattcggttactaatgagtcggggcatcgcgacaaaacactaaacactgaaatgtaaaattagctctgtcctattctggtgtaaattagttaatcaaaatacacttctgttgtcatcctaaaccaactattcttaattctcagccatgacttcaatttcatgtttctcttgtgattggttggggctaaaatttgttcaatacagtttgttgctcaagggatgaatgccaacaatttactgtcactcattgatgtaggttccgttaacacacttttactatgtctaatggatgagactgcattaagtaatcgatataccctctaaatatgctatcctttcaatgtaattcgcacccgactacattaacctgctgacagtcacatgcaattgtctcttgctgagtgcatgtactgcatttgagtcccagtgactatttatgtgcttagagattaataaacttcttattatatggagcactaaagcatggcacatattttctagtaggtttattttatatccatccttatggcatgtctttttgtacccataggtactgttttaccaaggaaat

SEQ ID NO: 12171 - DNA, 443 bp, Oryza sativa
  Intron number 2 from transcript LOC_Os05g30300.1 (locus LO C_Os05g30300) derived from phytozome v7.0 (chr-ID Chr5; po s 17506028 to 17506470)
gaccccaagcatctgggacacctacacacattcaggtatggcttatgagcactcgcaataatctctctctgattttttttatttgaacgaaactctctctgaatttggattattgaaagaattctctgggggtttcgattggtctactgccaaattgcttcctaaccaatgttagctttcttccattgtctaaaagattggtatgctagtttggagttcaacgtaaaatcgatccttttccttttcagatagctcgacaatttttgtagatggaagtacatgataaattgtttaagtgagtttttatatattaatgctgaaaataagtaggcatgataatgttttttacctatgtcaatttgacttgtcaagttgcttccattattaaaagaaaaaaagtcaatttgacacgtggtctgctgcatcagggaggcatccagaag

SEQ ID NO: 12172 - DNA, 888 bp, Oryza sativa
  Intron number 1 from transcript LOC_Os05g42270.1 (locus LO C_Os05g42270) derived from phytozome v7.0 (chr-ID Chr5; po s 24661801 to 24662688)
ccggccggatcgccgccgcccgccgacactcgccggtaagcgccgctaatccgcttcggtgtagttcccttttcctgttcctctcgcagatccagcgcggatatttttttgttttcgtgcgaggttagagctaatgaggtggattattattagctgcgccttcgtttctttgctctctctccatttgggtgcggtgatgagtggcatttctccgtaggatgagtgaagcgttggtgctagatcgtttgggtcgttcgcacagtggtcgaattggaggatggtttgagcttactagtagctctggggtggcgggccagtcttgattggtgagctttgcgtgcagatgcagcttgctttgctactagtagcttttcttttgccacttctcaccgtactgtccgagctgcacttctggatttttgtcactggcattccgcattccttggtttgtttgtgtgtgttgtgccaataatgaaacgggaaatgatagcttaaaccgtttgtagatgctctgctaggctgctactatcacagaattgcttgactgaactcagtctgtcagttaatagcctttcccgatttgcttactgccataattgaaggccattcatcgttttccatcatagtagtatcatggcacaatgataggccaccttatgttccagaattctagccatatgtgacagtcttttagtatacgtgttttctgttagcttttgcttatctcttgttgtagattttcgtattttggtaacaaaacttctttttatatatagatttgcacgaggcatgtaaagatgcgtacttttgagctgattgtttaatgcttacattgatctgtatctgctatgtgatgctctagtttctcccgaaacaggtggggtttgc

SEQ ID NO: 12173 - DNA, 846 bp, Oryza sativa
  Intron number 2 from transcript LOC_Os03g55150.1 (locus LO C_Os03g55150) derived from phytozome v7.0 (chr-ID Chr3; po s 31381586 to 31382431)
caaggtctggatccccgtttctgtccccctctttttcgcttagatttgttttgagttaggagttgtcctctgtgttcttgtctgctctgtaaactcgaaaggttggcgctgattactgcgggattcggctggtttgttagttccaataataatctattagtagccatttgtaaatttttataccttatatgttcatacgtttagatttatctgtgtagtctgaattgtgcttatgcaattttctggatagtgtcgcaactgtgggtttaattccccttttgcactttctttttttttttgcgtcagcagtgaccagccatttttgttatacagcgctaactagtcaactttttgttgttgaatctattttgttttgtttcgttcatcatggaaatgatgattttgcaattgtggtgtttgtaatgcatggtatttgctgatttggggttgtgctcactatttctcttgccgggtgtattttcatccatatatagtcactgtcattgttgtagtgtggatatgattatgttatctcaaaggcaaaagtactgtttctgcgggtgacttgactattgatgatttcagccaaaaggttgaaatgaaatttgcacgccctttttagctttttgttagtgcaacgctttgcctgttaccaaactaatacctcatttcatcactgcgattcaggccttaatttaaaatactcattttgtcaatgcgacgtgtgctttaatttaaaatgccttaatgtggttatcatattttgtgctatcttcttgcaattattggttggtgaacgactcctgttttcttttctttgatgaatgttatagtggagtgggaacc

SEQ ID NO: 12174 - DNA, 883 bp, Oryza sativa
  Intron number 1 from transcript LOC_Os06g07740.1 (locus LO C_Os06g07740) derived from phytozome v7.0 (chr-ID Chr6; po s 3746784 to 3747666 reverse strand)
agcacaggttgattcttgatctgattttgatttatgacatgattttttttgtttctttgcatgttcagttaaaattccactcttttggagttgaaaaattatttactttttaatttttgtgcatgtttaattaaaattccagtcttttggatatgtaaattatttactggttaagcactctttgttttttatcacgtcgaaacataaagcatgctgtactgttctatttcaaaattttctgtagtgatgtactgtagttctttaatgaaaatatatatgtgtaagtgatgcatgataaattgataataagcttcctcacaaaaaaaatgataataagcttgtagctagtttttattgtttacatataatgatccatatatagtcaaaatatattattctttttacctattttgctaaaatctgtaggttggaactatctagctagataaatgaaaattcattgtatatgttcatagtttgccactgttaataactttatgtgaataatatatatatacaagatgacaaaatatatgtagccgatgcgcgcgatgggatatctcagttgctgacatattcaatattgaccttagaaaattcttttctttcttaaaaaaatcatgtctattttggaagtagtagctagtagctatagtacatttgtatgtatttacgcacaaagtccacatttcgttcttttctaggaaataaaacatatatgcacttcttcagtcataaactcataatgacaggtcattagttccctcaaggttagcaagctagtaattaatttcgaaacaattgcaaggttagcaagctagctaattaaacagctcaagagaacttaattaaattaattccccgcaggctgttcctgactggg

SEQ ID NO: 12175 - DNA, 357 bp, Oryza sativa
  Intron number 5 from transcript LOC_Os05g43374.2 (locus LO C_Os05g43374) derived from phytozome v7.0 (chr-ID Chr5; po s 25159101 to 25159457)
atgtatgttgtttaactttcttcgtcttttcatgtttctttacattgatgggttagtcaatttctgttacctcaaaagctaagtagattttataatatacaaaattgtattggaattattatagacattagtcatgaacagtagtagatctgttatatgtacctgtttttaaaattgttctctgctgctcaatatacataccgtttgatatattcaagcttttctgttaccctttttctctgttctgttttgttgaccaatttattaattctcatattttgcttatgcgtctttcttatttgctgttgcctcttttatgaaggtacgttcatagttaccaaagttacctctggaacc

SEQ ID NO: 12176 - DNA, 1044 bp, Oryza sativa
  Intron number 1 from transcript LOC_Os03g60920.1 (locus LO C_Os03g60920) derived from phytozome v7.0 (chr-ID Chr3; po s 34607619 to 34608662)
acagcgacgagaaggggctccccaggaggggcaaggtgagctctccttttcagtccctcccctcccccgtgtcagttctcctctttgggatcgggcgatgagtgtaagcgacattgaatctccatatgagcaatctcccttggcgaagcttagcttggatttggttttggaatctgaatccttggccaatcttctgtaggcagttaatcataatttgtaacgatcgaatttggattcttgtgaaagatgggatgggaaaaagaacaagatcgctgaaatacggcactgccgcctttagattctgttggcttcaattaggcaataagcttttcagaggatatggggatgaacgcttatcagctaagccggcacagtcgtatgggaagaaagactgtgaaggcaaaagattcttctttttgttcgatgaacctggttatgatgcctagccctgtgcccctgtctgaagtctgaaccattttcttttcattctgatatatctgattgctagctttacgtcaacactaattgcttgattcctggccctattggaaacttgtgctttaccacaacgtttaaatgagctgtccacagttcagtttagctacctacaaatttctttgtatgtattgatgagcatacatgtttcttctgtattttttcccctcctgatcaatccaagcatagcaatggagcttgtctagtacatgcaacattattgtcctgaacagaaaactaatatccaagaaaaacacagtcggaggaatcatgaggtctaggtgacatttgtacaatgagcaattgctcttgttgctttataaaaaaaagtattttgtattgtcctccgtcatagcaagttgtccgatttgtttccttgtcgtttactgttttaagatacaagcaccttcagcccaagttatctcagtaaaattacatgttttcagtaaggaataatttatttgagtaatgtatgttgcttttaatatccgcatggtgacactttctattgcagtctttatcaggaaggacattaaacaccgcacagat

SEQ ID NO: 12177 - DNA, 705 bp, Oryza sativa
  Intron number 1 from transcript LOC_Os03g47070.1 (locus LO C_Os03g47070) derived from phytozome v7.0 (chr-ID Chr3; po s 26618704 to 26619408 reverse strand)
gcatattaaaaaagtaagtaatctaaacgctcaatgcctacctactgcttctttgctaggtgtcataaagaaaaaaaaaagattgattttcgcatcgagcatgtcagagattacttggatgtgtttatgtaccctaactattaccttatttgattggagagatatggctatgtgaaagtacatttttacatcatatatatgtgataattatgtcattttttacctttccatgtgaaatctggaagtccagggttgggaggtagacttgctgtcattaccgatttcttctccattagcagtttattatagtaacatatacatttttctagatctactatttggtgctcagggcgtcccctgtctgtttacagtcacaagtcacaggggacgcatttactactttgggggatgcttctactgtcgctgaatatttactactttgggggatggatttacattctcaggggtgggtcactgttagttcccttgatgctagttagcacttccatgtatctttgtttgtgttgccatgcaacattcaatctgttttttaggctttaaagttgaggtaacattataattattgcacgcacagtattatcttctggcatgttattttattcctttattcatttgtagaggaacataaaaatgtctatttctcttgcaggaagtacataacccagctagtgaccggataccttc

SEQ ID NO: 12178 - DNA, 852 bp, Oryza sativa
  Intron number 1 from transcript LOC_Os05g46710.1 (locus LO C_Os05g46710) derived from phytozome v7.0 (chr-ID Chr5; po s 26975195 to 26976046 reverse strand)
gattcaggaagactgccttcctctcatctccacaggtatccaaagcatacctctgtcccctcttctcttgccatcagatgaactaggataagaagagtagattaataagagggatagtgatttgattggtctaatagggaaaacaaagagtatgatttcttctcctccttgcaatttacactccctgcgtgatatggtgcttagaccaaaaatgcatgcatctcgcactcagtcatcctaattcaattaatcaagaggttttcaaaaataaataaagttaatgatttctttatatttgtggcaatgtatgttcctcccgatcacagttggtctttttggctcagagatttgtgccctggtaatgcactcgtgcagaattggttggcattgaaccattagtgctcctctgtgtttcttttcttgaaccctgtgttccagtcacagtactgcatttcttccttgagccatgtgtcccagccacaatactcatcttttctcaacacgggacgggagagagagagacctgtatggatggacatgactcaccagatacaatggtagaactgtgataaggagaagtgtttgatttagagagttaaatcagtaatagtaaattgttttttgcattggaaaaattagactgtcttttgccttattttgtgtcaaatgttacctagaatgttttgcgagtaatgatgttgctgggggctaattctccttatctttcttttttgcacctctagagtgaatatagttttactaagtatggattattacaacttttgcatttgtttttatatctaacgctttaaacttttgtttaaatcaggcaatctgagagctgggcaacac

SEQ ID NO: 12179 - DNA, 997 bp, Oryza sativa
  Intron number 1 from transcript LOC_Os05g41670.1 (locus LO C_Os05g41670) derived from phytozome v7.0 (chr-ID Chr5; po s 24323420 to 24324416 reverse strand)
aacctcatcacaggtgattgctccgcgcgctgctgtctacattttttttgtcgtcctgcttcggaattggggatcgaataggcgagatttgagagggacgttgtccgattgttacgtgacatgacttatgttcgaatcgtgctcagtgtgctatatgaaaaaaagttgaatttgatgggttatgaggcgacttaagttttgggatctaatgggccaaccactagtaattttgctactgaaatggacaaaaagctgaattcaacaacaccaaagattccgtatgatagtatttggtttcttttctgaaaatgttgattatgtttcttttaaatgtggaaaatgttaatatttcgagtgcatagaacctccatgctgtctataaaccaaagttagtgtacatcacacatttctgatacaataattatatctatacctgctatcccaactcccaagttggttgtaggtgagtggagggaaaagcctgaagccgaactaacacttgatcagaaggctctgattcagatcaattgaaccaaaatgcccttttagccacaaacaattagccaggccagattagaatttgccacttggtgtcctgcctggtaaatttaggtaacttagaataggatatgctcttcctgtgattccttcttaccgttaagttatgatttgattgttctacctctggtttcaaaattttaggtagcaagaaaaaaattatcaatcttattcactgagatagaatagtggcttacctatcttttttgaacggaagtagcttacctatctgattctgttgtcaagagcatacatcaatctttggtagagtagtagctcatctatctgattatgtagttaagagcattcatcaatcttgttcactgattcactgaagtagattagtagcttacatgtcttattctgttgtcaagagcgtcctgattttcttctgtaccctgcagaccaagatttcacagaactcgttcaaaaggtccca

SEQ ID NO: 12180 - DNA, 773 bp, Oryza sativa
  Intron number 2 from transcript LOC_Os03g50720.1 (locus LO C_Os03g50720) derived from phytozome v7.0 (chr-ID Chr3; po s 28950776 to 28951548)
cgattcattcattcatcaattcgttcattcagacggtatgtcaatccctttttttttgggggttcatcggttcatttgttcattcattttttttgtgttctgttttagtgtgtgtagcatttgaattcaaaggaatttgtgtatgtatcatgtgttactatctcgaaaggagccgttttttcccctcatatacctgtgttatgtgtaccgccatgcctaaattgtgacatatgttttcaagttcaatttggttgagattagtctttctacaaaatattcacattcagaacacggttccctatagaattatttgaaactgataaattttaatctaaattatgatattgaagagaagacacattattctttcttcaaggtgatctctaatctcaggccatgtttcttttagcttggaataacttattgaagtagcttattataatctggagcccagcttattataatctggtaagctcatttaggccatgtttatttcagcttaagattattgtaatctagattattaaatcagattactctaaactggattataataagctaacataaaataagctacgagttgtttgtttctctggattattagaggcatctaagggtagtgggtctttagccactcaataatctgaaaaaagcttctcttgaggagattattggattatagtaatctggcttatagattataataatctagcataataatctacttgtttgtttcagcttactcctaataatccagattataataatcctaa

SEQ ID NO: 12181 - DNA, 538 bp, Oryza sativa
  Intron number 1 from transcript LOC_Os03g59300.1 (locus LO C_Os03g59300) derived from phytozome v7.0 (chr-ID Chr3; po s 33758817 to 33759354)
ctgaaggtatggttcttctctcaggtctcagctcactgtgttctcttctctgtcacatcttcttggttttttcttggatcccattttcttgcagatgtaaatgttctaagaagaaagattcagttttcttttaagcaaagaaagattcagttattacagtttcatttctgcatttttgtttcaagttcagtatcacattcatgcaagcacattactacctcgacctgtggaaatgttcttggcaagagcccaagaatgtgtctggcacactgcattttcgtgtcttgtgcatcacttatattcatctcacttttatccatcggttttgtgactttttgttgttgctcaatccatttccccagaatggtgtggtactgtaaatctgtaatgcatttgcattttgcaagattttggttaagagtcttcagcgctatatttagctgttgaatcctaaagaaagcaacaatcatgtagacatttgaagcaaacaagtgaattttgatatatttttttaatggtgacccaggcctcctcatca

SEQ ID NO: 12182 - DNA, 716 bp, Oryza sativa
  Intron number 1 from transcript LOC_Os04g51580.2 (locus LO C_Os04g51580) derived from phytozome v7.0 (chr-ID Chr4; po s 30370868 to 30371583 reverse strand)
tcaccatcttggatctctctaacaacaatcttgaggtagatttcatatatacgtggtttaattttattactactacttttgatctggaagctagctagatcacatgcttctttgtctatctattcagagtattatagtaatggataaccagcaagaacttatcttcaaacggtgtacggtagttttatatcttggtgataagttaagtcgagctgtatgagataagcatggcctatattattaatactacatgagcctaactagccatgcatccctcttcacaatctcttgtttttttgccgtttggcttgtcctccttaattttgtcattttctaggacgaaaaatatcaaataagtgatggctttgtaagagccaagaatattctgaaaccatgcatacgtataccagtaggatgaactttaagttttattatgggatgaacggtattaaagacgaaaatacctgcaagttgcaaacttatctctctatctgtttgacttggtgggagaaatggtactgcctgcagtactgtaccggcaaaaaagaacatgcagattaattgtgcgtatgctctggttgtactaacctttttttacagttgacaaaacttcggagaaagtaaaaaaaaatccgatctttatacgagacttaaatttccttccgttttggaaaaccgcagagcatcccggagtcaataatcgctcggctgctgaa

SEQ ID NO: 12183 - DNA, 405 bp, Oryza sativa
  Intron number 2 from transcript LOC_Os06g06230.1 (locus LO C_Os06g06230) derived from phytozome v7.0 (chr-ID Chr6; po s 2883032 to 2883436 reverse strand)
cagcgattccccggctgggagagctcattcttgaggtaatcaaatcaaagcaaatcaagcaaacacctcatcaccttgttcttgtgatgagctgctgagagcaagtttagtactgtagctaactactagcctcaaatcacgttaacaactaatttatataataattatctataaacatatactacattattaatatatgatcccacctatcatatatacattatgttttggagtccgtgtttcaaatagctacaaatctgtagtttgccttttattttctcttctattttctcttctcaatatgtgtttataattggtttatagtttactgttatacccgctctgatgaaatttggcgcgaaatttgaagggacgggctgcacctgacgccgcgcgggaacaggg

SEQ ID NO: 12184 - DNA, 661 bp, Oryza sativa
  Intron number 1 from transcript LOC_Os04g37430.1 (locus LO C_Os04g37430) derived from phytozome v7.0 (chr-ID Chr4; po s 22120248 to 22120908)
cctcctcgagctcgtcagcacggagaccgacccaagtaagctctctctctctctctctctctctctctctctctctctctctctctcttccacccccacacatcctcctccgccgccgcaggcggcggcggcggcgcaggtggcacgaagcttcttcttccaacatagcaccatacctttttttctccatcggtttttagaattccatgcccctcgcgttgcatctttgaattgttctctcgaaattcgcttccccctcttgccccctcgcttttttcttgtcttctctttcttctccccctcgctttcccattcgctcgcgctgcttcatcggcttcatggaagaagctgcagcggcgaatattccagctgttccatcttgacctgtggcgtttgtcctcgagtcgtcctctgtccaaatgggccatcaagcacctgtctgttgatttaattttgatccatttcttttctctgcaagttgccattattttttctctctcacatgcatgtggtggcagtagtacgaggcatcgatcgaaattaatcaggctattatcgatcggaattgatcatgtgatgcacgcattgatcgagctgagtgtatcttttggtttggggttttgcagggaaggggacgccgaagaagagcaagccgtcggcg

SEQ ID NO: 12185 - DNA, 611 bp, Oryza sativa
  Intron number 1 from transcript LOC_Os06g35030.3 (locus LO C_Os06g35030) derived from phytozome v7.0 (chr-ID Chr6; po s 20373417 to 20374027)
gcgacggatccaccaacggccagccgaatcgtcgggtaatcgatcgcctaatcgcgctgctgggttcggtgcgattagtttcgctgtggggggtttggcgtagattcattgtggcatgatcgatctctatcgatcgatcgatcgatcgattgggatttggggtttagggtgatgttgttgtcttcattgccggagttttggtctctgacgcgatcattccagaatgttgattcatgggcgaggggggtttagttctagttaggttatgatatttatgtgatcaatttaagacgaattttcctcgaggaccaattgatttgatcttgtaccgatcgttcttataggagagttatcgagtcggtgcttttttgcatgtttgttcactgataattcaactgtgatacattgatgaatttttgctggttgtattttgatcgagttattttttcttctggttttttatgttgacgtttttgttagagaaattgcttgccacgatctgtacagttctatagtcactctagtgggctttacgttttttctttgttgataattataagatgtattttgttacagagaaggagtagcttcaaccaagggaggaggaggat

SEQ ID NO: 12186 - DNA, 739 bp, Oryza sativa
  Intron number 1 from transcript LOC_Os06g06630.1 (locus LO C_Os06g06630) derived from phytozome v7.0 (chr-ID Chr6; po s 3117429 to 3118167 reverse strand)
ccggcggtggcggcgcgctgggggtggtgtcggtgtgggggatggtcccgtcgcctcgcctcgcctccttccccctgcgcacatgaagaagagaggacgatgaatatgagagagaagggagggggaagaagggaggagtagctgacatgtggggccaccattttaaaattattatttttagctgacatgtgggtcccatgttttttattattttttcgagatataattgccacgtaagcgccatgtcaatgccacgtgggacgaatatctagtcaaacaagccacgtaggggccacatcagccaaaaccaccttcaaaaccgctgagggacctcgtctgcacggtttttgtaagttgggggacgggtcatacccggttttgcggtcaagggacgaaaatcggactgggtgacaaatagagggactcaaagtgaacttattccaaagaattcaccagctccagctcgttcgtttcggactcaagtcgtgtcgcctcgccgcgtgcctacataaagcaaaccagaccgcaactgcgtacgtctcgtcgaacactcgaaccatagtagcagtacgtcgtcgttcgccaacaaatacatggatgcgagggagtcgttcgccaagtagctgcaggcgaagctgtccgattcgccgagcggctcgctgctgctgcgctgcaacctgctccacctcgcgacgaccaggcagctgatcgcctcgttgagagccatctacgatacgct

SEQ ID NO: 12187 - DNA, 912 bp, Oryza sativa
  Intron number 2 from transcript LOC_Os04g45690.1 (locus LO C_Os04g45690) derived from phytozome v7.0 (chr-ID Chr4; po s 26842953 to 26843864)
ccgccgcctcctcctcctcagacgggctatttcaggtcagttcatccactgttaacgatccaaactttccatggcaacgaaaacctgaatacgtattcagtccggttcatgcatgaaaccctgaaaaaccaatccacacacgttcttgtgagcaccatgaacgaagcacaggcaaagcacggcgcgccaaactctgttcaggccctgccggccgtcgtgggcacataagccaatctgttcacaatatcgtgagcggacaaattttaccatgcaggtagtttgtagtcatgctcacacagctagcaataacaaaaaatatatgtaattgctggaccagggtgtcaggataatatcctgtggagaccacaaaaataaaatactaagcgataaatccatgagggtggattttaaactttgaaggggacgttcactcattgtttgtatgtcgctcaaatagttataaaaaaatttgagaagatgtactaatatgtgatatatcacttcataaacatacaagttaaaattcaatttatatatattgtaacgaaaaaaataaatttaattgtatttatacgttaactagctagctgtagtttaatatattttttcgttatgagatatataaattgaatttgaattcacatgtttatgaagtgatatgccacaagcaacaaaaagatattttcttaagagtttagaataatttcccgtaaacctgcatatcatattcatcctcccctcacgagcagattgttccctgctttccctatttgaaaatttcccgtactctgtctgcatgttcaaaacagtaaggtcgctagaagcttgtgcttggactcatgtggcaattggcatttcgctgctttccttcgtgcagggtgggctgctggctcagatcggtggggtgccgga

SEQ ID NO: 12188 - DNA, 643 bp, Oryza sativa
  Intron number 1 from transcript LOC_Os05g03460.1 (locus LO C_Os05g03460) derived from phytozome v7.0 (chr-ID Chr5; po s 1461446 to 1462088)
gatcatccctcaagaactctggtaaggcaaatcttaccaacaaaaagataattcatatgctattcattcaaactgagcataaattaggttgagtggtagcagcatcagctcaaaatcagacaaacaaaaactagaagatgcactgttctagaaaacctctaagatttgaagtcctttaatatcttcccttcttccatgcaatcactatgtagattagattccattaaacctctactgacagacatacattgtacctttgtctaaggacaaaaagcactcctgcgccacattagtcccttctggatacctgtgtatatatattactgtatttgtctaaattaaatctgcctaaccattatattctgtattatctgttctgtacttttgtgccagtgatacatgcatttgatgtcatgtcacactcattcttgtcacgtatcattaagtccaaaatataaaccatgacagatcaaaatgatttctgcaaatatgacatggatagactataaacaattgatatttttgtaatcttgtactagtctagataaataagcacaaattggaattctgtatttctgtctaatatatcctacaacttatgactgcagaatctgacaagtcgccacgtggccattcaaacaac

SEQ ID NO: 12189 - DNA, 892 bp, Oryza sativa
  Intron number 4 from transcript LOC_Os06g04040.3 (locus LO C_Os06g04040) derived from phytozome v7.0 (chr-ID Chr6; po s 1648529 to 1649420)
ctgggaaatcgaggaagctgggctttcacggtatgactcattgcacatgaagtgtaataggagttagaattggatctttctttggatggaacatgctaaggattgacatacaatttttaaaaagaaaaaatagaacatgctacctttaacataaattaggacttggttaatagtaggctttaccaatgtaaatgcaaggagaagaagacatgggcatacatatagacaaaagatattttgaatactagaagagatatacaacccatcaagagaagtctttgcaagacaacttttactcctacacatgtaggcctcattaggtttgatgccaccaaaccaagtgtatctatcctgaaactacctgctatatactccaccatttattgcatctgctccacaaagtccatctgctcaggtaattggatactccatcctgttgtcctcattctgctgcaagtgcatccaccagagcataagtgtaatgctattaatgttttgtcagtatatttaacctgattatagtctgtagggcaggtccccatatgcctcttgaagatcttatagctcttaaataataaaagaatatatataccaacttagtgctatcatattcttgtgtcaatggactttacatgatctgtagtggtaaattgatgaagaaacttaaacaaactagtcagagcctcctcggtatttgttgactagcaccttgtcctaattaagatgataagtgtaaggtccagaaggaatatggtaaaacacatacttgtcaaccttctttgtttgagctgtgtttcatttgtgtttcttatttgagtttccgtggcatgcaaatccaatttcttgggttctttcaggagggccctatatacaatcagaacaagtacatacc

SEQ ID NO: 12190 - DNA, 322 bp, Oryza sativa
  Intron number 1 from transcript LOC_Os03g54050.1 (locus LO C_Os03g54050) derived from phytozome v7.0 (chr-ID Chr3; po s 30983101 to 30983422)
attgcaggaaggtgactgtccttccaaggattaatttcagcttttgattttttggagtgtgtttcactcttcgaactagtcctttgctttttcttccttcgtgtgcttagttcctctcttctttttgtatctagtttggtactggtagtcgattatgtagtcataaatcagttgcaatcagatcaatactttggtctcaattcttctccgtctttagtcttctgtagtagaggtttagtttctcaaccctgctctgcttttgaagaaaaagaatattcaggtaggattctgagttctgatcagtgggagctttgcgttgcag

SEQ ID NO: 12191 - DNA, 411 bp, Oryza sativa
  Intron number 2 from transcript LOC_Os03g42880.1 (locus LO C_Os03g42880) derived from phytozome v7.0 (chr-ID Chr3; po s 23906312 to 23906722)
cgggaaaggcggcgtcggcaagtccaccactgcaggttctcttttctttcaccgtttatttcaacatttaattaattatgttgaaatagatacagcgccaggcttgtgcaggcagatgccgattattgaggtgcagaatttcagccttgtacattccaatgtacgtagtatgtagtggctatcaataaggttaacctgtcaggtttctgaattttgctgtccatgctcgctaggcatgtgtatcgaatttgtactcagccatattcattcaattgaacaaacttgggctaacttatggcgctcagaagaagcagattgttttgtggacctgttagatcaaaatttccccttatcctaatcatttgttttcctgcagttaacattgctgtagcacttgccaagaagtttcag

SEQ ID NO: 12192 - DNA, 898 bp, Oryza sativa
  Intron number 1 from transcript LOC_Os04g16748.1 (locus LO C_Os04g16748) derived from phytozome v7.0 (chr-ID Chr4; po s 9117515 to 9118412)
ggttggtgtattgatttattttggaaagggagtgtgtgcgagttgtctatttcaagaatagattggatctatccggctgcactttagaatattttttagtatttttcgaataaataagaaaagggtgcacgatctcgacgaattacttctgaataaatgcagaaatcatatgaaagaaccatagcatttcgcgacctattggtaaatcaaatcaactttgattctctatagaccaataatatgagaccattaacacggttaaagctaaactgcttgaagtctaggcaaaagggggtactctttctacaactatattagtattagtaccaaatgctttaaacaggaaatagctaatgtagaatttatctgatatagaacactcatatcgataaaatggtttgaactatttactagaaggggcaccctgcccttttttatccaatgccgaatcgacgacctatgtataaaaaaggagaaagtttttggatttgaagaaaaaagtaggaattctatccattttcattttccatttttctatttagtttttcttaatgaaattgaaaattttaactaaagggcaaatacaaataaaaaaacaactttgctgcccacgatagatttttatctaggcggaagagtcctcttaatatttatctagtcttatatgggtttcggtatattgaaatataaacagaaaagagagggtagaggataggctcattacattaaaaaaaatatggaagtagccatagcaaaaaaagaaaaaagggagcgtgagagccaaatgaatcgaaagattcatgtttggttcgggaagagatcataaaagttgtaaacttaatagcaaggtaatctactttcattaaaagatttattagataatcgaaaacagaggatc

SEQ ID NO: 12193 - DNA, 842 bp, Oryza sativa
  Intron number 1 from transcript LOC_Os04g40300.1 (locus LO C_Os04g40300) derived from phytozome v7.0 (chr-ID Chr4; po s 23777006 to 23777847 reverse strand)
ccatcggcctctgtctcggttgagtcgaattgaaggtatccatcacctctcctctcgtagccccctctcccagtctcccctcctcttccgcgtcactccgtgacctggggaaatctatccggacctggattgtttttttttcttttcactacgattaagccatctagtttcttcgcgattaatctgtccattgatacgtgcgtggtgcagtattgtttaaggaaaaaaaattggggttgagctgaattcaccccatgccctaagttaggacgttctcagcttagtggtgtggtagctttttctattttcctaagcacccattgaagtattttgcattggaggtggccttaggtttgcctctgttaatctgtcagtgtagggccatggattgttgatgtaggttttagcttagagatttgatgtcagcttcgcgggagttcagccttgtgtggatttggggattatttttgtgcttgcatttcgaacctgcattacgtgtgagccgtttgcgtttctgtattttaactccaatgtaatctcctctatttgttttgttgattaatagggagtctttgtatcttttattgtaagttaacctcttggcaccacatgttttttgaacaacttcatggatgtaactatagtatctagtacaatatttcaaattaccatcacctatgatgagaccgcaacgtgcctggtatttaatgttgagtgccatgttaattgtcgttatgcatgcatggcttagcatgactacttaataacatttttcacttttggttgaagctcccgatttcccgatttaaactccttttggtgttacttgctatttcagtata

SEQ ID NO: 12194 - DNA, 562 bp, Oryza sativa
  Intron number 1 from transcript LOC_Os05g02810.1 (locus LO C_Os05g02810) derived from phytozome v7.0 (chr-ID Chr5; po s 1010854 to 1011415)
gccgacgacctcctccccgatctcctacaaggccggtaagctctcctcctctcccttccctctgagctattttgccaccccccaaatcgagcaagaacttggagtgcgctttatcaagagcgtttcttcttgcctagtatataatcgcagccttctttgttcataacttcatatgtaagatacttttcgatcgatctcagtttctcccaatctcaagcaacatgaccgtgtttacaagacgattcgcagttcttgtgatttttgtattcactatgtttgattatttcgattcagacagacaattggcctaaaagtagtttctgtttgcacagtttaagcttacataaaccgttcgaggaatcactaatttaattcaagagtaatcataataacattttagccacattgaactttctgaaacaaactggatgattgtatgtactctgatgttctactgttggataataatgtacctgtacctgaactgttgtattttgtgaatcttaacgattctcttgcttctgcagggtgactgtgaggggacgccctgaagaagaagctg

SEQ ID NO: 12195 - DNA, 1041 bp, Oryza sativa
  Intron number 2 from transcript LOC_Os06g34020.1 (locus LO C_Os06g34020) derived from phytozome v7.0 (chr-ID Chr6; po s 19813876 to 19814916)
tacccttattttgcttacaagggtgaccctactaggtacgcatgcacttgtgctctgcttcttgccaactttccttcttttttttttttacctttttgttttaacattttttttggattgtttggctatttgcatatgtggtttttttgttcaagattagactgttatagacaaattctaggggtcaaaattcatgcattgtgggcaacattcttcccttcaactggtaaccatgtcattaatcttgagaaaaccatatttactgtttgacttcatgcattggctttatgagccacagccagaacttcaatttaaaacttaatttcaatttcagaaatttgcgtaatttctgacccctcggcaaatcattatctcaactgaaattttgcattttttttaaatttgtattgaattggtcaaggtttatttaaattcagtaaaaaaataaaattcaaataattttggtccaaaaagtactgaagtttatttaaattttgatgataccgattttttttactgaaattgaaggtgcaagtatagtcaagcagttaattaagagtcataaaaaacaatgtcaaatctaatgatcaaataccatgcttcgcgccgagcttagtgtttttttacgggccactcacacgtggtaaacttttttgttggtctaacttcacaccaaacttaaatggtttattcctaagaaaggcaaaataatggtaaattatcaaattttctaaaacaaaaatactctgagcggatccactcaactagcatgagaagtacaaaagcacatacgtgcacaataattgtaagatgctccgttaaaatgcaataacatggcaaaatgaacttattttcaacacataaacatctgccatgctggcaaaacatttcttggttagtctgccacatcagaatccctcatagaaaaaaaatactacattcattcttttacatatgacactcagtataaataacttatgacatgtatcaccatacattaatgcagggtgtccttagactacgcattatcaaacccatacc

SEQ ID NO: 12196 - DNA, 772 bp, Oryza sativa
  Intron number 2 from transcript LOC_Os06g45480.1 (locus LO C_Os06g45480) derived from phytozome v7.0 (chr-ID Chr6; po s 27497445 to 27498216 reverse strand)
agacggtgctcaggctcaaagaacttggcaaggtcaggttcttcatgtcgttggaatattcagttctttgatccactttttaaggggaatctcgtccggattgtatagattgtttgggctcctgcatgctgctacctctgtttgttgctaattcagatagcttcataattggaaatataaattaattctaggtgttatatgtggacagctattgacacccaaatgaccatatataggtttaaaaaaatatctgtggggttcatgtgtgtacacttctttgttcatcagatgaacagtgtaaatttcatttttaggatacaatttcactctttcctcggagagaatacaatttcattttgtataacttaccagtacagaccatatcaagacagctagctgcaggctactcgaaaattatgcaaaaggattgcaaatatattctaggcttctcatctcttcttttttggggtgaatttcattttactaggcgttaaagcatcaaacttttgtaaggcttttgttccttttctctattagttatgtttattggtcattccaaagaatcatatccatctcctgtattcgggtgagatgaccttacgctatgaaggttgctcaatttttacgttctccagttgaaatattaaatatatataaactgaacaaaatcctggtttcaaagatccgtgctgcaccttatttttactctattgcctaacagtttagccatgcagtcctaacacggcgtcgttttgtgtgaatcagatatctg

SEQ ID NO: 12197 - DNA, 497 bp, Oryza sativa
  Intron number 1 from transcript LOC_Os04g42770.3 (locus LO C_Os04g42770) derived from phytozome v7.0 (chr-ID Chr4; po s 25132775 to 25133271 reverse strand)
tgctaactgatagaactcacagaggtacaaaaatttcttccactttttctttgaagtgctgcttaagcaagtgatctgcaactcctgattttgctttttttcgccgggtcggcaactcctgattttgctttcataatgcatatgaatttatactttagagttacttgtgatagacgggctagatggcattggcattgtttgaataatgattcatttgcataatgttagatggtggtctccctttagacaatgtcatgtttgattgtttgtagatgatgacacatttgtcttttctttctggatgttttcctcttcttggattcgaaaataattcaaaagagctcttgctatttttgttgcaagacactgaccttaaaaatcaaactgactgtgttctttatttgttagtttgtattgatagacataagtgttttctgcctaatgttaattgttcagcttgcatctttcaggctctcgagttcataaaagccggcaag

SEQ ID NO: 12198 - DNA, 959 bp, Oryza sativa
  Intron number 1 from transcript LOC_Os06g02240.1 (locus LO C_Os06g02240) derived from phytozome v7.0 (chr-ID Chr6; po s 698240 to 699198)
gacgtcaagccggtaagcgtccgtcgatccccctcccgcacttaccctttccttaaggcttaaggtttagcttctgcggtctgcggagaaggcgacgtgttgcggcgaatccggtgctgcggcgattcagatcggaatcgcggtttttttgtttttctttttgccggcgaatccggtgcccaatcggtcaaccgtctagtcatacatagcttaatcggtggtgggcaaatgattttagatttaacaagaagaggggagtgtttacgcagatctagtcatggaagatcgtctggagttaggggagagattatgggtgtagcgtagagatcatcaacacttcctactcctccctcctttcctttccttttaataagcgacctaattgatcccgtctgcatagtgactctgaattagggcaaaattaggcaggcggtttgtttgtggctctgtgcttgggattattagtctataaataagctttattacttccataaacaggctctagccgttctgcgcaagtttttcagtgctgtaagccccattttgtcattttggtcgatggtgctagtttgtaactgcacataatattatattgaccttttctggtacgctcagaaaatacatctttacatagtttaggcttcttcatgcgagtgaagtattattatttacttcattcatcattttaggctgtgaattatttatacagatgaaaatctcaagcttagacttggttagaagttggtcaagggtagccccacttgcatgctctctctataaactttcaaaagaaaaaaaacctttcttatatgtgtacagatgctgatctcagtaattgtgtgctgttgcctttgattttttttttcatataccctgttttctatatccctacatacttgattcgaaaattatagtgataatgttttattcgttacaggtgaggactgtgaaggtcacca

SEQ ID NO: 12199 - DNA, 969 bp, Oryza sativa
  Intron number 1 from transcript LOC_Os07g07080.1 (locus LO C_Os07g07080) derived from phytozome v7.0 (chr-ID Chr7; po s 3497152 to 3498120 reverse strand)
gacgagagttcttcttggctgggtccaatcccaaggtgagtggtggatggattgtttgttgattcttgtttgagagtgaggatgattggaattgtttctaggggggtgattgtaggattggggttagggtggtggcagatccgttttgtttggttggatttttgctgcgtttggtcggtggaatggcggtttggactgtttggttgatccgatttgtgcggtattttgaggattaatttatttatggttggaaatgtgtgtttttcccgtccttgtttgtgcctgcttcatgattgattggttgcccctgttgcagattgatactaggtgttattcttaatcatgaattactattgtttatcagagcttctaaaatttctatggggtgagtggtttgatgaaaaggatttgggggagacgtctgataattcacaatttttatgaacaatagttggattcatttgtagtcgcacatatgaacaagggtgggtgcaagagaaaaatgtcagtgtcaatggaacttctatttctctatcaaagtttggtacatatttcatagttttgtttgggtaggtcaatttttggattaaagctttgtacggttagatagtctcactgtttgattcttgacttcaaggcaaaggctcgttctttcaagctgccctttttatcgttatatcttgggttttttgctttgatagttagcaatcttggcaatgttgttttgtcatgttagtagatagtgaatctaacacttgatgcaggtttttaaatgaagttgtatcacttgacattgagaagattcatgattgcattcagtttcttaccaagccagattcatcgctctgatgatgaatcgtggaaatgacaacatacattttcactttcttttttagtttttcacagtaatccgtttagtactaacttgcatccgtttgttcattgtgcagattgatctatattatatag

SEQ ID NO: 12200 - DNA, 1025 bp, Oryza sativa
  Intron number 1 from transcript LOC_Os04g57010.1 (locus LO C_Os04g57010) derived from phytozome v7.0 (chr-ID Chr4; po s 33798038 to 33799062)
caacggaggcgccgccggagggaagcgctcgagaggtacccttctctctctatcgcctcattatccccttctgcatttgcttgtgcgtactagatttttcgatgtcttctgtgcgctatgctgctggatctgcaagcctcgacgctctcctggtaattttagggtttgttccgcgagcatcgagcgagtgcgccgggctgatgagccccagtaataagattagaatagtcaatcttgtgctcggacttactatgatgaaccgtgatcatgagtatgcacgtgttttcgtcaacaaggacttcgtaacctagcagtttgtgctgattcggatggtttgatgggctatttgagtttaatttgtgagtgaaattcattcaaaatacaacagaacgtttctgaggggagttagggaaagtacccatgttaagtgtgtaggattactcagatgattacatagtccaggacagccagttagattggtgtttcccttcaagaagcaaaagaaaactgcttaataatttggaaaggtagtttatagatagaacaggtgagcccttactgcttaaaataaagtacaagaaatggtgtatggtttgagctgtgggcctgtctgtagtaactaatgaccatagtgctagcgaggccctattcatatatagacaagaaatatgtagcactattgatcgaaactatctgcaaaagcatagtaccttgtggctcttataatcagaatggggcctgaggatgctccaaatgaggttacaagaagaaacacctggacaaatgatatttaccatctgcgaagcggttgaatgtaaatgtgaatgatttctgcaggataaatcactgtgaaatatcatcaatatcatatcaaaattattgtttattcatcacattcattggacgcaaattttatatgtttacttcattagaagattaacaatgcaacttctaacaagtgagaagatgtaacaaaattttatgcaacagaaacggagtcatttcaaactggtctatcaagcaaa

SEQ ID NO: 12201 - DNA, 868 bp, Oryza sativa
  Intron number 1 from transcript LOC_Os06g38764.1 (locus LO C_Os06g38764) derived from phytozome v7.0 (chr-ID Chr6; po s 23012817 to 23013684 reverse strand)
acagtgatcgtgctccacggggtaggatagctggaacctacatgaacttttcattaattatttcttaagtgagatttatgacttttgatatacgtattaattactagaattttgcaactgtagcgtatatcgttttggacaacgacacggtctccaaaacataactttgacttcttgtttctataaaaatatttattaaaaagtgatatatgtatacttttatgaaagtatttttcaagacaaatatattcatatactccctccatctacttttgatagtcatatttctaaatctgaaaaatttattttcgataggcatatttcaattaaacaacctattatcttaatggctttctcggatttaatgcgtgactctccattcttccacacaagattggctctatgcgcatcgagaaatgtaaatattaatgaatcacttgtttatgagtaatgactagtagcatgtttaaatagatgataagtagaattacttatccttagtctgtgtatcaagatgaaatatgactatcaaaaatagatggaggaagtattttttacattttcaaactcaacaagtactatttataatttataatcctaaagtttgacttaaacattatcctaaacaactttctttacgagtacggaaggattacatgtcattattactcctgcagcttgtacgtaaatgtaactgaatttttctattcctccttcgaatgctagtacatcattgtcttcccacgtatatatggctccatatatttcttcttcatttgtttgatttcccatttaatagtgaatttatttatccttccttggtgctgcatcaggtattccacacacgcctactattgacccgattcac

SEQ ID NO: 12202 - DNA, 937 bp, Oryza sativa
  Intron number 1 from transcript LOC_Os05g41550.2 (locus LO C_Os05g41550) derived from phytozome v7.0 (chr-ID Chr5; po s 24264707 to 24265643 reverse strand)
gccaatctgagtgaatcctttaaatcatcacccctttctcttcaatttaccatcagaagttaattgcttgcaaagttgaatttcttctcgaataagtggtctcttgctcactgcaggtcctagttcataattttgcatggccagccttcactgagtgaaatctttaaatccccttattcaattcatcattagaagtactcaccaagggtagaatttaagtgcttggatttatctgcagaaatggaattgcgtaggaattttggagcttcaagatagatgtgactactggagaattctacaaccaaaacatacttttcctagtttgcctaatacttaacttcctgtttagtttctatttcggtcatcagaattgcttcatacatgtagcttagattttggtgtgcctttgtctttctttgttggtcgcagattccttaattttctcccaagttgacaaggttattgattggaggctgttggcttgttcggtttgtgttttatcaccttcaattgttacctatgtttatccgatagtctctgggttggtctgggggttggagctctgaatgcacacaaggtctgattgatttcgcagattattgttacctggattatttcagcatatggatcgtttggcttggcgtttctgtgtggggtcttccctgatggccagccatcagttgcagtatctcgtaattttagtggattctagacttgagacctgagttagttttttttttgtggtttgtgtgtttgtccttgttttagatgatgcagaagggtggctatcgggagattaaatccaagagtagaggatggatcttttgatattacggtggactggagcaactatcatataactggaaaaagatcattaagccaaattcacccactcattattttagtacttaccatccggtttagcatcttctcagcg

SEQ ID NO: 12203 - DNA, 294 bp, Oryza sativa
  Intron number 1 from transcript LOC_Os04g06340.1 (locus LO C_Os04g06340) derived from phytozome v7.0 (chr-ID Chr4; po s 3306082 to 3306375 reverse strand)
tctaggctgttttagcattcctggccacgtgtgtaatctactatctaatattgaatctcaatggtgaatccaaggtttattttgatttcacaattattcaattcttctgtggtaatcacgatgtattaaagaaacatatctttcagagtaaaatttgtgattccaattttcttctggacatccatcttcacatatccatgtattgcatatggtttttctgtatctttcatgctttcctagtaaaatattttttatttttcaggtaaaaatctggattacaccaggagtgcatcc

SEQ ID NO: 12204 - DNA, 900 bp, Oryza sativa
  Intron number 1 from transcript LOC_Os07g05500.1 (locus LO C_Os07g05500) derived from phytozome v7.0 (chr-ID Chr7; po s 2565115 to 2566014)
gagctggagacctgggtgtgtacgcagacaacgatatcatcaaggcaatgaaagtcctcttcattcagcaggagtaagaactaaaccaggcctataaattcttgcgtttctttctgttttattcacataaatagttaggctatgtttagttccacgctaaaattgaaagttcaaaaaaattggaatgatgtgccggaaaagttataagtttgtgtgtgtagaaacgtttgatgtgacgaaaaagctagaactaaacaagggcttattttgtttatcccagaacgtgtgctcgacattctgtaccttttgctttaatttatgcttggttctaggtcttgctaggagataagaattcttttcaagtgcgagccagggagatatgagcaaaatttgaacctctgaatttatgtttaccgtgctgaaaatcgtctgcttttaatacaaatcatcatccgaagctgaggatctgtttgcccatttgttgtggtttgtgtatgactgcagttgctcgtgtcctgtccaatcttttaggaatttaatctgttgctatgctttgtgtacgggtgtgtttagttaacgctacaattggaagtttgattgaaattggaacaatgtgatggaaaagttggaagtttgtgtgtgcaggaaagttttgatgtgatggaaaagtttgaagtttgaagaaaaacttgggaactaaaccaagccttagttttcaaatttttcttcaaactttcatcttctccatcacatcaaaactttcctacatacacaaactttcaacttttctgtcacatcgttctaatttcaatcaaatttccaattttgatgtgaactaaacacaccgtaaaccaggcctaactctcctccttttttaatcacagaatccttattgggaaa

SEQ ID NO: 12205 - DNA, 828 bp, Oryza sativa
  Intron number 2 from transcript LOC_Os06g11190.1 (locus LO C_Os06g11190) derived from phytozome v7.0 (chr-ID Chr6; po s 5874036 to 5874863 reverse strand)
cagcgaccagcgcctttacaagcagaccattggaggtacaccgaacaagccgcgccattgcagcataccgtactctttactgtggataatagttggtgaactcgactactcgagctcgcattgcaccaagtcttaggccttcgaatggaagtcaacggaccaggtctggtgcagttgctgttcttctgctgtttcacaaggactgcaccggttctcagttgtagccttgtaggttggtacattgcccacgcagcctatgatggactacctccgtctcaaaatatatcaacctaatactggctttgtccagatttactatgttatatcctatccaacgctaggttgctatattttgagacagaggggtagtagctttgaggaaaatggatcagaaatggtacgattgagtggaaaacctgagcaggtctaatgtctgcaattcgtgaggcaccgctgaaaatttagttgaaatgtagttaagctttcgtctgccattaatttgggatgcatcatggaaattgggacccagatgaccaaatgcatgggcaaattgtttacataattgagatctccatgctttagagaaaagaaaatgagaagaaactagcctatctttatttttttttctttgaatagtaatgccgctttgattttcaaaaggtttattcgatgtatctttttagtctttaagtcactagtcatcattgctaaaaaaaggcgccatatggagtgctccttcaaagagtatctggtaactaatatatttcaaaaatcttttccttgttgatttcagataactcagcacaacctctgaccccagattacact

SEQ ID NO: 12206 - DNA, 966 bp, Oryza sativa; identical to SEQ ID NO: 10311
  Intron number 3 from transcript LOC_Os04g55290.4 (locus LO C_Os04g55290) derived from phytozome v7.0 (chr-ID Chr4; po s 32683405 to 32684370 reverse strand)

SEQ ID NO: 12207 - DNA, 779 bp, Oryza sativa
  Intron number 1 from transcript LOC_Os06g02080.1 (locus LO C_Os06g02080) derived from phytozome v7.0 (chr-ID Chr6; po s 612973 to 613751 reverse strand)
tcgggacgccgggtaggtgccgccgtgccgagacggcggcgggagcaggactgcggcctgcgggcagattcaaaatcaaggtgacgacgaactgctactgttgctgcctgttagtgatagaatagaaagacccgaattgctcaagattggtcgaccgatccggttccggatcgctcccctcccctcctctcttcacgtgcgtgtcagtccctctggccctcaccatatatctcttgttctcacctgccacttatttacacacacaactccattaaaaaaaacctatatattttaaaaaccccctgttaaaaaaatttggtttattttttttatcaaaaatgtttcacctagtgtactcacaatgtttcactatatatagatctaatgttgcagtgaattgaaatattccattgtaaaaaaaactcacatatttcagaaacccctattaagggaattcgttttatttttttttcaaaactgaaacatttttcgatctacttagtgaaacaattctgatatacctggtgtaacatcgtgcaacatttaaaaataattcaataataagctaaatttttttcgttgtaatatatccatgtgtggtcttattttgaagatttaattgcaacgaatttaatggtgcaatcggatcatgatttggataagtaatttaggagaaaaatcagtttaaaatagttttgccgataattttttgctgatgaatgtcggccttggcctatctcctagatctatatcaacttcttccaaatcatcggccgaca

SEQ ID NO: 12208 - DNA, 403 bp, Oryza sativa
  Intron number 3 from transcript LOC_Os05g09380.2 (locus LO C_Os05g09380) derived from phytozome v7.0 (chr-ID Chr5; po s 5268201 to 5268603)
agctgaggatcctcaagaatgtaagaatcttgtttgcacataattattataaattgtatatattaatgtacttttcatacttccatttatatttagaatggttcagttttggatgtatggtcttgaactgttcataatccagctatattttcctcattatattataaattctctaagtctgtccatatcacatgcatttggggtgtggactttgcttttgttttttaatttcaaccttttttcttctctatttttttagtctcatactgcttgtttctattccagcagtttgacaaaatacaacttgtcctcaaatgttaccattgtattccatttttcttctccttatgttgaccctcttttgttttgattgtgaaggaggataccaaggccaaaatcatca

SEQ ID NO: 12209 - DNA, 899 bp, Oryza sativa
  Intron number 3 from transcript LOC_Os05g03050.1 (locus LO C_Os05g03050) derived from phytozome v7.0 (chr-ID Chr5; po s 1189097 to 1189995 reverse strand)
aggtcgttgggccctcggggattggcaagacccaggtgagcagctcagcattatgcaatgatgctttgtgggatttgtgtgtctgtgatggatacgaaccaattattgtgtctgcttgacttctgggatcgcttggtgtcgatagggaaccaaaagcaaatggatcttgtgaatggatgtaacagggtgctgcggcattacgatttatggcattgctgtgtgctggttactgcattcttatttcattgatcaaagataggaactgagcctagcacttgaatcccctttgacattattcgtgtgctatcttatcgattaaagaaacccttgttactactcctaagtattatcctcttttattattccagccagcagcggtcatggtcgaacctatttattcggggctggttggttagtggaaaatttccattttcataataatgcatgcttttgttgattctgtctagtgcaaaggcattcactgagccaattaatggatcttcaaatggcacttgtttaatagtcttctccgtgtagagaatatcaagtgcttctcttatactccctccatccaaaagtcttgagcatatttcattttttggttttcccaaatgagacggtcatatttgtagtctccatatgctaaattaaattgttgatcggaacccaagtaaccattttaatactcattggttgcatgcatgtaaataattccctggttttggtacatggggaatgagttaatttctccttggtcttggtgacaaaagaaatatgccttagacttttggatggagagagtattacattgagtaatttattatacattcagtaaaattttataaagagtcacaaactttgcagttctgtctgaagcttgctttgctagcaacattacc

SEQ ID NO: 12210 - DNA, 1024 bp, Oryza sativa
  Intron number 1 from transcript LOC_Os06g44910.1 (locus LO C_Os06g44910) derived from phytozome v7.0 (chr-ID Chr6; po s 27150705 to 27151728)
cacgacgtcgtcatattctccaagtcatactgcccgtacggccccccctctcccatctatcctctgtgcattccgctttactgctctcgcttagcttttgctgagaatttcgatttgggttttgggatgtagtagtcgccagtatcatctatgcgtttagctgatctagttgggggatttcgattttggatgttgttgccgtgaagttgagcggacctaatcgtgaatttgtagaaagtcttgagagttggtactgaattagttctatatccatcggaaaactgtcttttcgttgcgaattttaggagagatacatgacctactggtcctggcttgtgacgctgtacatgagtctgggaattaatcctccttttgctcgatccaactgttgagtttttggtttgattctttacacaaatttgggactgtttgaaacggacagagcagataatggttgcctagttggtattggactaaaatggggaatggggaggaattgaggtcatatgaccttatgtggtgatccaagtttttatctctcctgcaattctatatgtgctgtacaccatgtgatagaaaatgcagttttactcagtactttaccaacttttataaaaatctctaattatttggtcaactgcaaatttactccttttgatttaggctagtcgattaaattgatgtgcaaagtattgttaacagtaagtttcagagctttcaggattttgttttgtgtaagagagttgtgggggcaattcttgctctatgatacaagaacttgctggatcagaattttggactttcagattaatttgctattggtgcttgtgaagagtgaagagtaggtagctatatggagtgttagctgatgagtaatgaatgtacaaaaatgatgcccatgataccaaaatccaacctacccttgtctgcatacatgctatgatactagctagagaaactcaatcttaaaaaaacgcataatttttcaggtactgtagaagagccaaagctgtgttcaaggaac

SEQ ID NO: 12211 - DNA, 972 bp, Oryza sativa
  Intron number 2 from transcript LOC_Os05g34480.1 (locus LO C_Os05g34480) derived from phytozome v7.0 (chr-ID Chr5; po s 20380899 to 20381870)
ggccacttcctgctagtgacgtatcgaaatttattactcttttcgtcaaccttttgtacagtttcataccgtctatgcaccaatatatagtaaataatggctacattctctactgtttgttgatggaagttctcactgtagtttaatgcttttaaaggacaaacaccagataaatcagtccttctgtctgatactagtcctgaataattacagtatgtttcttcttgcagctggcaagtgaatcatgtactttaatgttacctatcattgctctcgtaatctttcttatcaatccgaggagagataccaacggcctcatcttttcgcttatgcttatgcttatcaatcaaaatttgaattttcaaccttaaatttgaagccgattttgagttttttttcatcgaagtttatttttcagcctttgcttttagatcactaaggacacgtatataaaatttttattcacaaattacttttcgtttgcaaatacgccgtttggcttattccgcagataagccaaatgatggggctgcaagttaattggttctaatttgacattcaggcttaacagcacttcattgctatggaaatgaaaatgtaaaggattcaaaatttattattgatcaactactggttgcatacaaaactaatgattgaataaccaaaatgaattgaaaaataattattggttctggacttctcgttctatgtgttcccatcatctctgtagactttacagatcgtgttgaaaaataggtaccattaagatgaccattattatggaactggatacattatcactatccttagtcgaaaaacgtggttcattaataggttataccatgagtactctgcagtcttcatgctaacatgatttgtagttgaatatatttatgtattttgtgcatctgatttatctacttatgtcgactgacagataaaagtcgaatctgcagtcagggatattatctc

SEQ ID NO: 12212 - DNA, 801 bp, Oryza sativa
  Intron number 1 from transcript LOC_Os03g48000.2 (locus LO C_Os03g48000) derived from phytozome v7.0 (chr-ID Chr3; po s 27281476 to 27282276)
acatctcgctcggcatcagggagcccgtctacgaggtaaccgatcggcgatcgaacgccttgtaatggttaatggtaaattggagacagcaagggactcattcttatgatcatataagtcaaaatttaaattttagaacttaattttgaatttgattttttttcattgtagattattcgccgcatttgtttttttagtcactaaggatacgtatataaaagctttactcacaaatgattttttatttgctaataagcgattcggataaggttgcaaggtcgtgcatcagctaacttctgttcctagtcagaattatggattgcaatagctcatgttctcaaggtcttaagtccactcaacaagccaaatggaaatattgcaatatgatcattgtgagtgtccaaacgtaaataaacaatacattatatgccgttaatccaaacgtgtaactttggatggagggctaccagtaggcttcatgcataataaatctttctctaggttcagattttgctctctctttttttcaagtcatggggagttatgtccctcgttgagatcattttctttgcaaactcaaatggccgtgtgcatcctagatgcagaggctggggatgtaatcatctcccttatctaaaataaatctgcaattgtcatgctaatttgatgcatgtttctgtaagggtaggtttgctttggaatgaaatgcctgttacatattctgggacttctgcaaattgcaagatgcaaattaactttcccggatatcaaattttactcaggtgatagaagtaaaatcta

SEQ ID NO: 12213 - DNA, 463 bp, Oryza sativa
  Intron number 3 from transcript LOC_Os06g14200.1 (locus LO C_Os06g14200) derived from phytozome v7.0 (chr-ID Chr6; po s 7925020 to 7925482 reverse strand)
tgcaaggaggtataattctcatctaaatccttcagttacaggagtcagtttactgctgtatggctttgatttgattgctttttctttttacgaatctgattaacttgtagaatgagaaacactcaagggtcttccggctagctccacaaggtggtgggctagacgacatgggtttgaagcctcaccccttctaattatttgatattaggtcatttcctgatatttgcgtcttattaacatgtagaataaaagggacctgatccctgtaaagtcacaactcacaaattgataaattgtcaagttttggattccgattataagcctcggtctgaactgttatgatttatctctctgtaaagctaggagccaaagatttgttgtcccataattatttgatgaagctcactgaataacaccacattgcctactgttactgcaggatcgcggaagacaaaaatcaggc

SEQ ID NO: 12214 - DNA, 904 bp, Oryza sativa
  Intron number 2 from transcript LOC_Os06g10590.1 (locus LO C_Os06g10590) derived from phytozome v7.0 (chr-ID Chr6; po s 5496750 to 5497653)
ttgcagagatacactagctacaagctagctaggtactatccccgtcccaaaatactcatcgctttgagtttttatttgtaactcttgatcattcgtcttattcaaaaatttatgaaattattatttattttgtttgtgatttgctttgttatcaatagtactttaagtataacttattcttttttatatttttactcatttttcaaataaaacgaataatcaaacgttgtaaagaaaaagtcaaagcgacaactaaaccgggacggaggcagtagctggctggccagtgagtgagagtagagtgtagtgtagtgtgtgtgtgcgtgcgcgtgtgcaagctaagctcgagctggtgtacttagttaagccgcgatctagagtaggtcgagacttatttggtcccgggccggggccggaggcgatcgatcggtctatcgatcgtccagccacagccaacccagccagccagccagccgcccctgcccctcgccctggctcccctcatcaaaacgctggaaacatttcgccagcagccgcagctaccgtgcttcaatgccgcacttatactgaacctgcccaagaaaaaaaaaaccctacataccctctcatctccaccgttcatatcacacatttctccaatgatccaatcacacatatcaccgttcagaaaaaaagagaaaatttaaaatggtttgcagtgataatgtgataattttaagaagaaaaatgtatggttagatgggtaataagaggagggaggaggaggagtagagtaataaacaggggccagaaaaagggaagcagggggcatgaacgcatcatccagctttaccagcactctctgtttgtttttttctctttccatttataaccgaaatgaatgttcattgaaggctttacatta

SEQ ID NO: 12215 - DNA, 854 bp, Oryza sativa
  Intron number 2 from transcript LOC_Os05g38610.1 (locus LO C_Os05g38610) derived from phytozome v7.0 (chr-ID Chr5; po s 22580380 to 22581233 reverse strand)
cgtcaagacccagaaagccactgccggagcagaaggtaatgcgcatctgccccccctttcggcttgtgatagtgagtgacaacttagaagatgacttgtatctgatgattagtactatctcctagtatcccaatgtatgcatagtactgcttgtctcaaaccgtaatttttttgaagcatttgtataatctagttgcatcttttccatatgcatttagacaactctttatgatgtccaagaacgcaagttatctgcataccgtgcctaattgcctatgtttacacttgtctgtttatttttattacataaatgaaacgtgttgatgtgaataaggggctgtgtattctaggtatcttgatatcaagcataatttctgatcagtctttcaaaggtgctaaccatgcacctcttttttttgtttttctataggacttcttagaagagtttgtgaatcttaaaagagaagttgctaaaatatgcggtcagacaaatacattccatcacgtaaaacgcaatttgatttgatttcatgttaggttaatgtgatttgccccaacctaatattagttaatttgcttttagagttcatagactttttctaaaagaggtgtactgaagcacacccaaacataatacgattttttcagctttcgcttagttaaagttgtactatgttacacgatatcaaccaattattatgagcttggagagatgtatttgcattagttttccttataacaagtagtattgacagcgtcttatttgtgacttgtgagtgaaaaattacataccgtatgtctagttcaagtaattcactttatgtatatgtttccccctttcagctgagattgta

SEQ ID NO: 12216 - DNA, 528 bp, Oryza sativa
  Intron number 2 from transcript LOC_Os03g62700.1 (locus LO C_Os03g62700) derived from phytozome v7.0 (chr-ID Chr3; po s 35477839 to 35478366 reverse strand)
ggtgcggttattttgtcgtgtgttttccatgtgaatttcagtaacagttggcccattataagattgctatagaaccatcctttactcctcttttgttatgatgcaattggagtaaggaccatactaacatatgcgccactatatttaccatcctatgcaaattggctggaagatgtttcaagctgtgttcgtggaatgccagttcttgcttttatatagcaagctactgttgcattaggcaaattacacttatattcttttgagcctaattcacaaaaagttctgtgggtggtaaagttgggtgttaatgctcttgtgacagacttggttctttctgttgtttattttcacttgaacattggaagatattctgctatgatctatttgagtaaataatttggaatgtgtatgatgtatgactactagctgatatgaagttttgatgttgaagttgaaccctttctgattatattgttatgtttccattcatcagccaagcaaaagtcttcaaaacctcctgctggtcaa

SEQ ID NO: 12217 - DNA, 725 bp, Oryza sativa
  Intron number 1 from transcript LOC_Os06g38440.1 (locus LO C_Os06g38440) derived from phytozome v7.0 (chr-ID Chr6; po s 22776345 to 22777069 reverse strand)
gagttgagggggagaggcaccaccggtggggacaggtggccggcggtgatgggaggggaggggaagatgtgaaactagggttagggtttttgggcaccgtcggtttcgacttattctgaaccgatccaagtcgtccgttaaaacgaatggctcataccgatccagcgttgagcaggcctccatcgccgggccaaagcactcttgggctgcatgcacttcattcattgcgcacgataatgcccttgcagtttatgagaactttctttctatctttaggaatatattttcttaaagagttcatatcatgaaaacctaaaccctactcatctaatatatttatatttgttataattttagtttacccattggaacgcacaggcattttttctatataccaaaaaagttcagttttgctaacaagttgatatatttctcaatcaaaatcagtaattttcgtaatgagaaacacaactacatgcgaaaagtaactttagcatgcggtcagtaatgcagtccgcatgcaaaaatgataattgcaaaaaaagaaaaagaaaatgtcaaaaccctagctcaaatctgccttagctgcaatggttgtcgttgagaccccgctacacccgaggacggcggttgaggatctgcccctccctggaccggggcagctggatccgctgctaggtggcttgccgctctcgttttcgtcaccagacctacgagggaggcca

SEQ ID NO: 12218 - DNA, 655 bp, Oryza sativa
  Intron number 1 from transcript LOC_Os04g39140.1 (locus LO C_Os04g39140) derived from phytozome v7.0 (chr-ID Chr4; po s 23090920 to 23091574 reverse strand)
actgtcaagacgtcgttgaggaggtaatggattacaccatcagggccatttccactttgtctgcaaatcaaaatggagtatgctatgctgatagattttgaggcgagagctgagttgccaattgagcttccttagcatagcagcatatggttgcgttggatcaagcattttcccattttcgctgattattgcatatgcactaaataatttgaggctccaagtagcaaccaaagttgttctgtggacatggtaaatcgagaaccagtgtagaagggtttttactatacaaattgtcatactttgcttatataaaatgcaatggccatgatttaattttacttgaaagagagtatttgtttggagaagattggaagtattgttcattatgaaccagattcctgaaaaaggaaaaatgcatgagagttacccatgtggcctagttctagggcccatggctcttgcacgtgacatctaatggttgaactcattctcttttcgatcagagatagatgagtaagttgtgaaacctatggttttatgccatcaggattaatttgttaatctatataatgttttgattatgtgctttataaagtttttattgtgccttgtttcttcccattaggagaggaattggaaaacaacttcttaaggc

SEQ ID NO: 12219 - DNA, 755 bp, Oryza sativa
  Intron number 1 from transcript LOC_Os05g35310.1 (locus LO C_Os05g35310) derived from phytozome v7.0 (chr-ID Chr5; po s 20904649 to 20905403)
ctgctgctcttgtgagcgaaggtactatttatgtatttaaattatatattaactattttaacttcttacactatttttttgaaataagcatgtcagatatttcaatagcaccttaggcaatttttaatatctggaaatttctgctgcatcgtcctcactaacctgctgggatgacaacccattgctgttctcctgtcctacatgcttgaggtagtaatttggaaatgagccagtgtaccaactcatctgttccaaatacgctgtgcataacaaagatctctgcagcccatttgtgatttgttcgatcagtactcattcctattcatcttatgtgttccgaatgatttgaagaacacacatgagattgcagtgggtggtaaatctttattgtttttttaatcgaataagttcatgtagtttttgaaagagataggttcatttaacttccattggaactccgcgctgttgtttcttcaaaataaatattatgtgcagtaaatactcagatagatttttctttagtacataaccttgtatggataaatctgataactttgaggtaattgcatgctgagcattagtttcagctatacatgatacaaagtggttgcatatcataaagcagtgcatcaatcgacaatcaaatctgtgttcaatgggtcaactaattgtaaatatcgtgcctagctagctttgcagttttactttcttcatacaatatatggttttcaccttgtttacttacaattgaagat

SEQ ID NO: 12220 - DNA, 483 bp, Oryza sativa
  Intron number 1 from transcript LOC_Os04g27980.1 (locus LO C_Os04g27980) derived from phytozome v7.0 (chr-ID Chr4; po s 16348482 to 16348964 reverse strand)
ctcggccgccccgcccactacgacgacctcgccaggtacctaaggctacggttttaaatattcttctgtagctgtttgagatttgagaaaagtctagctatttgctcttacgtactttttccgttttatattataagttgttttgattttttttcaaacttctttacgtttaacctaatttatatagaataaattgatttaattaaatgtaacattaaatatattttaaagatatgtttgttttgtgttgaaaatactgctatattcttctataactggatcaaacttaaaataatttgattagaaaaaaaatcaaatcgacttataatatgaaatggatcgaggaagtataaaatttaactgctatagcatctcatttaacccgatgttacctgttttgagactgtctaccgctagatgtcttagcccgctatttaaaaaactgtaggtacctcaaagcttacagcgggaggaagccagggg

SEQ ID NO: 12221 - DNA, 940 bp, Oryza sativa
  Intron number 1 from transcript LOC_Os06g49430.1 (locus LO C_Os06g49430) derived from phytozome v7.0 (chr-ID Chr6; po s 29949326 to 29950265)
cctctccccgtcgagagccacaagaaggtgaggaggtgcctagtgtgaagtgtgctttgctttgcttcgttttcttttcagtttgggggtgaaatgaaagtttcaggctttctcgtgatccttgattcgtggccacgaggggttcttagactagatcagatcttcgtggcacctgaattacttgcatactgtacaatatcattatttctttttttctatgatctgtgcaaagtgcaatacagctcaagtgcaggtaaagcttgcgtgttctatccaatctttcttctttcgatggttgcttgtagagcgatagttgcttgtaaactgccatccgattcgtcatcctggctgttgacctgtgttattccagtgatctatgaaacgatcgatctcgtaaaacttaagtttctttctttctttctctgtttgcttagttctgaaattacttgctcctgcatgctccatttcttagaggagtgcaattgcagcactactatgcaaaaagcttgtgccctcttttggagctgttctcaacaattggtcccatcatccttgtcatactgatccttaggagctcatatccaagttgtccacttgtggttttggatgatctcatcagaatcggctactaattagtactccaggtttgacttggtctggcctatgtatatctctggtacggactgtttctattgggaacaagtcgcgtcttgcacatggtatggagcaggtgttcctttcatttgcgaataaacctacatgtctatgtactgaaaatgtcaatttttgttaggttggtcatgatattcccagggacaagatcatggttttgtttatagggctattctactactgaagaagttttataaccagccactctgtatttttagttagcttaatattttcttgcaaaattgtgatcttgtagaacacagtggaa

SEQ ID NO: 12222 - DNA, 991 bp, Oryza sativa
  Intron number 2 from transcript LOC_Os03g62280.2 (locus LO C_Os03g62280) derived from phytozome v7.0 (chr-ID Chr3; po s 35278462 to 35279452)
caccccttgccaacaataataaatcgatttctggagtaaagcatcaacctctctttaattaattacagttttccaatgcatagcacatgtacttaaattcatttcttttattatattgttttttatagtgagatactcaggtttccttaattaaatgcaccgatgtaattatttttgtatcaaaacttttctttgcatctttattcggctaatgtctataagttaaccccttttcctgtaggctccacttttttttttttatgtatgtaaatttagtgtagcggcaatgtaaatttttccattttgttttctgcatggcttcagtaaagcctacaaaggcacttctacaatagttacacaaccaaaattgctccaatagattgatgtccctcttagacaggtctccacagtccgttgggcaagaccagtccaataattcaatgtaaccacaagaccataacctgttatgctttatcgacaattttagcccattggtaggcctaaaaagaattcaaccaaagtcttttttttttaatttttcaaactcaatttgaagttgattttaagatattttcaacatagtttctttttcagcattggcttttaagttgctaagaacacattgtaaatgttttagacaaaaaattacttttttatcactaataaaagccgttgtggcttataataagtctttggtaaccgatgagacccttagaccatgtagttgaaaattcggttttcttttacctcacatttgtgtcaaatctccctcataatatagagcatgtattatcttgaaaaaagttgaaggccatagatttttaccagcaattggtccaattattatgggttcatatttggatgtactttcacgcaatattgttttccaaattctgcctaaagcttgatgtaaaagtgacattgacactgttcaaactttaaagcttcttcttatccaaccaaccagttttaccactgtacttgtttcctc

SEQ ID NO: 12223 - DNA, 854 bp, Oryza sativa
  Intron number 2 from transcript LOC_Os06g35730.1 (locus LO C_Os06g35730) derived from phytozome v7.0 (chr-ID Chr6; po s 20851636 to 20852489 reverse strand)
gggagagcggagatcgcctcacccgtgcctccaaggtttggccaggcttctttttttattttttttattttttcggtgtaccattagcgtttaggttgtagatgtccgagtaggaaatgagcttttgcttagttacaatgtgatgcattgtgttagcttgatatcttgcttcgatgatttgagatagtggtgtttgcttcgatgatttgagatagtggtgtgaactcgctaataattggtgattatgactgtaagttatctttcttagcggaaccgtgcaaggatgaaattgcggctaggggaatactagaatgatgcttttaaattgccattcaactaagtgataatctatttgcctggctgctttaacgtcagtgttcagttgtgcagacttcagataagtatcctgacgtctgctttatggtcgcaggataatttgttgaatttttttcccccagtagaatcgttgatcattgaccatagaactagaattcaaagctggatgattcggattgcagttatataaaattcatgagacaatgacattattatgtttgtgtaaaaaatagctaatggaactaaaaggtgacgactgtttgtctctttcaaggttgtgtggcaaaaggaaaatagttctgaactactgtttgttcttatcctggtcatatcctaatctctaattgtgaacaattgttttaattccgaattgctgaaaggtcaagaatgacacatcgctgttttaggtatctgttgctattgttaatgccaaactgttaaattaagttaacgccagttaatatattttccatgtactttcaggtcttggagcaactgagtgggcagtcaccagtgtt

SEQ ID NO: 12224 - DNA, 483 bp, Oryza sativa
  Intron number 2 from transcript LOC_Os06g33600.1 (locus LO C_Os06g33600) derived from phytozome v7.0 (chr-ID Chr6; po s 19561033 to 19561515)
tctttgctgttctacccctccctcaggtactcggcatggcatgtacttagttaagcttagtatggagctattttatagtatagttcacatgatcctttagaattatgatggagtggatgcacctttgatagtctctacatgataaaaataatagatattcacctcttttatgatttataatgatataatggaattcacatgttggaattatgggttgattagtgaggatgcacttttggtagataccacattatgaaaataaaagattttggttttggcctgtttcaagagtgacactgatacatgcaatccatatgttagaaaaatggggtcatatacaaagagctttgtctgtttcttctatgaatttgcagtcttaatagtgcactaagttatgcgcctttgatttctcagtcaagcttgtaagcatggtcaattttgttaccaggtggttattttggttgtgctacctaatcttcgaag

SEQ ID NO: 12225 - DNA, 566 bp, Oryza sativa
  Intron number 2 from transcript LOC_Os05g37950.1 (locus LO C_Os05g37950) derived from phytozome v7.0 (chr-ID Chr5; po s 22202979 to 22203544 reverse strand)
attgccgatctcgagaagctctgccgcaccacgaggttcctctcttggactagattattacttcaaatttgagtttacaactaaacacggggggcgcaattctccttagttaatgaaaaaaattgataccccgaatcatttgtttattcatggataattattcttcttttctttatgagattgcgtggataacgaacagtgattactctgtcagttcatgaatgcttgttactactttgaccacttgattgttcccacattttgcactgcataatcacttttatccggtgtagttaaaatgctctttgcaaataattccatcttaggtgaaaattaatttggaagagaataaaaaattgtgcatttcaattgtaatatgacaattatttatgaggacataaagtagcttagacgtgagaaatattcgtggatatattatattgcaatacaatcattccctagatgagctggacataatatttaattctctttaattttggcctattaaaaattttaatagcacgtctggtgtattaacaatctgacatttctgggttgtgcagcat

SEQ ID NO: 12226 - DNA, 439 bp, Oryza sativa
  Intron number 1 from transcript LOC_Os05g41360.1 (locus LO C_Os05g41360) derived from phytozome v7.0 (chr-ID Chr5; po s 24165396 to 24165834 reverse strand)
cctgtatttcaacgagagcacagacaagtcaggaggtatgaattgacaaaaaagaaaaaaaaacaaaacaaaagcctttagatttctcttcgttagttagctctgatccaggtgacctaaccatgcccaccaccacctacctgttgatgtacatctccagctgcaggaggaaggcaggaaggggttactgcctaaatcccataatataatataaggcacacatgcgttttaagattcaacttttaaaacatttgattaactattatgaattttatttgctgaaaataatacattggattgatatttgaatttaatttcatatggttatagtttacttttatattgctacaaacattatactatatataagaaattagaatccaaagatttgttttaaagaccgtactaagtttaaccgacttatattatgggatagagg

SEQ ID NO: 12227 - DNA, 981 bp, Oryza sativa
  Intron number 1 from transcript LOC_Os07g04310.1 (locus LO C_Os07g04310) derived from phytozome v7.0 (chr-ID Chr7; po s 1903584 to 1904564 reverse strand)
cgcactcttgcgaggaaggtcatgccggtcccggctgctctgcgccgggcgccgccgccgccgccatcgcgctccctccaccgcctcgaggttgtctctcttccttcgccccccttctcagcttccctattttcgttagatcgatcgatcgatcccgcataggtttaatccaccgtcagctgcgcgcaattagccccgctcgctcgcttcctggcctcaggatctgtttcgattcatctcgcgctctccccacccgacccagattagagagcacaatttggggaaaaagtttcaatcgaagtttctcttttctctactcaattgcttcatggcctgcctgatgttaacttaccttgtctatgcatgcatgcatataatattgtctcttaaattgctggcttggtaagcaaaatatttatatattatattaagagtgcatggataggatcgtgtaagtagtgagtatccggtttgttatggtaaatagaattagtgtcactctctatctacatactggttgtactctctccgtccctaaatatttaacgccgttgacttttttaaatatgtttgaccgtttgttttattaaaaaatttaagtaattatcaattcttttcctatcatttgattcattgttaaatatacttttatgtatatatatagttttacatatttcacaaaagtttttgaatatgatgtacggtcaaatatgtttaaaaaagtcaacagcgtcaaatatttagggatagagggaatatgtaactgctaggcaagtgcaagatgcaccagttgagggtatgtgcaactgactaaatgagcgactagttatgctagctacttcatctgttggctgggcatttttcttcaatcagcatccgtttgtttgcacttggcaatgcctagcaatctgattatgtttcttccttcatgtggaaccatgcatagggcacagcatctcccaagactacaactcctactgg

SEQ ID NO: 12228 - DNA, 579 bp, Oryza sativa
  Intron number 5 from transcript LOC_Os06g12940.1 (locus LO C_Os06g12940) derived from phytozome v7.0 (chr-ID Chr6; po s 7080099 to 7080677 reverse strand)
gatcagttaaacacaaagataaggtaagcaatgtttgtcctgccgttgaatctgtgaggattttcgcatgttgtatagttgcacattggatttgctacaacagatgctgcatctcttgcttctttgcttggagccagcttgatactctaaaaacatatatgttagtctgtattaaaaccttagtttagggcttggataagggtatcaatggatgtattgtctcgatctcgaaattcctgatatgcatgaactaaggatcataagggaatgaaaatgcttcaggtttttgttactgggggactcgtggtaataacacctactttcagaattcagatgtttctttttttttcttttttggcatggttagcactcattagtatggaggttgactacctatatggaaggatactaccaagttggttttggtgcttccaaacaattcaacagtcagtagcactgattatttgcttttttatgtccatttgcatttgctttgctaggtgaaaattttcttataagaccttcttgttgattatcaaaaggtaaacaatattcgtcttgtgcaggaagttccagcag

SEQ ID NO: 12229 - DNA, 827 bp, Oryza sativa
  Intron number 1 from transcript LOC_Os04g08630.1 (locus LO C_Os04g08630) derived from phytozome v7.0 (chr-ID Chr4; po s 4683958 to 4684784 reverse strand)
gctgctccaacgccgccctccattggcctcgccaggtaaaccacctctgcacctatctcccccatccccgccggcggtgggcgtagtggcgctacagcaagaacagccgccgccggtgatggaggtggactcgccggcgaccggagatgaagaagatggaggtgggtttattttgatgaagacggagacgggtttatttagttggagtttagggatgttacatcctactgttttagcttgttgcactctattgtagtaagctgtttcactttattttgatttgatgttgcattgcaattattttagataatggaaatgggttacatctccggcttctgtccataggcacacaaccaaaaagtccagaagtgaacagaaaagagcttaaaaaaggcgagatgggacaaatccccaacttttgccgataatatgatctactaaataatattttttaaaatcacgtagattctatcacgaaattctgtaggtactacgctatccaaactagaataaaagttccttggctacgtaccaattccaagcgtgtagcaccattgcgcatagtatcctgttgtttctgtgaaagcatcatacaccaagagtggagccaattagaacatatgaagataacctgcatgatgttaggcatttttttatggttaaaaactatatcattacggcaacgccaaattgaccaacatagagcactagctccaaataaaattattttttttgtgggtctaggaactccccttagccagttaccaaaaatatcttttgcattgtgggcagggaatattgaagcaaagaagacacatcgccaagca

SEQ ID NO: 12230 - DNA, 502 bp, Oryza sativa
  Intron number 1 from transcript LOC_Os04g59120.1 (locus LO C_Os04g59120) derived from phytozome v7.0 (chr-ID Chr4; po s 34982887 to 34983388)
gccgtcctcgccccgctcgcctacttcgtcgagaggtccctccctaatataattccctcttctcttctcttctcttcttttcttgagactattattgatcgagttgtttgcattatacaatatatttctacaacttcttcaattcaaagataccagtatttctttattatttttcctaaaattaagtatctccctttctgtataacatcacttgaataattatttttttttgttttccttcacgaccgccccatgcatgaattgaatgaatgcaagttttattctgtggcgaaaattaattaaaccatcagccttttgctgcgaataaaaatcaatggcccagctcactcatcctagctttttctctgcctacatatatatgcatgttttattttaaataatttgtttattctgtggttagtcaattactgaaacaatagcatatatgcaatctgttaattttaggtatgtgtgtgcgtgatgcaggaagaacagaacaaag

SEQ ID NO: 12231 - DNA, 791 bp, Oryza sativa
  Intron number 1 from transcript LOC_Os03g52770.1 (locus LO C_Os03g52770) derived from phytozome v7.0 (chr-ID Chr3; po s 30242207 to 30242997)
aacgtcctggttcgtgcgtatgatcccctctcttcccccctggtcttcagatccagctccctgcgtccccctcggatcttatggttgggcgcattttggataggctctgaacgcgtgcgatgaactgtaacctgtaatgagatttagctatcatcaatgctctggttggaattaagctgatcaatgcgtattggcgtattgcagttttgactgaagagttcaactgagcccaaagagcggtctctgctaatatatgtatggttgcagtattagatttggtttttgtaaacataatatggaagctcattgtcaagtttggaatcttgttacatggagagtgttcaacacaaatatcaaatttacggtcatgttgcctatgcattttctgttcttctgtgtatctttcgtacatcctgatcatcagagcttcactatgatctaccaatgaattttattcttactggtgaaaaacacgtaattccatataactgctgtatccattattttttttccagttgaactggttgagttactcacactactccaagtagtattgcattttccctttctttctttcttttctttaaagggttttataggaaaactgaaatggttttgagtgtttttctagataatctagtggtatccctaatggttattgaaaaagtagcatagtgggacacatgaatcagagtttagcttgtcaatttggatattggagagatgaatgcttacttctgttttgtgtttttttaggtgcaacaatcaaatctggaagctcttttacagag

SEQ ID NO: 12232 - DNA, 772 bp, Oryza sativa
  Intron number 1 from transcript LOC_Os06g48770.1 (locus LO C_Os06g48770) derived from phytozome v7.0 (chr-ID Chr6; po s 29522063 to 29522834 reverse strand)
caaccccgcggccgcttcgttcttggtcgtcctcggtgtgttcttgttgttgttgttgttgttcggatcgagttgatttcgtgcccctcccattatggaatcaggtttcttcagggtttctctgatgtagggtagaagattgtttggagaggccaagaaaaaaaaagttcttttggagttcagctgaactcgttgttaggtcgtttgcccctgatttagattcgattctgaggtaataaagttgcggaattgtggatgtccggaggatatccgagggttttatccgctcaatttgatgtgatcaagcaaaaaattcgtttctttttatgtttaaaggccttaatactacacaagctagtagtagtttgttttcttctgctctactgcaaaagtaagtactccttgtttgcatcccttggtggctttccagtacctaccatctgatgttgtagctccttggaaactgcttgcttatccctttgtcatgataagaatgtggtgtgaggaagaaacctgtattctttgtagttatacgctttatttgctttccttaaactctgtctttgtctgatttaatgtaaatacaagctgtcgcgcgaattcgttatcttgtcatgacttgtcaagaacagaagaacagtcctttctatgaagaagttttgagcctattgtatgtgatcggtagtgactaaggaatgctgatttggatttaccttcttgtacttgtgacattgcagaagatcaaccgtctggccgggagcctagagttgtt

SEQ ID NO: 12233 - DNA, 706 bp, Oryza sativa
  Intron number 1 from transcript LOC_Os06g11310.1 (locus LO C_Os06g11310) derived from phytozome v7.0 (chr-ID Chr6; po s 5930009 to 5930714 reverse strand)
caagaagggccccttcttccaaaacgacagccttggtacgtaacatctcaccagggacggagctagagcgaaatgaagggtggtgctagttgcttaatttactctactttagatcgagtttaagcttatgtgggtgcctaagtttgtattgagggggtgcatacatgataaaaatagatgaggtatagctaaaaaattttcttaaccgggttcctgggcactcccctaatatatactagctccgcccctgcatctcacactccatcacaactagtatgtatgccgtaaataatgcttttacatgtttgaattattattatacaatgatatttactcgctctgttttaaaatataagtatttctaggatttaaaatttacaccgtattatgaccatttctataacactgatccgaatacataaaaatccatacaaattttaaccaatcagatatatggggaaaaatataaggaattccgaatttaaccagagatgactgaaaagaacttttttctcccttaaccttagtatatttggctattttctattgctaaacaacttataaatgctaatattttggaacggagggatggagtaacacggtgaaccttgattgagtctaatattttttttaaaaaaaaatgttggtgaaattaataagtatatatatatgaacaatggtatggggggtggcactggcagtgttc

SEQ ID NO: 12234 - DNA, 852 bp, Oryza sativa
  Intron number 2 from transcript LOC_Os04g46610.2 (locus LO C_Os04g46610) derived from phytozome v7.0 (chr-ID Chr4; po s 27451230 to 27452081 reverse strand)
tgggaggtcccgtttccgccctttgggaaagggtgagtggaagatattcttcaattggtagtatcatgcacttcactcgaataatcttacaagttgagttccaatgaaatagcaaaaacaaaggagacagaaaaaaatgtggaagcatagcacgagatattgtgcattgtttgcaacaattttcaaggaatgaaatcgtatctagcattcatggattgatattgtgttcacgtaatcgtaaaccatttcattaaatcaaatacattactctcgcagtcataattattttaggtaagataagaattggtcaaacttttaaaattttgaccataaattattggtcaaatgcttagtttaaaagccaaaaaaggggtatacttagatttgactcaaaaatatatatatcataaatttattctaatctaaaattaatcatccgagttttaaaagtttaaccgaatcttgtcctaagtgtcaaatatgtatgaccagaaatagtttttggaactgtgctgcataatcaacaatttataagtctaacaaacttttcatttttgttactagatgaccaaatcatcatctacaagggctttcctttcccacctccatttttagggatggtgtatatgttttcttcacctgatcagtagagagtgaatgtaaataaagctggactggaaacacatttttaccagttaggtctttgacatttgttcagtttatcagttctgtttcgttttatcagtttctggtttgacaccatctatttggaaatttggcttgtatgtgttaggtcttttgacatttacataatatatgcctctactttcaggtttgacactgtctatttgg

SEQ ID NO: 12235 - DNA, 716 bp, Oryza sativa
  Intron number 1 from transcript LOC_Os04g43760.2 (locus LO C_Os04g43760) derived from phytozome v7.0 (chr-ID Chr4; po s 25723786 to 25724501 reverse strand)
aaggacggccaggccctccaagttgagctgctcaggtacagtaaaaaaaaatcactaatcaaagagccattttactgtacgtacgagtcgttttgttgcttccgatgataatgccatcatgtgcaacctccgtgcgtcggtgaacggccagttgttgcagttatcttggtgtgcacgtactacctctcggtctgatgcagagctgcagattttagaactgcgtgccacttgtttttagctgctgtactacactactactgccatgttaggtagtaccacaacagaggacatgaatgttgaagcaaaacgaaagatctcgaatagttagttagtcccaaaatacaagtatttactttgaccaacaatatctataaaagtaagatgttttaaataaagagagttgcatattatgatagctcgcttaatgataaatatagtaacatcaaatttacatgattaatctttttaatttatttgctattaatggttaaaatttaaaaagtttgacttcgcactgttctaaaaatacttatattttagggcggatggagtagtagtagtaactgattaactccaatcatggacgaacaaacaggttaattttcagtagatatttgtgaaacgtaattagtacatagtcttctttcacccacagtatactgagaggttgcaaagctgaaagaattgctctgtttcacggccctgcaggcatctca

SEQ ID NO: 12236 - DNA, 766 bp, Oryza sativa
  Intron number 2 from transcript LOC_Os04g43350.1 (locus LO C_Os04g43350) derived from phytozome v7.0 (chr-ID Chr4; po s 25452528 to 25453293)
aagccgagcagcagaagcaggtccaggagttccaggtactgcatcaccacgctccttcctcttgatgggaactcctcatatgagaatgcagcaaagcgtgagcctgtaaatctggaactgtggaaagggatgcgatctagctggtgaaaaactatataatttccctaactcaggtggttgcttgcaattgtgcctatgaatcagggaattgggaactagagagctagctgtatactccgtacgtttcatattacaagttattggactttttttcttagtcacaattcttcaggttgattataagttatttgacttttttcttagtcacaattctttaggtttaaccaaatttatagaaaaaatcatcaacatcttttgtaccaaattagtttcattaaatttaatattaaatatattttgataatatgtttgttttgtatcgaaaatgtcagtatatttttctataaatttggttaaacttaaagaagtttgactaagaaaaatatcaaacaacttataatatgaaacggagggagtagagtacaatgtatcttcacgccttacagccttagccacaatgcaccaggtttgcttaggttttgcaactaataattattgatcactgcatagcatatacaaagaactttataatcaccctaccattcttctgtaaatctgaatgcatggcacatgcttatgagttcttcttttgggggataatggcattacaggaggaagtaattcagagagcccaaaaggcaaagga

SEQ ID NO: 12237 - DNA, 586 bp, Oryza sativa
  Intron number 1 from transcript LOC_Os03g59660.1 (locus LO C_Os03g59660) derived from phytozome v7.0 (chr-ID Chr3; po s 33962122 to 33962707)
ggagctaaccagcgccaccgccgtcgctcgtcgtaatccggtcgtgatccgattctcttccctcctacatttggttgattcttctcgtctctattctcgaatatcaatggtctctctctgtttttttccttcttctgttcctgaaatttttttcccaacagttttcgatggcaatttaatgtgagggaagttcgtccactcgttcatgatccgtagcccattcctgaattattacagttagattgatttgggctagggctagaatttcgcccaaatgtgcgtcagattgcatgatttgggattacataaacaaatgccgtacagttggatgcagctgggaacttgggatcatatatccgtggccataccattagcttgccttgataacattatcataccattagcttgtcttgatgtgcaccatatcatcattagtagtggtgtgatcctcgaattgaactttggttcagcattagtttttgatgattcttttgatgctggagagcagacaagaggattccatatgacatcgccatttgttgtgttgtcagatacattttgtgctcctcatcagcagacaagggaa

SEQ ID NO: 12238 - DNA, 770 bp, Oryza sativa
  Intron number 1 from transcript LOC_Os05g01280.2 (locus LO C_Os05g01280) derived from phytozome v7.0 (chr-ID Chr5; po s 190072 to 190841)
tcggcgtccagatcaaccttggctcctctccctgattctctctctttgtttcttctaggtaatctcaattgcatatgtatagcagtatatatgcacctccatccatcatctctactcaccttagctcgttaatttgtactactatttgtgtgttccttccaattcttggcataatattgtgactcaaaggaattgatttcagagttactcattacttagtttcttcctccacatatatatgtagcaaaatcaaaagtgcaccattcatagcatttcaagtaaattacaactagcaaatttcccacgcaaaattaggcgaagccaatttttttctttttctttttagtaagagctggatttggcatacacatatattttgtttccatagatatttgtattttgtatacaatagatctttgaaagtagaattacatttgatatacaaccactagcttctatgtctatacgtccaattgtattttgcgtacaatagatttttaagaatatgttttagatttcatacacaactcttaccttgtttttcaatagatacaattatattttgtataaaactgtgtcaattaatctacatcaacacaatataattgttaatgtggtagtttgtaaacctcaagagttatctcgtactataatagggagatactaataacatatagtcagcagaggcagtttaattaattgctgcaagtgcaaccaaaaccattgggagtgcagggcagcatcagtacagtagcagcagggtcccaagg

SEQ ID NO: 12239 - DNA, 915 bp, Oryza sativa
  Intron number 1 from transcript LOC_Os06g14890.1 (locus LO C_Os06g14890) derived from phytozome v7.0 (chr-ID Chr6; po s 8455916 to 8456830 reverse strand)
ggaaggtaacttcccctcactttgcatacccctgggcccatatctccgacaaccgagttatcatatataccgcataatcttgattgatgtcgtcatccaaacttcaccggctagcctctatcatcgaaaactgccggtaggtttgcgttttgatatcaagctagactatgcggtgtatataccatcttgaatgagttttcatcgatttgattagatcttatgtttcttttcacgcttaatgctgcatcggttaggttcattctgttaagtactgtcttcagacattctatatatctagccctttctttgaatgctaatagagatagcatcgtggtttcaaccgatcttacctgatttaaccgtcttgtttccctatttggttctggatcatctaaatctaccctttatatcaagatcccacccatttaaagtatattaagcttctatcggtctgctagttcaccctacttgctagattggtttcagtttcgtatatttcgtatgtgctgatatcttggtataaagtggtatcagagtactaaccgatacacgttaggtttaccctatcggctatgctgtgagtatacataatccctactttgagtcacatttagatgttgaatgatttatactgtctcggcataacggccgatctatcccaattattcgatctaagcgtgttccattggatggattatgtattgttaacatctacagccgattgagtggacccaatagtttccaagtttttatctgcttctgtcgatctgatgcgagttacatcggcatggcttcggacgatacgtcatcggcaacccagctgatcggctatcgttgatggatttaactcttcgtcttttttctatcttgttggttgcaggatcaaaccatctggcacgctcagaacccaaaggc

SEQ ID NO: 12240 - DNA, 708 bp, Oryza sativa
  Intron number 1 from transcript LOC_Os04g56600.1 (locus LO C_Os04g56600) derived from phytozome v7.0 (chr-ID Chr4; po s 33569058 to 33569765)
tcgagggtaggcttcagcggcgccggtgtggtcccccgaggtggatgttgccggatgttgtatcaataatccctaatcctatacagcaaaataagaaaatcaggaggaagattacggtggtgcaatgtttcatgaagcttattgcactttgcttaaaaatgaaccatcttggtacagaattagtcaaaagcttactgaagtcataagttcaccttgaccaaatctgtcaagaatccagaaacagttggattgtcctaacatatgcatggagatggtgatttcattaatcaaggaatgaatctctactatactgataattgatatagatggtgcatcatcttaaatattctgtcactgccagtgaaaatcgaattttaaggtttgatttctgaaatgtgtaaaatcttaaataaccagatactatatattgttctttggagatgtttagacatgtgcagacagttatgcgttgttcatagacatggatactttagttatcattatctaaaaacatgaattctttagataccaaagcgatgctttcggtttttttcttttgattgattctggattatattaagaaccgtatgatcaaatcagcggcgactgatggggagagaggaaatatatataatactgcattgtggattaaaaaaaaggggaggaaggatgattactgtaccttaatttcggcgaatcagatcgagg

SEQ ID NO: 12241 - DNA, 890 bp, Oryza sativa
  Intron number 1 from transcript LOC_Os07g09450.1 (locus LO C_Os07g09450) derived from phytozome v7.0 (chr-ID Chr7; po s 4979576 to 4980465 reverse strand)
gcgccgggctggccggtggcggagtaccggaagtgatctcttctccctctcagagattccagctttggttagtggctcgtgtgtcgtttgcatgtgctaagattggattgagtttttgtttgagcaatcccatccgtagggtaagggaaccaggtgcagctatagagggaattttccaggtgttgcactgattgctaatgtgaaatgttgagcaattttggagtcaggggtgtgtgtggtagatgtaagattgggaactttgttggtaaatctgttattattccgattgaaagttaaagctcagattactctgctctgtggatttgttgagccagttgcttatctgggacttcggtaatccaattagagtagaacttggtgggcatagtcaatctgcacgaattgttactaatgatcatggaaacatcttagtataacttacatcatttctcatcctcctattactattggtatgaaattacattttgggtgcattcactgcatggttttaagtattaatcagcgggttgtccgaaactaagaatgagtgtaaattggcattggtttgatttatgtttgcaatgcagcggcagttttctaatgaccgtgttgttttcggttatttttgtagttcgcaaaacaatttcctattgtcttctccatgcatcctaccagtttgtgcttatttactttctagcttctggataattttatgatctctaaatgtttgatttcagtttaatgcatgaatacagagtgccaataacaaagtagaggccaaaaatggatgcgcaacacgacaaagttagttataaagttatagcgatttaatacttccatatttaatttctgcaggctacaccactcatagcaggactcacggttgcagc

SEQ ID NO: 12242 - DNA, 1054 bp, Oryza sativa
  Intron number 3 from transcript LOC_Os07g10250.1 (locus LO C_Os07g10250) derived from phytozome v7.0 (chr-ID Chr7; po s 5503008 to 5504061 reverse strand)
tcgttgcatacggaggagcgccaattactcagcaggtttgtgtctatttagtctatgatacgtttcaaccgtaatgccttgtattttggtctgtgcatacctgagtttcacatgctttgccttgtcaagaggattgtacacattttctgctttacttggacatttgctgatatgatgcatttacatccacggcttaaaattttaaatcgtgccatctaagagaactgaatactttagcaagttcacgtgtcacaatctgctacgataaaaaagaatagaatattagtgcaaggccctcatttgtaaacatcatagttgtactggcaaagcaaaccttgtggcctgtgctttaaggggcttttttgttggtggccacagtttgtcacaccaaaccttatgcgcgccacaatttcttaggttagtatttgattgagtgccacaattgagtcaagccatactttattagcacattggcccacgcatcatactctcattttctagccaaagtttgccatagttgtggccatcaaattgttagccacactttgtgtggcttgccacagttatatggcaaatggagttgtggcaaatgaattgggccgcttgcccagaatttgtaatcccgatttagttggtagagaggcaacattgtgacaagttcatgaaatgtagttatgaaatgacatattcaagtatctgtttttaaattgctaggctctaaattgggtttaacaaaatccaatcttgatgaaacttgagatccaaggagagcaaacataccttgaacaaaactaaagaatactatatatgtagcaaactaaataacataaattcttcttattattgcaataattcaagtgggaactttttgtaacataaacttgtgtatgcttgacagaacaagaaatacaaatataaaaggtataagctgacatttgaatgctaggaatgggtcttaaaatgtttttttccatgtaattggatattgtactaagtaaagtgtatggttgtttttgtagctgagggagttagaaagaggtgttgaaatccttgt

SEQ ID NO: 12243 - DNA, 967 bp, Oryza sativa
  Intron number 2 from transcript LOC_Os05g34600.1 (locus LO C_Os05g34600) derived from phytozome v7.0 (chr-ID Chr5; po s 20454747 to 20455713 reverse strand)
ccccgcccgccgcagacgccgatctcttctacaaggtaataattattattggaaccgagaccattgtggaatttggtttcagaagaattaatcatgtgtagctagggtttgggatcgagctcaattttgcagagagctagctagctcttgtgattggattcattattccagctttgatctctttttttttcttttcagtttgcaaattgaggtgtgtccagctgcttgctgagtgtgtgtgtgtgccgtaaatttagtatttggtgtgttaatcatttgtttatctgcaatatctttcgatctgtgcggtgcttttactatggtcgcatgatttgtgtgagttccttttttcttatcagatctatgaactagggtttgctttttgtccccctttggttctttttgggcatatgtatggacatgagcaaaaggcaagagctatgctattgaaattctcctagctagataccacttacatatgcatgattccgtcttgttctgcaaagtatattgttgttctgcatgtgcaagctgaaaattttggcttccccaattgctaaattattcagatctgaacttagtttgaagcattagattttatagcccctcttcacttcatttctgcttcttaattacaatcctactaggctatagttactacactacaattatccgtgactgcatctttctctttcgatctgatgctggtaatttcttaagtttttctttggctttgaaatgtccagtgagaaagcttctgctgacaaattttgtagacattgcttaaattactttggattaggggatatttcaatatttcattaacttaatttcttcctcttaatttgcaagaaattaaagcaggccaatgcatgaatctccattattaattctcatcacattgtctctactctctactgatgatcatgcagtctgagatctcgctctgccgcgtctacaagcgctc

SEQ ID NO: 12244 - DNA, 984 bp, Oryza sativa
  Intron number 1 from transcript LOC_Os04g37690.2 (locus LO C_Os04g37690) derived from phytozome v7.0 (chr-ID Chr4; po s 22229813 to 22230796)
actacctccacagctgtttcggacccagcggcgaggtttgccttcactccccgatccgggctttccgtactagatctcactgatacgattagattcgtgccatttccatgggttagttcgcctgttagtgttctcaaattgtcgcaaaagcatacttttgcgtttatttgtcgctctacgcgaataaaggtacaaaatatttgtagaattagctttgaggtttgctcgaggcacctacttcgaggccattcaatgcaatatgacgtaatgcttttgttggtctagtgatttatgtctattgattcgttttgttactgccgagtaacttgaaagcatgttcctttatttggttgagttgttattttatatgaaactggaaatggggcaccctttctgtagaattggtactttcgagctgccaaaggtgccgactttgtgctgggatttatgtacatgtccaatttgatgagtagtttggaggaactggtcctgacgtgtgatgatttagtaaacattttgaataagtcaagctagctgttgtactttggtggttacataattagtaatgaacagttagaggagggaaaggaagccataatgacagcattagctattttgctgtattttttgggactgtgtccatcgatgttgacaggaagaaaaatgatgcctgttaagaggattattgtgatggaaactgatgcggtcagggacagggttaatgaacaaagacacaaaatggactgtaattcttgtttctgtacttgttgcagggatctgtttattctgtatttgaaataccaacatctgtggttgttaggtttattcaattacagaactaaggattaccactgatcagttcgtcaacttcttattttcgatgctagtgtgtatctgtgctattccttgactgctaacttccttgcctttcgacaccccttttttataggtagtgacgataaaagttatccgcaatagacaaac

SEQ ID NO: 12245 - DNA, 901 bp, Oryza sativa
  Intron number 1 from transcript LOC_Os06g03500.1 (locus LO C_Os06g03500) derived from phytozome v7.0 (chr-ID Chr6; po s 1349185 to 1350085 reverse strand)
ggtgtgcagaaggagatgtgagtgcgtgtgtactgtgtccccatttgattagtactggtttcttacttccttctgtttaattagttcccttaaagaaagaggcgtttcaaagaaagctaattgcatggttattctcgaacagcgatatttcgttcttgctgaccatgcagtgacggagctgcttttcgagtctgggataaacttaaatttattacagtttgctacaagatttttaattttaattaattctttttttttaaaaaaaaataaatcaatcatgtatttgacggtgagcctaggcgatggctctgccccttttacatgtgaatttggacatgtataaagtacagatattgatccatttattgatctatttaaaacctaacgcatcatataatgtgaaaatgcatggggaaagtataatatttcatttatcactgtgatcaaatccatctctccgcaaaaaaaaaagataattaattcatcagatttcatccgtgagcaatccatttagatctcattctactttatttgttataattaaagagatgtgatatgagtccacatggtaagggtatcaatgggaaatatactccctgatgtacatggcatgttttgtcatctccgttgtcattgctccatgatttgagaaaattcgtttgaagtttgtactcttaaaatttcaaacatcatctttttgagatatttttacatgcatatataggacctaggcatgtagaggtagaaaaatacgctgagtcacaatacctttaataattcttctaatctgaattaataaaacaagaatttagacttccagagcaaaatcagttattcggaattccatatactcaagagtgctaaattttgttttaccactgtttttttttttggcaggttc

SEQ ID NO: 12246 - DNA, 691 bp, Oryza sativa
  Intron number 1 from transcript LOC_Os05g43300.1 (locus LO C_Os05g43300) derived from phytozome v7.0 (chr-ID Chr5; po s 25126165 to 25126855)
gagaggttctcgcattacgtcggtacgcaacctcgctctactactacttagtaccttcgatcgattactttgtaactttgcttaagcattcaatggatttttttttttgcggagcaatattgcttccgattgattgaatggattgctctccgatgcagtacattgacttgcaagaactcaattccatccacgattttcggaggggatcgcatgctccagcgttggaatgtgtgatttatgttttttcaccttgtcttctttgtcgatttcgtaagggaaattgcgctacaaccatttccttttagtttgttcatcactttgtccaatccaaaaatccaggatacagcgcggaattcgagtgtgcacagcacacgcatctagataggcatattattaatggggtggcgtggagattgattagcggcaacttgggcatagaaaattttgagggggtggaaatggaagcgagacattagattatgctttccactccatgaaacaccactagcgagattccaaacaatggcatattctatgtggtttgagttgtagcacatcatcacatattattcttttgtccctttatgatcttgggaccagcactggtttccccccaccttgtgtccttcttgccttttctgttttctcacaaatatgtggcaattttcagctaggcaaattgggtttgacc

SEQ ID NO: 12247 - DNA, 634 bp, Oryza sativa
  Intron number 1 from transcript LOC_Os05g44910.1 (locus LO C_Os05g44910) derived from phytozome v7.0 (chr-ID Chr5; po s 26035619 to 26036252 reverse strand)
agtctgagttccggtggtgggatcgcatcgaccaggtgtgttaatcttaccctcatctctctcccaatatactgcaccttgtcgttctggagcgatttggtgctttaatttcactcatggatattggggacgatcagtgtaggcatagttccaggtccttgagcagagttgattcattgtgcttgctttgttaccctccaatgcttgataagcaggttgtaaattcacagtatgtggcctgcggctgattttttgggtccaatactacactttcgagcaaatcaacattctgaattgtaccaatatcatgtagattcgcatgtgttatgtttgtatcacttacgcttgtgattactcttgaaggatggttatagggattttgattagtgatcctattgaggtctagagctatggtatgaccaatatgagtaatttgaccagctactgataacctataggaatcctttccaatttttatttcctactttcattgttagctctgtctaccatccatgcacgatgcatgcagttttaaactagtatctgataatttgaacagttcatcaaacaatatggtgatcttctgttcattggatggtgtgtactgattttcttcccacctcccatctccagt

SEQ ID NO: 12248 - DNA, 319 bp, Oryza sativa
  Intron number 2 from transcript LOC_Os06g48980.1 (locus LO C_Os06g48980) derived from phytozome v7.0 (chr-ID Chr6; po s 29675619 to 29675937 reverse strand)
gctggtcagtgtgcacacatcatcatctcgccattcttgtgctcatgcaagctgctaatcatttatagctattttaatagtccattcatgcaataattataaatatactacaccattattaatcggtcatatctctcatacacataaaatataatggagtctgtgttggaactggctacaatctgtagcccgttttcttcctttttttcttgatatgtgtttattgtacttgctataatgttgcactaatttaatcaaataaaattgaaattaatcaaatgaagacggaagtgagctacctggggcagtacaaccatcc

SEQ ID NO: 12249 - DNA, 923 bp, Oryza sativa
  Intron number 1 from transcript LOC_Os06g33710.1 (locus LO C_Os06g33710) derived from phytozome v7.0 (chr-ID Chr6; po s 19613391 to 19614313)
tgctgctgctgctgctcgcgtccgattccgacgaggttagaggcgagccccgccatgggtgcacggtgatgatgtgataagcttcgtttcttggatctttaatctacctaccaacttaccgagtttatctctccttggtcgtcggtgttcgtttgtttgtttgttttggggggattgtttttcttttttttttgttcaactttgttcttcaactttgtgctaatcgcgcccttttattgttttatacataattgtttgcagtattttgttgattggatttatgggtttgttttggtggcgaggtttttatgggggaagttggggataatctggggactctttgtaacagtgatttaatttatttaggttcggttccatgttctgggatagttatatgggttttacggatcgattacctcattgattcttctttaatcgaaacgttattattgaattttcatgtctctgatgatagactgataatatcttactttattactaatacatagaaactaaaattgcaataccatgaaaaacataatgatgaatttagcaaagatagttcttaaattatttttgtgtatgtatagggtagaaggatgatggcccctaaagcagagttgcagtgatgacattttctattcaccttaaaagccttgtgttgagatagtgaaattattaattcaacatatgaaaatcttttattgcgttgtacatcatagatgtttggctgagcatggcacttcttgtttgtttgaaagccatggttaacatgttgcagtagttaagcaatttggtacttttgagtctggggctctgggctgcttgcttataagagttgttcatggctgtagcctgaatattttgttcccttttcttcatgttgagccagaggctgggaacttcaaagctgaaaaggacta

SEQ ID NO: 12250 - DNA, 871 bp, Oryza sativa
  Intron number 1 from transcript LOC_Os04g40810.1 (locus LO C_Os04g40810) derived from phytozome v7.0 (chr-ID Chr4; po s 24030119 to 24030989 reverse strand)
gcgccctcacctgttgcgccagcggcacgcccttcgtatgttatatttttgccatttcttcgtctattcggatctgatcccctggtgattcttcttgttaggttgttttgacgttcacttgttaattcgttgtgctgctattgatcaagtgattacctatgcggatctgatcccctgctatgattggtgtatcttgttgttaggtggatttggcgtatacttgttaattcgttgtgcagctattgatcatgtgattgtctattcggatctgatcccctgccacacaattgggggaatcttgtattgttaggtggatgtgacgtatagttgattcgttgtgctgtttctcctttttttttcaagagattgatatgatcttgccctgttctcaagccatagctatttgaatcccttattgaacctagttgattgttctgcttattgatgcttagatttttccaatgtgtagttggttctgagcaattcttggttgaccttatgttagcttcccctgtttcttgtttgttgagtggattgaatggagggagtgtttctgttgttgcatgtgatgagtgcattatcatgtaacctgttggtgcatagaacatatttaaggagtgatgaaatgttggcctaatttcccttaccggatgatttgtgttcctttgctgactgtagtgacgtgttttgttaaatccattatcttgtttgttttgttcacttttgtagcctcataggtgtctggtagttttcattaatgtttaatcagctctatatatttgaacaatgtggtttcattaaagttgtaatcagctctagatttttgaacaatgcagatactcgtctgtgctaaggttggtctccaacaatt

SEQ ID NO: 12251 - DNA, 613 bp, Oryza sativa
  Intron number 1 from transcript LOC_Os03g08020.1 (locus LO C_Os03g08020) derived from phytozome v7.0 (chr-ID Chr3; po s 4100181 to 4100793)
atctgctgctgcaacaaggtatatatctctagtgttttttcttctgttatgattgatgagtctagcacttgtttgttcacattcgtgatgctattctagatacaatgaagtagcataatatgttttattcactatgcatctaatacttcaatgtttgattcttgcaagcatatctgtcttttatgattgatctgcacagcacttctgtacatattcatgacgcttgtcctgaatactcttgattacatcaatgaagtagctttcatttgaacgtctagttgtttgttactttatactaaacatctatttgattggtttaagttatattttaaattatctggttgtggtgttgtacttcattttgtcatttttatcctgctggaagttgcagcccctgtcctgtttcattacatcttatctggtcactgtgtatcttatatgctgttaagtaccttttgatactcctacatctggtccctgctcttgtatatcttatatgctgttttaagtattgtttcatatgatcatatcttgtatggttatctttgtttggttgccaaccgaccccctgctgaggaaagttattgatttgttttcctttgttctgttacag

SEQ ID NO: 12252 - DNA, 639 bp, Oryza sativa
  Intron number 1 from transcript LOC_Os05g16660.3 (locus LO C_Os05g16660) derived from phytozome v7.0 (chr-ID Chr5; po s 9449250 to 9449888)
accgtaagatgcctcttctctaaccttctatttatgtttcgaaagcttctggtggcttctatttggattgggagttggagggattggtcatgggagtttcattttagtaactccctccgtttcacattataatataagtcactataacttttttctagtcgaacttctttaagtttgattaagtttatagaaaaatttaacatctatagcatgatattagtttcattcaaactaacatttaatatattttgataatatgtttgttttatgttgaagatattgctaaattattctataaacttaagtttgactagggaaaaaaaagtgaaagcgacttataatatgaaatggagggagtagtagagatgagatgatgagaaacatctcgtgatacttaggaggaaattcccttccaattacgtgcccctatccaggtattgaaaaggtgggagttcactcttaaactccccttcccaatccctcctaaaaactcccatgtcctccaaccaaacaattgacttaatccccacccctcaaactcatattcctccctaacaattccccccaacaacgtgggttctgaagtgtgtggttgtggatgaagagtcggaggagtctcttctcgtgatttctggcatc

SEQ ID NO: 12253 - DNA, 1035 bp, Oryza sativa
  Intron number 1 from transcript LOC_Os05g33360.1 (locus LO C_Os05g33360) derived from phytozome v7.0 (chr-ID Chr5; po s 19526815 to 19527849 reverse strand)
cctcgccctcgtgctcgccgtcctccccttcgtccgtacgtgtgccctcctccccatctgatgatgcttcggttgacctctatcttagatttcttgtgcttgatgagaaattgagaatggttttattctgtgatcggtcgtagattcatccgcgtcccgctgattagcagctggtttgatttgtaggctacatagttgaatctagatagatcggtgcgttactatatgccttgctgttggaatcaaaactttggcctctagatctaggatctaattagttcacgaattaatacttagaattagacgtagtaagttctgcatcatggatttgcccactcgcattctgaattgggatgtgaagtaaatgtttgtgttatattataaactaatgctgcaattgcttttcctataaattgtgaatagcatttctatagatcatgttcagcgacgagtttatgacaaactagttaatgcaaacgctgtcggaaaattttgttacaaatgttatgagaccttaaatgatatgattcatatgcattttggtttggccttatttgtttcccttgacatcatatgatgcgtttgtgttagtcaagtgcggagtgtgatgatatgggcatggtggggctgtctttagaagtgtagaactcttctgaacacttgtgtatccagattatttttttttctttcaattctgaaatttctgctttgtgtttgccatagacaagattgttttatcccctagttggatcaagtaggcagcacacataactgtgtaagagatagtcaatgtatttagtccggtatgagttatattttaatagtatatggaaaaatatcaaggaaagtctcaaatcttggatcagtggggctgtttttttttactccctgctttttgttcatgttagtgttgcgagtaactaaacttcttcatctgaattttgagaaaagcctgagtagatgacattgttaattgtttggtaggatggaatggttttggtgctctcagctaattttgtgttatttcttgcagtg

SEQ ID NO: 12254 - DNA, 748 bp, Oryza sativa
  Intron number 1 from transcript LOC_Os04g51990.1 (locus LO C_Os04g51990) derived from phytozome v7.0 (chr-ID Chr4; po s 30684946 to 30685693)
gcagttcaggtatatatatatatgggagaaaatatatttaccggaagccccttttttttaaaaaaaagttcaaaaatatgaatttgatctaccaactaacttaactactacttcctctgtttcacaatgtaagttattttagtaatttccacatgcatattatatctagatttattaacatcaatataaatatgaaaaatgcaagaatgatttgtattatgaaacggatggagtactagtatgtgaggataattctgatctatcacatggaaaaaaaaaataaatgaagatgctgtttttctggaactggagagctaattaatgaactaataagctggtatatatatatgtttccagcatatataactgaatatcacatcaagttatcccctcccctggacgttaaaattatgtgggaaagaaaatgtgtgtatgatgtcaagcaagcactggctactaattacacatatacttacgtgctttacgtgacatggacgtacctaccgcatatcaacctactacatgttttctttgagacggagaacatgagagaaaaaacgtagacttgatatgattcatgcatgcaggataaattacctgaaaggtatatctatcgacgaattaactaattattatcatattgtttgacctgttgtggtacaaatggtcagttctttgacctgcactaatccacatggttaatatacgtgcaggtgaccaagttcaagtgcggcggcgccgtcgtggg

SEQ ID NO: 12255 - DNA, 454 bp, Oryza sativa
  Intron number 2 from transcript LOC_Os04g51786.1 (locus LO C_Os04g51786) derived from phytozome v7.0 (chr-ID Chr4; po s 30501952 to 30502405 reverse strand)
cagacaagagatccaagtactcggcacaatcagtggtaaggagtgcaaaaaattcccccctttgatgttcgtttcttctcaattataagtatttagttttcgcttttattggtcactgcgtacttgctaattcctcgaaagctggaggctgctggctgatcttagtggacatatataggcgagaacaacaggaaactgcttctgaaacaaggattttgtatcagtagattcagcactatatctgaacattttttctgaaagtgctttccatgtcacagaactaattttcccatcaattaaatgaattagagaaatctgaaggggttgaaaccttctgccaaatacatagttttcgtaatatattctccatatgaattgcatagcaaaagcaacggatgaatgtctaataatgtttggtgtttgatatctcttgtggtcatgtttgaagagagca

SEQ ID NO: 12256 - DNA, 401 bp, Oryza sativa
  Intron number 3 from transcript LOC_Os03g49620.7 (locus LO C_Os03g49620) derived from phytozome v7.0 (chr-ID Chr3; po s 28250995 to 28251395 reverse strand)
ttgtgcaagtgtaagtttattttgttgatgttttgcttcacttttattttctctccattttgagttaattctatatttacgtatctcttaaacttatatggcataatagttcttgatttatgttccacattcattaccagtgagctccagaagcatctgtttgagcacatgattatgatttttttgatgcacttgcacatgctatctgcacttctttgatgcacgagcacatttcataattgaactatatgaaaatggaaaaatcatacaacatgctgtttctttaaatcttcttcacaccatctgttatttctggcaaaacaacatctagatggttctgttgaccccgttatgcatgttccatatctaggttttttgtttgttccaagttggtgtgcctg

SEQ ID NO: 12257 - DNA, 846 bp, Oryza sativa
  Intron number 1 from transcript LOC_Os03g49620.7 (locus LO C_Os03g49620) derived from phytozome v7.0 (chr-ID Chr3; po s 28251809 to 28252654 reverse strand)
ctgcttgctgcccagcctgcgagggcaagccactggtaggtagtacgtgcttctctcttcagtcttcactgtctgtgtgtgtgtgaattggaatttggaagtgctggaggtaagcagtaagagaaggatcagatttggagaggctgaatctctgattctctctggtgtttaaagagtttgttcaattcgaattgtgggtttaattttggtgccgtctctcactgggagggatcactggatcacagttgtgctgcttctgggaacgttttggttaattctatcaggtctgtagttcttcatgatttttttttgaatggatgtagttcttcatgatagcttctagaatatctgagtcttgctaatattccttttttttttaatagcaagagaatttagtggtgctgacatactaaaaattagaaggtttatgtgctgtatgggcatgttcagatattttgatttgttaggcaaatttagatatttttaaccatggcgaccttttggtttgggggcataattgggagcttggttttgcttccttttttttgaacggaagttttgcttgtttcatgcgttctctttggaaataataattctagtacgttttgctgtgatgaattcaagcctctattttagtataccgatgaaacaattgtgcatttcaaggcaacttttgcttttcagcataactaacagcataacagtgaacagatagtataataataacagtaactacaaattctgctttgcctatcactcaatcttgtatgaacctcttttcttatccaataatattttgtctatcttataggtgccatactggactggcttgcttgttaactgggt

SEQ ID NO: 12258 - DNA, 1050 bp, Oryza sativa
  Intron number 1 from transcript LOC_Os04g41890.1 (locus LO C_Os04g41890) derived from phytozome v7.0 (chr-ID Chr4; po s 24641432 to 24642481 reverse strand)
gcgtcgtctgaactgcggaggcgagaaaggtgatggagcccggtaatgggtggaggaacaagatcgtggcggaagatgatagtaggcacgtaacacgttataattggatttaaccgcgggaggataagacgaggatcggacatcggaggatgaaatgagagcgcaatggcaacaaaaggcaaaaaggtggtggatgcctagatggctagcggaagaacaaagtggtgagatagaaaggtgttgaaagagagggttacaggccgaactatggctagctaggccggcatgaccgaatgtcgaacgaactaggggcagcggtgataaaaatggtgggaaataagtcttcaaataattatcgttacccttttcttcccgcggaaacgagacggaaacaataacattggaaaatatcaataacgggatcatcacaataaagacagaaacaatgtatcacaatggcaagttactgtcatgctttacttgaagacttcgtaatgaaattatagcttcaacattgacatcacactgataattaacacacaagggtcatgaataagttttttcttattctggcaagttgtgggtaatatacaaaataatttctttatttaggaaagttctaatgaaaatgagatatgccgttaaaacggtgagaaaaaaaagctaactatcgtttccttttcattaccagataatatgaaatcaaaataaacagctggtacaaaactaaaacgatagccagtactatccaaaaattccatactgtctccacacctacgtataaaggcccacgggtacgaagaaaagtgtttggtggcggtgtcaggttgtgagttacagtctgtgcgtaccgatttatcgtaatatattttcttcattttaaaatataaatgattttgattagacatgtgtctcgtctaatcaaaatacctaatattttaagatgatggagttgtcacttagaaccgaatacaacactatatagtacaatgtatcatacatgtcttctatgtagattttttagtccaaaaaataagaacctaagaccaa

SEQ ID NO: 12259 - DNA, 688 bp, Oryza sativa
  Intron number 1 from transcript LOC_Os04g42840.1 (locus LO C_Os04g42840) derived from phytozome v7.0 (chr-ID Chr4; po s 25174772 to 25175459 reverse strand)
gaggtccgctcctgttgcttgcaatctcattggttgtttttttttcgttctgtttgggagctggatggagctgcaaatacgagttagtgttagataaggagcaggcttggcatcttgtgggcttgtttttgagtagttcgattcgtttattggggatgttgagctgcacagccgaacttaaatgagaaaactaaaattgtccggcacattacaataaattgataggccctaataccaaaattgatcaaaacactaaatatgattttcagggagcacttgtttaccgggtttgatgttaaaatgtgggatacaagtgaactttgaaacttcttccatgcatgtagtggcttgacctttattcggagcagatgatttaactttcaaatactcatattcaaagatatttcttttgcccttttgtgctgatatatatatattttttggtgttatagtgtaaatatatgatagcttttctcttttacttgtcaatgttgatttatatatactaaacgtgctatcatttttagacctttttttttttttacttttctacattcatcctatgatttgaaaggaccaatccaaacatgtttgtcttattatcagggttttggattattggcagctaaccttttaatctatctgtatctcaggtttcttcgccgacaatcatagttgaaagagctgg

SEQ ID NO: 12260 - DNA, 995 bp, Oryza sativa
  Intron number 1 from transcript LOC_Os03g46730.1 (locus LO C_Os03g46730) derived from phytozome v7.0 (chr-ID Chr3; po s 26436191 to 26437185)
gcaagctacggaagcgcctccgccgccagacatagagcgggccgccgccgccgccgccgcacggtgaacaccctcctccgcctccgcctccgcctccgcttcgattgcgagtagcttctcaccatttcgtgtgttactgtgcttgcttgctgccatgactctagcggaaatgggggtggattgctccgtgtattgaattgttagacacttttctgtagctcattttgattcagtcttactatttcgttattattattagatgaaaatgctgtatcattatggtattaagttatgtctaggtctttggtctagattttcaggctctagtgctttgttgatgtatgctgtcacattactatggcagaaatgtagatgaataagtttgaaacatcgggcggggtctcataatctcatttggttttcgttgttcctcagttctaattgaataagtgttgcaatggtgcatgcccatagtgtcatctgtgtggtgggctggtggtgctagaattgtattttgcatacggggtaacattaagaattgtttagcacagacatctttcaaattttatcctctaatcttccatcccttggcttcagttaatagttttcccagatgaaacattgtgaactttagaaagaacatcaattcactattgtgctgcatcactgggctaaatgttttcattttcatcagctaaaattatgcatctgttttcatattgtgttttgaggactccaaattagtaaaagctccatttcaaaatccctgggcatagtcttttttttttcttcaaggattttaccatttttaacaagatagagttgcaatatgtaattattagatggtagactgctgcaagtataaaccctgttatatccatttgtaatagaagctcttgcacaacataaagatacttttaccatgttctgtgcactaattcacagttctgtttattttagtgggcccaaggattttacttgcaagcaagcactcg

SEQ ID NO: 12261 - DNA, 993 bp, Oryza sativa
  Intron number 2 from transcript LOC_Os05g06340.1 (locus LO C_Os05g06340) derived from phytozome v7.0 (chr-ID Chr5; po s 3246283 to 3247275 reverse strand)
tggcgcggcggcccgaccggccccagggtgcgttcttgttcttcttcttcatcatcgatgcctttctgaatttttatcagtgctgttgttgatcgtgatcatgatcatgatcatcagtgaccttctagatttgataaccttcggttcaattcttggacttaatggagtgatcttgtaaaacagtaaaaagaagagagtttgttggtggtatttagtgaccttctagatgagttttactacatgaaaattgcggttatttagtgttttttagatttgaaattctaagttttttgacttattctaagtatgagtttacttggtttagtggcacaagatgattaagttgatgatttatttggattaagctgtgagggagaaagatatggtgatgattgtcgtaatcatatattgagtagctgccctgtggaacatttcaggatctttaattcagtttgattccattttggtggttaggtgagctgttccttgcaacagtactaacctccaatccaaattccaaagtgtgaactgcttaaaaaaagggcagctttctttggttccatccaagctcctaatcccatttttaattgctcgggtcaattctctaatggcatccttatcaccatacctgtttctctgtcctggtaatagcatcaagccataatatagttcagagaactgaataaaatagattgccccaaaaaattgatatgatattgcttgtgcttattagcaccatagtttgacttgggctattattgagtggaggattgttgctgcggattatctaccattaaatatttcgacaaataaatctaataaatagcttaaaacaagtagtctaagcaatgcagtagaaaaaagctttttgagaaaaaaaaagtatagagtaaataatccatttcaataattcggtgaaaaatctgaaaagaactaagcctctggatgagcactgaactattctttttttggtttgattgcagtcgctttgca

SEQ ID NO: 12262 - DNA, 815 bp, Oryza sativa
  Intron number 1 from transcript LOC_Os04g03320.1 (locus LO C_Os04g03320) derived from phytozome v7.0 (chr-ID Chr4; po s 1406913 to 1407727)
cgaaccctagctcctctccatcatcgtcaacgaaggtctccggtggagaccttcgttgacgatgatggagaggagatcggcggcgaaggttgggctttggggtggatccggtgggcggccgttcgacattcgtccgtcggcgaccgtccctcgccggctgaacagcatcaccttgtaccactccgatggcgccatccactccttgtactacgactactacatgaaatcacaacggcgaggaggtggtggtgatgaactcaagctcgtcaaggacggtccatgggggcaacgatattcctatgattccatagcagtccatgacacggtactaattaattaactactcccttattattatattttattaatagtaatatgttttgacttttgttttcaaactattttttaagggttgaccgaccatgtggaaaaacatagccatacttttagtatatatgtaaaacaaacatatatcaaagtattttcaatattggttttaataaatcaattttgtgttatagagatgttgctaaatttttctatatatttgatctaacatagaaaacggtgtgagtagcttctctgtgatattttacttcttttttatctatatatatccattatattggtggatatatatacgcggctagttttcgactaacctcttgaaatcaactgccaagttaataagcatcccattagttggcattttcatgccagattattcttcatcattttaagtcattgcactagatgaatatgaaaaattatcaacttaattgtaatcaacgaattgcagatcaagttgtcggcgg

SEQ ID NO: 12263 - DNA, 862 bp, Oryza sativa
  Intron number 1 from transcript LOC_Os04g35810.1 (locus LO C_Os04g35810) derived from phytozome v7.0 (chr-ID Chr4; po s 21655545 to 21656406 reverse strand)
accccaaaaccaaaacattcactctctccgttcaggttcgtaccagaatgcagtaatttaggatgggtatatccaggttcctaccagaatgtaactatcaaaggatttattaagaaatttcataggattgaaatcctataggaaaatatcctatttgggcctttgattcaaatgattggagttttcgaaatcctatataatttctatggaatgactcattgcatgtaggttttggagaaaatttaacaagaggtccaacctcttggaaaaattcttttgagtctttttctttcatccgattcttgcgtttttcctgtggcccaattaaacgatcattcatgtgttttacaatcctctattttacacttcacatttctgctcgaatattgtgtttttctattcatctattttttttcattcctacgatttaaaagggccctgaatagaggacaataccctaacttccatccatgtattgattgagtttggtcttaaattttataaatcgtcatgaaagtttgtaatttttctttaaatgtaagaggtcacgaaactggagtacgggggtcattgtcttttgccttgggccaaatttgctacaggacactcaaagtgagacacccaaaaaatatgtatttgcttgtggacactgcaaaaatatggtaattagttgctgaacacccacctcattattttattattttcggtggtaatggagaaagaaacattggttaaagacaagtttgcccatggcccacttgtcaatctctctttctctatttctatgttcatcttcttcggttcttcctcctgcgtgcgtgctgctggcctgctaccttcgcaggccaccgcgtcccggtgg

SEQ ID NO: 12264 - DNA, 717 bp, Oryza sativa
  Intron number 2 from transcript LOC_Os04g46750.2 (locus LO C_Os04g46750) derived from phytozome v7.0 (chr-ID Chr4; po s 27536763 to 27537479 reverse strand)
cttgtatcttccatacagggctctttgtgcttcaggtaggattacttgctatatgggtttctcctttcttctgcaaaatttcttttaactttctccatgtaaggaaagatattagctcttaatctcttcattactaggaatgactatgaatcgacctcctttagtccattgcatctacaaaggcattctgttttgtttagcacttcatattaggggtgatctaactgccatttgataagtaatccttcattattgtttaattaaaagatctatgcagttttgttgccaactggtttactgcaaatcttttacctgaaattaataagcttggttttagaagctgcaagcttatattgaatctgttttcttcctggatattagtctttagctttctgttggcctttctcaaagcacagatgtatttttcaggggcgcgaaacacagaatctacaatacttcttaaatctaaacctatctaatgcacgggccaattgctgttttttttggcacaatattctgcagtaggcaaattcaaaatggttatgacaactcctactttgtgcactcattttttttgtcatactaaccagttgttacttattaatcaacctgattttctctagtccagaaccatctaaagttcatcaaatgaacctgaatattgaaatttatgtcgtcatgaatttttttttctttctattttgttttcagccctca

SEQ ID NO: 12265 - DNA, 454 bp, Oryza sativa
  Intron number 1 from transcript LOC_Os06g40040.1 (locus LO C_Os06g40040) derived from phytozome v7.0 (chr-ID Chr6; po s 23820673 to 23821126)
agaagccgctcttcttctacgtcaacctcgccaaggtcaggattcctccccctgttccttgttgctgttcgattttttttttttgttaccggattttgtgtggcggtttgtgatgaggcaatagcgagtggatgctgctgctgtttcgtcgatttgatttgaccgattcttgtttgtccccttatcccgcctaacaaagaagatcctttttggtgcttcgatccgtcggggggtttttcgtctaaaaccctaaaaagctgccctttgatcgatctatttctattttaatcttcaaagacctagcttttgaatcaagtgtcgattttgttttcttgttcgtgatttgcttttatgaatgtattggtaaagcaaatgtttgtgtcgcattacaataaatgtctacgatactttggagttggagctaatgttgtttttctgatgattgcagagatac

SEQ ID NO: 12266 - DNA, 678 bp, Oryza sativa
  Intron number 1 from transcript LOC_Os04g38490.1 (locus LO C_Os04g38490) derived from phytozome v7.0 (chr-ID Chr4; po s 22693887 to 22694564)
agccttgggtcaaagtatatagggttgttcacgtggtaagcacatctccacccccacaaccccacactcagccgtcacttaaaaaaccctgagagattccatgtattgctcacagctcacttgtcactccgtctcatccaccaaattttcctccgttgatgctttctggccggcgtaccttcttttttttctcttcttatctgctgcaagaatctgcaagaaaagggcgtgatgccatagctttggtatatctagcaatcttcggattaggttatctttgaaatatatattcctctcagttataacaggctttgaagttggcccatggttataacagattaacaggctttcaagttaccaaacgggaccttaatttatctagaagaggcgttgaagaggaaacacagctgcattatactccctccgtcccaaaataaatttatttttcacacatcccacacatatccatataaaataaaaagattaaaatacccctattttatcaaattattatgcaattactctttaatttagctactcccaatacaaccactccatactttcatgaactccgatacaatgattatttgaaaataaacttattccgagataaatgaaaataactaaaaatggcttattacaggagacagggagtacgacagagcaggttgcgcctgg

SEQ ID NO: 12267 - DNA, 409 bp, Oryza sativa
  Intron number 1 from transcript LOC_Os05g04450.1 (locus LO C_Os05g04450) derived from phytozome v7.0 (chr-ID Chr5; po s 2050775 to 2051183)
tcatccgcctcttcttccacgactgcttcgtcagggtacgtacaaaactatcatttataaaacatataagtttcgtagtaaattcatcaacgtgtcatatttggattggtttaattcaatttaataataacaatttacattcatgtttacccaacactatttctttaactatgttttaacaataaaattcattccagtctttattttaaagaaagtacatccaattattacacatatattacaaatcaaatgactcgaattataaaatcatagctcgattaaaatcaagaaaaccacttaaactacctgtttgaagacaaaggttaactatctaattaaaaaagtaattaatgaaattgtatttgcaataatagggttgtgacgcgtccatcctgctggacccgacgag

SEQ ID NO: 12268 - DNA, 128 bp, Oryza sativa
  Intron number 1 from transcript LOC_Os04g47570.1 (locus LO C_Os04g47570) derived from phytozome v7.0 (chr-ID Chr4; po s 28032408 to 28032535 reverse strand)
gccaggaattccgcgtgttgtgctatctgttttcggtaggaataagatcaaataattactgaaaaaaaaactgaaagttcttttgtgtttcaatctctcttcttttgtcttgtaacttttgcaaggcg

SEQ ID NO: 12269 - DNA, 932 bp, Oryza sativa
  Intron number 1 from transcript LOC_Os04g03500.1 (locus LO C_Os04g03500) derived from phytozome v7.0 (chr-ID Chr4; po s 1524009 to 1524940)
ggtgcgaaactcaaataagtttcaaatcagaatgcgcacgaattaatgatggtcagttccattcggtgcgtatacagagactgaaaattataattgcattatctaaaatgatgccactttagaaatattttattactttaatttgttatttaagttgaggtatataatgacgaaaattgtgggcggaacgaagtgagacatcatacactcattatgttccttgtacggttctaccaaaacatcgatcaaccctcatcaccaagcaaacgaaacacttggagcccctttaaatcatagaaatagatgaaaaaaaatgaaaaacaatacataattttggtaggaatgtatgtgcaaggattgtaaaacacaataaaacataaaaatgactatttgattagaccgtatgaaaaaacacaagaattatatgagagagactaaaaggaaaattttcaagaggttgaagctcttgctaattagtttcatctgaagtatctataggatttttttccattccatatgaatttcaaaggatagtatacgattcaatcatttgtttcaaagaccttcgtataaaatttttctatagtattgtaatcctccaaaattcttatgttttaatttcttcaaatcaaattaagggcccttagtccatacacaacggttggtaaaactagggtcaatcagtacaggttggcatactagtgattattgttaggaacacaaatttttcgaatgcacactcgttagacagtaaaacaatatttccgtaaccaaaacaggatgtatgcgcgtaacgtcgtgttctatatatataagtgggtcgtttctcccagctcttgctccatcgtagctagcttgtccaaccaaaatggcggcagcaggtaccgccacattcagagggtggcaatctcggcctcgtcaccaactacaac

SEQ ID NO: 12270 - DNA, 955 bp, Oryza sativa
  Intron number 1 from transcript LOC_Os04g21710.1 (locus LO C_Os04g21710) derived from phytozome v7.0 (chr-ID Chr4; po s 12271347 to 12272301 reverse strand)
cgttgccctcccctcccccactgccccgctcccaggtatggcgcttaccctccctccctccctcctgccgttctgcgttcgtgcgtgcgtgcgggcgggcggttcttgccgccgtcaatggcgcgccgattcgtcttcttgttgctgctgttttgcgtacatgcgtttcttgatggcaattgttgcttgcgctcttcttcgtgtggggaggggggagagtaactatggcccgtacgcccgcgtgatgttgagatggaacccgacgggcgggcgcccttaaatttcgcttttgatgcacgcggattcgttgggttgggttttgtttggtgtgtttttcttgggggacattctgctcgccattaacgccgcccatttcttcccttctcgtacggtcggagccagagtgtcaggtaccctcagatgggttggttgtttgttttgttcttgattgatttgattcttccgttgaattttcttcccaattttgtctctagaatctagaattggcaattgtttatgggtatcgctgcggaatatttgttgcgatgttcgtacggattaaggaaaaaaaaaaacaagaagggggaagaaagaatcaggggctggttgttggagcctgcgccaccaccatttttaactgcgaaattcgttgccgatatgattcttttttcgtctcttttgtttctcgatggagccgccgatttggatgtctcaccaacatttggataatttttattcttcagtgcgtcggccttttggggggaactattggggctcgcaatttgggatttcttatccttctttttttcttcactcaggtgttcttgcgattctttgccaagatctgcctgatctgttcatgtgttttctgttcttgatttagcttttgtgttgcttcttgtgcagctctgatccagcaggcggcggcggcggcggcggaggagaggcagcagca

SEQ ID NO: 12271 - DNA, 985 bp, Oryza sativa
  Intron number 2 from transcript LOC_Os03g39740.2 (locus LO C_Os03g39740) derived from phytozome v7.0 (chr-ID Chr3; po s 22113595 to 22114579 reverse strand)
aaggacatcgagggactcttcatcttagttttgcggtcagcacttttgagaggaaccagatgggactctagttttgttgtagagaggaatcctttactttttgatagagaaggttatatgtaagtgcctgatttcaattcctacagatttagtatattaacattgcttatacctgatactgtatttttttaaaaaagcatgtcagatgtgatggcgcacactcattcaaattttctagggtgttttcagaaatttgctgattttccaaagaaattttgaattgtaccatacaatattttgaattttctgcaatgctatcgttaatccctatagactcatttcaaacctgatttttttattgcaatttgaattttttacaacacaatctttaaagtttgtaacttctatacttaaatgttactccagagtcatcccctaatccccacgttccaaacatgtgaaatgcaaatctcagggtgaaaggggattgggtggtgggaggggattaacccaatcccccccccttgggtgaatctccctggggaaatcccccccctccccccttgttgctgaacgaagccttattgattcactctagcactaagtttcccgtatgtttattagaagcattcctgtgtaatcacaaaattgattattgcaaaaccacttgctactttctatgtctttttttcctgttatttttataatatgtgcaccttatttttctgttctatgatgggaaataggagagctaatgataatgtcccagcatatattatgatttcgtaatgacacgatttgcctattatcctgctctagtgctttaattgaatatgaccctgtttcatctagaaaaagaatatgtttcatcttaaagataatatggcttctgttattcatctattgtgcatacatttggtcataacatctggttttcttcactcctgcaggaaactttttgacatttacaattgccaagttgatt

SEQ ID NO: 12272 - DNA, 454 bp, Oryza sativa
  Intron number 1 from transcript LOC_Os06g49510.2 (locus LO C_Os06g49510) derived from phytozome v7.0 (chr-ID Chr6; po s 29990487 to 29990940 reverse strand)
gcacagactgattcaagtgaggttaggttttttttgtcaaaatgttttccctgttgcaatttacattcaaataagcttcctgtaacaagacttgcaagtagtagatctctgtcaaccatttgtattgcttgtctcccttttaataactgcatataatttgattgctgatagcaacttatctacagttgcttttttttcctgaagcttgggtaattaatatctgaagatagctcttgaaattgtcatcaagtggaatactatggatagagtactgaatattgaatcagcagttttaaagatatatatttctttatttgagcgtgtcaacaattaagatgcacatttttgccattgccaccttttctcactgtacttcggttaaacttcaaaatgttttaacacaaggaattctttgccagcctttgaagtgggaacttaggcaaaagccaggcat

SEQ ID NO: 12273 - DNA, 976 bp, Oryza sativa
  Intron number 3 from transcript LOC_Os04g34930.1 (locus LO C_Os04g34930) derived from phytozome v7.0 (chr-ID Chr4; po s 21057224 to 21058199 reverse strand)
ccctgaaatcgccgacttcgtggccgccttcctaggtactggttgttgctttactgttcatgatggaaacgtgcaacagttgaattattctgtgtctttgtgcaaagttgtattgcttactagaatgaattgcatactgtggtagtattgtgttggaggtcaccactttgtggtgtgggttgggaagtcgggagattcagatgtgcatacatatacttcatggagtaattgtggaaacgatttatctgcacaatcaggctgaatcagcttccttaatgaatacgcaaagttactattagtagagtgcccgttagtagagttttgtgctgcgtagtgtaatggttaaagtgtttatcttggaaatacttgcttcctaagatagccttgttcagtgggtttatactatctccttaataaggactagtgatttgattattttcaggctgctcataagagtttggttcccaagaagttcagttttgttcctatttttacttctaattgacaacatgatgcaacaattctagatgcacagaggatgttcattaactcatgcttcaatcaaaataaacactttgtagttatcatttatgagtgaaactgttgaatgtattaatgtaatagcattataattaaacatttgcacttttttataaggtgattgttaacattttaccagcagtcattgtgacacagtagtggaactagagaagttaagttctttccatgaagtgcttactatgacatataccataataatacgtcaatcaggataataagttaataacatcatgattgtttcccttttgcttgtttaaccaactaatcttctagtattatttttatattaggaaataagtataaagcctgctgttttatattttttttagtatttataattggttaacttgaatatccaatattgttttctgattacacagaaagctacagaaagaggattttccagttgttgact

SEQ ID NO: 12274 - DNA, 435 bp, Oryza sativa
  Intron number 4 from transcript LOC_Os04g27670.1 (locus LO C_Os04g27670) derived from phytozome v7.0 (chr-ID Chr4; po s 16179685 to 16180119 reverse strand)
ccggcagctaaacacagccatacaaaggttggataagttcagtttgttttattgataacacatatatgataagtgaagacaaacagtaatatcttagcctacaaatattcaaaataagatatccaaatttgatatggagcatatcaaattgacattactccctaatatatatttagggatcgagtagggaatgttcaaatgacttatatttatggatcaggaggaatattagatttgtcttgaaaaatactttcatgcagttatattttaaatacatttatgtatggatggcatatgattagaaaaattaatgattaaaactatgttctgaagttcgtgtcaatattttaattcataagaaagaaatattggatggaacatagtgacaaataatgtatcctagcatggctaattctcatgcaaaactaattgcag

SEQ ID NO: 12275 - DNA, 768 bp, Oryza sativa
  Intron number 1 from transcript LOC_Os06g29810.3 (locus LO C_Os06g29810) derived from phytozome v7.0 (chr-ID Chr6; po s 17162931 to 17163698 reverse strand)
gtagcgttgcgtcgcgccgcgtctaccctttccaggtgagcctccccgattacatcgctcgttctagctagctagctagctagctcctgtgttcttgctgtttctttgtttctttttgcgtttttaattttcctttcttggatctttctttgctagctcgttttgatttgtgtgcttctgtatttgtgtgttttgtgggcgaaaggggggctttcttggttcttgttccgggcgattgttattcttgttctggagaatcggattacgagtgtgccttgcagtggagttttgtaatgttaggctccaattgagcaagaaaaagatgaggttcttgttaaattctaggttatccagctcttgtttggttggctggtctggaactctgaattccctctgtagctttttactaggtaatggaatcccctttgtaatgcaaaatgtagatgcctctgccatggctatgttttatctttagatgtccggaattctcttctaagggagcctaaacacggcagttcagttcagattaattatgggtctgggtttgaagaaaagaataaagggagtgaaataaagaaacaaacaggtctgaatttgtgaccctgtttagctgaaagtgaaactgaaaaggggaacagaaaggaagaattgaccatcgatttaatgttaggtgttactgcatatgtgcaagcaaagattgttcttttggcagtggataatgctctgatggtctctggccatgatcaagtggttgtttttctctgcagg

SEQ ID NO: 12276 - DNA, 834 bp, Oryza sativa
  Intron number 1 from transcript LOC_Os03g52700.1 (locus LO C_Os03g52700) derived from phytozome v7.0 (chr-ID Chr3; po s 30215466 to 30216299 reverse strand)
gagcaggtcagtttcaaaccgagaaagaaaaactgaactgccacatcgttaggcggagatccagttcgattggtccatttccctcgatttgcttttcttcgttaaatttggggttcatctgatcccccccataccccacattaggtccaacctgcttcgagttgcttcctcactttaggaaccagggttcgattttcaaactgctctcggctttgagttggggtgaaattagtatggcgtggtcatcactcatcacagaagtactcctgctatggtagctcaacctcttattcgatgctaggtgtaactagtagaaactaggtgcaacatttgacttatcaatttggtttagttgctttttttttacaactagcttaccaattagctttcaattggaaacatagaaatcaagcacaatgtgttcaactaaacatatataatatgtttaactagtataatgatgccctaaaatttgaacacaactggtttagggcgttttagtgcaagctaatttaagtgaccatgatacaatggcaatgagatggttcatctgtgatgaatgctttgagcatctttagagaaatccaatcgggaatacattttggaaatttacatacctaccccaccctgcagacctgcacacctcgactccacacatagaaacacaagcttgcaggtgtgcacagatatgaaaatagcagttgctgcctttgtgctatcctacactggaaatgtcacgtgcctagtttctcaaaattttcctgcttatagaatctaactgctttcttaagtggttaaatcttgtgattagtttctgaaaaatctgtttgcaga

SEQ ID NO: 12277 - DNA, 1017 bp, Oryza sativa
  Intron number 1 from transcript LOC_Os04g02100.1 (locus LO C_Os04g02100) derived from phytozome v7.0 (chr-ID Chr4; po s 678696 to 679712)
tgcggcggcacgaaggcggcggcgtggtggagagggtagaggggaggaggaggggatggagtgaggagaggggagaacggtggagcttttataggggagaggggggagtaaggggagagggaagagagagggggcgggtgacgcgacggcagcgcggcggcgcggggtgcgaggcggcgatgggacgcgcgcgcggcgacgggacgtcgacggcgacggcgacagcggcaggcggcagcggcgcggcgcgaggcacaagacgcgacgggcgagcagcgcggcggggcgcggggcgcgaggcggtgaggggacgggcgagcggcgcgcgggcggcggcgagacgcgtcggcgaggagacggcgcgcggcgcgggacgggcgacgcgacggtgacgggacagcggcgcggcgacgcgcgacagggcacggggcgctaggcgacggcgacgcggggcgcaggtgcgaggcagaggagggggctaggctaggggaccacgtcgagcacctagagtgcaatgaacagtgtattttcctatttttcccatttaagtccatttcttatataaatttgattccacaattcctaatttttgcatatatgaattttactcaatatttgtgttatctcaactaatggattcaccctagattaatattactcatattttatttatataatttatttgaatttttaattagggttaattcttattctatcacatttaaatttaattgatacaaatatggtcgcgataatattttatttatttctatccacacctaatctttattttaaattatatttattttaccaatttatttttagggtttattcctaattaactattctttactcacgattaatgaacttcgaaatcaaatccaaataaaataggcgaataagatcggcatgatgtaattaatttaaaagttttcgaaggtccatatttttagagttttgtttttattggtcaaattttcagggtgttacaggttagtcaaggcgaaccctccccat

SEQ ID NO: 12278 - DNA, 790 bp, Oryza sativa
  Intron number 2 from transcript LOC_Os04g41770.1 (locus LO C_Os04g41770) derived from phytozome v7.0 (chr-ID Chr4; po s 24566060 to 24566849)
cgtggctgcaccggtggtcttctctgtcaccggtgagcactcgtgaacaaatactatcagcttgttaatcagttgccgaaccttctattgttttgtaccacgcgaaacctgccgttgacttatatccatagatcgatcctcacaactgcatatacatgcagcagttagttgtataatcattttttttttgaacgaaagttagttgtataatagatctgtttggtgtgtgaatgtctcttttgatccttcctgcatctacagtattatcacctgagttaaatatcagatagcaatttatgaatgaacttgataaggttgacaatgcatatatagatcaggtgcacaccagagaggattgaggattcaaagctcaaatcttctgctgatcatgacagtgaatttctagaaactaacagccaaagccaatctgcagcgatctgaaccactttcatttttagtcatagtaagtagttacacctggctcgttaattctctccgaactctgaactctgtacagcgtaatactgttcttcattagttcactacttcactgcttaagaaaccactgctttgccctttaatcgctgtaatgtcgaagctcagttctgtttcgagctacataatacagcaaagttgctttgcgttcggactttttctagttcaattttcagttccctataacagagaacccctttcctctgttttcaatatcatttctcactttgtgacagctcgatcatatattgtgcgtacaggccttctaccaaacggcaacttcgagcacgggccg

SEQ ID NO: 12279 - DNA, 509 bp, Oryza sativa
  Intron number 1 from transcript LOC_Os03g40670.1 (locus LO C_Os03g40670) derived from phytozome v7.0 (chr-ID Chr3; po s 22614591 to 22615099)
gctgccttctgtaagaccaaaatccttctcttctcctcagctacagttgcatttctttcctcttcatattgacaatagtttacctctgtttattcaaaaaggaaaaaaatgcacctcctgtgtgcttcacatcttcctttcctgtcccatgctgtggttccaatgctcctcttggcagcatctttttacatgaacctcgatgtatgtttatgaaatactaggtatctgaatctgtagctctcatggagtaattcatatattttcttcaagttagcactgaagcatttctaccttatatatgttcttcagttcatatgatactgatggtaatgcatctttctcgtggaatgataactatcaaaggaattggcttcttcacttctctatttccttgatcaagaatgaaacttccaacttttcagcgtacttgaacaattcaagtctagtactgttaattgagtgttgtcttgacagggctcatctctatcattgtccttgtactactttct

SEQ ID NO: 12280 - DNA, 988 bp, Oryza sativa
  Intron number 3 from transcript LOC_Os03g60992.1 (locus LO C_Os03g60992) derived from phytozome v7.0 (chr-ID Chr3; po s 34644806 to 34645793 reverse strand)
caagtgtgtgtttcttgggctcaggcgttaagcaggtgcgattcttggggttctttctcgtttctgcttgtgcgtgttgcgttcttgcatcagaacgtacatcagacgtaccgtgcgcatgacattgttttgtttgcccctgtttgcgttcttgcacgagatcgtgctttgctatgctcttgtttctcgtttctgcttgctcgtgttgcgttcttgcaccaaatcgtgcatgtacgacgtacgcacgttgtttgcttcgctcctctattcctcttctcttgcctatcacgcaggaatctttgatcagttgatttcttgcacgtacacgtacttaccaccggtcagactcagatctgctcgtttaattttgacctgtttatcgacgatccatcacctccgtccttatttttccttgcaagttttgcctgtgcaaagtcggtctgaaaagcagaagcaggtgtgttcttttggagtatttctattttcagctttgctcgtccgcgtagcgtccctgcacgcaccagattcaaggaggtgtgtttcttggggatctttctttttgtttctgcaagtgtatggttcttgcaccaagtcgtgcatgtatgttgttttctttgctcctgttcatcgatatttgggcctttcgtttgctgcgaagcttgcagatttccttctctttttaccgaagctgtggttccttttttttttcagagaagaaattagaaatacaacggattccagttgttcttgtgagatattttttaggattttgtttgtgacgtcctattcgatcttctgatgcaccaaatctcttattaatttccaagctactgcttttgttactgttgaagcttcagtttttttccctttctgaaacggaagcttcagttttctggttgctttgaaactagtaataatagttttgatggctaatttggtctctgtttgcggcaaattgcagacgaagctggtcaagatcgccttcagg

SEQ ID NO: 12281 - DNA, 825 bp, Oryza sativa
  Intron number 2 from transcript LOC_Os05g35000.1 (locus LO C_Os05g35000) derived from phytozome v7.0 (chr-ID Chr5; po s 20727997 to 20728821 reverse strand)
acaaggacgacgactacgacgccctcgccgatcaggtcgactgggacttgatgagcacccggcggtgaatgccctgattttccctctctttcacggtaccaacaactgaataacccaaccagattatttttccaacttaaacaaatgagcagaccaaagcagtaagaacgatattaaccggcagtatgtatatgagcgtcgcagtgaattgattttgtctctcaaaacaaacagcaataccagatagtagttttaaagcactgatacggatcaacgatctgcaactccacccgtgtggcaacacacacgatcagagaagatggaaccaatcctgactccaagcaacactccctggagaagtatcctggacgtgtgctccctccacacctcacggcggcagcggcaaatcaacaggatgggatcgccatcctccagttccacaggaataaaccctagacgacttcaccaaaagcaaaaactaactctcattacaggccacattgggcttttatgttgcacgcaggcaatacaggaccaaagtcctactcgagcaggcccaaacaaacaaataaaaagtaatctaattatgtgattaatggtaacgatgccgctaataacacttaccttaattaacctataaaagtactgctcgcagctaggccttctcctttcttttgttgttgcacggtacaaaagaaagatccaacctgaacaatactcctagatgagctattatgcaaacatgtagaagcatcgatagagatagatggaactttgatggtctcatcaggactgggaggccacctacttcgtccagcaccgccc

SEQ ID NO: 12282 - DNA, 438 bp, Oryza sativa
  Intron number 3 from transcript LOC_Os05g24594.1 (locus LO C_Os05g24594) derived from phytozome v7.0 (chr-ID Chr5; po s 14124589 to 14125026)
tcttgctgcttccatcatttcaaagtccgggaaaggtcagctggcttgaaatattctgttgtttatatattgtattgtattattctcagtgccgaaaagaagtttttttaatttatattgttatattgtaatcaaaacaaatccttttgttcatagaaaaagaaaaaaaaagtatttgtataagtttttatcattcacctatgctaataagagtgttagctcatatgcaaatttgtggaacccaaatactaaactagctgttatcgtgttacctcagtagattcttaactcctataaccctaaaatcctatgtagtgagcacctcctggttaccaatttgttgatgcttcattccaggaagttaatgtgattagactaaatgctgtttcttttctgtgcttttcaattgcagcacttgtttcaagacagtttgttgac

SEQ ID NO: 12283 - DNA, 697 bp, Oryza sativa
  Intron number 1 from transcript LOC_Os03g47540.1 (locus LO C_Os03g47540) derived from phytozome v7.0 (chr-ID Chr3; po s 26875103 to 26875799)
gccaaaaaaaagcagcaggtaagttgcttgcgtgatgttggatttggcttgggacgctgcagatcctttggcgagtggattatcactagatgcagtacgtacgtacatgcgcgggatcgtgctgttaacttcactaggataacaagaagatacacacttcttgcaaaaaaaggagaagcaaaagaaaaaagttgcttgcaaatatgcacttcgttttctttgcacttatattaatattcagtgctgttttttttccttttttgagattgagagagacatgcaatgtttattcggtgtcacattgtgagatgtgagagttccaacttgcaagttgtaagtgcttacgtattctgtgtgatcagcagataagatcccggttaacgtaaaaggaaaagttcacttttaagttctttgtctaagtgtttagtttgaatcgtgtcccttaatatcctttctctctcgaaatcaatgcaaacgagattccaaacggtattaaggtcagtttcaactcacgtgacatctatatggtttgttgacttagtctttatcctacaaggcattacatgcgaaaataaaaataaaatccctaattcgggacctacatgtcaccgagatatccttcatctacttctccctctcttcttacacatgttgtattcaaggtggtgagctcaacgagaggtgctcgtcggcgtcg

SEQ ID NO: 12284 - DNA, 1013 bp, Oryza sativa
  Intron number 1 from transcript LOC_Os06g05130.1 (locus LO C_Os06g05130) derived from phytozome v7.0 (chr-ID Chr6; po s 2273815 to 2274827)
ttgatttgatttgggcgcgtctcgtggagtatccggtgagttcttggcgatctggcgaggcgagtgatgagtgattcctgctgctgctgggggattttggcgtgattttcgttggttgcattttgtttctttttttttgtatcgatttgttggagctttattcggtagatctggtcgattccatggtgagttgtatcggcgccggagtgatagctgattctgtttttttgtgtgattttttttttgttttggaaatagggtttgtgtcgaattgagggcattttttttccttaggcaatgcaggatttcgttttgtatgtttttgcgtggaatggatatgaacagacctcgaacaaatggaagaatttgtattttgtatgatggattgcaatgcgatacttgttttggggcgtgattcgattgaaataaatgaaatattagagttattttgggattcctgtttgctgcgcctttttttttagcatttcttgatatgaacaagagaagaagggctgaatttttttcttagctttggaggcatttactgtcccagtattttctcctaccggaagcagaatattttgtttgattggagggttgcctccctttgccaaattgaatcaaatgttctcggatgttttaaaatttccgtggactctttttgccccaggggagaccgcttttagcagctggatcccgtgttttcatttcaagttcttgttttcctagtctccatatatttctgattgttaactcgtattctctacctcacatatgcaaaatcacacttgcgtcgttctgtaattagttagattctgcaagaaaaatccggaattttcaagcatgctagtagttttaaattgatgccatgttttttagacaatgttaattgatgccatatgactataggacacattatattgcgtttctgaatataccacctcatgaaactcataattttgttgattaattgttcaggttgccccttctagtgtgtaacttggagcaaattt

SEQ ID NO: 12285 - DNA, 585 bp, Oryza sativa
  Intron number 1 from transcript LOC_Os07g09700.1 (locus LO C_Os07g09700) derived from phytozome v7.0 (chr-ID Chr7; po s 5161353 to 5161937)
agttctgttctacttaatgtattttcaggagagctttagttggtcagaatcttatattttggcatgatttgtgtgtttctattgtacatatccagttgaatcaatcttcggattgtttctcatggaattataatcagaatggtcggttctctgtaaggtcaatgtatctagctttgattaataactgctatattgggaggaataagataatttggaagcttaagattaaaggggtggtgttaacgaaagataatttagcaagacgaaactgaaatggtagctcaagatgtcgtttctgtatgaaaaatgagacaattaaccatctttttatcgattgccattacgcaaaattcatatggagagcagttcagttttattttggcttatacattcctactagcatttctcatattttttatgggtggttgttaggagaggacaggaagaaaagtaaacttatattgctgggagcttctacgatatgttgggctctatggttgtgtaggaatgacgtagtttttgataaataatcatatgttcatatatgtaggtaattttaggggaacatattggctccggttttgg

SEQ ID NO: 12286 - DNA, 958 bp, Oryza sativa
  Intron number 1 from transcript LOC_Os03g51600.2 (locus LO C_Os03g51600) derived from phytozome v7.0 (chr-ID Chr3; po s 29519368 to 29520325)
gcatccaggtacggatccgcgtcccatctccctcaccccccgtgttcttcgtgcctgcttctgggtcagatctgggtggattcgcggttgttggatgtggggggctgtgtttatttgtcggtggatctggttgtctggatctgcgttttctctgtcgtagttagcggatctgatgaaatgtttagtgttcgtgtatactggtatggtggatctggtcctaggatgcgtggaatggatatatgtaggcgaattggaggatttattttgtgaattttgctgaaatgatagttctaaacactggatctgacctcgggatgctgttaaatgtggaaatcatggtcgatgctgtcatgaacatggtgttcttatggtagatctgagcaatgtatgtttcaaaattgtttgtcacatggaaatgctatggttctagatgcaatagaatgatacatgccgagatcccctctagttgatatgatagatcatgatgttttacagctatgtcatatgaatatgttcatttgttaccgatgtatttggatctacttaacatttccaaagcacgccgcgttctaattctagatctggtagtcatgtttgtacacgtcacccacctaatacaaatacatatgtctagtgtttggtgacactgcccgtcagatctgttttttccagatctgtggaacaaatactccacgcatgtatggtagttttgaaacgatcttgtatcttccattgttgtagtaacaactaaataaagtacaattgttcaattattgggaatcgtattttctgtagtgccgatgtacagcatattcatagatgtctatttaggaactcaaattttaaattgaggactagttatttattgtgggtcagtcttttgaattgtgttatcttgctgtactgaaataataatgtaccactaaggcgctaacatgtattttgtcctttcaggctg

SEQ ID NO: 12287 - DNA, 1041 bp, Oryza sativa
  Intron number 1 from transcript LOC_Os06g19400.1 (locus LO C_Os06g19400) derived from phytozome v7.0 (chr-ID Chr6; po s 11046302 to 11047342)
gcccaagagcaagaagtccaagatcaaggattacggtaaattcatggcacccccccccccccctaatgttatcttgagttcttgaatttgcccttgtttcaagatatgaaaaggtattatgctgctgttttgcaaattcatccagcttgtgctgttttggatggtttgcctcgtgatggtaatgtgttgcttttacctttgaagtggagctttgttactccctccgtttcgctttgactgttttcatagttaaactttgtttagtttgaattttcgatcaagtttatagaaaaacttgccaacatctaaaataccaaattagtttcattaaatctaacattgaatataatttgataatatgtttgtttttttttgttgaaaaatactactatgtttgactatgaaataaagtcgaagcgacttgtaatataaaacggagggagtacttatagagtgttggatgagtagctgtactagtttctcactttctttttccttattgttcttttttcttggcaatagtctcctaccatgtctttatttactattccatcttctcaaatagatgatgtttaatgtgtgcaatcaaacatcgaaatcttaaaccactcatataggcaaagatgttaagatttggtattcaaaaagaagccattagtatatttggtacgaaaacactttcatgtaggtatgtttccaataattttatacgcattggaaaccattgaaataattaatagcattattgacaaacaagaaattaagccatctacacaattccgtttttattggagttatggttgtgatgtactagtatggatatgttttcgcctggatgatatactagcactattgtttgctgttcaagcttttctatttgtttttattcatccaagtctccagtccttctctttccataacaaagcccacttttgtttgcctatatccaattttatttatgcatgcaagtaatttatatactgataacaggcaacaacttctgtaggagaaattcgtcttacaatatctctctctctaaat

SEQ ID NO: 12288 - DNA, 667 bp, Oryza sativa
  Intron number 2 from transcript LOC_Os03g62850.1 (locus LO C_Os03g62850) derived from phytozome v7.0 (chr-ID Chr3; po s 35549129 to 35549795 reverse strand)
aacctccttcagaattgacttataagcaggtacatctttgaactttactaacgatattgtttatatctgatgatctagacaattcttccaaaatagaaacaccaagtagacaattgtactatatggtactcttttcttactgcatagttacctgaaaacttttgccgtaaactgtaactctacatgtgcgctttccaaagaaagaactaagcctttatggttgacaactgataagaacaaagggtcagctaaagttatctgcattctacatccatattccagttggcaatcctttaacagcctcatcgtattttttcgcttatacttattataggcgaaacaacttattagattaaaaaataatttttgggctaaacttttatatacatgttcttagtgatttaaaagcaaacgctgcaaaaaaaaaactatggtaacaaaaacctcaaaatcaactgtaaaattaagttataaaattcaaaatttcgcttatgcttataagctgaaggctaaatgatggggttgtatattccttcttttaattatccgtgtgtgtgtctgtcagttaatgcactagtatcatatgccatttcacatttgagtttgacatgttaattattgtctttaatcagcttgaacaagaaatattggatttttctcaaggtct

SEQ ID NO: 12289 - DNA, 1012 bp, Oryza sativa
  Intron number 2 from transcript LOC_Os07g01450.1 (locus LO C_Os07g01450) derived from phytozome v7.0 (chr-ID Chr7; po s 291890 to 292901 reverse strand)
ctgtcgcatcctctgcaagaagcgaacccgccaaggtacgataactctatataccaatccttaacttgttcctttttgctttccatatttatttgtagcacatttttgttatttggtcattgtttgtgttatcattggctagcttctcgtcacttggagtataagtgtaatggagtagtacgtgagattaggttgccttttgcaacacatacaactatataatgtccttatagcatgtgcctgttgaaatttgattgcggccatcaaattaattgatcttggattgataacccggccaagagttgtgactatgatcgatcacaatgatttatatatcacaactattgcatatttgcatgaggtgctctacaagaggaaggaatttggaaagctcaatatgttgtaagtgtgcaaaccatgacaaccaaactcaaattacatggaaagcaatgaaataacatatatttgctaatcacattgagatatatatcccacgttggtctacaaacacgacgataagtttgagatcgatatcaaaccatccgaggatgagttggtctattattgtaataaaagtgtggaattaacccttatggtcatctgttgtgaatgtacgtacaaaggttttatgtcattgtttaatgaaacttgagcttgatccatttccttttttggtgtaaaaattatagcatacgcatgtttctcccaaacaaaagcaaggcattactagtactattttgtactttgttcttaacttggtcataatgattagactaattaagttaaactgagcattggcatggcatttctttatggttcaataagcacaatagcgaatcacatatttgattaaaaactgaatactgaggctttgtttatgtcttgttcagtttgatctgaacatgtatacaattttgtctcttctttgttctaacgcatttatcatttccctagtatgttgccatgtgcaatctttcattttaatttgcttcttctttggcagttgttcagt

SEQ ID NO: 12290 - DNA, 884 bp, Oryza sativa
  Intron number 1 from transcript LOC_Os05g32830.1 (locus LO C_Os05g32830) derived from phytozome v7.0 (chr-ID Chr5; po s 19164667 to 19165550)
ctggtgcaggcgctggagtgctacttcgagctcgccgtcgccgaagggagggcctccggcgctgtgcttgatggtgtcccttcatagtctaagggcaactaagtcatttggctgtgccgttacccaccgttagaaccaaaagcggacggaatggtgtgaagggcgcgattaagttcgacgatgacataaagggaggctcgaattttttaatagcacagagacgggcatcatctttttttttatggcattcaggaaaaacctctatattttttgggccgcacggagagaggcacgtgtgggtacggcatccacggagagagaacgttgtgacttgtgacttcgcgagctgtgacgattttgtcttgccaacccatgtgttctcttcaatgtttacttctgagagatctggagatggatggatttgttttcactatcaggcctcctttgatttgattgatgaaattcgtatagggtttggatatgcatgttttgtaagaaaatagaactccctccaggttgataatatttatcgttttgaacaagaacacggtcttcaaaaaaacaactttaaccattatattctattataatatgtataaaactgttaacaaatatataattttattaaagtattttttaagactattctatatatatgtagtcactatatttgaaagacaaatattttaaaaatgatccataatcaaagattttaaagtttgacctcaccattgtctaaaacaacaagtattatcagccgggaagagtacataaatttgatggatttaagagagaagtgaggctagaagagaggactccttgaaggtttgagtcatttcttaagggctttgtgtgtgtttgttttcaggtaatttaaaagcaaa

SEQ ID NO: 12291 - DNA, 548 bp, Oryza sativa
  Intron number 2 from transcript LOC_Os06g21620.2 (locus LO C_Os06g21620) derived from phytozome v7.0 (chr-ID Chr6; po s 12474201 to 12474748 reverse strand)
atttcatagggtagattatgaataatgtcgatttatgttggtataacacaaatttttgacttctgaccttgggtaggaacagtaccctgtggatgccattcatcatatttacaactgtctttgaatatgccacgtcttttcttgcatacaaaatcttatagagagttttgtagtgctcaatttttcacttcttttatgtttgtgagaataaatagtttagaggattatgggtcggaattatattattttttatttgtttctctgtttgccactgtaccacctatgcatgattaagtacttatctaatctgttaatgtacagtcaaaatgatgtgtagcgtttatgtaataatcgagtccatatacaggagatcaatatatatttctcggttttggcgatgtatagatagatcctatatttcttggcagcaatcatctgtttgtcttgccttcttcctcacactccacatgtaaatgtcttgattttagtgtgctaggtgctcaatgaaattcccatgtgaacaaatttctgtttttgtctatcaggct

SEQ ID NO: 12292 - DNA, 560 bp, Oryza sativa
  Intron number 4 from transcript LOC_Os05g43360.1 (locus LO C_Os05g43360) derived from phytozome v7.0 (chr-ID Chr5; po s 25152965 to 25153524)
ctgtaagtcccttttttatgagctttcgatgatcaactgttttccgcctttaatgtgctatatcctgttttcaatacttcaattttcagaaagtgatgtacctcaacatttgttagttgttacaacccacgttagctatagttatattggacttgcttagcagacattcataaatcaaaaccttattgcactggccttgtttctgttcacttcttcgtcctactgaagatgggtgacactaggaaattaggagccttaatagtaagaggcattggagaatgggggttggcaatcacaaaagaaaaagttcttgtcagcatatcagttgacatatttatataattataattacaattgagttaatctcctcaggactaggactattacaataacattgctactgggagtgttatagcttatgttacattttagatattttgtacatagacccaaccaccattccaccaccactgtgctcacaaaaagcatttctgacaatactattttcatgtcttggactttcagattgctaagatcgttgaagttgcaccaatcagagt

SEQ ID NO: 12293 - DNA, 914 bp, Oryza sativa
  Intron number 2 from transcript LOC_Os04g09960.1 (locus LO C_Os04g09960) derived from phytozome v7.0 (chr-ID Chr4; po s 5354124 to 5355037)
aagtaacactcttccaacgtggattagagattcaggttagtaagtaaagtatagaaagacaactgactacctcgttggtatagaccaataatttgagattgttaagattgttcaaactaaactgcttaaagtgtagccaaaatgggtgacatttaggataaaaattaggcaaaaaattattaactttcaccattaatattttctaaaatactaaacttaaaaataaaatgtaggattgaacaagaccaaacaaacaaacctaccagaggaggggggaggtgtgaatggtagggaaaaccaaaaacccaaaatcttttgtggaataaaagatttacctcgaacattgtagatgaccaagctctgtcactgccggtcaaaccgccccgaagccaccagtcagaccgccacgatgtctgcggttagaccatcgtatccccaccagttagagcattgccttgctgtcagccaaaccgtcgggaccaagaaaacgtcggtagataaaaacttgcagatgtagattagtatatgttgactttattgcatcaactagtgtttacaaagtgtaccaacagcactccccaccaaaatcttgaactaactcgaaaccctaacttttctcttaactcaattctctctaaaatcgataccaggaggccacaccttccctctctatttatacacgaggtaggttgtgcagagcacacgaatctaacacaacttagggctcccaaccatgtgggaaaccctctcttgcaagtatcaaacttgtcactttccttatctctgtcaatcttcctgaattcgaactcccttccaaattcgacttctcgttccatacgtacacaattcctcttgtataccatatggattcttcatcaccacgtgcattgttctctagccttttagtatcccgt

SEQ ID NO: 12294 - DNA, 468 bp, Oryza sativa
  Intron number 2 from transcript LOC_Os05g46270.1 (locus LO C_Os05g46270) derived from phytozome v7.0 (chr-ID Chr5; po s 26770762 to 26771229 reverse strand)
agcatctaccagttcctcgtatgcccccatgtctcctctcacattctgcgagttggctttgaaatgtgctcacttacttggggtttagggtttcttaagcctttgattgcgcgagagagattgtatttttttctatttaactgcccagtgttgtaaggattcctcatttcaaattgctctcttagaccaaatcgggttgggtgaaattgggatacctccattgtgcctcatattttcttctttggtcggctatatttattaacattaaactaaacacctctagcattggatgttttgctttaaaaatgggagtagagcatagcaattccatattacattcactatatgttctgtgtgcaaatgcttgacaagttttggtgaggtattaggaaatccttacccactgctttataagttgggacagctttttatgttttacttgtatagattgtagttggaaggacgggg

SEQ ID NO: 12295 - DNA, 1004 bp, Oryza sativa
  Intron number 2 from transcript LOC_Os06g19180.1 (locus LO C_Os06g19180) derived from phytozome v7.0 (chr-ID Chr6; po s 10919055 to 10920058)
aaggctgttggcattgtgtacagtgaaggtaagattatgcacatcagaagttcaggaaaaaaaaatctccccatttataagtaatataaattctttgacatatagatatactttgtgcagttttctaggtacatgcctaaatctgatatactctgaattttttgacatttttgctattgactttggctgtaatataaattctctgaaatccaaattttgatataagttctgttctgaatacagtacatatgcagtacatattctttgaaatgcacctgcacatatgttctcctagttgttcaaaaatggttttaaatctgtactgctacttattgtaagacagattacttgatagattatatagattctatattgttaacagtttctatagattctataaactgaatcaaacatatactaaatctttgatgtttctgtaaagtctcaagtctacaagatgttagttacatatttttagtattgaaattacagtgttttttttatgtaattcttgtacaaaatgactgtaatttaacaacaaaaatttagaatgctgctgaatattctcaatatagtgatttgaatcgtttatggcaacttgtagcaatttttagtttatttttaggttgtaatgcattatgttattcggattttgttgtgctatgaatttctgaatttcctgctaatcagtagatatgcaatgatttgtctgttttctgaatattctcagtgagttatggtctgaatttagaattctttgaagagcaaaaaaataatctgaagttgtatttcattgctgcctaaggatgctagattgcaatctaagagtttcctgacaattgtactttaaatagtcaaaatgctagcttaagacaattgtcatctttttttgtaaccatctatgtctctgacattgatcagcaagtgagtaatgtaaagagagtggtgtatttgaatttttttttctgtctgatcatccttttgtttcctctctaggtgactga

SEQ ID NO: 12296 - DNA, 503 bp, Oryza sativa
  Intron number 1 from transcript LOC_Os03g62500.1 (locus LO C_Os03g62500) derived from phytozome v7.0 (chr-ID Chr3; po s 35384141 to 35384643 reverse strand)
atttttctttcatctctgtgggattttggctccaggtactgtggctccagattctttgatcccaccagagagaaaaaaaagggtcgttttttaatgctccttcggacccggtttgcggcggtttggacccaattatcgagttataggatttgggatggatcgcacggtttattttcggaggatctttgggccatttttgagattgatctgttcgggatttagtgcaagttttgcggtttttcttgatgattatttagtggcccttcttgatcgctgtgtggctggaaatccggatgccttttggagtagtgtactaacagacgaattatgtgtttcgtacttgagtgcagtgtacttacttcctgaagattttttggatgttcttcatcagttataaattgatgaagcaacttttacaagaaaaatttcctactatgccatagaaggttcatctcgatcttgacacatttttatggaatgtgtatgcagctgttgctgaagtg

SEQ ID NO: 12297 - DNA, 880 bp, Oryza sativa
  Intron number 1 from transcript LOC_Os04g34100.1 (locus LO C_Os04g34100) derived from phytozome v7.0 (chr-ID Chr4; po s 20481935 to 20482814)
cctcgcgcgcccgatcgccgccgccgccgtctcaggtcctcctcccatctgactcttcttgttcttgctgtttcgctaccttgtagtcgatgatgatgatacctccttcagttcgtgtttggggtggattgggctgacgatgcgtgtttagggttctgtgcgtgctgcttgcttgtgcaggctgattccagatttgtgtttgccgtgtggtagaatctgattgttttgggggatttcaactccgagagattggatttgagatgctatcgtgtgtggtgataataatttgccaggaagttattggttgtaaagatacaaggttcgggggtggcgggggtgccaattgttggtcgctgcgttgtagttaaagcatcaataggaaaaatgttaacactctgtgtataaaggtttacatttccaagctgatcctgaacttcacttcagatgtgttgtcctgaagtgttgttcctgctcgtgttgcatctttgatcacataataacaggcaatattgtttaaaatgatgttgctgcaaaccaagaataactggttcaaaacagtgagatttttcacttgattctgaagtaaataagcttattattctctaacctttttgtcaaagaatacgttgacgggaaaaaaaaccactgtttgtcctttatatgccataagtgtataagaatgggagaagcatggtaagaggatggttgacaaagagaaatatatttggaagagtcattgatgtcatcttgccttttgtggtcttcattttgctgcaatgtaacactgttgccttagttcaaaattgtacataccccaatatcaaattttctgtgctcaatgttgtttaacttatacttgttttaaattcaggtggcaaca

SEQ ID NO: 12298 - DNA, 980 bp, Oryza sativa
  Intron number 1 from transcript LOC_Os06g38870.1 (locus LO C_Os06g38870) derived from phytozome v7.0 (chr-ID Chr6; po s 23065731 to 23066710)
cggcaaaaccggcggcacgggaagcagtggcagtacgtacagtacttgctacatcttaaaatataaaaacatttagcattcaaaacttatattaaaatatgacaacttttcgatctatgttgttttctcaaccgatcaaaacactccctcaattattttctttacctatatcgtttccttaatcactaacaacccttcgtcattaatttaagagcaaatttcactttgggccaccttttgttaccgatatttcactttggaccaccatttaagtaatattttcactttggactagataaacctgcctttgtttcactttggaccacccgactctcttctcaagcatatgaaccatctcgattacatcgtctctctactcgttaatgaactaccacagctatatgtaagactatttcttcgacatattacaagttggatgtagattgataaaaaagtaagggtggtccaaagtgaaataaagataaaaatacccggtctaaagtgaaaacattagtcctaaggtggtccaaagcgaaacatcagtaataaaaggtagcccaaagtaaaattaactcttaatttaatttcacatatatactctttttagggagaatttgaaccatgctacacaaattttgcatgccaccctgacccatatgtcattgactcatatgggtcttacatatcattgagatatgggtggcatatctcaaattttgcaaatatagggtggcatggttccaacaaaacccatattgaagcctaaaacttcttatatttcttaatacctaataccttattcaagcataaaaacttcttatattttagtttagaacagaggtagtgtaccattttctttacctgttagccatgtatactttatttaatttggtttctcctagtttatatatggcttgcttactttttttttttttgtgtgtgcaggtcgaccaactggtacgggtggtccgtctaccgca

SEQ ID NO: 12299 - DNA, 411 bp, Oryza sativa
  Intron number 3 from transcript LOC_Os05g02350.1 (locus LO C_Os05g02350) derived from phytozome v7.0 (chr-ID Chr5; po s 763002 to 763412 reverse strand)
gcagccttctgacgggaagagatttgtcaggtacaatgcaacttccctcttctgacgggaagagatttacaaagcagtacacaactgctgctgcaatgctagtactacagcaacaacttcagaactgctcctctctttattaatcttcatgtttcaaaaggtatcaaaaagtgagaacatagttactgtttctccacgtctacttcacgagatggaactcaactctgagcttttgcagagcatctgcatactagcagtaatactactactagcttgcacaacctgaagaaaaaaatcagatgtttgtaattgaggtcaatttggtttgtttctttttacttggtttctttaatctttttttcatattcatgtacaggtggttggctggtggagagctctgaaaatctgaga

SEQ ID NO: 12300 - DNA, 737 bp, Oryza sativa
  Intron number 1 from transcript LOC_Os06g09400.1 (locus LO C_Os06g09400) derived from phytozome v7.0 (chr-ID Chr6; po s 4748118 to 4748854 reverse strand)
tacaccagcaccaggtgattgatgtcgtcatggtgttcgtattttccttgcattttcgttcatatcgaggatccctttcatttttctgtttttggaggagatttcatttttctggatgcgtagaatttttcccccgtgattttggtggtttggattgcattcttttcaatgtcaacctaatttattcttctgttcattgaatgattaaggtcctgatttctttcttgcagacggcagccacccggcggcagaacacattaacgaccttaactcaacccagcgacaccagcccatatatgcattgggaaaaagtttttgtttagagattgtgatttggcagaatcgggtatatattactaaaaaatcagatctgtgttacagtggagtatggactgtactttgtctttgtaatcagcttcacttgttctttttaatttggaaatacatttcgcttttttgaatctttgagaacaaatactgatactgacacttttggatcatcatacatccacggagcccagtatagtttgtgctggtgtgtactggagtaaaaaaataaatataccgctactaactttaaaaatatagtatgtacggctactaacattaaaaacagtatgtacttaaaaaaaaaggtatatactgctactgacttaaaacacagtatgtactaataaataaaaaaagtatatataaatatagttgtgtttgcaaagtgagcgtagctcaattggtta

SEQ ID NO: 12301 - DNA, 993 bp, Oryza sativa
  Intron number 2 from transcript LOC_Os06g04710.1 (locus LO C_Os06g04710) derived from phytozome v7.0 (chr-ID Chr6; po s 2058095 to 2059087 reverse strand)
gtgctgctgacatagagataccaagccttccagaggtacaccataaataaaatgttgatgatgaaacatcttactagtagtgtagtacaagtaaattatgacgattactgcttgaatcgcacaaatcggtcgaccaacgttattaaagtttatgaacggagcactttgatgctataacctcctacagctgctgcattggaactgtttttccagctgttgcacttactttcaattacaagttgtgtccacataatgcttgcttctaagctggtggttcttaggctgggagtttctcaagtcaacgtcaatgattagcctttgccactagtctccatactgtttctaacttccttaaattttaacatctcaaaaatggttccttgctaacaaatgtgacatgttatctccggtaggccattgcaggcagtacatggtaattttgtgagccacatgtccttgtaggatggcattcttgtttgattccccgcatctccccatcctgactccccgcatcttccccatcctgagttcctgacctagtgtatgaaaatccaagcaagcaaccaaacacacctttagttctgttacatatttaactgatctttctggttgtttatatattcagatattggtaccctatgcaaagtgcatgtccatttctgttccttttatgccattgaataacatgctattagacaattaaacatcattccatccattttatctggcacaattgcaaagaaacaaatagtgccgagcacctaatacatgatttgggtaagaccatatttgcctagcagaagtcaactatacaattcatagtacaatagtacataatcaggcaggtagcactggaccggttaaagtgttaactccataagttaccattttttttcttccatctaattcaaccatctgtcttcacaattccaatggttaacttctctcccatgcttgtgcaagcaggacatctggcgtcttatacattccttg

SEQ ID NO: 12302 - DNA, 621 bp, Oryza sativa
  Intron number 2 from transcript LOC_Os06g01670.1 (locus LO C_Os06g01670) derived from phytozome v7.0 (chr-ID Chr6; po s 400973 to 401593 reverse strand)
ttggctctaagactgtaatacaggtatagtttatagctatctcaacttccttctttttttttgttttcttctttagttggttgcctttgttactgaatatttcagagttttacaatttttaaatctaccgggtaccaacttcaacttaaatccaatttcaagctagcagttttcttttttcagtaccatcccgccatgcttcttctgtgatgctacaaatatgtgattgtcatctattggaagcttcttcgattatccacaaagcaaaatgtggcacttttctgttttcattagttgcgtgctgttgcttcagatgcttaaaaattaaacacatattaatgtaatgacatggctttgtttgatttagcaatcggtttgttggtagttaaatttcctagtcatacaatctttcattttgctgcaagatgtttgtttggcaatcttgttttggtgtaggatctgcattcgattgtccgtttaacaagatataactcactcactctcaacttattactccaataagtaaatgaacatgtttgtttttgcttaatagtaaatcggtaatgcatctgacataccgtgcatgatctaaaatacagttatcttaacagatcagaagcc

SEQ ID NO: 12303 - DNA, 987 bp, Oryza sativa
  Intron number 1 from transcript LOC_Os05g34270.1 (locus LO C_Os05g34270) derived from phytozome v7.0 (chr-ID Chr5; po s 20223251 to 20224237 reverse strand)
cgggtgtgcgggctcccttcctcctgcttcttcaggtgagacgagctctgctttttaattcttgttcttgtgccttggtgtgttcttgtggggctttatttgggggtgtacagtggatatgatcttcgtgagtggttttgcggtttagtgttcttggagcgcaggaggatctcccggacccggaattgttatgcaaggatggagaggtgaatttcgggggtgctggtagagtggtagtacggcgatggaattaggggagaggaattctgttcgtattgctgctgttgttgttgccgatgcgtgggtttcttgaggaggaccaagggttcgtccaggactcatccgcttggggatttttgatgatcatacgcgaatcatttcgagtggcggagaagggcggccggagtgcctgaccacttttggtgcgagatcgaagagaaaagatagtgtttgtttgtttggatggtggtggtgccttcttttgggggatatttttttcctcgttagatttttttcgcaacaaaagtagggcgcctttttgagacacgagagaagccgagatattaaaattagagaccttttgatcgctctaaaatagaattgattgaggcatagaacgatggttttgtgtgttagaacctgcttccagtagacgattctttgttactcgttctcattcatgcatctacttgttcttccttttgcctatcttaataattagaaagtttaccgcttgtgtgatttgctttgtctaaggtggggatcagttctctactgatgtagtgatgttggctgcttacagttgggattctttgatgttgttgttactatcataaattaagtcacaatttccatcgtactaggataattatactgtggcacactaactttcaggctagagcatcgtatgtttacctgtaatttcgtgacatggtgttattgattcttgcaggcgactgctaattttgaagtgccatttctcatcgt

SEQ ID NO: 12304 - DNA, 628 bp, Oryza sativa
  Intron number 1 from transcript LOC_Os04g23910.1 (locus LO C_Os04g23910) derived from phytozome v7.0 (chr-ID Chr4; po s 13663754 to 13664381)
tgcaccggccgcctctacgacttctccagctcaaggttggtgattatcatcgtcgatccccttctatagttctatatgtatatagctgctacctgctaggtcatgaaatatatcccaatccttcagatttttgtctatatatctcgatgtgtccagctatctagcttttgctttactctagcttagggttttctttgattctttggatgatcttaaggtgaaagacttctgttttttttagaaaaaaataaagaaaatcgatgcatccatttagatcactccttctcccatctaaataatctctatacactattaatttgatgaattgtgtatgcatatattgactctttctgtttagtctggagcattattcctgaaagagaaggagatgcgcagtaggagctggtatgcaaggggctgccagaatgtgagaatatatttctagaaatggtgtatacgatttttctaagttaaataactcacaagttatctctagatatatatttattttgatttgtatattaatttacctcgtttcttagctgaaaatttaggttaatttcccctagatgcataaaacatttgctatatattggatcgtaatggtatagtcttcctttttgttagc

SEQ ID NO: 12305 - DNA, 728 bp, Oryza sativa
  Intron number 5 from transcript LOC_Os06g21980.3 (locus LO C_Os06g21980) derived from phytozome v7.0 (chr-ID Chr6; po s 12709513 to 12710240)
gactaagaaatcttgggaaaaggtaaaaattatcttccattataaactttaccgcaatcccatggcacacatcaactgggtgcaacaaacctagatataagatactgctaccatgcttttagtattgttttagttttgcatcatgtataaatattatgtatgagcctggatgcaagaatagaattctattggttcagaattattgtacgtacacatgtataatgtactctacaaatgttcatgtactcttttggttcttattaaagcatattagaaactctcccacttcttttgaaacaatattgttttgaagtttgtaactactgtgtaacttaaataattaatattcttacttgttactcccatgctgcaactttttcacatgtattcttctcatgttgtggataagtatcaaataattctcccaatggtatccaaggtgtcaatttattttagatttattaatttatttgttattgacatttatattttattagtatatttagtattagttcttgacatacacaacacctggccttgtgtagtccatatatgtacatgtcagtctgagctattcataataatctttcagctggagttctggacatatttattgtagggatattgcatattaactaacattgttatgtctttgttatacatagctgaatcattgctttgtcacatatgtaggctgttatttttgttgataattctggcgctgatat

SEQ ID NO: 12306 - DNA, 294 bp, Oryza sativa
  Intron number 1 from transcript LOC_Os04g06530.1 (locus LO C_Os04g06530) derived from phytozome v7.0 (chr-ID Chr4; po s 3403345 to 3403638 reverse strand)
tctaggctgttttagcattcttggccacgtgtgtaatctactatctaatattgaatctcaatggtgaatccaaggtttattttgatttcacaattattcaattcttctgtggtaatcacgatgtattaaagaaacatatctttcatagtaaaatttgtgtttccaattttcttctggacatccatcttcacatatccatgtattgcatacggtttttctttatctttcatgctttcctagtaaaatattttttatttttcaggtaataatctggattacaccaggagtgccacc

SEQ ID NO: 12307 - DNA, 976 bp, Oryza sativa
  Intron number 1 from transcript LOC_Os04g49940.1 (locus LO C_Os04g49940) derived from phytozome v7.0 (chr-ID Chr4; po s 29602870 to 29603845)
gatcgtccgcagcgaggtgagctcaatccttccctgcacctctccccttttgttctcgtgcctgcgattcgtcgaacacttcgtagacaggaagcgtagttgaatcgaccggtaggtttttcctcggcagcgggacatggagaggaggtgtggggatgggttagggtagcgggtaagattgtgctgcctgcagcagaagctagcgcgatgggaagaatcatgaggaatcggcaattgagtaccaaaaatgaggaaattaggccatggttggtagaaattgtttcggcattacatttacggaattgtttttttctgaccaagtcgccggaggggggcgttccccacctgaatatatttcaaaccatcttacagaatgttaaggtcgtcatgtgtatcagaactttgtagcaattgattccacttcttttttattgaatacctgaagcttagcaccatgcaaatatgcaatccactgaacactttataagcaaaatttacttgccattcacttcatgacttagatcttgttccaacgtttttacagccagcaatgcttactgtgtgtttgctctagcctgtagtgatttcttaactccaaacataccaaggttggccttgcagatttatgtgttttttgatgtagcggtcgggttatccattatctgaaaaaaattgtgatagtacatgagatttatcatagattcattgcgagggaaacatggcaggggaaaaggggaatggggttgagaaagggcatgctattttcctttctgtgccaactgataccctctctgtttgtcactgagttaggagtccttcaacttgccagacagatggaacaagaccatctcagaccatattgtacattaagaattgtcatttgttaacttttgacatgtttatacaccaatcctgatatcttcactgcaagtatgatgcagtcaaatattaggagggagagaccaaaaaggcctga

SEQ ID NO: 12308 - DNA, 661 bp, Oryza sativa; identical to SEQ ID NO: 9718
  Intron number 1 from transcript LOC_Os03g56310.4 (locus LO C_Os03g56310) derived from phytozome v7.0 (chr-ID Chr3; po s 32095767 to 32096427 reverse strand)

SEQ ID NO: 12309 - DNA, 1006 bp, Oryza sativa
  Intron number 1 from transcript LOC_Os06g06850.1 (locus LO C_Os06g06850) derived from phytozome v7.0 (chr-ID Chr6; po s 3236292 to 3237297 reverse strand)
gtggataatcttagggagcatctcaaacaaaaaaggtgcactctaatgatccatttgttttcaactgaccattcttagcttgtttcggtaattaatcttcatttttgttatctttaactttgctcaatcgcatgagaactcaaattttcatcagaacttttctaaacaccctccaactatacaatacttgtaatctaaatgctacaggaggcattgatttggttatgtgctacaattagtagacgataaacactgccaaaagacctactagttcaggtatagaaatagttggccaaaaacaaaccattttgcattttattggttcagttacggaaaatagtgagaaatacccatgggctttccggctagctccacaaggtggtaggctagactacctaggttcgaagaaaacaagtgccccagtttgatgtattgtgttctaagcactgagtgggccaagctttcctaggtaactagatggttccccatgcgttgctgcgggaaaacttatcctaagctataagaaatagagaaaaaacataaaatatcttcgcaagtacataactgatggctagattaatttgaggtgatgtggcacattgtgggatgagagaattagagttaatggggatgaattgtataagtatataggatttgctagtatgaggcaaaggtagcacaaatgctcatgttgtaattctaagcactattttttttcgggatccggaagcctgatgtatacttgctgcgaaccggagtaaactattgtttaatgctatgtaagctataattacctcgtagtacaaatggtaaaaccaatttcaagaattttgtaaactaacacccaaccaaacatatgagcatactttagaaatctaattccggttctttggaagggtatcatttataattttggtcctttgaaaatgtatacataaattagactttaatttgctcttccatgataaaattaaaactacatgtgccaggtatattatcgtagtgg

SEQ ID NO: 12310 - DNA, 990 bp, Oryza sativa
  Intron number 1 from transcript LOC_Os04g58780.2 (locus LO C_Os04g58780) derived from phytozome v7.0 (chr-ID Chr4; po s 34774307 to 34775296)
aggccgtcgtctctgcattcgagaggatacccaaggtgtggcttctcatctcaaaatctattttctgctatttccggtgaataataggacatcaattgcatattatgtattttttttgaaaccaaaccaattgcattgttataggtgtacacgtgtgtgttttcaagaatgcaaagcaggtgaagtttttctataagtaattttgcaggaagcagtaccgttcgcataggagtcctacaaatgtcatctgtatttcggaatagggattaatgtgccactgaataggcacatctttattatacaatgcatgtttgaatttacatgttagcaaacttgtcatgaaaattgtcatttcaatgccatcttcagctgtctggtgtagttagcgcatacttccctctttgtaagcaaagtttggatgtcctggatcttacttacccatttctttttaaaaaactgctccatgaggtaatattcattacacaaataccagatgcttcatcttttcctattagatttgatgctaattcatgtagtcaatatatcatatagttcactagttcagtatatttgttattttcttttagataatggatcctttattgaactcattaaatcacatcgaggtgatacaattgtcctcccgacctttgcattataagttataacttttcttgagaataggtatacaattacttcattgagatttctggttagtgagtgagcaactatattttttcgaataaaattataaaatgtgccaattcttaatgttcaaaaatctctacattcatggttatgtgttcacatcttcccaagaaagttcaagtgccacaggagaaaaaaacaggtctagctgatgcttattgaatttattgcattgaagatagaggcatctcataactcatattaccattagtacattgttgtatgcaatgcattgacacttctatcttgatgtttcagccatcaaggagagaattcggtctg

SEQ ID NO: 12311 - DNA, 566 bp, Oryza sativa
  Intron number 4 from transcript LOC_Os05g13300.1 (locus LO C_Os05g13300) derived from phytozome v7.0 (chr-ID Chr5; po s 7371783 to 7372348 reverse strand)
tacaactcaaagatcacatcttctcaggtatacgtctccgtctcaatatgcctcagatatattgtcctggatatctagattggttagcaattgcattgtgttgcatcttttttgctactattatacctgtttgttctatcccaacctttttgtttaattatccctactacatatcttcataattttgtgtccttaatgcacatctgataatgttgtcctaactctaaaacagagatattggaatgttcagcatatacagaggtttaactgtacttagacttcctctttgatttcactgttgtgtcatggcacacaataagatcatgaaaaagatattctcctgattcatgtttcactaagaattttttttcttaaaataaattaattattatgtcaacgaaaattgctccttctcaaatgagcttcggtggtggcttcctttcgatctttaattgggttgtaggattctaccatgatgttctgttaagaaagtttcaattgtcgtgaccttcaactttataactaactttgtttcacattcttattttcttgttgaattaagctga

SEQ ID NO: 12312 - DNA, 781 bp, Oryza sativa
  Intron number 3 from transcript LOC_Os05g13300.1 (locus LO C_Os05g13300) derived from phytozome v7.0 (chr-ID Chr5; po s 7372641 to 7373421 reverse strand)
agctgcagaagagtaagaagagcagcaaaactaaggtctgccaattttgttttggaatgtttgttcatcaatctttgaagttgaagccttagaaatgaatagttgttaactttgttttggaatgttttggaatagtttttaactttgtagctgaatttgttgcttggcaattggcatactgaatttattgctcggcaattggcacactgacggtagcgttcttttgtgctaaatggctgaatagaggaatgatttatgataaatatttgagggtgcaaacgaatgaattaactattataaagttgaaaaaggatttgaaacagtattataaaaaatccatatatagaaagtttttgcaaaattcacagtttaggagatcgggaaacatgaccggtaatccattcatccattccattaagcattacgcttgaccttgctttctttgatgaccccctatttaacttaactttgtttcttggttccctaaaagaaaaaacaaaactttgtttcttggtgcttccatagtaacgtgagctataaattcacaaagtatattccataggacatcacacctggtgtgcttgtagttatttttatactgcacaatatgctgatttttcaatattgaagcagtgggttatcatacttacatttgcagaagagtaattggttaaaataccaacagtgtgctacaagtaccagttaatcaataaatactatctattcaagtggctttgaatatgcaggtagagggtgacaacagaaaggtgtgccaatcaaa

SEQ ID NO: 12313 - DNA, 555 bp, Oryza sativa
  Intron number 1 from transcript LOC_Os05g06110.1 (locus LO C_Os05g06110) derived from phytozome v7.0 (chr-ID Chr5; po s 3051203 to 3051757)
cattcctcggcgtcggcgacaagccgtacgtcttctctctcgatctttagctttgctgtttcttctttttttgtttgattccgtttggttgtattgttctgtatctggatgatgaagctggaatcttgggggattggtgtttgaatatgccttcgcaagattctcatcctctctcctttgcttttaaggtgtttggttacaaaatcaaaatgtacttgcttggtaattaatttctactcaagaacatctacaaatgcatcttctctatctgaatggagtaaaaaacaggagaactttgttgagttattttattgctatcacaagggaacgtgtggtaggttttttttttaaatacaaagacaattacttagaactctacaatcttggtaggaatgggtttagtaaaattcaaggcggtcaaagtcctgtgtaactagtgatgccattcttggttttacctctgtgctgtaagtgttggggataaatgtagcctatgttgtttgtcaattaaggaagataatctatggttccaggggactggacatttggtgcatt

SEQ ID NO: 12314 - DNA, 967 bp, Oryza sativa
  Intron number 2 from transcript LOC_Os03g58190.1 (locus LO C_Os03g58190) derived from phytozome v7.0 (chr-ID Chr3; po s 33132994 to 33133960 reverse strand)
attgggaagggcgaatttgactgcctcggttgcaggtgagaagtattcagagctgttggtattggattcctttcacgctaaatttctcgtcttgttgtagattgtgtggcaaagattggatctttcggagttcttcctttgcgttcctgattccaatctgagctgacgcttcccagttcccagttcggaatctcgttcttggtttctccaaagtgttcgtcttcgttgggagttctttcagattatctggatcgttaatgcccaatgttagttggtacaggttggaagttttcgtagttccgtggattcctcttctttttctcgttgtggttttttttttttgctggaaatttgaatcgagtattttgataatcaggactggaaccaagtctagtatgttactgttaaatgttgttttattcatgaaaactaatccccttttctagacttagtcaatcgggtgtcttgctttcaaattcctttgttcttttcaatagtatggtccaagttggatctgtgcgttattcctacatttctgattcgtatttgttgattatgagatgatataatgaaattcgattggatccggattaggggattgatctatcctcagtaccctgcgtgacatggtattgactttgtgttaagaatgtccagcttctgaatttgagcagttgtcttttgttctgtgcttgaaattggagatggatttccttttgaattggtgttgactttctgtctttaaaattctccatactgcatatactttctgttctacatttctgttgtgcatcttgggtgatctttcctaatgggtgttggctagcaatgataaatgaatgtgaatagatcttttgactcaatcatgatttgcttttcttttgttattaactctctgttcatgctgatgctaatgaacattttgaaatttttcctcgtggttcagtcaggactcaggagtagaatc

SEQ ID NO: 12315 - DNA, 1026 bp, Oryza sativa
  Intron number 1 from transcript LOC_Os04g50864.1 (locus LO C_Os04g50864) derived from phytozome v7.0 (chr-ID Chr4; po s 29898004 to 29899029 reverse strand)
cggccgccgacgccgcccgccgccggacttcgccggtgagcttttcttctcttccgagctccccccttcctgcccgcttcctgtggttggagttggaggggggggggggagttatctcatctgcagtgtttgctcctccctgccctagccgatcgatctccccgtccccaatctcctcgcgggctcggctcgccggccggcggcgctgatctccatccgcgcgagcagcgtctccggcgtcctgccgcatcctctccggtgcatggtctggttcgatttagtctcctccggcggcccgtcttctccgcctgttcgttcgttcggcccccaaatcccaggccgcctcctccgctggcggcgcgaggcaacgcttcccggcgacctcgggcggcgtccccttctccccgatggtcttcgcctcgcgcgacgacgaggcctgctctccggtggcctctgcctcgcgcagctccgccgcttcctgcgcgacggttgctatactccttactatcgcgacgtttgctgcgggttctgtttgatttggggcgacactgtcaatgcgcttagcttctcttgcaatacggaagcgttactccttgcctttgccttaacctagcaaatttccgaaagaatttggggttcagctgaacctccatgccccatgttagatcagtccttgcagtctttagtgatttaaccatatggcgaccgcttcagagtttagcctgctaaatattctttagcaaatttcttatcacacctttattttgcatttctgtttagcaatctgtgctatcatcggggtgttgagcgatcaaattacatttcatagtttaacgagcacaatttagtattgattgttaacagttcacaataatagtactagactactagtgatagattgggcggggaatatcttcattggatgtttatcgtgattaacaaaattattgaagactgatattggtataatttccatgttttcaacttgcaggaatttcgccattctgatataaattagtgcattgc

SEQ ID NO: 12316 - DNA, 968 bp, Oryza sativa
  Intron number 1 from transcript LOC_Os05g48450.1 (locus LO C_Os05g48450) derived from phytozome v7.0 (chr-ID Chr5; po s 27716402 to 27717369)
cctccttctagcttccaccgcatcgtcgctcgccggtgagcatccctccctacccacacctcatcaggtattctgctttatccctcaaaaagtttgggggttcaaccgaaacagggttagatctgcctctgcccagctccacctactttcaagttgttaattttgatttccgtttttagcatatgtaatttggttactgaatctcatccaaacacccttatagaacgaaaaatgtaagctcacataatttgtactcatccaaactcacgtaaatttctttaagaagaatctagaccacaaactacccatagtcacacaaaatatctttttatcaacttatattcttataagtaatttttattccacaaaatttctaaaggacatactgtgacacttggcattaatctaatttaacttttttttctttgtcaggttataaattttctaagacatttgtgccacttggcatgaatctaatttaacattctttctttatcaggttataaattgaaaccattgaacgtactttgtcttcccgtccctaaaacattgtgatatatctataatattttaatatttttaattttaaaaataatttaaactaataatatagatatttaaattaggtaattaataaattcaaatcaactatagtttagaataaaaaataaaatgatatatgccaagtacaatctaataacaatagaatgttagaaacaatatgaattcaatatttttataaattttaagtacgattcatatataaaactaaagaaaaatatagatttatatataagtgagaacataataaaatgtaaggtaaaattattaaaggaaaaatattattaataaacaatgatgttgatgtatttctaaatattttcacgtattatttattaagtgtcaatgattgaaatggatgatttaccccagccactgccatttgaggcccacacagcgttggcccc

SEQ ID NO: 12317 - DNA, 980 bp, Oryza sativa
  Intron number 1 from transcript LOC_Os04g46290.1 (locus LO C_Os04g46290) derived from phytozome v7.0 (chr-ID Chr4; po s 27241894 to 27242873)
gttcggcctcggcatattccactccggaatcgaaggtttgctttgagctctctcttcggtgctactgttttttctcttccctttcttggttgatgcggtgaatcagtgatgcaagtgtcttacagattcgtatatatgcttcttctgaaaatctgtaggcttcttttgccaattttggtgatttttaaaagagagaaaaagaaagtaattcgatagaagaggagagagctttttgggcgaggttttgattgccttcctacgggtgtgatccaaacttgtggtggggtttagcaaaccaagcaaatataaaaacatggaatgtttctagggcaagagttgagagtatgctcaattcactcataaatcatgcaataataggggaaacgtatgatgaaaagaatttaaagttctaacttctaagcaaacttgggtttagctccacctaccttacatttgcacttatacattttaaaaaaaatcttcaagacccatacatatagggcatgctgcaataggtgcgatatacacaaaaagaaaaggtaaaatgtcaacatatgcagtgacacatatctggacccgaagtatgagtgtagtttgcttcgatttgcaaaattgaaaaggaagtagaattgagatttgtttgcattgctgttctgagtgtgacattagtggttatgccctagtgccatgttagcgagaaaaaagtactggtggagtttggtacgctaagtattaaccattaaaagctgattgaaaatgatctgctcatgcttcattgtacaattcatggattcgggcttttagtttgttcatatgcctaaattgaaattgtatatcagcattatttgcttgcacctgtatggctgtacctatttttcacctttttctcagcctgctgttggtggcttcctgtactgtgctaactgattcgatgagcttaattcaagtgctatttcgctgttaattctaatgaacagtcc

SEQ ID NO: 12318 - DNA, 1062 bp, Oryza sativa
  Intron number 1 from transcript LOC_Os04g37630.2 (locus LO C_Os04g37630) derived from phytozome v7.0 (chr-ID Chr4; po s 22192375 to 22193436)
cgcttgctgggggtgtctccggcgttgtcgcacaggtaacacgtctccttaaagatcagactcgtctcgctcgtttgttagcacactagatcgaactgtgctctattctgaatttctgatgggtagtactactaggcattgtactgtctgtacacattactccccaagttactcagggaagatcattttgatgtttgattattgaagttaggatatgttttttctcggtgtaaaagtaagaactgctttggtagtattacatttagaagatggaattgaactggacttggggacttgacaggattggaactgttttttgctggacttgttgaagactgtaacatgctagcatttcttagttccaacctattggttccaaacaatgatgcacattatcattaagtaaaaaattcaacaaaatagacatatacatcttaaggcaggggaagggatcttctaatttgtgtcattaccgttaccaaaattatagtatcacaatgcagatgataaagcagcagacatcagtctggatgtgtttttgtatgacaggctcatttgtctccaagtctccaccacctccttatgatccaacctacagtacactcgagagccacaatgagaccatgccatccctgctgacaatgcattgacacattgatggactgtaggacttgtgtagcgcaagatgtgtgcgataggacacctctacctcaaggtcacttgcgtgactagtataggaaagaggcgatacctgggtactcaatgatgctgctcctcgagggttgtgaataaggttgattagaaaaggatgacctgactagcaccctcatttaggttttgaatagtttgtcattcctagagtaaagtagcaagcaattgagataatcaaaacattttagtttgttagagagagattttgtaatcaacatgctgctggtattaaccatctgttagaagtagaattgatatagcttaatagctgctattgtttcgttgatcatttattgacattatagttactctgcagtgcaggtggtggcaagccctgctgatctcatcaag

SEQ ID NO: 12319 - DNA, 806 bp, Oryza sativa
  Intron number 1 from transcript LOC_Os05g02770.1 (locus LO C_Os05g02770) derived from phytozome v7.0 (chr-ID Chr5; po s 998095 to 998900 reverse strand)
aggttaccccggctcgtccgcgccattccaacacggtacgcgtctcgttcttgttcctgttcgattctgttgtgaacttgtgatgattatatatagtcgcttaattggaattgtgattttgttcctgttcggctcgattcgtcgaattgatcggtagtagtattaggttggatcaatttgctgtttctatttcatagattttgcattgataggatctatccccaatttagacccttttttgatcttattccctgttacatcggtcacatcggatgtttaacactaattaaaaatattaaacataaactaataataaaaaacatttcataacccttaaccaatttacgagacgaatctatttagtctaattaatctatgattagcctatgtgatactccagtaaacatgtgctaattgtagattaattaggcttaaaaatttatcttgcaaattagctctcaattatgcttagttttattgttagtctatgttaatatttctaattaatatttaaacatccgatgtgacaggtactaaaatttagtctcttatccaaacaccaccttagctgccataatttgcaaacctttgtaacctttctttggcctgatttagttcctaactttttcttcaaacttttaactttttcatcatatcattccaatttcaatcaaactttcaattttagcgtgaaaaacacacggtttgaatcctctgtttttggtgattcagacaaagaacggtggaattctgttcgtacaattttaatcgttttgaggactccctgattggttttgcaggtaacc

SEQ ID NO: 12320 - DNA, 1017 bp, Oryza sativa
  Intron number 1 from transcript LOC_Os06g45830.1 (locus LO C_Os06g45830) derived from phytozome v7.0 (chr-ID Chr6; po s 27731286 to 27732302 reverse strand)
cccatctcgcctccgtcctccagtcgctctcccaggtgcgcccccgctcgcctgctagttggatctggatctcacagttcactcgtgcacaattgtacgtgtatcacgcgaaacccagatcattttggaggattacgaacttgcgataatagttggtgcgaatgagcaaatgttgaaccaatttggcacaataggttttagtttgattcatttatgcgtatgattcagcctctggccgcttttagtaccccccgttttttcacttggatctggatctcacgtactgtatttggtcatgtcaattttatccttgtacgctttgcattgaacagtgcgtacaactagaactgtatttagtcatgtcaattttatcgctgtacgcttttatcaaatgatatgttaatttgatcatctctgttaactgaaactgaagtcagaatttgcgtgggcttggcaaaaccaagctggagctctgttggcaaaatccttgcatgtgtcgggatgttataatgctgtgtacttatgcaatgcagttatgtgcatgtaaactttgagtatgctgtagaggacattcaaatccagcagttcagtgatgcccataaaactatgcctatagtctattataatgggataccgtcacttatatcatttagttcatataggtgataggtcaggatgctacatcaaatcacaagcaaaacattttctcctgtagcatgtacttcttgttacgtgtagcgttatcttctcataacatttagcttgacattttgtagaatacactggaatgaatttgctagcactagaacttttttttttgggtactgagtgattccttctttgtaacggccaatgctgaatactgggtgttaatgaatgaaatatgacatacatatgcatgtatgatcaactaactaggtattcagtcccatctacatttcataaattctgtattactgatgatgatgatttcttcaatcaggctgagggttcatctgcagagtcaataactgcact

SEQ ID NO: 12321 - DNA, 616 bp, Oryza sativa
  Intron number 2 from transcript LOC_Os03g42130.1 (locus LO C_Os03g42130) derived from phytozome v7.0 (chr-ID Chr3; po s 23448822 to 23449437 reverse strand)
actccttcatcatcaacgtcggcgacatcatccaggtacttttttttttgagcagctacatatttatcaacaaattttcttctaacaatttatcggacataaatatattacaatgaaagaataattgtatcataacttgtgtgtccttatatgtaagttttagaaatcctatagtaacatggtattttcgcgaaagcggagattgtgagaccgtatcttttcacccatgcgcgtcatatgatttttttttcttgccaacttaaataaatttcaaagtaaatctaatagattaaaattatgtgaaacttacatataagttttctacggtaacacgctattttcacgaaacggaggtcgttccaagttgaatgaatcttgaagtaaatctaacgatttaaaattatgtgcatacacgttatattacagttatatacaagttataatataattacactacaattataacggtattcatagttgacaaacttttaaaagagaattagttaataaatatataacaacattgtagtttaattgttactatttgacatcatttttatttgcattttgaatttgactgaaaaaattgagagtgcgcttgtccaggtgtggagca

SEQ ID NO: 12322 - DNA, 513 bp, Oryza sativa
  Intron number 2 from transcript LOC_Os03g48940.3 (locus LO C_Os03g48940) derived from phytozome v7.0 (chr-ID Chr3; po s 27859000 to 27859512 reverse strand)
gcaattattggtgttattggtggacttctaggtaagtaaatggtatgttaagttgatctcgtatatctagaaaaatctaagtgaaaattttgtacataacagttttttctgtgttgcttaggacattctaattatttatatatatttttttcttctttcttggtaggtgtgttctcattatgccgcttaccaattaacagtgagaaaataatgcagatacactgtagaaatgaatcatatgttcacctctaagttgctgtaaaccattttttgtgatagctagttaaattgctcccgacatctggtagacacctctttattctcagtggtatcagcctctctgaaaatcaaactgctaattgagcaaagcacaaccaaatgctgaaaaagttagcagactgtatattcaagacataggaaatcctactatacttagcctttcctcaatctaatctaatgccttgttttttcttttcaggggcattattcaatcaacttaccctgtatataact

SEQ ID NO: 12323 - DNA, 644 bp, Oryza sativa
  Intron number 1 from transcript LOC_Os05g06420.1 (locus LO C_Os05g06420) derived from phytozome v7.0 (chr-ID Chr5; po s 3291194 to 3291837)
acaacctccactcccacaagcgctacctcagcgaggtctctctctctctccctctccccatgggccatggcagcgcccgccctctgcgtccggggaattttcgtggctcggtgttcttggggggtggccgccgcggctcggattcggggcggtttcgtttcttggttaatttgggtgtcggtagagagagaggattttctccgttgttccgtcgatttgtgtggcctttttttactctgtgattattggaattgaagcgaaatgggactcagggattcgggtaatttactttgatttattactggttatatcactagtctttttcaggtttaggggcttttttttggtgctttgcacgttcccttcattctattaattaattaattacctattcttgtttgtctcgatccgtgttcatttgactctgattcttgggcgatttcgtcgttttggatgctgaattgtactatgttcttctgtttctttctttcctctcgctctgtgaaacggtgctgccttgcttcagttcttggtgtactagttcatatcccactctagaatgcaattcatttatattattactgtgagaccaaaattccagtgttttacttatatgttagattggatattggctattgcagata

SEQ ID NO: 12324 - DNA, 855 bp, Oryza sativa
  Intron number 1 from transcript LOC_Os06g48650.1 (locus LO C_Os06g48650) derived from phytozome v7.0 (chr-ID Chr6; po s 29433619 to 29434473)
cgatctccttcgtggtttttggtaataataaacaggtttgttcatctctcgttttacatttttctttctctccgtgacgcgcgtttttttttttgctgttcctcttttggtggtttacctggtaatagagctaagctacagtaggataaaggaccatactgtttagagattccttttgccaatttttaaattttttcatcggtattttgtttgaaggaaaacctttttttttttccttcttttagttttggctgtattttttaccagatgatgatattattcatattgatctttgattttgttgtttcacccttttttagcagcttgcagtattggttacagtgagataatatttgttcagcctgttctagtagatcttaactcatgcttgatcctttagcaaagtggtataaatttttagtttcatttcaaaatcaatctgttctaaagaaaatgcagctattaaaatgcatacggagtacacacagactagccgtttacagtacgctatattgtagtgtagactgtagagtataatcgttctgaagagccatttaatgtcatcggccgccctaatttaataaggttccgtaaatgcgtgctccatgagaggcttgtgaggtgggcaactccagtatcacaaagaaattgtgggcactgccgggaccagtagtggatgactagggtagtgagtgattttactcagtcagtagtgcagtcctgtactcctgtagttgttgtactcttgactctcccaaaccatcaaattgatgtctagtgtcatgcatacttgtaacttgtaagtgcacttccctgacagttccattctttggaagattctgtggtgtggcaatt

SEQ ID NO: 12325 - DNA, 426 bp, Oryza sativa
  Intron number 4 from transcript LOC_Os06g40840.1 (locus LO C_Os06g40840) derived from phytozome v7.0 (chr-ID Chr6; po s 24360266 to 24360691)
ttctttctgaattgcaagctctacaaaaggaaaaggttggcactttgtttttcattttcacaatctgccaactgcctttttctggacctgcttatggaataatcttccaaatttcatagcccaaccatgctaaagagattctttgttttgcataataaataataatttcacataatatctgctggtcaaattctcttgataagcattgtataacatcaaacatccctatgatggatgatctctaaattttgacgtaccatattagtaccacagaagcaggcatacggccactgatatagctgatgataatctttgcattatacacacattttcgactatttaaaatttattgacttgaaatcgtatttctttccattttcttgcattgcagagcaatagactgcacaagattcttgacttcgtgag

SEQ ID NO: 12326 - DNA, 725 bp, Oryza sativa
  Intron number 1 from transcript LOC_Os06g48050.1 (locus LO C_Os06g48050) derived from phytozome v7.0 (chr-ID Chr6; po s 29067841 to 29068565)
aattgatatcactgggttctaggtatgctgtctgttcgtccatgtcctttcctcaagaaattcgcttgcctttgtgttcgtgaaaactcttgttgctgtaatgatcaattaaaagacgatcatgatatatctgcagaaacatgaactaattaagtgattttggtttatatcttgagtactactattagttttatcctttacatgccatccaattatcaaacaaacagagaaacatcccaagtcccaaccttattgttcttgtataaacaaaaagttctaggagtaggagtgcaaaggtattgacaggtgaaaaagttttgcagcataaatagtaatcaacaaggccaaaaaaaaaagataataaaaaggtggaatcaaattagaaagccaatggctccagaacgtgcaaggagtgttttgtcaggtcaaacaattacaaaatcctgaatatgcccaggaaactggttcacaaaaagaaggcataaacatgcagtttaacctttgcatgtctagctagggacattaaatcagtggtgaacatgttgccaaagtgccaaacaacatctaaatcttcgaggtcaaccacagaagattcaaaacaaaattagcaccagctcataaattccaaaagcatggcttaagcatgaaagctcctgaaactgaaggatcaatgctctgacaagtctccctgctgtgtctcgcagcagaagcttaagcagccgccc

SEQ ID NO: 12327 - DNA, 838 bp, Oryza sativa
  Intron number 2 from transcript LOC_Os06g40704.1 (locus LO C_Os06g40704) derived from phytozome v7.0 (chr-ID Chr6; po s 24263953 to 24264790)
agtaccagcagaggtagtgctgagcttgagactttgtcatttcctcttccgcttttttttttcatttttatcgcaacgcgtgtgctcttgctacttgagcgcggctgcatacttgcatttgagggacatgtgcattatatattatgaaagtatttctcgtgatgaacctaaaaccgtactaacatttatcttatgatgttaaactgtataattctagatgtttatagtcaaagatacaaatgtttgacttagggaaaagctagtacgaccactaatttgaaaaggagggagtatatatgtggaggacatatatggtgaaaacgagcttagtgttggaaacttgtgaaaattatacctaaaagttttgtaaattcatgaaaaaattactagagataggtacaggtatgaaatacattatcaccaaatctcaaatccaaactcaactttgtttaagagaaataaaaaaatacaaatttggggtgaatagtgtcatgttactattcacctgaaatttgtcttttttgttactcctaaatgaagttgagtttgaacttgagatttggtgagaatgtattttatatttacacctctctttagtattttttttatgaatttacaaaacttttatgtatgattttcacgagtctccaatacttggctcgttttcaccggatatgtcctcatatatgtgagttagtaactgctgttcatcagaaaccctaaaaaaaaagaagaaaattttgattttgtatctggtactcaagccagcagttctgttcatatcgattgtgttgtgttgtatgatgggctcaagtttcagtgctttcgtgcagataag

SEQ ID NO: 12328 - DNA, 1019 bp, Oryza sativa
  Intron number 1 from transcript LOC_Os04g43400.1 (locus LO C_Os04g43400) derived from phytozome v7.0 (chr-ID Chr4; po s 25487606 to 25488624)
agggtgggtgtggagcttgcctttccttgtcgatcgttcattcgttcccgcccgtacctaatctgttatagtgaaagatgcccatgccggcatgccccttaagcattagccaccaccatacttagggcctgtttaatttgcgaaaagaaaatttttggatatcacatcggatatttgactggatgtcgaaagggattttcagacacgaatgaaaaaactaatttcataactcgcctggaaaccgcaagacgaatcttttgagcctaattttttttgcggggaaggttaaatctattactcaaacgaatcttttgagactacttaatccgtcattagcacatgtggattattgtagtacttatggctaatcatggactaattaggttaaaaagattcgtctcgtgatttctcctacttgtgtaattatttttttaatatatatttaatgctctatgcatgtgtccaaagattcgatatgatgtttttgaaaaaaaaaattggggaactaaatcaggccttatatttctttttgttggttgtagctttacagacaaggcaacatttggtttctcatgactcatctgtgttctgttcctatcctatgatgtcagtatcattgttcctatcattctccaaacactattagggtgcttgtggcgtttttccttttcttttcattgcatggaaggtgtgcacataaaaaatacagtggtgtccactgccatagtcaaacggatggacatcagtggcaaatgcagccaacacgatttaaattatggtggatggaacgatatacacgaggggcttaatttacaaaattgctctcctttgagctcagatctgcaaatgatggatgcacatattcttctcctctattttgtcgacatcacatctaccactgttctacctaaaatcggaacagttaacacgcgtatgtaattcaagttaacctcttgtttttctctcaaagttgtttcgattcgtcacagctggacgaatctcagatagacgcaacgggg

SEQ ID NO: 12329 - DNA, 1055 bp, Oryza sativa
  Intron number 1 from transcript LOC_Os05g14220.1 (locus LO C_Os05g14220) derived from phytozome v7.0 (chr-ID Chr5; po s 7974533 to 7975587 reverse strand)
tcttcgtcgccgccgaggtcgaacaaccaagcaccgtgagtatattgtagttataggtttgagatgctgctactcttgttcttcttggttgcaaaacagtgtcaccttcgattgaaatgagagttagttggatgaggatcctctgcagtcgactgcaccacgcctttatcactgacatgtggacaacagctcacatgttagtgacaaaggcgcggtagactcgattgcagatcaggatctcaatctaagtttggtttaactcgtattgtgtaagcatggcatgcatatacgcacatgaggttccatgcataatccaaaatccattcaaaatttcaaaataggtaggacgaaattaattcatggtgggtagttcacttcttcgactataattcaacatcctcatcacgtcttttttatttactacttcatctatctaagtatagctacctttgtagttcaactggatggagggagtacttgtctagatcaagaaactacatactacctccgtttttttaatgttattgatttttttgacaaacgtttgactatttattttgttcaagaaattttgtgcaaatataagatcttttaagtcatgtttaaagaacatttgaagataaatcaaatcacaataaaataaataataattacataatttttttaataagatgaatggttaaacgtattttaaaaggtcaatgatgtcatatattaaaaaaacagaaggagtatataaatatgcccagcctatactaattacacactaaaaattatacatgtaattatatcaaaataataaaatctaaattagtcctgatgacgtgtataaacccgtgttttcttattttcctgacatttatgaagtgtatagttaccacaagatttcgatgaaaatcacatataaatagaactttaatttatggtctctattggtagtaaaaattatggtctctcctgggagtaaaaattttctttttctaatttaatggaatgtatctatatatgctatcatctcagctactgctactgatagaacttgcggtagaactcat

SEQ ID NO: 12330 - DNA, 705 bp, Oryza sativa
  Intron number 4 from transcript LOC_Os07g09040.1 (locus LO C_Os07g09040) derived from phytozome v7.0 (chr-ID Chr7; po s 4721657 to 4722361)
ctgggctcaaggctgttaagggatcccgtgtcgcagtatgtacctttattatgctagctgttcagtcaacttatatatttgtagagctcgagccatgtcacaatagaatagttaactgacatttgcatatgctgatttgcactgcaaatcaagtaatcgcgagcaatgccatcatgagagtgaataatccaacgagcttgatacctcatgaaacgagacaattttgatttgtgtaaaaaaaaaatcttaattcgaacctgtaatgctatatcagaaggtgacattttttcttcagaaaatctgatgtttttcagttgtgtatatgttttttcaacaagcatccagatacctcccttttgctttttccttctgttgtattaattcattttggaagtcacgcaaaataatgtcttatatttaggcatgtatgcatatagtattttatatatattgtaactacactatcaggctgagtattaagaaccacagtcagttacgtaagcatggaacaggtaacttcctgctgaaaaatgtaaatctgcaagactagcctaagaggaagcctttaatttgagattagtcttcagttccatgatatgtaaaaacaatgaaccatcaatttatatgctagcagatgaatgtccaaaagctcacttccaatttttcaagtatagtgatctattatcatcttactgcaggtacatt

SEQ ID NO: 12331 - DNA, 789 bp, Oryza sativa
  Intron number 1 from transcript LOC_Os04g20774.1 (locus LO C_Os04g20774) derived from phytozome v7.0 (chr-ID Chr4; po s 11641203 to 11641991)
gtagctactttcaggccggccgaccgagcggacaggtaaaccggtgtggttgtggcggaccaggccgtctatcatctccgtaggttgttctatttgatccatctatgcatctgtattgtattgtattttcacgcatgtatgtcttataatatcctcttatccggtcattggtcaaacagactcgcaccagctgctttcgctctcccttattaaatcttcaccggcgggtcggatcgcttttcccctttcttttggtttcagatctacacccttgtaaaaaaaattgatcccttggtaaaaaaaaattaaatcatagggacatatttagataagcactgtgtccagattaatctatgggattggtttttttttgaacggagagagttatttgattagcttggtattttctctcttcgcctcccctaaaaaagatctttcttctccttttttttctatctaaaaagaatatatcttgacaatttctgctgtttttgttttgtttgtgttcaaacgatatgtatgtttgatttttattttgttaacttttgatatactaatgatctgttccgtaggcagatttattggtcgaacaaaacttccaaatctgtttatcgaacaaatcatgaatataccaagtgttagaaaaaaaaaaccatcaaacacaagtaactcagattgaagttataaaaggcaagagcactatatcaagtggtaaattaaacacggtatcatccggttgcataaatatcatcattaaatctgtacttggcaggggcgtgcgagcgagac

SEQ ID NO: 12332 - DNA, 736 bp, Oryza sativa
  Intron number 5 from transcript LOC_Os03g60700.1 (locus LO C_Os03g60700) derived from phytozome v7.0 (chr-ID Chr3; po s 34492522 to 34493257 reverse strand)
aacgttcagctgtcgagaagtcatttacttacgaggtatgtcagggcagaacatgctaacagctttatttgacacagtaatacatcagggaagaaaacgttaggctgattttgcaagcaaaactaatcaagcgtaaatgagaaagtatgcatttcaccatcatgagatatgttagcgagctggttaatcacttcgccacaatggtgacaccgtggcagtccattagtcttgcaatagtaactgtttctatgtcatatattcactttttacctgagatatatcaatatcttgtttggaatgacatttgaatcactgaatttgttagctaggaaatgcacagtgtgggagccaaacactattgatccaataaagcatttacctaaactggtgtgtcaggttgctcggaccttaaagataggactttgtatctagggtagtgatgttttgttgataccgcttgctctttagatcaattgagaccataagctatgatgcctttgcaatgcttctgaacatatcagccatatctctcaattatatcatgctctttaaacacatattatgtataactcttattaacatttgcactattatatactgcataacaccataaccagatatttggcatattattattgcagaaccttttattcataaatcctgcttaaattagctaacattggaaatcggagaactgatttgcttttactgaatttcataaaggtcttgatcgttg

SEQ ID NO: 12333 - DNA, 830 bp, Oryza sativa
  Intron number 2 from transcript LOC_Os04g44620.2 (locus LO C_Os04g44620) derived from phytozome v7.0 (chr-ID Chr4; po s 26218026 to 26218855 reverse strand)
aggctgccctcgactccgcccaagagctccctcaggtgcgatgcattttactgaaatgctcgtgatatttcattagattatagatttcctcggagtcggatttggacgcccaaatgtggaactagttaatcaaagttgaataggttttcactgaacaatctctgctgggattattttggctttagatggaggcatcaaatgtacatcccttagtgtaggcttttctcattcgaaagcttgaactatggaattagtgatgagttggattcaacttgggctgccttatcaaattgaaacttgaaacctcacgtgacatactcatagttcactatagcaaaagcactagtccagtttatttcagtcataagaaactaactgcattatttgtttgtaccttgagaaaatttataaatagccaacaagactcaggatcaccgatcacaggcggtacacactaagttagtattacagaagcaaaatgtagaatagcaagtatactagtctggaactgccattcatgttttattttcgtcctgaaatcttagtcatgcttctttataataccatgtcaaggagactaaattagacaccccaactaagttttcctggggaattgtgtattcactcagggaggtttatgttgatttaatataaacgtcaagaatcacagacaactaaaagtatcttctatttcgatgattctaatctctaaatttattcttctttgcaaaaattgtagccctaaatcctaatggatgttgtcatgttgatacttggtttctgttctttctgtagactctagttcaggttccagatctgccacagttgca

SEQ ID NO: 12334 - DNA, 493 bp, Oryza sativa
  Intron number 2 from transcript LOC_Os05g02670.2 (locus LO C_Os05g02670) derived from phytozome v7.0 (chr-ID Chr5; po s 940874 to 941366)
agtggttgcagaaggtaatccttgaatacgattgctgccgtgatattgtttctccgatcttgttttgattggttgaataatttcttgctttaccccgtttatgtgattgcttgcttaccatttcaatgacatagcgatgaaagaaataaataaataaaagatctcgttttgatttgtgaaaacagccgctaatcctaatcttaattcgttctgaatgaagatcccatccacgatacctcaagatttgcatctgcttctcccttgtacttgccctcttgtctctttctgcatttgctccgccggcattttggctcttcttgctactctgatctggccaaatttgacacctgctgtcacattcagttataaagctagtagtagtggttgggatttttttttccagttcaattcttggagcaatttgaatctgcatttgaagaatcggtgctcctttgcagaattgggagctgtgggcagaaagactaggccttgt

SEQ ID NO: 12335 - DNA, 936 bp, Oryza sativa
  Intron number 7 from transcript LOC_Os04g39814.3 (locus LO C_Os04g39814) derived from phytozome v7.0 (chr-ID Chr4; po s 23531905 to 23532840 reverse strand)
gcagaaactgttcggttgtacagagagaaatatcagttcactgaagaagttgtcaggcagtcgcagttcatccatgataatgatttacatcgaagatccgcaaagttaagtttcataatccaaaattacttattgcttggcattcactttcagccaggtcctggtggtagagtttgccagtacagacattaacctttactagtagtagttgataaggaaaaaaaggaaagaaattctagaattcacaaaaaaaacaataaaaattggcacttaatcccaatgtgttatgtgccctagttagagaggtcaaaataggtcagagaaaatatttatgtattatacaagaccttctcacataaaaacaaaacatcatgccttaatctcggtcctcctaatacaaaggtctggatctgttggttaggttaaagatatactcctattattttattattttcatgctaaattcaatgaaagactttagagttgataagaaaagcaataaattcataaaaagcaaaacatctcccattaagttatcttcaaattcaaacacatatcagtatccaacatcacaaatgtttctgatagctagctcacaatttctgcgggtaacttgactagctaattactttattaactgcagcgctaatttatatcctgcatattatgaaatggagacatgcatattctagtccagtgatatattcaaagcttctgcaatttactgctacatgataatacgttcaaggccttataatttgaacatgattgttatacatttgttgttaatattatttttagggaacacaaaacctttgaccatgcatgcagattgaatgcttagtagaatcaattctgtttttcaaatcaaaaggaacaacaaaatgcttgacaaatgcaggccttacaaaaggggaagattggaataattgtgaa

SEQ ID NO: 12336 - DNA, 405 bp, Oryza sativa
  Intron number 1 from transcript LOC_Os04g49430.1 (locus LO C_Os04g49430) derived from phytozome v7.0 (chr-ID Chr4; po s 29308822 to 29309226)
ccaacaagaggagttgagcaggtctgtaaaagatttcccctttcccccctcctttctagcctcttgagagtaattttgacgccatttattgatttattggatttctttcgattatttttggaattgcaagccttcaaatgtctcgcttttattgctaacccgttggactaccatcgctacatcttctgggggaaatgaaatgcattgttttcctattatattctctctcaacctcatggagtcagcgttcgtactgagaaaaactgctcggattaaatccgaatgatcacccatcaaatccatgttgccctgagagtggaggagttctgattttttttctttttccttttgttttgtttctgctatccaggccattgttgctctgaagaagggagcacatctcct

SEQ ID NO: 12337 - DNA, 656 bp, Oryza sativa
  Intron number 1 from transcript LOC_Os05g33600.1 (locus LO C_Os05g33600) derived from phytozome v7.0 (chr-ID Chr5; po s 19695158 to 19695813 reverse strand)
gagagggtcaaggtaagaaggtgtagattgtgttagaaaaacgtgtcattaatcgtgatgcttatacatcatgttggcaacttatcgatctcgataaattacaatggactagattctcaaacataagtccatatgtaattatgtcagccttgctaaaatgttcattactcatttcttatatgtaagttgtgtcatatgtgaactcagctactctccaaggctaggatcctgtatagaactgccaaatttgctttctaacttctttctacaattctactaactttgatctaaatttctatggatgtatttacaatggaatggaatttatccctttctttacaaatacgatgtgcttacgtattgatttattttggaaatgaaaccgttttcttatacttatttatttacgacgcttaaatggcactacctgtcaacctgtcatttgtaaatggtagttttttttttaaacgaatacgatgtgttgtagactgttatcttggcgaataaaccttccctttctacgggtaatattctgatgtgatcaatacttcaagagttgcaatatgaataatgcattaataaaatggtttcccactaagataaaatttttattcttttcaggcttggattccagaaataacatctatcacctcatc

SEQ ID NO: 12338 - DNA, 917 bp, Oryza sativa
  Intron number 1 from transcript LOC_Os03g61580.1 (locus LO C_Os03g61580) derived from phytozome v7.0 (chr-ID Chr3; po s 34912050 to 34912966)
ccactccctccgtgcccttccaatacctgcccaaggtattttaggagtgcagcatgcgaatttcggaaacttagacatgttatgttgggtgatatgaggaagaacgagcgaattttgatatctatacttctgtttccatttttaattaatatgtttttaagtgtagctagtgcgtcgtgactacaaagggaaaatgctactcattggtgtaggatcgatgaaatagttcgatactgtagttcaggggaaaatcaactattcttgttgagcattctagtggtgatcaacagaagggctcatgtttctgaatttgcgcttgactgctgattttaagatctgattgatagtcaccagccatttaagacgcttgatgatagtaatcgtggatgtgtagtagcaagttttctttaaattaggaagaggatccttgttttgtttggtgcaaactattttcaagtgttgttgccttgagaagtgaaggatttttatattatgatttttttttctgaacacatggaggtgtcacctaaaactcaataaaactgtggttgcccactgcttgttgctatatctatgctctaagcactatcggggggctttgcatattttttgcaggataatcctagatggaaaattgtgtctttcttgagctcctaacttcctaattactgcagtagctataattttcatctataaacaattcataccctgtggttttgtgttcatgccaatcagatttaggatgtaacaacattagaatcagttttgtgagagattattgagtcgtgcagtgatgtttgtacaatgttctgatgagataaacagctttttattgaagtaacgagctatcttgccgtggttctagttacgctgtttttggttgtaatacctttgttcttctgcagacaagcttgaaa

SEQ ID NO: 12339 - DNA, 790 bp, Oryza sativa
  Intron number 2 from transcript LOC_Os05g11350.1 (locus LO C_Os05g11350) derived from phytozome v7.0 (chr-ID Chr5; po s 6414960 to 6415749)
aacggtaaaaaatctcttatgtttatgttcatgagtttatatgaatgaagtgtcgttgtgttccttgaatcgagtgaatgattgacactgtatatcaccttaacttttatcagtgggactagctctatatatcacgcggaagacttttaacacaatactcccttcgaattgataatacttgtcgttttagacaagggtacaatcttaaaaaaacaactttgaccactatttttttattataatacgtatacaagtgttaacaaatacataatcttattgaagtattttttaaaactaatctatatatatagttaccatatttcaaagacaaatattttagaaattattcataattaaagattttatagtttgacttcacccttatccaaaacgacaagtattatcagcccggagggagtatatcacaattttcactgtggcaattaaccttaaattaattaagccttttgatatctagatcagtgattgcaatttcacttggaaatttccgaaatttcggacccccccccccctgcaagtgattatctcggccaaaatttttaggtttttctcaaatttttgtgaatttggtaaaactttagtcgaattcagttaaattatgttaaaatttcaaaacatttcggtccaaaaagtgtcgaaaataccgaaatttcgagaattttggttgaaccaaaatgtgcaaagtcgaaattgaaaaccctgatctagatagattataatgttgagaacgttaagaacatatacctaattaattgtagcggatatatat

SEQ ID NO: 12340 - DNA, 732 bp, Oryza sativa
  Intron number 4 from transcript LOC_Os06g28820.1 (locus LO C_Os06g28820) derived from phytozome v7.0 (chr-ID Chr6; po s 16421739 to 16422470 reverse strand)
gttgtcggtatgacattaatacaaaaatgaataatactattattttccatatgattgcgtggatagaggcgtgttggctaggttcgatatataagacaagacaacacctcatgtgttgatgtctgcattatgtacactgtctgcttatcaaatgtacgcccaaaagtaaatggtgtcatatattaaaaaccggagggagtatcaatttcaaccaggaaacacccttttgagctgaacatttggtatgcatcatgtgctagcttgttaataaattaccattctgatcaaactttgttaaaacgatttgaattggatggtctttgtaatcaaaacaagtttcattcgaattatcacgggataaataaaatcataaatttcgattagtactatccatttctttaaatacattaatatgtttattggagctagggcactattcagcccctgttttagcaatacatgataaaataaatcaatataaaagataattctctaaataaatctagtaacgattgaatttataatataacattctagtaacttgttcttattttacctaccatattttagcttgctattcatttcaccttatttgtccagtgaaatccgtcattacaaatattagttcccattatttggttcgcacttatcttcattatctgtagtttatcaagttgtatgatgaaagggttaatgcaagctattcatatattctgaaggtgattggtttgt

SEQ ID NO: 12341 - DNA, 791 bp, Oryza sativa
  Intron number 1 from transcript LOC_Os05g38250.1 (locus LO C_Os05g38250) derived from phytozome v7.0 (chr-ID Chr5; po s 22363101 to 22363891)
tccggggccggcttcgccaactacacggccttctggtacggtgccctcacgcgttcccgtttgattttggggggcggagtttcgtattttggtggtgttgatccgtgtagtgtgtcgtctcgtcccctctcttcgcctggagcaatgcgagttgatgatggcagatttggtgggtaatttcggttggggcgcagtgaagagcatgaattttgcgctcgatggttttggaacaattagtgagtaattggcttgcggccttccaaaattgggtagtgaggagtggatgattcacaaggagcttagctaattgcgagtagaatcgtagaaatgagggcctttcactatcaaatggcagctgtgcgttagctgggaatgtggtttacaagttacaacctctaataagatctgaaaaaaaattatgaagctatcactatactatccagttgtttatgttcacgaggtatgtgtacatgtcataacttataacattggcttttgttgttaatgctggttatatcggcattcggcaaagataattgataatcccctttggtttatgctctgtttcctatttttcatatgatgcatgtggatttggtgtaccttaatcattcgtattacaattctagtgcagtgatgacctttttcttggtaactttgtatttagtcggttttagtaggcaccggtacaacggtccttcctgtattcgcaccctctttggcgcaatcttcctttgaatcatgtaatgagtttgttgtggctttcaaatttcagctacttgattgcatca

SEQ ID NO: 12342 - DNA, 842 bp, Oryza sativa
  Intron number 1 from transcript LOC_Os03g49620.8 (locus LO C_Os03g49620) derived from phytozome v7.0 (chr-ID Chr3; po s 28251809 to 28252650 reverse strand)
ttgctgcccagcctgcgagggcaagccactggtaggtagtacgtgcttctctcttcagtcttcactgtctgtgtgtgtgtgaattggaatttggaagtgctggaggtaagcagtaagagaaggatcagatttggagaggctgaatctctgattctctctggtgtttaaagagtttgttcaattcgaattgtgggtttaattttggtgccgtctctcactgggagggatcactggatcacagttgtgctgcttctgggaacgttttggttaattctatcaggtctgtagttcttcatgatttttttttgaatggatgtagttcttcatgatagcttctagaatatctgagtcttgctaatattccttttttttttaatagcaagagaatttagtggtgctgacatactaaaaattagaaggtttatgtgctgtatgggcatgttcagatattttgatttgttaggcaaatttagatatttttaaccatggcgaccttttggtttgggggcataattgggagcttggttttgcttccttttttttgaacggaagttttgcttgtttcatgcgttctctttggaaataataattctagtacgttttgctgtgatgaattcaagcctctattttagtataccgatgaaacaattgtgcatttcaaggcaacttttgcttttcagcataactaacagcataacagtgaacagatagtataataataacagtaactacaaattctgctttgcctatcactcaatcttgtatgaacctcttttcttatccaataatattttgtctatcttataggtgccatactggactggcttgcttgttaactgggt

SEQ ID NO: 12343 - DNA, 641 bp, Oryza sativa
  Intron number 1 from transcript LOC_Os04g07910.1 (locus LO C_Os04g07910) derived from phytozome v7.0 (chr-ID Chr4; po s 4216560 to 4217200 reverse strand)
ccacgtggcttccaggtgatgcgtgtgctgcacagtcgggataacgtacttcagttggttaggaagtttgttgggataggattagattaggttgtcctctatccatgtaaggatggtccctctctaggttatgataggcattagattaaaatttatcatagtgcccaccgaccctaccttctcggctcccgtcaagtaattttggttgagggctagtcttgtaactttctctattataatataatctattccccttcacctatttcacttgcacgtgacacttacctcattcaatcttgccagtaataaaaacttactccttattgggtacacctaaacatatttgcaagatcattggaacatttgcatcaatcaaagattcaatgtattttttttcttttcctgacaccatagtttgttttctgaatcatatttagatgttcgctgactactttaattttaccttgaagaggtctctatggattgaacctacaaatcatggctattcattttttccctttttcttttgaacttttaatcattgtgaatcatgtcaaagggtatgcttgcaacaccatttgcaagaactgtaaggacacatttcagtaataattctgaagtttattttttgtgaactacag

SEQ ID NO: 12344 - DNA, 960 bp, Oryza sativa
  Intron number 3 from transcript LOC_Os06g41840.3 (locus LO C_Os06g41840) derived from phytozome v7.0 (chr-ID Chr6; po s 25087251 to 25088210 reverse strand)
tcgattactgcagagccactaaggtgataccaaccaaaccaacacaaggcttattgctcatgtactatatgcaatgagataaatgactgaggggccccttcgaatcgtaggaatgaaaaaacaaaggaaaaggaaaaatataggattttgataggaatttaattgtaaaatagagaattgcaatacacaggaatgaccgtttgattagaccgcaggaaaaacacacgaatcggattagagagatagactcaaaggaaatattctaagaggttggagctcttgctaagtttccttcaaaatttctataggattatccgtttcataggaatttcaaatgataggatatgattcaatcctttgtttcaaatgccttcataggaaattttcctataggattaaaatctttccaaaattcctatatttttcctacaaatcaaaggagccttgaactcttgacaagtacttcccccgtttcacaatgtaagtcattctagtattttccacattcatattgatgttaacgaatctagacatatatataagtctagattcgttaacatcaatatgaatatgagaaatgctagaatgacttacaatgtgaaacggagggagtaacagattttgcttgcaacatgatgttggatttactagataagtatccaaaaaaacttactattagaaattacaaagcaaatttgcatgaataaacatcttgatagtcaacgctagttggaatactgtttctgttagttcactagtttttgctgttgcttaaatattcggtgccttgagactttagtctgagatgattaattcaagtgagcaatagtgcaatactttgccttttttcttctttacatatcttggtcatgtaggcatatggttctcatatgttccaatttcgcttgatacatcggtttggcagaattggtatacccttgggaaaacacttgcggagat

SEQ ID NO: 12345 - DNA, 965 bp, Oryza sativa
  Intron number 2 from transcript LOC_Os03g55150.6 (locus LO C_Os03g55150) derived from phytozome v7.0 (chr-ID Chr3; po s 31381586 to 31382550)
caaggtctggatccccgtttctgtccccctctttttcgcttagatttgttttgagttaggagttgtcctctgtgttcttgtctgctctgtaaactcgaaaggttggcgctgattactgcgggattcggctggtttgttagttccaataataatctattagtagccatttgtaaatttttataccttatatgttcatacgtttagatttatctgtgtagtctgaattgtgcttatgcaattttctggatagtgtcgcaactgtgggtttaattccccttttgcactttctttttttttttgcgtcagcagtgaccagccatttttgttatacagcgctaactagtcaactttttgttgttgaatctattttgttttgtttcgttcatcatggaaatgatgattttgcaattgtggtgtttgtaatgcatggtatttgctgatttggggttgtgctcactatttctcttgccgggtgtattttcatccatatatagtcactgtcattgttgtagtgtggatatgattatgttatctcaaaggcaaaagtactgtttctgcgggtgacttgactattgatgatttcagccaaaaggttgaaatgaaatttgcacgccctttttagctttttgttagtgcaacgctttgcctgttaccaaactaatacctcatttcatcactgcgattcaggccttaatttaaaatactcattttgtcaatgcgacgtgtgctttaatttaaaatgccttaatgtggttatcatattttgtgctatcttcttgcaattattggttggtgaacgactcctgttttcttttctttgatgaatgttatagtggagtgggaaccatgctagtcttcttgttgatacgaaggtttgatgaccacataatgcatttatacaagtatcttatcttctccttccttttgtaggttgttgaggtctccactttttatacaagtatctt

SEQ ID NO: 12346 - DNA, 744 bp, Oryza sativa
  Intron number 1 from transcript LOC_Os05g01760.1 (locus LO C_Os05g01760) derived from phytozome v7.0 (chr-ID Chr5; po s 457232 to 457975 reverse strand)
cgggggggcccagaggccaggagctgtcgccggaggtgagattaaatcatcaatcttcattctttatgctcttctttccttcttctgcgccccgcccgcaaaagaaaagatctttcctttctcccttttcttttctggaggcaaaaataaaattaacttaagctcaccctgtgggtagtagtagtaggtagatggtttgtttggatttggaattggaatttcatatgggccctttgctctttatgttcaatattatttttctataataatagattgtatttttttaatgttgggaattgaatctggagctgcctaccttctgcagccgtaagcataattagtgttcaacttgtttgcactcttacatcattgtattacctggcatctcttaggaggagtaatagtaagtaatttattcccataaatagatgcaggcaggtgtcttcacttaacatcaaagaaatttagagttttcatccagctgttctctcttcattctacaggatgccatttcttagagcacttgagtttcacttgcaaattgaggaaaacgccttgtctcttgttttgctagtagtattaaattagacgtcactgtttttagaagcagttgaaaagggttctgtttgatctttactttatcatcatgtcatgcacaagttatgcacataagacaacttcttcaaagacttctgaccctctgaatgcatgcactctaggatttcaatttttcggagccatttg

SEQ ID NO: 12347 - DNA, 819 bp, Oryza sativa
  Intron number 1 from transcript LOC_Os04g34450.1 (locus LO C_Os04g34450) derived from phytozome v7.0 (chr-ID Chr4; po s 20691120 to 20691938)
agcccaggagctggaagcgcgtcgacgaggccgaggtatgtggggggagatcggcgagatctcgatctcggccgctcgtcttccgtgctagttttttgggggtcgcgtgctttgatgatccgaaaattttggttggtctcgcgggtttgttaaggcagcgagccgagtagcttgttatgaacatgtcagaatcgtggttgagtgcatttagctagtagtgtaggttatgaaatttatgctggtttgatcagtttgtttctgttccttctggggatcgcacaaattagctgtggtgctgcagagtggagctgcttgttgggtcgcctggggggggggggatttgggttaattcctaagacttgcctattggtgtgaactctgggtactggtgtgtttcaatcattcatgttgtgtagtactatgatatatggaggtataagggattaattaatggacttatagacaacatttttacaagtttgctggtctgacacacaatgcttggtcatcacatcaattgcatttgtgcagcgtgcattactgttggcacactctttcggtatagttcattttgatttccttctagctgcacattcatgttattcaaacctcctctctcagcttgtttgaaattgaatgccatgcttttcattttctctgttgttgcatttgttcatgtatcatttcatatctgcattctccatattagatgttaaatgcaccaaatacaaacatctgttttaacatgttatcttgtactgaatatgcctaatgtcagtctgcctttgctccacccagcttgctcgcagggttcgggaa

SEQ ID NO: 12348 - DNA, 843 bp, Oryza sativa
  Intron number 1 from transcript LOC_Os05g40980.1 (locus LO C_Os05g40980) derived from phytozome v7.0 (chr-ID Chr5; po s 23962647 to 23963489 reverse strand)
ctctatccaatccaatatcccagtccaatcgaaaggttagtcacttcttgatttgaattttccttctgcttagtttgatacaaaaggggattctttttattttcgttccagtgttcgaaatcatggagacgatttctatctttccccctttgatcgcttgtatgttaatctagagatttttctctttaaaaaaagaggaaattttggtgggggaagatgagtcctgcgacgaaattatacggggtgcaatggcgtgaatcttgagcagtgccggaatccggtttcttgttcttctaacccccaaaccaaagacttctgctgcgtttttattcctctttcgggggggatagcatcgtgttctctgaaagaattggaatcgagcacctgattcttggagagggaatcttggctcttgatctctgccttccccttcgcaaagatctatctgtcagtgctgtgcctcatcccccccaagtgggtcttttctctgggacagcttgctgcccctgttgatgaagaacccaaaaaaggctaatttatttcgtgtgttggatgcaaagctaacccttgttctttgttcttgatgctgatctgttgtgagatctgtatgccagcaattgtctttgtgaaatccagtcacggatggatgccgtagtgttcatcttgtttcagttcttcttgattaaacttctggcaagatgctggactctctcgtgtagatgataaaaaatgtgtatgtcgtggttgtttgcttgggaatcttacggattattaacttattatggtgcccggttcacagatttgcgttttgatcgtggtgccgtcaaccgaaggatttgcaag

SEQ ID NO: 12349 - DNA, 867 bp, Oryza sativa
  Intron number 2 from transcript LOC_Os03g45760.1 (locus LO C_Os03g45760) derived from phytozome v7.0 (chr-ID Chr3; po s 25845847 to 25846713 reverse strand)
agacgtccaagaagctggcgcgggacctgcagaaggtgatttatttgatcttcttcattgttcgaatgcttgcttgtagatgtctgtcggtgtattattagatggtccacctttgactagacgcctctaattgaactatctatgaagattaagggtgtgtttgaggagaaggggattgaggagattgggtagatacgcaaaacgaggtgagccattagctcgtgattaattgagtattaactattttaaatttaaaaaatggattaatatgattttttaaagcaactttcctatagaaattttttgcaaaaaacacaccgtttaatagcttgggaagcgtgcgtgcagaaaacgagatgctttctccctcaatgtcctccaaacgaatgctgcctaattttaggagaagcaggggaaagtgcgcttttatgctgcaaattggagtgagttagggagtaagtatggagttcgttagatgtttaatgccatttataacgatagcgaagaagggtcattttgctgattgcagccaatgtaaaggcaagtaaagattgtccatcagctggttatttttcttctgaaatgaatactgcccgtccaatcccacatccatgttgatccctggatagttgatcacaaaaatagtggtaatcccactgtgggatgcaagaactcctttaggactgaaaaaaatgaggcgctgttcttcttttcactttcttttgagctgtttaagcaatgagtaagatgtttgttcagcttatcagtctgtcttttctaatatctaacctctacaacactctgaattctgtttttttctttcctttgctttgcttctatcagctggagtccttcaagaggcatctg

SEQ ID NO: 12350 - DNA, 762 bp, Oryza sativa
  Intron number 3 from transcript LOC_Os03g51930.1 (locus LO C_Os03g51930) derived from phytozome v7.0 (chr-ID Chr3; po s 29782661 to 29783422 reverse strand)
ttgttgcggccaaatcctgggctgttgggataccggtaattatcagttctgtttcgaaattcaaatgtgactgctaattggaatgtgtttgtatctacatataatttgtgatgttattttgctatcatgggtcaacacataagtaaactgtataatgtgggaattgcgaacttttatctttgagtgtcttcacttataacttggactaatggaacccattcttttgttacaatgaagctgtatgctgtttgcttgacaattgactgatgccaccttgtaccagtacccaaaccatttccgttctatcctccatgtgctacatcataggctcgtagattgtcgtgcaaactacatgacacctacttttacgtacactaatacagacaatgtcttctgtgtgtacatgtgtgcttgtgcgagggtggggtgttctaccaagatatactctcttgaatgtaacgtagtatataatatcttcataaatgatgatatattcctctattatatcttcataaatgatgatatattcctctattatatcttggacagtattttcagcatctggatctatttctattctgaactctacaacagctgtccatctgccttatcgtgtgattgtttgctaaagtttattgactatgagtatgtagttaatgttaatgttaatgttttttctggtgtttcatagcttatgtttattctgttttctctctctcctctttagttgggcctcgccattcgagcactgtcatctggtca

SEQ ID NO: 12351 - DNA, 514 bp, Oryza sativa
  Intron number 2 from transcript LOC_Os06g20320.1 (locus LO C_Os06g20320) derived from phytozome v7.0 (chr-ID Chr6; po s 11676611 to 11677124)
aaactactctacaagagtacgcaaagcgcttcaaggtaccatttctgtggtagcacatagaccaaatgaaacatatgcgtacatcatgggaacaatgttgattgattgcataatttgaaaagactgggcggctcgcccagagattagtctcttctttatggttaatgggtatatatgttttgtaactacataggagttgccaagctgataacttgtgctgcataccactgatagtcttttttgcaaggaagacgtgcggttgctcagaaatgagctctggtcttttgtgtgtaattgagatcgactacattttgaaattggaaactctcgacacagctagcatgtttgagctttctgcatgtaacatcaatatttcatgataaatttatttgctatgttttctaagcaggatgatgttcgcaacgaacatagtatattctaaacaatatgctaatatccctcctatctcttcttgtcagattcctggatttcgtcccgggaaagtagttccaga

SEQ ID NO: 12352 - DNA, 777 bp, Oryza sativa
  Intron number 1 from transcript LOC_Os04g52720.1 (locus LO C_Os04g52720) derived from phytozome v7.0 (chr-ID Chr4; po s 31209119 to 31209895 reverse strand)
ccaagatttctgcgttgctgacaaactcagtgctggtatatatatacaaactcatttcatcaatatatatgttgctacgtgtaaattacagggatatgtcaggtgctaattaagtcacggtattgataacaaacttgttattcgccgtttaatttaaacggcttactgcatattcttttcagcatcatgcagttgggtacgttttattataacaacataacttgcagcaacccaactagccagcccgttggaccatatatatatttgtcaaaaatacagtaatgaaatgagaacaaaaatacaccatcaaatttgtgatgagaacatttttgagactgtatacatttactgcaccacatttttcatcagaaaacacttaaattttccaaggcatggtattttaccagcatattgaatcatataaggaacttcacgtatgtatcatctcggtctttaatttgcaaaattgtaatgcagtgtttgtgaatggttatgaaactttgactacaaaatccaataaatttatagtattatgatattacttttcaaagaaaatctacgtataccattccttatgtttttaaaacaatcatttaaaaaagatattttttatagtttttgagatggtactaaaaatttagaactgtaaaatttctctttgaaaaaatattaatgatcaaagttttaaatgtttgactaaatcttatcataaatgtcaaagaggtttgaccaaagtattaatctatgaacaataaattgcaaatgcagtgttcgtga

SEQ ID NO: 12353 - DNA, 618 bp, Oryza sativa
  Intron number 1 from transcript LOC_Os05g41590.1 (locus LO C_Os05g41590) derived from phytozome v7.0 (chr-ID Chr5; po s 24296429 to 24297046)
caagtaagttctttgctctcgagtgagtttgattatcatatccatttttactaattagtttcaattacagtatcaaatcgattattcggttgctattttactactattttcgttgatcgttgtacttgtgtccttgtgggaataatggacacataaagaaaaggtagttgctgctgaactgggaccaagatacatacctccagaatattcttgataaaatgtgcaggctattcttgatatgcacctaatgtgatgtccttcatgtttattgcaattattatacccaacacaatgtctattgttgaatgttatgagagctagttaaggccttcagtatgtgcccatgtgctatgtttctttgcaattcctttaggggtaatgcatcttatttttagcagagtttatccaaattagtacccagtactgcacgttccgtgtcacgtttctacccagtattaacttctgatatgctcctaagtttttgtttcactgtataattgattttaccatccactggtcttcatctttcctaccatgttgtagcctttaatgttttttgtttcttatgatgggcctattgcagctggagttccattggagaatattctatatcttgga

SEQ ID NO: 12354 - DNA, 966 bp, Oryza sativa
  Intron number 1 from transcript LOC_Os06g47760.1 (locus LO C_Os06g47760) derived from phytozome v7.0 (chr-ID Chr6; po s 28906912 to 28907877 reverse strand)
gtagcgcggcagcatctcccggcgcggcgtgaacggttagccgcttctccatctgaacttgggtaacatttgcctggattttttttttcgacttcgaaatctacctataatgttattcaggaaaatcctgaaataatcactttacgtatactaaggctgtaaggcatagcgattatcagtttagcacactaatcgcagaataggggaatatgtcgtacattgtcgctgtggataaatttataaccgtggagatccactgttacaggcttacgggcagaaagctcataactatactgtatatagttatataaaacatataattccacttcaaataaaattaaatatagtgcccacaattacatggaaaatttagcttatcgcattaaaaaaacacattttttctctttacaaatagatcaaaccttcatgcaaacaagtagtataaaagaacataaggctcactgactcgctgtgttgaaaactgtacgctttctggcatcatgaactgagactgtatgaaaaaaataatctgttgactgcgtccatttgtttggtatgcaaaaattctactttaagccaactatttttcactaatcagtaccgctaccaattcagctcaaataaaaaattctgcagctactcttcattttacattttatccgtttgggtgaagctgaaggcccacataccctcgtgctcatggcttcagcactacaactctcaggcatcttttatcatggtgtttggatcaatacagtttgatatatggtttcaatttttctctgacaagatacatcgtttcaattttcaggcaagatccacaaatcagccgcgctgttctttggccttgctgttgttgttctgctctcctttacctctccgaccagctcctgcacggagcaggaggagagctccctcatcggcttcctagatggtctcttgcaaggtggcaatggcagcctctgc

SEQ ID NO: 12355 - DNA, 844 bp, Oryza sativa
  Intron number 2 from transcript LOC_Os04g16230.1 (locus LO C_Os04g16230) derived from phytozome v7.0 (chr-ID Chr4; po s 8810603 to 8811446)
cccagggcgaagggaacaaggctggagtgagagaggtgggtagaagatggggtgttaagtgattttggacgaattttcaggattatttctctccatctcactttgtagctctatagtttaatttttgtgtgtgataaattctcgtggatttttctggaggtagatgaagttacctagtttccattttctttggatgcacttaaaaattatggatagattactcacagaaattagaagaagaggggctctttggaaattagtttggatttttaggggacctaaacagagaagataaattctggaaaaattatatttattcatgacaactaacctagtattttaataaattattttccctatatactatcatgcagttaaatgcacattttagttatgtatggttttagctgattaagaactatatttagcctattatttgactagtttgacttgtttatttaaggtatcaacttgagtgttaatgtttgaccaaaattatagtgaatagcttgtgctaatcatattatacataaatttttccatgattttatcttgcacaaaatattttagataatccgcaaggcttatctcttatatgtgtttccctttcctaaatgcatgtaaatgtttataaaagttttatttggactcttcttaacatgaggtgatgttgatatgttagaattacagtttaccttacacaggtcataagcttcttacctatttatgcataagtttactttagtattaaattaagaggatgcttatagagatgattaagatagaatataccctatatgagttaatttatttgttcactttcatgttcatgacatgtcttcag

SEQ ID NO: 12356 - DNA, 658 bp, Oryza sativa
  Intron number 1 from transcript LOC_Os06g33980.2 (locus LO C_Os06g33980) derived from phytozome v7.0 (chr-ID Chr6; po s 19783542 to 19784199 reverse strand)
gcgcctcctcttcgtcgacccaatccctccgtcgggtacgccgccgctgcccccctacacccttgcccctcctttcctatttacacaggcggatcgatgccgtgggagagccggctgcccgcggaggtgcgtggaggcggcggcctgcggcgcgggcggggaggcattaaggcgaggtgcgcgggggggggggggggtcgagtactgcaagcgagctgcgagcagaggagctctgatttagtgatcttttttttcttttttccgtttctgatttagtgatctctgaagatggattctcctcgttggtttgcagctagggctctgacactgaccgtggtccgtgaggtagggacgtagggtatggtattgtgaaatttttaggccgattcgacaaattctattttcatgtgatttgattatcaatgattatgttaaagtgatttgttaatttccgatttagttctgttaacgcgcattgatgcatattatgttccaaagattattgatatatctatgttctacaaataatatgttctataaattggtgatctatgttattaatattcatttgtttggacaacgatgtttattttacttgtttttgctattcactccagcacttggccactagtccctgctctgccactgggttcagcat

SEQ ID NO: 12357 - DNA, 899 bp, Oryza sativa
  Intron number 2 from transcript LOC_Os03g61800.1 (locus LO C_Os03g61800) derived from phytozome v7.0 (chr-ID Chr3; po s 35030860 to 35031758)
aggagatctgcatctgtatgcttccaatccctctttagctttgggataatgaggttgtgctctgctgacactgtagctttcttgatctctctgggggagatggatgccggtttggagggtggtagcagggttttggtgggatccaatcatccaagcacacacattgcagtttctgttccttccttctttagtgagtgagtagtggattggggattggggctggtgatctagctacaggctattacaacacaccattttgggggcttcttctgcggtggcatgggcactggatagattggtgttggtgctatgatgattttgtttggcattgggtagcattggcgcgtgtttgatctgttttgtgctaaggttgtgttgagcactggcattgggaggaactagaggccagatgttcatgctgcttgcgtttttcctgccacttgattgaaatgttcttttgggatcataatatcatgtgcttggctgaacagtgaacacttttgttgagactcgtcatgattagttgcgtttctttgatccaaaaaattgtttttccatgtagcaacttcagaggatacatggacacattgtttagctaaatatttggactttctagtttattcatgtaaaatattttttttgataggaaaaatacatgagactaccctaaattgtgcttgattggtgtttctgacacaagtagagacaagtttattcagatctatgaagaattatgctctcaaagatgcataattctggacaatttgcatcacttgtgttcatagatggaagtattcatgcttaatctgtttagtgttgatgctaatatgtgatggatactgatactgttctatttgaatttatgctagctactccgagtccttttggttttcataacc

SEQ ID NO: 12358 - DNA, 663 bp, Oryza sativa
  Intron number 2 from transcript LOC_Os04g53120.1 (locus LO C_Os04g53120) derived from phytozome v7.0 (chr-ID Chr4; po s 31453679 to 31454341)
gtaacaagtactgaccaaccggtaaatccatcaaggtaatgctaatggagttctgaatttagtgtaaatccgttgaagtgtaaatttggcccgttacatctgcttaagatctcattctgtctctaatcttctaatagccaactcatggtcattttttttcctaatatatagtaccggtgatggtgcaccaaatgtaattagatgcaaggaaacaaaagtgaacaattgtatatatcaaatataattatatctaaaacatgagtagtgtatcaaatccaattctttcaaaaatctactatgcaaaattgagtgacaaaatctgctgcctttttttttttacagaaagcaaccaattaatataagtcaaatataaaaacgctttgtagtctccaataaaatagctcattgtttcgtttatacttatgtttataaatttaaatttaaaacttaattttggagttgattttgtggttttcttttcatcctattttattttacaacatttgattttgaatagttaagaatgcgtatataaaaattttacccataagttattttttaaattgttaataaatcgtaaggataatcataagtataagtgaaatgattcgctcttcatctacttaagattgcgttatattgctgacctttctaatcgcctaa

SEQ ID NO: 12359 - DNA, 1010 bp, Oryza sativa
  Intron number 3 from transcript LOC_Os04g23550.1 (locus LO C_Os04g23550) derived from phytozome v7.0 (chr-ID Chr4; po s 13457529 to 13458538 reverse strand)
cacaccctcttcgtcgaggtataatacaatctccatctccattgctgacgtcacgcacgatcactgagctcctcttcctttccttaggtttgaccttccaagtttgactttgaccgttcacacgcagtactacattttacttccatttttaggtagaaaaataacgttgcgatcacacgctgctccctttgcggcgtcagtatgttaggccaatcaaatcctcaccaatcctaaagcaaccgtcccgaatctcaaagcatcagaaaatccccttctccccgctttacgaatccacctgattcttcttcttctgttcttcgattgcaaaaagcgattgaaaaccacatgggattaatcgggtgcgcacgagggagaaatcgaacaattcgatggatggatggatcgcgcacgtgcttcagataataattaatgaattaattttttgggggacaaacgggagcactacatctacatgggcgtcacatcacgtgcgtgttttggttgggggaagccatggaaaacgattggcacgtgttcgattgcacgggagatgatttttttcccctcgtttttttatttgttgtgacgttaaattccacacttttctttaagctgatttgattacagatgtgaagacaacagtttttgggggatgttctgtgttttgtcctcttctagaaattaggtgtttgatacacattattgaggccgagttagttttttttttttggggattgaggctgagttagtttgttgacttccacgtgcatgcacgtttcttgaactgttaaatttttaaaagaaattatacaaaaattgttttaaataaatcataacaatatattttttaagatttttaaaatatatttaattaatcatgtgttaatccattactctattttacgtgcggagggaaggggttcgcaacctcttcaaaagaacaaaaccttagcattgttaattttggggttttggctgaataaagttgtttcaaatttcaggtagatcac

SEQ ID NO: 12360 - DNA, 837 bp, Oryza sativa
  Intron number 1 from transcript LOC_Os04g19370.1 (locus LO C_Os04g19370) derived from phytozome v7.0 (chr-ID Chr4; po s 10773010 to 10773846)
gctcgtgggcaagtatattccgcaccttgccgaaggtcggcaagctacctaaacccttctaggtaccttgtagatgctctagaacccctccccaagccatgtctaactctctttaccctgatcaccttcatggtttaaccatgccaccgccgccctagccgctagcttagccacataccaaattaacccctccgccgccgctcgctgtcgccggagaaccctagctccctcccctcctcggctgcaacccctttccccctctagcgccgccacaatcccaaaccctagcgccgcctgccgaatttagggatcgactggaggtagaagaagagaagagagagagagactgacaggtgggacccgcacatagtgctatttcacatttaattgattttcaaactttagaagcccatatcttttaaaatatagatccaattccagtgaaacttggaccaatattcttctaaaatcattctctatcttttgagaccccttttgctatttttctattttattgtattttctctatttttcttatttttttagattttatttgaattccttttaaatttgaattttatatgcttaaccctaggtcttgaggattcttctgacacactagataatatcaatcaatctcaagacatcgagcaaggcaagttattatatatccttttgatcatttaagcctatattttacaaattatttatttatagcctttccattcaatattctattttattatgcataatttaatcatagaaacccagataatttagtattgcttatttcgctcacaatctggttaaaatatcttatacttagattgggacagt

SEQ ID NO: 12361 - DNA, 884 bp, Oryza sativa
  Intron number 1 from transcript LOC_Os06g51400.1 (locus LO C_Os06g51400) derived from phytozome v7.0 (chr-ID Chr6; po s 31132191 to 31133074)
ctcatccaaagcttgattccccaaatcaaatccaggtcaatcttctctctaatctttgatgttcgatctacatccttattctgcttttgatagcaattagtctcaattagaaattgctttgattttttagatgaagaggatagaactttaaaataattctaccaagtccagtctagtgagtccactccaacccagaaacatcacaaacaatttgtaacttacttgcatcatttcagcaatgaaatatttaatgtggtacttgatgaaattattgttgatttaaacaatcgctttgctgaaaggtctactcggctattgagatgcattacttgtcttgatccaaggaattcttttaccaattatgatgaagataagctcattgaacttgctaagatatatgcggcagactattttgaatatgattgtatagtcttcagagatcaacttgacacatttatctgtgatgtaagtaatctgatttggatttctcaagctgctctgaccaagatcaacctttctgtgagcctgtgaagatggttaaaagtaatagacacacggtttttccattgttatatcgcttaattgaattagccttaattttgcccgttgctacggcaatggtagaaagagccttctcagctatgaacattattaaaactgagctgcagaacaagatgaatgattaatggatgaatcacttacatatgtaatattattttctggattcaacttcaggttctctacgtagtactgttaatgaatagtgaaaattacgaggatatgttgcgttaggtattgtacttttactgtacttcgttgtatgattagaaatcgtatttcagtcttgcattttttttttcagcactcgcactgtacttcagtgt

SEQ ID NO: 12362 - DNA, 533 bp, Oryza sativa
  Intron number 4 from transcript LOC_Os06g51110.2 (locus LO C_Os06g51110) derived from phytozome v7.0 (chr-ID Chr6; po s 30915974 to 30916506 reverse strand)
caacactggcaaaccaaccctccagtgctcccctggtaattactcatgaaagccatattaaagttgttgctatattgatactgctgctgttctgatatgtcaacttccccatcatatatccaatgctttcctaattgttctttaggtttgctgttgttttgatatgctctgaaaatgctgtgctctttctatttgattttgtttaactttgaattagtacatgtggttattcagatttacatgcagaaactcgaaatggtaaatcggaaagttgcaaatgagatattaatgttgcctgtacactgcatcttctaatttaatccagtgatgtagaatttagttcgaatgacagctctaggacttaacgcctacagttttctgacttctatttacatattccataactagtaaatttacagatgcatagcagaacaacaattctgtgagctgctttgaacaaatactagtagtctgaagaagctgtctttattgtggcaggcacccattggaagtgagaggcaaaaaaggacagc

SEQ ID NO: 12363 - DNA, 849 bp, Oryza sativa
  Intron number 1 from transcript LOC_Os07g06050.1 (locus LO C_Os07g06050) derived from phytozome v7.0 (chr-ID Chr7; po s 2934790 to 2935638 reverse strand)
gaggaataggaggtcgagtgaggaagaagaaaactaaagggtaaaatggtttaggatgacattctacactccacagctaagacgttctagttgaaagtggtatcctgttgaaggccgtttaaggatggtattttagtggttgcgagggtagatatgtaattttctcccttttaagggtggcataatggactttgtcgtagcgagaaatcgttcagtctatcctccttatcctaatgcgatttggtcgccggtttgatcagtaccatattttaattaaccgacacacctcttatgggcggtttcccctgcgcgcgcgaggagccaggaggggttagcagcgacgtgtaaaacaatgagatagcccaaaaaaattcaaaaaaaaagagaaaatcagtggggttagaggagttattgattgatgataacctactgtatatatatgctgtagccctcgccaccgagttgattcaaaaatcaatcaatcaaaccacagtcgaaaatccccaatcctccccagatctcggtatttgcgtattcgatttgtattttggtgattaatcggtcgccgatggcgatggcgttgcggcggctgttcccgccggtcaccaccgcatcagctgggatctcgttccgtggaaaacggacttagaaaaaccctcccaaacatcaatatcttctgtcgaacggtaagaatttaatttcccctgtctctctctttctatattatcctattaggatgatgaatttactctttattacgatgttttttaagtataaaagcttaattaacttgcaaatattaatctgcctgcagacagcaaggcagtctttccatcctaaggattacag

SEQ ID NO: 12364 - DNA, 698 bp, Oryza sativa
  Intron number 10 from transcript LOC_Os06g42800.1 (locus L OC_Os06g42800) derived from phytozome v7.0 (chr-ID Chr6; p os 25728708 to 25729405 reverse strand)
tgtcgcaagcacttttgcagtaaacatagatagaggtatgctcctatatatttgtgcacaatattttcattttatcatactattaatatttgttatttgtggctcagatttttttccccatataagaatagtaatagttcttgtggctggtgataatcgtgaaatttaggccactgtctgacatctgactaagaccagatggcatgagcaggcattacgaaaaaatatgtgagtgagatactaatatcattttttctccaaatctgataaaatataaatagaaaagaaacgaagacttgtttgagataaacattttattctgccagatatctcaaacatggtgtttgctttgttgatgactagctttttggcattcttcttcctttattgatgtgctctttgcacctgcattatagctattaggtgcttgggtatgcttgggagatgggaataataaactttgtaccttactttgtggctgtttctgcttattttattggcagtgctcctgccattttgagaaaaaggcaaagtgtaacattactttgtggtttgctgttaccaatatataataaaaaatgaaacttaaagaactgcagaaggccctgatgttcaattgttcattccccaaagttgaaaataaatcaatattacctacatctttggtgcttttcttttgcagcttctaacagggaaat

SEQ ID NO: 12365 - DNA, 826 bp, Oryza sativa
  Intron number 2 from transcript LOC_Os06g42800.1 (locus LO C_Os06g42800) derived from phytozome v7.0 (chr-ID Chr6; po s 25730782 to 25731607 reverse strand)
ggcgtctcctgcgttggctccgccgtcacctcgatgtaaataaaagatcttctgattaaactccccccaaaatgtttttgagtgatgaaaagatttcgcgtttgatgcctttcatgttcgtggaaagcaggagtcattttgctggttttcttttcactgcatttcgtaaaaaaagattgccgtggctttgtcttgacgtgtgggcattgaaagccgctgatgaaatcctgaagtgtgttggtttttcacattctctatctttcagtaaatttctgatagataattggaaattctcatcctttgcagtagttgattgattctactatcatgagataaaacgttgtccaaaaaattttcattggatgcctatgatattaagagatagaaagtttttttttcctccctgcatgatgtcaagtggtgttaatataattctactctactctctgcatcgattaatttgccagctcagagtttgggagactggatccagccatccaggcaaataatggtgctctgctggttttcagtgtctttttcagttgtaggaaaaagggctttttcgtatgcataaaaaaatatttgatatttgttctcgttcaaaatctgatgtctgggtaacatgcaacaagcagaatatatctattctggctaaaatatagattatacaaaagaggctggagagtgtatcttatctttaagaccataccttaattttgctattttcctctctttttttttttttgtatatgaaatcgcctcaaatggagatgctcgatgctgaaccattctgtttgttcccttgttctgcagcaagctttctggt

SEQ ID NO: 12366 - DNA, 783 bp, Oryza sativa
  Intron number 3 from transcript LOC_Os03g52450.2 (locus LO C_Os03g52450) derived from phytozome v7.0 (chr-ID Chr3; po s 30088591 to 30089373 reverse strand)
ataagatacagtgttcgtaaggaggttgctcaaaagtatggacttgactcatgcccattcccttctgcactgtctaaaatatacacgttctgaacatatttctaccatcataattgcagggtgaatgcatatgcacttttaaatggcattcctgacttgctaatttagtgtgaaaatgcttgttatatcaaattaacaatgttgtgatctttcattattaataaaccagcattttacctgattcttgtcacatcaaccttttcttataagacaataaactaagacagatggggatatagctctgttgactagtatttttttaaattttccatgtagcttatccgttatgacgtcacttgttcttgaatagttatagagggagtaatgatggctcagaaatattttcagtagcaatgaataacagcataaaactatgggtcatggaacaatcatgtcttactggtgcaataaaagtttcttacattgtaatttgcctttgcaatgtcacattgctaactttcatggttctaatatgcaaaatgaatgtttacagcactttattccaattggttataaaaaacctgctcttgattttttgccccatttagtaagattgggctgctctgaataaataaattgctttatcagtaccatgtcattcagtcattctctgtttaccattcttggtacaggcagtcaacataagattgctgttgagctattcttctgtaaccatttattttgtttcagatgttataatatgcacgcattataattgtcagg

SEQ ID NO: 12367 - DNA, 815 bp, Oryza sativa
  Intron number 4 from transcript LOC_Os05g05200.1 (locus LO C_Os05g05200) derived from phytozome v7.0 (chr-ID Chr5; po s 2534537 to 2535351 reverse strand)
tcctaatagcattgattaactactccatagtgaaggtcagtgctagcatctttgatcaaaactactgttgatttcagttgtcttagtcgttgtttttctgttttccttttttttttgcataaatatatagataggcaatgccacaaacaaaagtacatggagcaaaacagaatgcttttttgttcatattcttgttataggtattagaggtagcatatttgtcaatcgagcatatgtttgtggatgtgcacaatgtatgtgtatgtttaacggatgcaactttctcaacgtgatatagaaaactgaagactactccacaggtgcatatgatatcaagcacataaaagataagaaacatagtacacatcaactaaagaagagacactgtgataacaggaatgccagatcaatggattttttaagtcattattcaagggaaaactaagactctatgttggtaaaattcatttgggatgaattttcggtttatgtattgattccaaatgtttcattcatcaactagaactggtcaacacaactattacaatattgttggactgagtggttaaacatctagtcaggttggttgaaaatggtgtcctcagttaaggaattcaagttaacatgctgtttattatgtgattattgtcaacctgtaagtggtaccttagttgtaagcaatcattccgactgtagtgttgacatcactgttcgattttctctgttctaattgattatgggtttaagttttgcttttgaccatagtattctctcttgcagctattttctcgatataaatattgtgttgggctcat

SEQ ID NO: 12368 - DNA, 960 bp, Oryza sativa
  Intron number 2 from transcript LOC_Os04g20990.1 (locus LO C_Os04g20990) derived from phytozome v7.0 (chr-ID Chr4; po s 11804208 to 11805167 reverse strand)
tcgcggagaccatcgtgcatcagaaagataacttggtgagctatatgcccttccgcccttcacttcttcatgattaaaaccgggtgaaacgtagatgagagaaatgcaaatccttgctacggaggaggaaaccctgcaactgatcagcagtgaagcaacctgtggttttaccacgattctgaattactgtgcgatgtgaatctggtagtgatttgattggagtcagcagcaaactgaattcgtttacgattggcccactttcattcatgtcaataacaatgccacaggtgttccatgaaaaactttcccgtgcgcattgcataagttttccattctcttcaagctatatctggtgactctttaagtacactcatcagagtcttatagtataatgttcatcttaatagttccattagcccatggtgcgctttcatatatcacaacttggaacctaatcatacagcggcattccactgattccttttgtcagatatagttcatctcctctgctgtctcaatctaggcatatgcgaaggatatccattgttttagctaatcagctctttttttcacataaatattgcagtttaatgaaaaaaagaatcaacttactgccttatcgggataaccagcaatgtattgcccacatgttttttcttttgtatgttatcaagttgcgatgagctttcttggcggcactggcagcttaatatgggggaaccacttcaactcaacttggcaccatcagtgctggcttgttttgtatatttgtcactatgtcttcaatcattgtttcttaaattctacttttggtgcaatgaaggcaactgtgaaacgtgtctacgacatatggttcacattatgtgcacatgacactgctacacagaattgataaatcttattcttttgtcgtcacaatatgcaggatagatttttagcgtttcctgctgaacagcatcc

SEQ ID NO: 12369 - DNA, 868 bp, Oryza sativa
  Intron number 2 from transcript LOC_Os03g52340.1 (locus LO C_Os03g52340) derived from phytozome v7.0 (chr-ID Chr3; po s 30057843 to 30058710 reverse strand)
agctcgtcactttgcccttcttcaggtacttcaaggtgaggatggatccatggcctttttgcaatcgttagtgtgcgatattagtgattgcagaaaatgtatgttgtagttatgttttggagagctagaattgctgaaatttaaagcgatccatgcgtgactgaagaatgtggccatgtggctgtggcgcataaatgtagaatcatttcccaaacgcatattgtgtgttctatttaccaaattgatgcgtttggtactgtagtggtgatgcgcggttgcatcctggggtttttaaggttcagatagcaggcaatggtatctgttctacccccccccccccccccctctatttgtcaatgaattttcacaactaaacagattagtttggtggagcattaggtgagacgtgttgccccgcaaaaaaaaaaacggtgagacatgctggctaccttatggtgatatatagcttcaatgtcagattaatcttagtctttttgtttctacatttccttgcagtggcaatcaataactaaacttaagatttgtggtcaaggagatagtattgattaattgatgcatgcctgaaaattctgctcttagtcctgtttctagcaaaggtgggattgactggtgtagtattttttcagttagagcacttaaccaactaccatcttgcacctacagatactgacgtgtaaaatgctgaggagtcagtatgtcatacacgctgcctgactattttatttgttaactttgtgtatgattgcaccaaaatatgacattgaaaataaacactcaaaaaaattcacttgtttatttgctttcttgtttaggttaaattgtggtgtgactgccctttctggcctga

SEQ ID NO: 12370 - DNA, 630 bp, Oryza sativa
  Intron number 2 from transcript LOC_Os04g12639.1 (locus LO C_Os04g12639) derived from phytozome v7.0 (chr-ID Chr4; po s 6999939 to 7000568 reverse strand)
tatctcatccattgttgaaagggcacataatacaggtatgttgctatttcacactctctttctccgttttcatattatcaagctttattcttctcatcctaaccccataatcaaatagtacaaataagtccttaatccaactcatgtttctcaattagtcaattacacaaaaaaggtgtggttggacttgttttctttctttggcgcaaatcaactgcttgatttggcaaaattaattgagcatctaggttgttctttattatcaatggaaggaaaggggatatgactgcatatgtttgtagtttagtaaatattgctccctctgtcctataatataagggattttgacattttacttgcactgtttgaccattcatcttattcaaaaaattttagaattgttatttattttattcgtgacttattttattatctaaagtaatttaagcacaactgttcattttttatatttacacaaattttttgaataagacgagtggtcaaacagtgcaaggaaaatatcaaaatctcttatattagggggacggagggagtaaatagtaatgtgatagtgttttatgacttgtttcatttgcccaacatttttttatttgtaaacttttcaaccag

SEQ ID NO: 12371 - DNA, 479 bp, Oryza sativa
  Intron number 1 from transcript LOC_Os03g61700.1 (locus LO C_Os03g61700) derived from phytozome v7.0 (chr-ID Chr3; po s 34958638 to 34959116)
tcaccgccgccatcctgctctccgacctcttccaggttagacatttttacttgaattcaaactacatctcgaggatgcaactctttctccaagctgttacagtttctatttgtgccttgtgctcgttgttagaatcaaatttgttctgaatgcgattccggatatatcgaagaatgtcgaaccaatgtgatctctatatcgaaacagaaaagggcatacataagcaattattcactaatcaccccccatagattctggcaccgctcaagcaagtggcttatattatttttccaaggataacacaatttggcaatccatgcttcttgcttgtgtacagactaacaaatgcaaacccatttcaaatccatgattgcattttttttcaccatttcttttcgcattggacatgtggattagcctttaaatattttctgcttttgctagtcttggacagaacaaagcaagtctctgaccgcaaa

SEQ ID NO: 12372 - DNA, 555 bp, Oryza sativa
  Intron number 1 from transcript LOC_Os04g46480.2 (locus LO C_Os04g46480) derived from phytozome v7.0 (chr-ID Chr4; po s 27386450 to 27387004 reverse strand)
caggaagtccgcgccgccgttgctagcatccaagagtaagattctacttgatgctcttaggtttacaagttttgatctttgattatctagaaaagatcggaactgccttgtttaattacttgctaattgattttcttctataataatataaaaagggggggggggaggttttccatgttttgttatcggtgataatcgtcctttaattacaaatttgttgcgtggaagttattatgcctatagccacggtcaagctatgtttgtatgttcctgaaatcgttgtgtatgcaccgtctagatgtggaatgccgtacaatgcggttggatctccaattttcaacttatcctgctaaaagaagcaatttttgtagtacttctccaactgcatacacatgctcgtcattgctttgttatcccctctgttattgatagaccttatcagctcttcagttgattaattttatgcaatctggttttacatattttatataaaaaaacacacactgttttctgttgcatgcagggtatttgaaaaccatcctggattggattctg

SEQ ID NO: 12373 - DNA, 811 bp, Oryza sativa
  Intron number 2 from transcript LOC_Os05g12260.1 (locus LO C_Os05g12260) derived from phytozome v7.0 (chr-ID Chr5; po s 7035183 to 7035993)
gcgtcaagttcgtcggcggcgaccaccgcctcagggttcgtgccactcgatactgatacccatttctgtctactgctctgcttttttttgtccctttttagattagataatgtgctctgcttatttctgccttcttaattactaatccagtatgattggctcactgcaagtatatcatttatgccttcttaattactaatccacagtatgataaactcactgcaatccagtatttttagaaatcttgttttctgttttatcttggtagcaaatgtttggcattataacctctgcatatggcatgcctatctagatttagaatggatatgggttctggaagtcacattggttcatccatcgttttgattggatcagatgatagataaccttgtgcttcattatttgacctactaatttctaggaagtaatataatcatgagtagttttgacttccactagggatagaatgaaaaaatggacactgggaaactcaaccctgttttccctgttcttcatttgggcttcagtttaatgatttgcgatgtgaattccaatacgtcgtctgctttcttgaaaggcaatgacctactagtgtggtctgcatgtggccttgctgtttcttgaaccttacttgaaaaataagttgaccatgttgccttaattgaagaataatgattttaggttcttgtttatggacagctaggcactcatgatctttacgacttgtcaaagctttattttgatttgtactgatttctgtctccccactccttcagaactactcatccatcgtaactgtccatccggagag

SEQ ID NO: 12374 - DNA, 918 bp, Oryza sativa
  Intron number 1 from transcript LOC_Os04g02000.1 (locus LO C_Os04g02000) derived from phytozome v7.0 (chr-ID Chr4; po s 620591 to 621508 reverse strand)
gtggctcccccgcgccggcgactggatctgcaccggtaacacctgctccgccgcgccaaccacccttcccccctgctctaattaattccgcacttgttaatttttgatctgctacactggtgcctgtttctacatgaaaaattataatatatgtggtggaaagggggaaatcaatgccagatgctggaaataatggctttgtggtttagtttcatgtttagggtgggggtattgggatgggcgacaaacgtgcatcctcttctttgggggaaatcttgatcaacctaaagcttattatgctacctctgcacaccagtattatgcccttttttactgtatatgcttagtttttaggcttgttagaaaccgagaagaccgcagtgctcgctcatatttttagtcgcgttgttgctgtcatagtttaaagagttgggagttttaatgaataataacagtggaaatagagagacaaccaaagggatatatgtggaatgtttggctttcttttgccattccaaccaagctctgcatcttgcaataaaatttacagttgttctgacagagttttgatatggatgatttctgttagtggttcaagtactgagagcaatttatcatcaagaaaaacgacatttgtctgggaccatgctattaattatttgcctttcttgttggaatttatttattttcagctgctgtttatttatatttatttattgtgtatttgatatccatatataaaattagaaaattaccattaagcatgctgagtaaatgactagtgtgtgtgtctttattcctttcattgggtttgtgcgggatggctggttggtgtgcgtgtgcttcggtgcgttgtctccctggtgtgctggttggtttatgcgccaaatggatgaataggttgcagtaacaataatt

SEQ ID NO: 12375 - DNA, 549 bp, Oryza sativa
  Intron number 1 from transcript LOC_Os06g36700.1 (locus LO C_Os06g36700) derived from phytozome v7.0 (chr-ID Chr6; po s 21600824 to 21601372 reverse strand)
ctccagtcccccgacggcgacgtcaccatcagtaatcatatccacctctctctctctctctctcttctactcttctaggttttaaggctttctgcgcgccttctcggctctgtctcgtcagagatctgggagtgggaggcggctcgctcgccgatggatcggttggccccggggatgacgcagagcgatctgtggattagggttttcggtcgatgcagagatcatgagatctagttgtttcctgtgtgttatatcgaatggcggaattttgtttttatatcgaacgttgtaactcagatttgtttagggtcggatccggtttgcatttttgttctttttattctgctaaaaataccaggctgccattttctctagctacctattgatctcggtccaagggattactagtggtgactggtgtgttaatttggattttgagggtctaggtttatgcattgatttggttatgcagtcgtggatgcaaattgtatctagattccaacattttctgttgcttaatgaacatgttacgttatgaattgtcagcaa

SEQ ID NO: 12376 - DNA, 606 bp, Oryza sativa
  Intron number 1 from transcript LOC_Os03g60610.2 (locus LO C_Os03g60610) derived from phytozome v7.0 (chr-ID Chr3; po s 34436356 to 34436961 reverse strand)
cttggattgctcgtagggtaatttgttgtttgagcaaccaatctaatttgtcctgtccaatccatcctgctatttgtgggttttgttggattgctctcataccagcttgtttcccaaaattttgggggaaagtacataacctgctttgggtcgggtttccgacgattagtgggagatactctgattgtgtttgattagtagctaggtgccatattgtttggacttggtggtagtatagatggagatttttcgtcataaattgggagaactggataattagagtccccctatgttgcttggatcatttttagtattattattgtttttgctgggagatttatatgtatgatagtgctggaccgtatgcttccattgtagctagataaagatcagttatagaaccaagagaagtgacattcatatcagacaatatatccatatctcatttcaccatatagttaggaatagtcaatgaagactgttctgtttgctggtttgattcttaaaaagttagtatcagtattttttttgtttacttttctaacacctcatgctgatgggattcacttcttgtttgttttttcagctccatttcctgctggttcg

SEQ ID NO: 12377 - DNA, 834 bp, Oryza sativa
  Intron number 1 from transcript LOC_Os03g59720.1 (locus LO C_Os03g59720) derived from phytozome v7.0 (chr-ID Chr3; po s 33994151 to 33994984 reverse strand)
aacacatccccggctgtcgccgccgccgttgcggagtaaggagacccccccccctcccctccctcctgatttcgtcttattttcatatcctttatttactgctgtgaagtggagtagtaagctattgcatctgtgccgagtgaattaggttggaaaatagtggtaaatagaatttttcttatacaagtgtaatcttctattctacttaattttaattattagtgcgtaatgcttatgcttgaaatcgatgaaactaacattgggaccttttaattcaatgacctgcctgttatctgaatcctgcggctcactgtcttgtatgcctaattgccctccaataaagccattttgttttgttttgcgctataggataaccggctattagtctgtattaacaagttaagtactaggcagtaaagtgcaattgaccgatagttgaactttgatgacctttcatccattaaaatgattaatgtgttcactcattgtagtccctctgattacaatatgggaagtcatattgttttatggttcatttaagtcctgaatttcctgtattaggtcgtggtgcccttcagctttccaaggcctttggtttttgtcacctgttgccgaaataagttttctgatgttatttcttacagatttcaattgcacctgttgtgccgttgaatagatgacaagtctcttttacactttgcatgacattactgtaaatttgactcgcctatagattgtgctgtatggtatatttatctgcaaattttagactgccaattttactctgtaactttgttttgtagggcctcgaaggttgctaagcaagagccgtct

SEQ ID NO: 12378 - DNA, 982 bp, Oryza sativa
  Intron number 1 from transcript LOC_Os06g29770.1 (locus LO C_Os06g29770) derived from phytozome v7.0 (chr-ID Chr6; po s 17103064 to 17104045)
caagggggtaaaaaaagtacaatgagtagcagtggattagttatctttttacaccaagtagaaatgagaagtgagtgcactgtccataaatgcccaagcagaataataatattcacatgcatttagtagatttaggcaaaatccatttatcaaaaacttggaaaaatagtaaacctatcaaaatcgtcacactgcaaacttcatgttgggtagttgctaggctcataggggttctctgatcagcaaccaggtaaccctccctcctagcaaaacatgtaaattgacaaaaccggtccaaaaatatgtgataatcatatactccagtacaagattagtcaaacatgggtgctagagcacaatacacagagtgacccctcgcaacaaacttgctgcatgcattagcttgtaagcgcccacgtcaagccatgttcacatgtcaaccattcaaattaggaggaaaacctcatctatagacctactcacaaatgtcagccaatcccatagagggagaagactagtgggaaaacaaatgtaaaattccaaagtaggacatggatgctatacaagcatttcaacagacatgtaaccagcatataggaaatttgtctcgcgtgttgttggtctttctatccggtagtgtcgccattctctacaaaagaatcagggcaggtgtgcgatcgatttgtgcctcctagccaattatgctttctctcttccacatattatgctgtcaaacttgtctacaaactaaacctgatagatccaaataccctaggctcctccagccattacctgtgctagaaggggcttgacaagtaattaatctccttggatttattgggggacttcccagatcaaaacattctaattgcatattgtttacagtagacaagtattccaaatgtgcccacttcatagctttggctcatccttttctgccttagatatagctaaacactttatggaaatgtctttaggttac

SEQ ID NO: 12379 - DNA, 747 bp, Oryza sativa
  Intron number 1 from transcript LOC_Os04g51770.2 (locus LO C_Os04g51770) derived from phytozome v7.0 (chr-ID Chr4; po s 30495467 to 30496213 reverse strand)
gcgcgggtggccgtcggaggcttacttcgtcgaaggtgagttgagttcgatcgaattaggcaattagcatttctggattgcgaaatggaagttgtaaaggtatttagcattttgtttggattgcgaaatggaagttgttgcgttgtttttctgtaagtagccttggttaggagcaaaccgcgggtgtttgtttgattggtgaagcattggggattcatgattgtttaggttgagagtatagtgaatagttgaagtatgaaacaactgtacatggattaccttcccctcatttgcaggttgaaattagagtattactgtattttagtagtttattttggctttggagtgtcatgtatgaaccatggttctaatagtttttggttcatcttactagtactccttttccttcatgagcttgacaggaagaaaactctacacctagtttggcttcgcaaatttgatccacaactattttagtactagttaattcaaaacaatttagacagaggttccagtaaatcttccatccacttgattcatgcagatgctaaacctggatttctctgcattaatatttgtttgtgagagttactaactaatctcaatgtcagttatacataaccatatcatgaggcatcagaatttcttccttccaaatgtagattctgtaattacctcagtaacaggagcactcagcttgttgttttggcagaactgaacttataacaggcactttctaatagtttg

SEQ ID NO: 12380 - DNA, 755 bp, Oryza sativa
  Intron number 2 from transcript LOC_Os03g52430.1 (locus LO C_Os03g52430) derived from phytozome v7.0 (chr-ID Chr3; po s 30082063 to 30082817 reverse strand)
ctgcgcacgctgtgtacaccatcgcgcgatctgaggtgtggattcctgttgcatatcgttctgttcggttggtgggatgcattagagtcgcggtccatctttaggtttgtcgatgttaacaatttttttccaggtttatttgttcgcttagtgaaaagaaaattgctggttcccacaaaaccggaaacaacttgcccatatatgagtcagattacttaatgttctttagaaatattctaaccaggttgaaaaatgtagtttcactttaaaaataaactctacgttgttgagcttgtgcttgaatacgtttgtagagagcagatattacatatgtacatatatacaataatgtgaattgtgaaactttgagtatgagcaaatcaaatggtggtcttctttggttgagatgtatagatgtttgtgtttaaagaactcttgcttgttaataactagcagttctacatggatatgttcactttcaaaatgttctctgatagcgcttgcgggtataggttcctagtatgaggttaaaatgcggtggaaggttgctaggttgagacatcgtctacttaaaaggttgagatgttacagtctccttaaaatactaaatgatggaaatccctattgctatcacttggtatctgtgaactgttgtaagaattgaaagaatgtggttctttcgcttctaagtttttggtatgcgaagttgagcttcactgattgagttggctatttgtagggtctgagaggacttt

SEQ ID NO: 12381 - DNA, 873 bp, Oryza sativa
  Intron number 1 from transcript LOC_Os05g04360.1 (locus LO C_Os05g04360) derived from phytozome v7.0 (chr-ID Chr5; po s 1994551 to 1995423)
tcgaggtcgaggttgccgtccaggtgcctcacgtgagttgctcaactttgtgttctgtagttctacgttttcagtagtatttcagttgggagatcgaagaatttcgtgggaaataacatggaatctagcaaggattactagcagtttagcagctgtttttcagtaattttaggattgtttgttaatactactcatgtgaaaaaggtgctttcagttgttgtaatcagctctgatttttagatatctctatgtaaattattgctgtcatcttgttattggattttaggtttattatggagtttactgcctttctgtttattacacgagattgttttctgttcgtggatgcaaaagactgacacagtttgtaagaaaaaaaaaagtagtccctttttagggggtatagggtggtggttgtaggccagaaggttgagaaggtgggtgctgatattattggatccattgtgtagatagtgctagtggtagttgagttgtagtatgtatttatgcgctttcgcgcaagttcaacttatcatacgaatttgcgcagatgattgtttatctagcctaaaagtgttgtcctgtttctatagctgtagctgaaacttttcagctcttgttcagtatcttatttcagtgtagagtggggtagtggggtaaatcatagtgctgcgtgagcggcaggataggattatgtttgaaacataactacgcaagtaggtcagtggcagtgctgggtatataatttagcagattaaggaagaattggttgtttatgtttgttttgtgtctgagaaataagattagtaatttttgtgtttctgttcattattaataggggttggagagtgctgctggtgcaccgagcatatc

SEQ ID NO: 12382 - DNA, 628 bp, Oryza sativa
  Intron number 1 from transcript LOC_Os07g10550.1 (locus LO C_Os07g10550) derived from phytozome v7.0 (chr-ID Chr7; po s 5709546 to 5710173 reverse strand)
agcccgcccgccgggcggcggcctctcctagcaacgtaacctcctttgccctcctccatcgatcgatctatcgatctccttccatagcgttttaattaaattatgtttgattggtcgagagattggggttcgaaccattgcttctgttgttgcaggttgccgctcgatttttttttgtttttcttttcttaaagtgcctgcattatacatttgctaagttttatattgatataatatgaaaaataatttttacaagattgcagccatggaaggctgtaaccatgaaagaaaaacaaacaaacacgcaacctaggagaaggtctagcaccaagccagccgccgctaagcgagatcgaacgccgctagaattttttttgttttcgttttgatttgatttccgttagaaatggcattccccccaaaatttatgaatttcgcctgctcggttttaacttgccaacaacaattattaatgtatcttgctttggagaaaattcgtagctagatagtgcatattggaggtggaatcccttgatttgatcgccattgttgtgtttgcaattattctaattagcttttttttttgttttttgctctgctaaatcaattctgcttacagtagtagggg

SEQ ID NO: 12383 - DNA, 655 bp, Oryza sativa
  Intron number 1 from transcript LOC_Os03g61800.3 (locus LO C_Os03g61800) derived from phytozome v7.0 (chr-ID Chr3; po s 35030860 to 35031514)
aggagatctgcatctgtatgcttccaatccctctttagctttgggataatgaggttgtgctctgctgacactgtagctttcttgatctctctgggggagatggatgccggtttggagggtggtagcagggttttggtgggatccaatcatccaagcacacacattgcagtttctgttccttccttctttagtgagtgagtagtggattggggattggggctggtgatctagctacaggctattacaacacaccattttgggggcttcttctgcggtggcatgggcactggatagattggtgttggtgctatgatgattttgtttggcattgggtagcattggcgcgtgtttgatctgttttgtgctaaggttgtgttgagcactggcattgggaggaactagaggccagatgttcatgctgcttgcgtttttcctgccacttgattgaaatgttcttttgggatcataatatcatgtgcttggctgaacagtgaacacttttgttgagactcgtcatgattagttgcgtttctttgatccaaaaaattgtttttccatgtagcaacttcagaggatacatggacacattgtttagctaaatatttggactttctagtttattcatgtaaaatattttttttgataggaaaaatac

SEQ ID NO: 12384 - DNA, 630 bp, Oryza sativa
  Intron number 2 from transcript LOC_Os04g58380.1 (locus LO C_Os04g58380) derived from phytozome v7.0 (chr-ID Chr4; po s 34550019 to 34550648 reverse strand)
ggggtgcgacgcggacggcgacacctgggacgagtgtgagtattatcatctgccaaatgtcgctgtgaattgattcatccgctcattacccgattttggttttgctgatggtttagttcatcgccgattcaaatattttccataggatgagatatttatgttatgttattcgtggctgtccttgtgaatggatggaaaattaatattaggcgtatatgctttacaccgttgatggaaatcatgttttggagttcaatagtactagtatgtggctagttatctgacaaaataggcatggttaacataatgacccccttcattcagtggaatatagttaaaatttttaattggtaacttgcagtgctgtttgtgtcaatgctagctgcaatgagtcatgtactcgtgtttacagtggatcgttggtgcattccttgctcagaagtttgtgttgtttctgttggtgccctaggagcattttattcttctgttgataccaatctgtgtgatttagggctaagattcattccgattttgattgcacatgaaaaaattttggcttaaaattgctgatcactttgttttctagcatagcttagcttacttgccataaaaattctcaggcataagtaa

SEQ ID NO: 12385 - DNA, 629 bp, Oryza sativa
  Intron number 1 from transcript LOC_Os04g53510.1 (locus LO C_Os04g53510) derived from phytozome v7.0 (chr-ID Chr4; po s 31693566 to 31694194 reverse strand)
cagctcctccgtgagcttcaaacaagtatatgcttcccccgccccctcagctttcgatccaccttcctatacagagatcgtcgttggattctaccgctatcgtttattgcatacttattactacctccatattttaatattttaatgtatgacgcagttgactttttatccaacgtttgaccattcgtcttatttaaaaaaattatgtaattattatttattttattgtgacttgattcatcatcaaatgttctttaagcatgacataaatatttttatatttgtacaaaaattttgaataaaacgaatggtcaaacgttggtcaaaaagttaacagcgtcatacattaaaaaatacggagggattatgttttagaagaaaaactgctcttaggctcctccttaacctgattggttcttcagctagcttataataaagtgcaatttagacaggggaatttttaactcttatctggtctagtgctcaaatcttcaccttattttggtttatgcaaattagtggttcttgtctgtaagccttgaattgcattagcaaattcattctctaaccttttgtttctatctctatctctagacaaattggacacatcttcaaagataatttacgct

SEQ ID NO: 12386 - DNA, 770 bp, Oryza sativa
  Intron number 1 from transcript LOC_Os06g27870.1 (locus LO C_Os06g27870) derived from phytozome v7.0 (chr-ID Chr6; po s 15795424 to 15796193 reverse strand)
tcggtggtggtggcaaaagtattcttttctaccaggtaaatttctatttcaatcatgctatttcagtgtatgactatgtgtggcatttttgtgtttgtgtttcttattccctgagaggcatcctattcaacttctggtggattgaagtgggaagatggaattttgtcaaattgatgaataatgactaaacatttaatggccaccaatttggaactccagtgtaattcagtaaattactattccgaatgaactacccattctgcttgttatgttgtagtctattgggcatctatgttgacttttcttgtttccttgattcgacttaatatgctccgatctgaattcgtctgtgatatatattgtatggcaacatcagacagagcacatttttgccctttcgagttaatttgccttgagactatctgcacgatcttcacaggtatcacttttcacgatacctaaaaggtggaatagcgattttcgaaccatttcctataagagaaaggtttccattactttgagaaatggattctatatcaaactatagctattgcattaaagaagaaaagaaactaatagaagtcgaatacgcggaatggtagtgaatagagagaaagattcttctggttgtctctgtgctaattttgcttttcccttagcttcgggatggataatcacatcaaggaactgtgatttcaatggaacaaaacaatgatacgtttgtgcttcattcagagctggagagggtaagacgactcattacagagaaa

SEQ ID NO: 12387 - DNA, 862 bp, Oryza sativa
  Intron number 3 from transcript LOC_Os06g14412.1 (locus LO C_Os06g14412) derived from phytozome v7.0 (chr-ID Chr6; po s 8054793 to 8055654)
gaaggggcaaacgtgctcgtgaggtcagttgcacattaatcttttgtacacaacttgttttggggggtacaatctatttttatccgttataactattttttgattcccattttcaccctgaactaaaaaaatgttatttatgccctcaactttgaagactggaaaaatagcatgctaaaccctactccatagtgattttgcttgacatggcagtgaagtttgctgatttgatctcttctttggtaaattccattgatgtggacactaagtggtgtccacggtagcagaacatgcataaacaggagcagtcatgtcaacaaaaatcactacagaaaagggtcttcctagtgtgttatttttctggttttggaagttgagggtgaaaaatactatgtaattggttgttgatttcagtgttaaaaaatgaatttcaggaagagtttaagggccaaaaaagcaattttttttaaaaaatcaacatgaaacagtaggggatgacccattgtaaagtatatatatagactttgtgcaaaagtctgcaacacctaacatgtgtggaggcctgtatggccagaaaaaaaagatatcaactaaaactagactacaatcttgaataaagtttaagaaataggaaacaaatgggtgaagaggtgaaattgagttattctgcagccacctcgagaagtgtggaaagaatttcttagaagctctgtcatttaggagaatcatgttggctagaagcaatctcttcaatctgtttttatttggaggtgctttgttcaatatatacagacgtatcactttgttattggttgatattctgctattctaatttgggtataatccttgtaggttcgctctt

SEQ ID NO: 12388 - DNA, 856 bp, Oryza sativa
  Intron number 1 from transcript LOC_Os05g38150.2 (locus LO C_Os05g38150) derived from phytozome v7.0 (chr-ID Chr5; po s 22317264 to 22318119 reverse strand)
gcttcgtgagggacgtgaagcgcgtcatcatcaaggtgatttttgtttggccgctgggtcgcaggagtcgccgtcacggattgaccttgatagatctagtttccgaggattcgtgcgcgtctgcttgggcgctgtttgcattgtttgcgctcctcttctccgtattcgtgagattgtttctggatcaaatttaccgggcgagtgttttgttcagagttgaagactcgagagacgtttgatttgggattctcgttgttagattatcaggagtggggctttgcttgggcttttctgtggtttacttgatgtgacggcctatgtcgaagttgccaatctttcgactctggtaggcatcatcatgggaaaactgttggctatttcgctgcggggcagcggatttctgtcagatgggaattggtgggtggaatggcacagaaatagaaaagagacatagtatcttatattggagcgttcggcaaatttctgtcccttgcgatcgctctcacaaattcgtgtttgtttcatctgtgacactttttatttgttcaaatcccatgctttttccaatttttttataaaaaatatgcggaactggtgaaataatgtctgaattggaaaggtgatgagaatcgaataatgtagaatcaaataccgttgcttttgagtttaggctttggaaaagcgtttaggctttagaaaagcctagcagttttgtggaacctcaacgcaataccttcaacacaagatgtaccactgtaccagtacataataataatataataataatgtttttatctctgtgcggctaattccttttttgcatgacaggtgggcactgcagttgtctccagacaag

SEQ ID NO: 12389 - DNA, 918 bp, Oryza sativa
  Intron number 2 from transcript LOC_Os05g15630.1 (locus LO C_Os05g15630) derived from phytozome v7.0 (chr-ID Chr5; po s 8846977 to 8847894 reverse strand)
tggtactgtctcctctctgttttgtaaatttacttacaatattgtttgattccctcgtttcatcgattcattctaaacagcaagataatgaatgtccttcttttcggcattggactttccaatcaattaattgatggtaaaactcgtaaagatcaactttgcgaaaattccattgtatcctaggagcttgtaactcataactcattagaaaaacaaaaatgagattctatataataagttgttgatattcaataactcgtagaaaacaatcacaaaatctaaacatttattagtttatccataaggcgatcccgcaatacattatagccattttctaatcgaaatgatcaagaaagatgattcagtgttctctactagtagtattatactactagtaaaaatgatctgaaccgttcgttaccaagagtaaatcggtaatttactaatacagttattacgggtaactttgttatttatggttttccccggctaaatcgatatgtggtcattcattgtgttggtattgctcatattctatctaaaaagctaaaaaaagaagaaaaaaaaaggtttacccactactaaatgacgattatgtcccttcacactttttttttttttgacaataatgatcctcgacatttctactgccactatctaaggtgataatataaatagatacaaacccttcgatcaaatgagatcaacagtttataaattgttttctactacaagtagaaagcaccatactaggctcacattattccgtcttttaaaatgaccagatttatttatactaaattgcacggatgatcctaaagcttgtcgcatgcatggtatcatctggtaaaaaaaaagattgtagaaccagttttcgatcaatatttctccgtccgtccatgtacgcaggtgttgggg

SEQ ID NO: 12390 - DNA, 1002 bp, Oryza sativa
  Intron number 1 from transcript LOC_Os06g35530.1 (locus LO C_Os06g35530) derived from phytozome v7.0 (chr-ID Chr6; po s 20717045 to 20718046)
tcgacgacccgccgcgtgcgtccgccgaggagaaggtgagcgttcgccgtcctcccgccgcgtgcgggggccgcgcggcactgggctgggccgcccgagcggctagggtttccatatgctttgaccagcacccttcccctccccacggcgtacctggatctgccgcctcggcggtggatctgctagctgctgtcgattcgttttgtgggagctgggcgcgctccggatctgcccgcgccgtattatttctactatggattactcccgtttctgccattttggggactaatgactaatcctgtggtgattagcgctagactgtgctttgcgtggttacgctttgcttcgcggagaggcgaacgtgctgggcgcctgggcgctttgcgagcgttaccgctctctggtggcaacttttgtgcatcccaagcttgcttccttctagttagcttgtgaggattaatgtgaaatggcagttagcttagggtgttggattgtctatgggccagtatttatgtgtcctgttgacctgttcggatggtattgttctccagtagtttctgcatggattgttgtttatttgagttaaagtggaaatgccaattaatttttaagttaaaattgaaaatgcgcattaatttttaagttaaaactgggaatgcccattagtttttaggtcatttagttgatataccagctttcggcgggaatacagttcaaacatgccacgtttgcctatatgggttcagacacttggttttaccggttagtgcaatcaccgaaatgcctttgtagtatttaggtaatgttacttggaatcacataaagctttctactgctaatactgaaatagctcctgtaaactgatggcatctgttagttctaggtttttatgaactacgaacttcatgagcttgattgtttgtttaagtttcttctggttgctgatcattatattgcctatgtcttgccctatcttatggttcgtttccatgtcatggcagc

SEQ ID NO: 12391 - DNA, 1015 bp, Oryza sativa
  Intron number 1 from transcript LOC_Os06g06530.1 (locus LO C_Os06g06530) derived from phytozome v7.0 (chr-ID Chr6; po s 3061262 to 3062276 reverse strand)
tccgcaccccgtccccgcctcgtcctccacatcgagtaaatccctccctccccgctctgtgcatactgaatctctgcatagtgaatcgctgggtagcgcagaagagagaactgcgtgtcatgtttactcgatcgaattgtgaacagcttattctacctgattggattgcgtgctagattggcagatctcatgttgtaatccggttggaggggtatcgtgatcccgagcgatttatccctgaaactgagctagtttggttttgagttgtgcattgaacttctactaccatttggtttctaggtggcttgtcagacctaccaagcttgttcatgcagtaaattgcctcgatttaatcatttgcacatcggtgtgattagttagttcaccatgctatgcttcctagctagcaatgaaaaaggggacgtaccgggcacttgtatcagcaacaacaacagaattagattaaaccttgtctttggataagggaacgagctctactactgtttatatgttctagttgacctcagtataggcctaaacatggtctcgttatgtacaaaattgagttctcaaaagtaacagctttgtttagttgaaaatgctgtactttctatattttaaagtgtgcgagaaaatctggcttttgcatgtgtgcgttttttcactagccaaagacaaataaatgcaacagcatagggttctttctgcacctttgctaatgaaacattgactgtgggagtgaaaacattgaagtgtttgttttaatggtgttttcaacatagccgaagttggtaaaattgtagaattccctgggcccatcgatataatttttttcccaaaagttatttgaagacaaaaatattggaacatccctgtttttactgttgatatcatgccagatttagaaactgccctgtagcgtttccttttttgccaattatcaagagcatgttattcatcattaattgttgttgctgcagtgggcatacaagttgtgataaagccagcatatcgg

SEQ ID NO: 12392 - DNA, 617 bp, Oryza sativa
  Intron number 3 from transcript LOC_Os06g15820.1 (locus LO C_Os06g15820) derived from phytozome v7.0 (chr-ID Chr6; po s 8979197 to 8979813 reverse strand)
caacgtctacagggtccagctgcctctgtcgcgatgtgagcattgctagctcttcttccttccttccttcctactactagcttttcagctctgactcacagtcttcttcatgggattctgctaactagtactactttatgatgattgtcaactcgatgatgtgaggctgtgagtttggtttggttggtcagtttgtgattgatgatgtttgcatgctagattttggtccaggctagtttgtttgttgattgcgaaatgtttgttagtttcttgtttgcaattataggttatgatgtgattgtgctttgctacttggtcactttcactcccattgtttagggaaagatgacactggagttgtcctctatcttaggatttgactaaacaggaacctgaaaaatcattggtgaaatgaaatacatcgtaatttgtttgtccaaattagtacaaaagcttcactatctgatgtttttttttaaggcactgtacgaaaaatcggtgtcgacattttacttatcaattgacgcatttgagatcaccagattctgatgtatcttgtaaaaaatggatcaaacattacagatagcagaccgaagcttgttgctggttcgccggaa

SEQ ID NO: 12393 - DNA, 763 bp, Oryza sativa
  Intron number 2 from transcript LOC_Os05g04250.1 (locus LO C_Os05g04250) derived from phytozome v7.0 (chr-ID Chr5; po s 1936615 to 1937377 reverse strand)
aaattgataatgtgagtcattttttttgtctgcataaaatactgacaacttgtaggaatgttaatcttctaacaaacctctgttcctatttgtatcgataacttgcctacgcctacgtcgagattcagcagcaacaggttgattaggacgtgggatcgggatattagaaggctgccggcgtggtcgaccacgacgacgtataattggttgagaagaacctgccgtattatccattctacccgagagcataaaccaacgaatcctataagtcgaaataaataggtgtactattactgaataaaatcaaactgaacttatcttgtaaacaattgttgaacttacaaaaagataataggtcaaattgagcattcatcatcaagagtagaaagaaacaaaagccgggtgaaagcataagggagaagaggcacataccagatttatctttcctgaatgaaaatccacaggagccacaaaacaaattcaaaaggaaggccatcggtaccacataaacaaatacccttctgtagacatgaaagattcaaactgatgaaaaaacctatcagaagatcattgtactccgaataactatgcaatgagattcagatgaaacgaagcagttggtggaggtggattgcagaatttcattggcaatataagcgaagggccacaatgatatcgccatggcgttatgagcaaacaaaattaatgtcttgatgacggtgatgaagtctggttttagtgggcggcggtcgtttcgcttctc

SEQ ID NO: 12394 - DNA, 739 bp, Oryza sativa
  Intron number 1 from transcript LOC_Os04g23150.1 (locus LO C_Os04g23150) derived from phytozome v7.0 (chr-ID Chr4; po s 13153446 to 13154184 reverse strand)
cctatctgttccatataccgtgatagaagaaccaagtgagttccaagaaaggcacaaatacaaccagtgccttccaacttgtagagatctagacaaccaagtttttctccttcggccaaccaagtggccttctgttatatatgctcctcgatcaacaacgtcacaagttcaagcttatctcagaccacatacgggttatgttccaacttcaccaatcgccaaatggtatagcaggtgagatgattcctcacatctaaggccctgtttgtttcagcttaagattattgtaatctagattataaaactagattactataagctggattataataagccgatatagaataagctgctagctgtttgtttctctggattattatctgtttgttagttgttagccacccaataatctaaaataagcacctttagagtggcttaccagattatagtaatctggcttatagattataataatttatcataataagctatctgtttgtttcagcttactcctaataatccagattataataatcctaagctgaatcaaacagggcctaaggacataattgttttcaatagctcttaaagcggtcaatcgacatgatttgtatggaagagataaaaaaaaatcagaatttaggggcatacaagggtgtgagaaaaaaaatcataaacacataaggtattggttcaaaattcaggctgctgcaagggattttctctcaataaaggcctg

SEQ ID NO: 12395 - DNA, 858 bp, Oryza sativa
  Intron number 1 from transcript LOC_Os04g56950.1 (locus LO C_Os04g56950) derived from phytozome v7.0 (chr-ID Chr4; po s 33766367 to 33767224 reverse strand)
gcagctatctcaacaactcccaagctcaggtacgtacgacgtttccaaacacgagctttacagaaagcaggggcaaatcctgtgaaatgaatcactgggatcttaactagggaaactattctaatcgctcgaggggatgttccctcgtttgctcaaaaaccatctaaacggttatgaaaaattctaaaaaaatttgacaacattcatacaacacatatatacaacttcacaaaagtccaaactcaactcacacacgtcgagatataaaaaagacaaattcagcgtatgaatagtagcgtactgtttatatctaaatttgtcttttttgtttctcgatgtgtagatcgaatttgaacatgaattttggtggactagtaggtatcattatactttacattatcaattttttttttagaatttttcacaactattagcatcgaatttggaagaaaaatgtatacgagaggatatcccctcgaggtattagaatccactcctcttaactatacatttagcaaagaaaaagttaggatctgaactgaacccttgtgctctatgaaatgatcatgtggatgtttcaatcgtctaacacttgtgtttaatatattgaatatggctttcagttactgcaacaattttttttacaagtacaaaaactcaaaaattttctgaagatgtgtgcaaaacgacgagtgtttttgtcctgcacaagatatcagatgtagctagccatccaatatttagtcctactttactgtacaagtaaatgcatggtagttactataatacaggttaagaattgatagcgtcagtttttaactgtaaactggctataaataggctctgcacgcccggcgc

SEQ ID NO: 12396 - DNA, 647 bp, Oryza sativa
  Intron number 2 from transcript LOC_Os05g05940.1 (locus LO C_Os05g05940) derived from phytozome v7.0 (chr-ID Chr5; po s 2971564 to 2972210 reverse strand)
tccccctcgacctcctcaagttcctcgaccgcaaggtagttaaatttaatttagggcatcattaaattcgcccgtcgaattttccaaattgaagacaaatttgcatatgggactaatctcagcatgttcatcttggtattattggttggtcatgttcaattcatcttggcttatcttgagaaagagagaaaaaaagaggatcagatgatgagttttcgctcttaaaatgggattaaaatcagttgggatgaaataattttatagctgtttgagtgaacgagttagttttgatggttttaagatagcacaagtacaacttaatcagttgaaatcaaactaattttatgaaattgatctcagcctgttcatcttactgatcgatcatgttcaattcatcttgattagtaccattttaaaaattaaatcatctttttagttctctatgatggatcaaatgatgcattcttgctctttaagtcttaagataagatgaaaatcagttgggtttaaactaattttcctagctgtttgaatgaactacatttggaaccttttttttttatgttgttgcaggaactgatggttttttcatgaactgtttctgttcgacaggttggtgagtccgtccaggagctggaccgccgcgt

SEQ ID NO: 12397 - DNA, 988 bp, Oryza sativa
  Intron number 2 from transcript LOC_Os05g14240.1 (locus LO C_Os05g14240) derived from phytozome v7.0 (chr-ID Chr5; po s 8001301 to 8002288)
cctgcatcctcctccgctacctcaccggcggcgtaagcacccaacccgtcaccgccgttaattctttctttctttctttgcctgtcaaaattaggatccgtgaaaagaggaggaaattttttttatttgggggtggaatcatgtcgttctctcgatttgtccgtggccatcaacttctaaatttgtttttgttagctttttttgggaccagatgagatgctgggttaatttactaataattcacctgataaacttctgtgggtttaaggttttatagtagtaattgttgaggaacttcaaagattgtcaggtttttaatcctgtgattcagttggttcagtttaccaaaaaaaaaaagactttgctgaaaaccattagttacaagcctttttaaatcagttttgtgattcagaactgtgagaattctagttcaatctatagttttgttttcttatttggataacaactgccgattgcttcaaccaaagtcaaccaaagtcgtataagatatgaatcattatgctgttagtgactctgatgaacttccaggtttgtattctgctttagtgcctgaagtctcaaaaaccctctagagtcttggtttgtaaagcatatgtatcacaaagttagtacaagttagccaagttaaacacgctgttagcaacactgacccttgggaattggaatagctggtttaaaaatacaagttgaagactaacataggcgagaccaagtcacttgatcgtactttccggttagtccacatagatacataagcaaattcatcactcctaagtataacaagttcacacctgtgctaaataagtataaattaaaggccacatcaccatctggttttctgttcttttcaagcatcttgtattcatgtgtaagctgaacacgataggtatcttcctcacaatctaaccaaactgtcgtaatgtgcaatgcaggcgaccccggtgcacactctgggctcagggatagg

SEQ ID NO: 12398 - DNA, 983 bp, Oryza sativa
  Intron number 1 from transcript LOC_Os05g48450.5 (locus LO C_Os05g48450) derived from phytozome v7.0 (chr-ID Chr5; po s 27716402 to 27717384)
cctccttctagcttccaccgcatcgtcgctcgccggtgagcatccctccctacccacacctcatcaggtattctgctttatccctcaaaaagtttgggggttcaaccgaaacagggttagatctgcctctgcccagctccacctactttcaagttgttaattttgatttccgtttttagcatatgtaatttggttactgaatctcatccaaacacccttatagaacgaaaaatgtaagctcacataatttgtactcatccaaactcacgtaaatttctttaagaagaatctagaccacaaactacccatagtcacacaaaatatctttttatcaacttatattcttataagtaatttttattccacaaaatttctaaaggacatactgtgacacttggcattaatctaatttaacttttttttctttgtcaggttataaattttctaagacatttgtgccacttggcatgaatctaatttaacattctttctttatcaggttataaattgaaaccattgaacgtactttgtcttcccgtccctaaaacattgtgatatatctataatattttaatatttttaattttaaaaataatttaaactaataatatagatatttaaattaggtaattaataaattcaaatcaactatagtttagaataaaaaataaaatgatatatgccaagtacaatctaataacaatagaatgttagaaacaatatgaattcaatatttttataaattttaagtacgattcatatataaaactaaagaaaaatatagatttatatataagtgagaacataataaaatgtaaggtaaaattattaaaggaaaaatattattaataaacaatgatgttgatgtatttctaaatattttcacgtattatttattaagtgtcaatgattgaaatggatgatttaccccagccactgccatttgaggcccacacagcgttggccccaccagtcggtctcac

SEQ ID NO: 12399 - DNA, 333 bp, Oryza sativa
  Intron number 5 from transcript LOC_Os04g21730.1 (locus LO C_Os04g21730) derived from phytozome v7.0 (chr-ID Chr4; po s 12287937 to 12288269 reverse strand)
gaaaagaggtaatactctgtaactattacatctaatgctctctcttttagattataatcgttttgagtttcttttcgccaacatattatctttcccacatatcttttagtccttgtttctactgttttgcttttgtactcagtagctcagaacattgtctttgtatagcatcattataagaccggttctagttttttttttttttcaatttggtaatgaaacgagttatccgtatataagttgcggattcatggacacccagttctataatcatttataatgtaaccatatatacgaaatctaatgttgttctttaggaggtgatcagggagg

SEQ ID NO: 12400 - DNA, 907 bp, Oryza sativa
  Intron number 2 from transcript LOC_Os05g04660.1 (locus LO C_Os05g04660) derived from phytozome v7.0 (chr-ID Chr5; po s 2196559 to 2197465 reverse strand)
cagctcggccgtaccatccaggtaaaaattattaacagcttaattaattacccactaatcaaaattctcttacttgctttctagagtactgtactattttcttcaaagatccaaacagataaataattcatcacacaacctacttgtcattgtagttgttaattgaatatgcctagtaggaccagtacagtactccagctgaccagaatctggaacactagattacaattagatcaaacaaagtaattattggcaagttcatcatttgggaaaggaagatcaagattccatgttagttgggggttaggagagtgaaagatgagacttacaacagaaaaaagttggactttctgccgagcagtcttctctgactaaggcactaagaagaaaattgttcagaaagtgccaaacaaggtcatctcttgcagcccataactcatagtgtcaacacatcatgctgactatttatattgaagtcataatgctagtacaagattagcatcagtcaggaagtttgtccaattgtattacctaaagttcatataagttacatcaatcattctagccttcctcaaagttgcaaaaatcttgcaaaaggcacttttggtttcctgttacctgcttctagttgcctgtaaaccttcagttctacagacagaactctcaattagcagaatatatgtatgaggcaggtgcttagtagcagtagtatacacttaaactttcagtttgtgtaaagtatgttgtcttcagaaatcagaatcataagtggtgatacatggtttatctcttctttgttcttctgttctcatcaagtgtctcaattatattttgcacaaccttctgatttcaagacatctcaagcatttctgttttactaattctgacaggtttgggaggtccagat

SEQ ID NO: 12401 - DNA, 1016 bp, Oryza sativa
  Intron number 2 from transcript LOC_Os05g49200.2 (locus LO C_Os05g49200) derived from phytozome v7.0 (chr-ID Chr5; po s 28170444 to 28171459)
caagtccggacagtcgagcacttatcagaagagtccgtgccttaaaactttccccaaccgtgctagtttatgttgtgactgtctgcctctctcagtttacttggatgcattgacaacatccttttttgctattactcgtatttgctctatagctggtggcatatctcatgttgaaatttgcccttttaatccaaaattggatgtaattgaaagaatcctacgtggtagttatttggattttggtgtgaaaaaaaatagccttgttagaagaagcaaaattggatttagttaaaaggatactagatggtgttatttggattttggtgcaaatcaaattaggaggttggttttattcaagttaaagtttgttttaaaaaaattctcctaaaaagatagatactagatttgcatatatgcattgaaaattacatcttcgcttggcggttatacttttagtccctctaaattgttcaatcatttatgatgaaaaggaaaatcattttatatcacaaagtatttatgatgaaaggggaaaaatattctgcatgggtttgaacaaaatacgtggattggtgtagccttaacatacttgaaaagggtatgatgttgatgtagtgcccacatggtgtcgcttgacattaaaacgatatgcagtcaggattgaggaacattgctgacaatttactatcgctgtctgtgttgaccacaataattcagatgtaccatcctatcttctaactagaaagatgcatggaagtttcttacattatttccagcacttgaaattttagtgaaatatcattaaaacataaccacttactttgctgtgatatgaaataaatgttttatttcttggaaagtggtatattcatatattcttacagtaaatttattgattttcttttcatttatttctaaattttaaccacccttttggtagcttaaggaaaattgtatgtttgacagtcctgttttctgttgtttcatccctccaggaaaaccagctgccattcagt

SEQ ID NO: 12402 - DNA, 609 bp, Oryza sativa
  Intron number 1 from transcript LOC_Os06g03600.3 (locus LO C_Os06g03600) derived from phytozome v7.0 (chr-ID Chr6; po s 1393568 to 1394176 reverse strand)
ggagccttttgttgtgaagttagttcagtattctattttgtctgatgtgaacttgatttctatttcatttctttcgttgtttgatctgacctggaagacattttggtatatgctccattcttgtacttgtatgagaggaacctgggaaaaatatttttttttgtgtggtggaaagaatgctaaagctcggctaatttcaaccaaaagagtaaatttcagctcacaccctgcataaccagcatcaactgttttgcaatttgtgtttcatgctatattttctgtcccttattttcttttcaaagacgatttttttatttatttaccatttgttggattctagtttcattttctggttatgctattgcagtagcgtagtatggttagagaattgaaaaatggccttcttctgttttctgttttttcaaccattgaatcgagaaatttcatgatgctaaaatctcattactacttgcatctgtttggcttcagttactgctgaccatttctcagttctcacgcattaggctgttaacagttcttatccagtaagatatttgatgatttatttcctaataattcatgttcaccttttgcaggttcttcaaagtg

SEQ ID NO: 12403 - DNA, 692 bp, Oryza sativa
  Intron number 1 from transcript LOC_Os05g02220.5 (locus LO C_Os05g02220) derived from phytozome v7.0 (chr-ID Chr5; po s 699236 to 699927)
ctgggagaggcccctttccaatccaaggtaaccatctgccctgattgcacgcaggatacctctacagggactagtttgtcacagacaataattaacaatcagatagcgacacgccgtgtgttttaggccgtgttcttttcggtttattcatcgtgttagtaaaacagattatttacttcacatttagaaaaatatgttttctgatgaaacttctaccgcattactcagatcacttgtttttaaaattgatttatttaccattaagtagatactgcactcaataatctaaatgaaatattacatagtaccttactcctaatcaaatattgaatccatagaaacaagagcattgcactccactgtaaattcaacacatggtttttcttgtatttattcaatcaattagcagaagctagctaaggtagcctccagcagcttctgcatgctagctcctgggagtacttcaaaatatcaggccgatgattgacatatctctatcttatcctccccagatgtctgacaagggataacaaaaacaacatatgccggttcaatccggcccctgttaaatttggctacacgccatcttctgtcctaaactgtgcctaattaggggcacacacacacacaattagtagcattaatgactcactgtttgccatgcgtgcaaaatctggagcaggtaccagctg

SEQ ID NO: 12404 - DNA, 1028 bp, Oryza sativa
  Intron number 1 from transcript LOC_Os04g57970.1 (locus LO C_Os04g57970) derived from phytozome v7.0 (chr-ID Chr4; po s 34349689 to 34350716)
tcaagaagaatcgccactccttcggccggcaataagctccctccgatccactcccctccgccgtacaatacatatagaaattttcatcatctttggtttttcattgttcgccgaagagatcgccggagcggaggaagccgggctaatcgtatcatcatcttcaggtaacttacattaaaaataataaataaataaatctttcattcaatctagtaacttaccattaatataatcaaaaaaatattaattaccatttgtagctgttcgcaattatattaattacaatctcttctaatatatagacgtgcaatctttacgtatttgcgaaaaaccatttgttgttgtttttggtaaaaacacaattattttagaagcttaaaactcaaattaaacagtaatgatcagttaatccatgattaattcgttgatgcttacccggcatgacctgtcgtgtgcgcgtgctcggtcggttgccgcttaagctgttggcgttgtaactttaagtaagaaagaaaaggaaatggtcggcttcggcactcgcagtccggcccacttctttccctttcggtgccattaggatctaactcgtggatcatcacatctaaagtttgattatttccacgttgatctgacctttagttttgactgtgggtaaattttgtttctgaatttctggatcttcagtagttcactgaatacagggtaatggcaccctttatgttgaaaaagaagaactaaagaagcaccttgagttacaagcatcttccttttttttataggttctttgcttcgaataggaactgtacagatcagaaagcacatgcagttaccaatggttggatgtagactaataactccttttgattgtgtttgaaccagcataattttcagtcacttgggagttctgaaatttcaaattcgactgtttttccatgaaaacaagattcctattgtgacatgtgtcattgacaagtgggcaggaccatcaaattgacgattttgtttccatccatcttggaatttgcagg

SEQ ID NO: 12405 - DNA, 679 bp, Oryza sativa
  Intron number 1 from transcript LOC_Os06g06160.4 (locus LO C_Os06g06160) derived from phytozome v7.0 (chr-ID Chr6; po s 2854603 to 2855281)
tcagattgccaacactgcaaccttctgaagctcaggtacttagtcactgctcagctgcatcatgtttatctgtgtgtttcttcagagttcttggcttggctcctctggtgttcttgtgctctgggttttggagggagaagataatacttgttcatctgccatggatgatgagcagagggatggatgagccatggggttgactctctgggtgttcttggtttcttggctaaggttataggaaggaagtctgaagcttgagccctgtcagttctgtaagatttgagctgattcttggcttccggtttattgccttttgttgtttgattttagtcgaattgttttggggaatcattcatatttgattcgagaagacttcaggatagaaacaaaaacaagggttcatttctcatgcttgcttctcatgtttctgtcaattgacagaaatattaggatttgcttcttttctccatgtaaattttgatttggttaatgaacactcagagagattcagaatgagccaataaacttggttcatcaggtgtaattttttatttcggcatgttgcaccatcttatacttaaaaacaaaattaaccctgtttttttaatgatttttttctgtgatctaagcaagggggttggacaaggattaatctgtgaggctcactctgattgaagcc

SEQ ID NO: 12406 - DNA, 642 bp, Oryza sativa
  Intron number 1 from transcript LOC_Os04g43880.1 (locus LO C_Os04g43880) derived from phytozome v7.0 (chr-ID Chr4; po s 25805014 to 25805655)
ggaggccgcccggtgagtctttttttttgattttttttatttgtggtttggatgtttttatctgtgattgaatgtatgaatctgtgatgtggtgactgagtatgtgactcgatgttgtcaatgaacctgtgaatcaatattgtgaatatatttgtgatgttgtgaacgaatatgtgaatgaatttgtgatgaatctgtgaattgtgatgtggagttgtgatgtggatttggggttcaatttgacgatatgcataccactcgattcgggagaaaataaaaaaaaagcagaaaagaaaaaaagaaaaaaaaggaccagctagactgccgctaccctctctttaatcccggttggtaacaccaaccgggagtaaagatccctatctttactcccggttggtgttaccaaccgggactaaagatcgatttttagtcccggtttttttacccgggactaaagatagcgatctttagtcccggattggtagtcccgggttgaaaactgggactataagggggttacgaaccgggactaaaaagcacttctccaccagtgttaaacattaatctcctgtaaataaatcatcctatttttttcaattcaatcgctaattagaatttgaatttggtttatagggaatcgtt

SEQ ID NO: 12407 - DNA, 359 bp, Oryza sativa
  Intron number 1 from transcript LOC_Os06g40580.1 (locus LO C_Os06g40580) derived from phytozome v7.0 (chr-ID Chr6; po s 24193774 to 24194132)
ccgtaggtaacttatagagtttgttttcaatccaggtaaccaatcaatcaatctcttgttctgcattccttctttctctctcttctatgcggattggaagcaaacttttttttgtattcacagaaggaaatttacttatcttgaaagagtttgttcttcttatctgcagaatagaaagcaaaactgtttttgattctcagaaatattgtcttttttgcgcatgaactttactgaaatgattttatttgtgtttattttttctcacctgttctttgtttgatcaacattttgcgaaaatggcgtggcaatcgaacgattgattaggtgtcaagagggcataccaaagatcgtcgctccgg

SEQ ID NO: 12408 - DNA, 1040 bp, Oryza sativa
  Intron number 1 from transcript LOC_Os06g27820.1 (locus LO C_Os06g27820) derived from phytozome v7.0 (chr-ID Chr6; po s 15757095 to 15758134 reverse strand)
tgcttctccgggccgccgcgccgcggaggtgggaggtggagttcgcgcgctacatcccggcgccgcgccaagctggcccgccggctccccccggcctccgccgcatcacccgcggcaaagcagctccgccaccgcgggggagcgtggctcaccgccgcgtcccccgcggtgctccgcgtgtcgagccccggccgcccctacgtgggccccgtcctcaccgtctccatcggcgacgtcgtctacgtccgtaccgagagcgcccccctggctccctcttctttccgcttctgctgtggccacaccacgttgtgtgccactgtgctttggttgcattgcctgatttgaaatcaaagcaaaggggacgtttgttggggaggaatctgggctatgcgtgactatattggggtttagccgtttaggttaacggaaatgcggcaatgcgcgtgagctgactttgatttggttcaagaatcgctaggatagttgattctggtggttgtgctgcacggctgctcgaccatcgtaaaatgaacatcttttttcatcgtaggttctccaactgtttatcttgttcttcctgcacgagatggagcatttgagggctgtttggttggctcccaaaagtttatagcttgagtcattttttagctctgtgcagagtagtacatatttgttattatatctgactgtacatgtgtacaagaggaatcaacctggaaatttaagttgaaaaatgtgctatgttagctgattaatttcatcgatgcatactcgatcttgtgctatttttatatttcatttcgttgatcctctgtgctatttttatttttatgtgatctttttgtcacttagatgtgataagttaaggttaggccatggtatttggaagttatgtcatgagtcatgactgtatgatgatgatataatgatatattgcacagtacaactttctaattttgtttcacacaagtaacaatgtttcagaatatgctgtagtgctgttatagtaaattgttgtttttttttccatttagttatac

SEQ ID NO: 12409 - DNA, 1040 bp, Oryza sativa
  Intron number 1 from transcript LOC_Os06g37820.1 (locus LO C_Os06g37820) derived from phytozome v7.0 (chr-ID Chr6; po s 22385149 to 22386188 reverse strand)
gtatcagttctatttttctggtataggttaatttggaacgtcttaggtcggtctgctgtcggaggctagtctggggagtgacaactatcaagtctaattattttcctcttttagccactgtggtgggaggaccatctcttaaaattatatgatatttcctctgtcctaaatatagcaatttacaggatacaaaatttgtatcaaaatataatttctccacatgcgtactcttctcgatcaatcacaacattatactattgaattccacctacatatgtccagcctcaaaagttaatctattgtaggatagttttatgaaaccaaatgaaaacccgcgcgttgctgcaaaagtttcgtacgataatagtagaaataatatgtaaggtagctagacgatatgattatataatactttatacaattttcatctttgaccaactattgaagaaaaagttatgaacaattaagatggtatggtttataacaattgaaatcatatatagattaatcattcaaaggtaaaactacaatgatttggctcaatgagagaaggaaaagaagggacataatatagattaatcattgaaaggtaaaactaaggtgatatgactttattagagaagaaaagaagtgagataatttgaaccatggatcaatcatctaagggctaaaaataattgaggtgatgagatttaatgagaagaaaaaaaaatagcattaactatattatgctcggccagacaattgtctgtctatgaaagactgagcttaaaagccaaagataaagtcttacctagctagctaggagctaccctcaagattctcgagttgcaagttgagttatatgggttctcctgtgaaataggtgtccaaacgattcctaccgctacctttgatccgttttaaaatacttgacacttttgactttgatgttaattgtgcacgtgggtctcgatgctgaccttgtttgttggttttctgatccatatttcctttcatttacagtgttctgtacctgctgaagctgaaaaggaaggtgg

SEQ ID NO: 12410 - DNA, 820 bp, Oryza sativa
  Intron number 1 from transcript LOC_Os05g37330.1 (locus LO C_Os05g37330) derived from phytozome v7.0 (chr-ID Chr5; po s 21772904 to 21773723)
ccggccttgcttcttccccattcctgctcttcgaggtacgcttgctccgatctaatcccttctccgtctcaattttcggcagttcgcagagtaattttgattaggtctttgttcaatacatctaataaaattgttcggttttgtttagtactgcgtgtattaacatccttttggttgtggacttattttgtattctcgatggtttcctgaagatttgcaccgtataatatcctaatctgagcctggtagctctttgcactatccgatcggtagacgtttcgttgcaaccccaatttcgcataattgagctcggcagtatgatcttaattcgacttatttcggtttagtctaatggggagagggtagataggagtaactatgcgaaaaaacgcatccgctcgcaaaatatcccatttttctctcgtagcgaaacctggtttttttttatcaaaggtaatcaaaggtaataataacagcacgattcttgttaacatttgggggggggggtggtgaacaggtaaactgtcatttttaatccaaagtgcacgaggaagtcagtcctgcttgctattttatgttgcatgtctgatcgaaatgaatgattgcatatgttttattcccttgtctatttttctcgctcaaattcctgatagaattgacaaaatggatgtgtttattatagcttttttgctttttatatatcacaattgcaacttctttctagtctgctctgttcatatattttcatccgtagttaccatatactgagctgatgctgtggtttatctgttgcttatttaaggcgttttttaacttcaca

SEQ ID NO: 12411 - DNA, 936 bp, Oryza sativa
  Intron number 1 from transcript LOC_Os05g48450.4 (locus LO C_Os05g48450) derived from phytozome v7.0 (chr-ID Chr5; po s 27716434 to 27717369)
ccggtgagcatccctccctacccacacctcatcaggtattctgctttatccctcaaaaagtttgggggttcaaccgaaacagggttagatctgcctctgcccagctccacctactttcaagttgttaattttgatttccgtttttagcatatgtaatttggttactgaatctcatccaaacacccttatagaacgaaaaatgtaagctcacataatttgtactcatccaaactcacgtaaatttctttaagaagaatctagaccacaaactacccatagtcacacaaaatatctttttatcaacttatattcttataagtaatttttattccacaaaatttctaaaggacatactgtgacacttggcattaatctaatttaacttttttttctttgtcaggttataaattttctaagacatttgtgccacttggcatgaatctaatttaacattctttctttatcaggttataaattgaaaccattgaacgtactttgtcttcccgtccctaaaacattgtgatatatctataatattttaatatttttaattttaaaaataatttaaactaataatatagatatttaaattaggtaattaataaattcaaatcaactatagtttagaataaaaaataaaatgatatatgccaagtacaatctaataacaatagaatgttagaaacaatatgaattcaatatttttataaattttaagtacgattcatatataaaactaaagaaaaatatagatttatatataagtgagaacataataaaatgtaaggtaaaattattaaaggaaaaatattattaataaacaatgatgttgatgtatttctaaatattttcacgtattatttattaagtgtcaatgattgaaatggatgatttaccccagccactgccatttgaggcccacacagcgttggcccc

SEQ ID NO: 12412 - DNA, 835 bp, Oryza sativa
  Intron number 1 from transcript LOC_Os03g39690.1 (locus LO C_Os03g39690) derived from phytozome v7.0 (chr-ID Chr3; po s 22082905 to 22083739)
ccctcaccaccgatttgatcactaacgtcgtcttggtaattaaacacaccatcatctgatatttctttacacaccatcatcgaaaaattcacaaggtataggtactaatttttttttcacgagtagggcccgggcccaagttacctaggcccagttccgccactgagaagacatgtcctactatgcacatgcaccgtacgcacacatccacgaaaacagtccagcgattataagtatttctagctataaatctgaataactatgcgtcctaattatagctaaaaattattatattttggaacggaagtagtatttgattttgtgtattttaggtgcagtactattccatattaggtacataattataccagttaattttgaaacaattaaacgctagtatcaaacttactgctccctccgtcccaaaatataagcatttttggacctcaacacagtatttaagatgctactttgaccaacaacatttataaaagtaagattatctaaataaaaagagttgcatattatgatagtttgtttaataataaatctagcaacatcaattttacattattgattttttatttttttattttgttattaatggtcaaagtcgaaaatgtttgacttagcactattttaaaaatatttatattttggaatggagggagtagcaactagtaacatcatcagatctacattttgaatttgtttgcattttgcagtttagacaatgatgcttacctatttcttctagagaaatgaagaattcatcattgcttcaaatccaaatgattactctgtgaactcattattgcttacaaaaccacaggac

SEQ ID NO: 12413 - DNA, 930 bp, Oryza sativa
  Intron number 1 from transcript LOC_Os04g54960.1 (locus LO C_Os04g54960) derived from phytozome v7.0 (chr-ID Chr4; po s 32506072 to 32507001 reverse strand)
ccgctgccgcagtttccacatcggcatcctctccggtaaaaagaaaaacaaaacccatcaatttctctcttctagcaccattcttttttttatgtcacaataggttttctgtaattttaaccattaaacatggagttttctgaaatttattctctctctctctctctctctctcttaccattgtgttcgaagtcctgcacttctcctctgttatgaaaaaagtgaataggcccgaaattcacctcctgtatgcttgtctcttcctttattgtgaaaaaaaaacaccacctgcccttgtgaaattgctaaggctgctcctcagggctgtcatctccagtaccggttaactaaatgctccaatatttagggcctgtttgtttggtttacagggacttattccaagtccctgtcacatcggatgtttggacactaatttggattattaaacatacactaattacaaaacccattccatatccttggactaattcgcgagacgaatcttttgagtctaattacgtcatgattttgacaatgtgatgctacagtaaactttttataattatggattaattaggcttaaaaaattcgtctcacggattagctctcatttattaaattagttttttttattagtctatgtttaatactccaaattagcgtccaaacatccgatgtgacatgggctaaaaagttttagccccatctaaacacccccttagttcagtctcttacacgggataagatcctgtttttcatgtttctcttagcttatcagtctgcatagaaagacacttttataatatatatatgaacacgaataatgcaggcatgcagcaccagagatgaactgaggtgatttgtacatgagttactctgggtgttatgtttgcaggtgctttgttagttatcgccggttttagccaacta

SEQ ID NO: 12414 - DNA, 836 bp, Oryza sativa
  Intron number 2 from transcript LOC_Os06g07630.1 (locus LO C_Os06g07630) derived from phytozome v7.0 (chr-ID Chr6; po s 3689141 to 3689976)
agcagcttccctacctcgtcggcaacatcgttgaggtaaaaaataacaaaaatgccatcctagtttatcagattggatcttctattgtgttgagatacttcttagtttgatatgagatcgtggagtagtgcgtgagagaaaagccaaatgcgtgtgctttagtgtgggggcaattcggtataaattgcttttggtctgattcatcctgtttcttgtcaacattgttctgtaattcaataatctgtcttagctcgctgtgttcagaagatccacaattccttgtaagaaaatattgatactgtgatcatttgattttgcttctgctatttccattatttgtgcctacacattatctatctaagtgttagcatgtatttgcagcagtaataactctctaaagtctaaattatgtgactttgatccataggactgtaacaaccaacaacttgatctggcttggattactaacatcaaatagcatttcaacttgattactggtctatgtcagtactcttagtgttcaagatcttcaaggtctgaataagttcatcctgagtagattaacgcaaatttgcataagcataacatctgatggttctgtagatactatcacctatgatgcatttgagtatctgcactcctacatgacttgcaatatggtacgattcatcatagataaagtatttaaaactaaaccacttctattgattcggcatgataattaagtgctattaccagaaattgctgtttccctattaatgtgacctattgttttggaacaattgcgtattgtaaccatatggtttctgcttttctcaactgtttagattctggaa

SEQ ID NO: 12415 - DNA, 881 bp, Oryza sativa
  Intron number 1 from transcript LOC_Os04g40600.1 (locus LO C_Os04g40600) derived from phytozome v7.0 (chr-ID Chr4; po s 23918479 to 23919359 reverse strand)
gggccaagcacaaccccaccacgctcaacagacaggtgcgttcgcgtcgttcgctcgtagtagggggattagggagccattcctcctgcgccggcggcgccgccgcacgcgtgtgccggcgggcggtggcgatggcggcggcgacttcttcgctggcgtcgcaggaggttcagtgaacctggctcggtttttgtttagtgttgactttgctctgccgcggaagttgtggtctctcactgggagtattttggaccgttaaacagatcagaaaatatgcggttttaaacacacctacgtggccatcatccgtgattagttgcgttgagatttttcacgccattcttggtgcagtacggtactcccagaacccagcaacggttgatggaagagaaagataaactcaactcgctaagatttatttttgtgaagaaactagcgggctcctttcaaaaaaagaaagaaagaaagaaactagtgcgcaattgtgtgaaatagatgcgatcaaactactggcattgtgaaatgagaatcacatttgatatgattgtggaaagtaattttgacatgaagctagtattggccttactatccaaaaactgcaatccggtggtaattctacccaataccactataccagtaggaaagaacatttaacttcatgccagattatgtaactgagaagtgagtcagtgaagactgatatattgagccgatcgagttcatcagctagctgtgcagcctgtgctgctatcagttttccacgagactaataactaagcatatcgtcctggtttttacccctgctaattaaccccggcgaacttatgcacgcgcaatgtatggcagggcaacgacgtcgggacgcagtaccggtcgggcat

SEQ ID NO: 12416 - DNA, 740 bp, Oryza sativa
  Intron number 1 from transcript LOC_Os05g03640.1 (locus LO C_Os05g03640) derived from phytozome v7.0 (chr-ID Chr5; po s 1566730 to 1567469 reverse strand)
cctcacaagtggccccacctcccccctgacctcaggtacacatcactcatccactaatttccacctataattattactattcaacacaaaattcctccttactccctctgtcccataatataatgaatttcggatgaatatgacacatcctacaccgtgtttagttccaaagtttttcttcaaacttccaacttttccattacatcaaaactttcctacacacaaacttccaacttttccatcacatcgttccaatttcaaccaaacttccaatttttgtgtgaactaaacacagtcctagtataataaatctggacatacggtatgttcaaatttgttgttctaggatgtgtcacatccatccaaaatcccttatattatgggacggaggaagtagttgttttagcatttttcttaaatgttagtataaggccgtgctcttttgaggagttcagaacatttccctctcaacatgcaaaacagaataatagactagcgcgtgattaattaagttttagcttacaagaacttaagaaacatatcgatatgactatttaaagaaactcaagtatagaactttttttcttccaaaaacacaacctttagcaattcgaaaagcacgagcgagggaatacaagtttaaaagggagaaaaggatatgtcctaattacatgtgcaaaaatactaactaatatatatgtatagggagacgacgacagagtacagcgaggaggtgagga

SEQ ID NO: 12417 - DNA, 1050 bp, Oryza sativa
  Intron number 2 from transcript LOC_Os05g19280.2 (locus LO C_Os05g19280) derived from phytozome v7.0 (chr-ID Chr5; po s 11200649 to 11201698)
cggtctctgcgggaggcgaaagaactcatcaggaggtgacgtcatggttcttgtttttttcccccctcccttgtctgttttggttgtccaggccaatacaagaatctactagactgctatacttcgttgaattttctctgattggctggttattgtgcatttgtatgggatatacagtttggagcttctggttaaggaagcaaccattgtatcaatcctgaaactataatttgtaccaaatacattctactggagaaaggatcgctttgatcaacagcttcggagtatggtgcttatgatagtaaattttaccatcagtgtaaggggaatcactatttcatcatagtccttgggtttgaaattgtgggtcttttatagactctgaatttcccaacaggccacggaaatgggaatgatatgtgtacaatttttttcttacaaacgttgtacaacactgatgtgtcacgctgcaattgaatcttgatgatttataactttcatttaattaaatcaaacggttggaacctttgttaggacttaggaggatgtttgtaagattatttttagtacatattctttcctcttagctttcggataatctgctatggatatctttccgtgggtttattgtctttgccaaagaacctggtctgatggcatggattgcctctgaattgctgtggataaatatttaagtttcactctatcttcagtgtttgcctccatcttagagtttgaaagtgttttagtaaaaaggtggagatctgtgaaatgagcaagttgtgcatgtctctcctcaccacacacacacacacacacacaaaaactgggagaaggctaatttttctccatccaaccagacaataatttattagtaaagcaaacttatatgctgattgctgactacactgtgatgaatcagtaactagcaagaagttcggccataaaccataagtcaagatctgatctttttgtcaacgagttttttttttaatgttagtcattctataatcaggtataaacctggggacttggttgaaggagtgtgtg

SEQ ID NO: 12418 - DNA, 838 bp, Oryza sativa
  Intron number 3 from transcript LOC_Os05g19280.2 (locus LO C_Os05g19280) derived from phytozome v7.0 (chr-ID Chr5; po s 11202096 to 11202933)
gagatatcatcacgtggtaagtggtggctcttgctttgttttatacattatcctctcttttttaatgctctgcttaactttggtttggagaaatttccagggccatcatttggcttattcagggaataagctgaacggcataatggcatatttgcaaacgaaaaataatttgtgaataaaacatttatatacattttcttagcgatttaaaagtaaaggctgaaaaataaatgaaaaaaccccagaatcaacttcaaatttaaggttgaaaattcaaattttgtcttaagcataagcgaaaagatgaggctgttctatgatgggactttgtttacttatcctcgtactggtagtgatcaaggtattatctgctgactgactgactctaggactctgagttctccacactgaaagaacaagattcaagtatatgtttgtttctgacaacagatatgagattgtcaacatcttgtcattcaggacataaagtatatataacaagttaagatttcttttgaatttttatgtggcatcctggcattactgcagtcaaacagttctaactttgacttatcatttttattgtcacctcgtgcttctttcttaatccaagattgaatgtatttaacaagatttatttgagactttgagaagcacatgaagaattatttgaagagttgcttttatcttatcatttgaaatgtgcattgctaggcgttcagtctatttttctttattttcttcgacctggtcttagtcttaggaaatactatgcaaagttaactactcagtattacactagctggattaattcagactgatgcttaaaacagggata

SEQ ID NO: 12419 - DNA, 855 bp, Oryza sativa
  Intron number 3 from transcript LOC_Os06g39260.1 (locus LO C_Os06g39260) derived from phytozome v7.0 (chr-ID Chr6; po s 23303358 to 23304212)
tcgaggcgctcaagttcatcagctacccagctcaggtttggttgcagctgcccttttgtcgtctcgcttcgcttgctttgttgctctatgcatttttgtgcagctattgtatctgtaattagatgtttccattttcgttatgggtgataggcaacgcagtagtataatgcctgcgaagtggaatgttctatttttggattgttcaactgtgctaagtaaatcagtggttggaatgttctatagccttatttttgccttgattgatgcgatagatacggtcatttggagaatttatgatgtgtgagtgattattggagaagaaaattaagtttggttgagtgaaattacgaattcagactctctggttctgatatacttggagttttgaatttggttcggtctgaccaagtcagacggcttatgggctgattcagaaatatctgaacatataaacaatgtttagatcatttgtttattagcaatttttatacgtagaaaacatttatgccatgagtattatgcacaaatgccaaaatatgattatccatgatactcttatcgctgtatcgcatggatgggtgaagacagaaccatatttcctcatcaaactttttgattgaactttgaaccatccaatgtacagttatacatcaaaatgtgtttggctcaagcgcaatgtaatttgatttatcttttgaacttattggaacagtcgcaacaagcctgtgttttctgaatatcatttttgtgtctcatttttgtgccgtaataatatatgctgatttgattaaatagcacattaccgctaaggaattatttgctctatgttaacaggtcctggcaaaatcttctaag

SEQ ID NO: 12420 - DNA, 558 bp, Oryza sativa
  Intron number 3 from transcript LOC_Os05g43770.1 (locus LO C_Os05g43770) derived from phytozome v7.0 (chr-ID Chr5; po s 25385359 to 25385916)
aaaggtacattacatgacatactccttttttattattctggtgtccttaggaattaccactgcacagggcacactttcagagcatttgattgaagggtgatacaattattcactattaagctgtatcaatacattgcatgtatgctactgtaggtagtcagtgattacagaattgccctcagtgaatgcaatggaagaacaatggaaatgctgttgaatggttacaatacataatgtgttcattgtaggtcatatcctttgtggcagtatgtaatcctgctctcctgaaactgggagtgcataataagttccttaatatatagatttgtttaaatccttataaaaataatcaccaaatgatccttttagcttttaggcgtttacctaattgctttatacatattattattctaagcttgaacatatttatgctccagattatttgttgaattcaatcttagtttgttgattgcattttttttttctgtttggcaccttcttaatattgatgttagacattttgttattgtagctcctgttgcagcaatagaattctac

SEQ ID NO: 12421 - DNA, 206 bp, Oryza sativa
  Intron number 3 from transcript LOC_Os04g09580.1 (locus LO C_Os04g09580) derived from phytozome v7.0 (chr-ID Chr4; po s 5136099 to 5136304 reverse strand)
gaaaggattttatcggagaaatcttgattaggaaggtatatgtacgtgtggtcagaaatttatccctttgcaattcaatagatgcattctctattttgctaacaggaattaatttgcatttctttggtaagaaaacagacgatgtgcattgaaagaattattgttctttgagatcttgataatatgtttcttgtccaggcattccc

SEQ ID NO: 12422 - DNA, 583 bp, Oryza sativa
  Intron number 3 from transcript LOC_Os06g43610.1 (locus LO C_Os06g43610) derived from phytozome v7.0 (chr-ID Chr6; po s 26230741 to 26231323 reverse strand)
agtggccctccaagtactccaaattttttgttcaagtaagatctcctagctgtcacagcatcttttttcagtacattgctgctatgtgagatcaaaattaacagtttataagcaaaaggggatatggaattgttgttcatcagtactgtactgtactactttggttgggtcttataaagagagagatggataggtagtaactgtcatcgtttagcttggacacaagatcgatttgttaggctatatagctcagaaaacatgttttggctgagcctctagcggactagctaatccaaaatgcggaagaacaaatcgccacaaacagtagtgcttttgtgatctccagaaagccagaaaggaagacgtgccatgtctcagggttaacatgctatcatataaacacgtcaatattacttctgctatataaggtttattgaatagtaatagaacacgcaatgcatgcctaggcattgttgtttagtcaaaatttgatctcctcttattgtttatgtccttttatgatatcataggttggctcttttaatgttggttgtttctaatgcatttaacttgttccagcttg

SEQ ID NO: 12423 - DNA, 703 bp, Oryza sativa
  Intron number 3 from transcript LOC_Os06g49700.1 (locus LO C_Os06g49700) derived from phytozome v7.0 (chr-ID Chr6; po s 30069792 to 30070494)
taagactgttaagaagtcgtcctcacgcaagaaaggtagcatatactagtggccttccactgctgattgtttatggtttcttagcttccccaattttgatgttagtgtagattaggggataaatggttagttgttttaaccctaaacctaactaaacatatcccttaaatgcctctaatggtacaaacaaattgatatgcactgtaaatgtagtgattggtatcatggaagcaaattggaaaaaagaaatgtgactgagttttgctggtttacgggaaaggaaaattgaagggaccaaccatgatcatgggaagatctgttcaccataatgtttcgcagttcatgtagtgcttgttggtgggaaagaagcagcaacacccttttgctttattacattattgtaataattattatgttcctccctatattaaatgcaaaattataagaaaatcttaaatgatttgttccactactttgaaagaattggatcacctacaaacaattgttggtaccataaaagggcccatgtcttaatcttgtgaatttcgaatggaatggtggcattatgataatgatgctaccaacttgcttatcctgaatatgctcaattcagattatattttgtaccttcaactgccattcttaattggttttgtttacgcctacagggggaaaggagatctctgttgtgcagaactggaag

SEQ ID NO: 12424 - DNA, 438 bp, Oryza sativa
  Intron number 1 from transcript LOC_Os05g28470.1 (locus LO C_Os05g28470) derived from phytozome v7.0 (chr-ID Chr5; po s 16604892 to 16605329)
tgttttgttggtaagtttttgttttgagaagaacacattgttttgacgtgtgcatatgtaggtggttgattgatctcatgtggccatatatgacctctgtttgtgtttgttttacacttgcaactaaggcagctttatttaggcaatcatttgtttttatatcatatgaaaaaccctctaattctggtggcaattaatgagggcaaaatggaaggtgtgctttgggattgtcaaatagtcaaaagtgccaagtaaacaaaaacagagtgggtgcattttagtttcgaggataaatattttctggcatttctaactttggatcctatattatatatatttggcatcctttgcaaaatgcatgttaatggtgcaaaattaactcagatgttttcttattgtacagactattcgaaggaagttcattcttatctaaagtac

SEQ ID NO: 12425 - DNA, 987 bp, Oryza sativa
  Intron number 1 from transcript LOC_Os05g46560.1 (locus LO C_Os05g46560) derived from phytozome v7.0 (chr-ID Chr5; po s 26895920 to 26896906)
cgcatcccccgccgccgcctccgcctccgccgcgggtaaatccctcctcgtcgtctcctccgctcctcgtgccatctcgcggctgaacaggggaggggatcctggtgagcatccgcatcctctttctgatgatccatctctctcccccgacctacctttgcctggaatttgcctgcgttcgttaaccctagcttctcttctagatctggaagaagctcttctcttaatttcagatccttagccttaatacaattaacagtttgtttgtttgttccccaaaagtttggggttcaactgaattgaaccctcgtgtcccaagttggatccgcccctgcttgtagtagggtgagtagcataagcaagtttagcctgattgataatggaatagcagcatcacacgttttcgctttgattcttttctttcagtgaaactctgatatcatgatcctataactgctaaatgaatcttctgacgaagcgcttggtgatgcctgctaaaagagcagttgttgttgctgctgctgctgttacagtgcaggctttttttttcagctagctagtttagttgtattcccattgttactatgttttggcggatagaacttcagttgctagtatgcaacactgcttacattattctatttaaatttgcagctattgcctcatcttctattatagcaactcatcctataactgctgaatgaattttcagagaaatcacttggtgatagctatttttcctgctattataacaattgttatttttcctgctgttacagtgcagagtttattattctttttgctagctattgtttaggtttactcccattggtactatgctttggtggatagaactccaagtactagttttccacactatttgcatttttttaaaatgttgcagctattgcctcatgttctattattgcaatcatcctaataattgatcatctgtcatttaggttgctgttactgccatattttcac

SEQ ID NO: 12426 - DNA, 382 bp, Oryza sativa
  Intron number 1 from transcript LOC_Os05g03530.1 (locus LO C_Os05g03530) derived from phytozome v7.0 (chr-ID Chr5; po s 1494781 to 1495162)
atctcaccccaatccaggtaacaaaaactgatggatatttttttcttcatcaaagattattatactatacagctcaaagaactcaaaatgagatgattctgtttgcatttgcatataccttcatcccaaaacatcatcaacttttcttcatcaaagataatactacagctcatcaacaactcaaaatgagatgattttttttcacatatatatatcttcatcaaaccatcatcttttcttcatcagagattacactacagctcccaacaactcaaaatgagatgattgtttgcatacacacatatatataaccttcatcagaacatcatcaattcttcatctatcaaagattatgcatcatacagctcaagaactactcaag

SEQ ID NO: 12427 - DNA, 916 bp, Oryza sativa
  Intron number 1 from transcript LOC_Os07g06800.1 (locus LO C_Os07g06800) derived from phytozome v7.0 (chr-ID Chr7; po s 3315946 to 3316861 reverse strand)
cgctcaccgtccactttctcaaacgaattctcgaggtaattcatggccttgccagttgccaccggtttttgcaatcaactatgctcatagccttatagcgatagagtttacttgcgtacgtttatatgggtgagtgtgcgtgtgttatgagtttctacgttatactgtgtaattcttagaaaaaaatccatggaatgatgaaaattaaaagatgattgtttagccacaattcttttcatcttttctttaaggtggcaatgcacagtagcaaagttttttcggtctgctttgtatcccccataccccataaccacctcagcgtgttatcgatatatgctacttttttttctaatatattaatggataaggtttttacatgttcacgagaaaaaaaaagaacaattcaagatccttgctgaatgctagtggaaaatacatttgatttaagaacaaaactttaaatgcaaatgaaaacatttggcctgtacaccaccactaggtatgcaaagctaacgaaatcaaagcataaatatgcatttttttatttttctgcaaaattatataagtccagttagattgctcaaattttgaagttaataaaacattgaggtgtgaaaaagtgttgaattacagacggtggtgtatatcagtaccaatttgctaaatttgagttcattttgcttacttttccaactcatctctcgttttccgtacacagttatttaaactactaaacggtgttttttttaaatattttatatacgaaagttgctttaaaaataatattaatctattttttaaaaaatcaactaatatttaattaattatgtgctaattagatgcccaacacaggcttaaatattcaatgcattaaattgttttttaggtactgttcatccatcagtacagtggaagc

SEQ ID NO: 12428 - DNA, 819 bp, Oryza sativa
  Intron number 3 from transcript LOC_Os03g51230.1 (locus LO C_Os03g51230) derived from phytozome v7.0 (chr-ID Chr3; po s 29300018 to 29300836)
agaggaaagctacttctgcaccaaaatacaataatgtgagttctcgcttcatacatcattttgttttcctgtattctaaattaatggattatgtagatgctgactttgctcatctggatttcaaatactactaatgttgcgagtttttcactatttaccaattagctttccacctgtagcacattgttagaaaatcatatttagaagggatgtttaagatttgccacaccacatgtacaactgtcgcttgatattttcttggggtttaaatgttgggcacaaatttggcgaatgtttgcaattagtatattgttcaaataggctcttttgactgttagatagtgaactggagtaggaggttagagaagcaagaaaatgccagagtaaaatgctcaatacagaaacaagcgagtgtgggaggaaagttaccttatatatatgttgttaatatcctgctaattagagataagtatgattgtttactcatgaatgctgaagatataaggataacatatgaaggaaagaagttttaaaaccatcaactttacttgtaccttttatttttggacgttggataatgtttttttatttaaaaaattacctggagttgtttggcttatttcaaattcctttagaacatgcttactcagatactttcgtaggatcaatcatattctttaagtggataggttgatcagtgttctgtacgaatgtggcaactagttttatacatcgatgaaatttcaagcaaaccatttcatttctaaccaaataaaataaaatgttgttcagaaaaaggccaagaaagcagtggcagcc

SEQ ID NO: 12429 - DNA, 1006 bp, Oryza sativa
  Intron number 3 from transcript LOC_Os04g52590.1 (locus LO C_Os04g52590) derived from phytozome v7.0 (chr-ID Chr4; po s 31084064 to 31085069 reverse strand)
gaagagctcaggaacctcactcacctcatcaagctgtaagccgcctgtaacctaattatttcagcttgagcaacaattgcaattttttttatttttgcgcattttctcggctcagcttgatcattgtgcataatgtggtcttgtgttcattcaaaccatctttcttccatttcttttgttcaaaataaattacgatgatttttttagacgagatttatgatggttttttcaagctgaaacacatgttaggattttcttttttcgtaaatatctcctggaagtagctgggccttttttccggcccacataaaaaagcccatttgcatctttcaacctaccccgttcggcccacacctacgctccgcttccacgcgccgcctcaccggaaatgccgccctatcgccggagatttggctggccggcggccgtcgtcgccggccgcgtgccgatgctcgtgggcctggaggagaccgttgctggcgttgcggagttcgagcgccatggcgcctcggagccagcggtgcgctgggacgtgcggctgcgtcgagatcgcggaggtgatgatggattgatggtgttcgatcttattcccaatccaatccgttttgggatcgtattaggagcagattaggcagtgtcctccattgcgattgttggccttgctcctgcgaccaccacattctcgcgctccccaattttgtctgtttgaactttgatgtttggttcgtcagttttttttttttgggtggtttggttcgtcagttaattaggtcagcatcgagttatgatgttcggttcgtcagtttatgataggtcgtcatcgagttctacttggggatgaacactgcatatcagtagctactagctagctgagtttgtgaacagcttgggaaaaccaaagcttgtaggatgtataagatgtgactgatgtgtgtaactaacgtcgctggtatctggtattgtgatttcagggacttcaggaagaattatttcaccgggccattac

SEQ ID NO: 12430 - DNA, 853 bp, Oryza sativa
  Intron number 3 from transcript LOC_Os06g45090.1 (locus LO C_Os06g45090) derived from phytozome v7.0 (chr-ID Chr6; po s 27272696 to 27273548)
tccagtaccacgcaagagtggcaggtatacttacaatccggttaactggttttaatatgattctaaatctaaatttctttgtccacaagacaattgtggtataaacaaacattgtcaaataccctcagggtgtgttcggatgcctctcttcccaacccctctccctcgttttccgcacgcacacttttcaaactactaaacagtgtgtttttttaaaaaaaagtttctatatgaaagttgcttaaaaaatcaaattaatctatttttgaaaaaaaaagcaaatactacctccatattttaatgtatgacgccattgactttttgtctaacatttgatcattcgtcttattcaagaaatttatgtaattatcatttattttattatgacttgattcgttatcaagtattctttaagcatgatataaatatttttatatttgcacaaaaattttgaataaaacgaatggtcaaacgctggtcgaaaagtcaacagcgtcatacattaaaaaacggagtacttaattaatcacgtgctaatagactgtcccgttttccgtgcgcactgcgcacattcccatcccctggtagcgaacacaccctcaatattctaatagatcacatgttatcaaattcatttcatcatagtgtctaattgtctattgctgcgttggattgcttgaatcatcttgctttggctgagtacattgccgtttgtgttctgcatgttcaatttgactctattgacacactcacttctcatctggaatttttcatattcagataagttcgggtattttgattttaactgcatagcatcggtgatttattttgctgttcaggtcatataaggagt

SEQ ID NO: 12431 - DNA, 706 bp, Oryza sativa
  Intron number 1 from transcript LOC_Os04g50660.1 (locus LO C_Os04g50660) derived from phytozome v7.0 (chr-ID Chr4; po s 29801931 to 29802636 reverse strand)
acctcgcgtcccgcacttgcacacgcagctggaaggtaacatctcttctgtgagaactcgatgtgttgtgcacttatgcggtgatttcatgtactgtctccaatttgaatgatgtgcaagggatatggtgaattcgccttacttttagcaatttcattggagtcatatttgcgtccctgaaagtatattgttggcttaacactctgtgctgtgaactgttcatattgtgcgtttttatgatacaatacaaataagcacactagataaacctcacaaacctctatttttggattatattgtgcattgctttgtttttatgaatgtggaacttatgtagtggtgggactgtaatacctttccccccaccctctcctcttaccgagtcgatccgaatgatgtgcctcaatccattagtgagtgtaatgttacacatattaatgactaaaacgacatgttatagtggtcagccaaatttactgtctccatgtagattcaattaaatgagaaaaaaatctgttcatcaactgctttttgcaatcataagttcatcagaagtggggcttccctgataacttttaacttcttttgccactcaaagtagttcacttcagtaaattattaatttattatggcacattggcaagcttttcccggtataacatgtgtgataagcttatgtatttcttttatgacttacaggggcacg

SEQ ID NO: 12432 - DNA, 960 bp, Oryza sativa
  Intron number 1 from transcript LOC_Os03g50390.1 (locus LO C_Os03g50390) derived from phytozome v7.0 (chr-ID Chr3; po s 28753685 to 28754644 reverse strand)
agcaacgagcctggaaggaaagagctctgcaaaaggttgttgatcctgcaagctgaacatcctttaaacttgttttccaggtttttgcatcatgatcctgcaagccggctacaggtttttggaagatagggggattagcttatcattgccaagctcttgcattgatagtaaggggagaacagcattaagcaattcaattcaagctcccttcagagcttaccgtgtcgacggtagttgttaaaaacagtaaaaacataataatttcaacttagatgtgttgagttataaggagattggcgcccatgattttcattttgccgcatggtgtctagatgctaaacttggaaccaccggtgctaacgtaagaatgattcttaccatttaagtaaggaatgcccgcctagttattaaaaggtgtagacaatttaaattcaaagctagtaattggttgctatttttagcagttgatcataagctattcctgcgatttcatgattgaagttaatgtaattgtgcgcacagcttctaattctatatacacagctcattggatatatgactggagtgaggtgttcatttgacttgtggcagattacttacttaaatacctgtttatgtctatcggagctatatccttcagtttaatttgctagttcttaaaaaaaacgaacttcttggagtccgcagcaaactctgtagtagtttgctgagaaatgttttactataaagattcatattgttgctacaactggctgaatttattctataatatgtgcttccggtgtttaatagtttctgctcctctcatatgaaaatgcatttctttttgtagccttgtccatagcacattctactttatcccatataacaatagctaacaatgtataatctgtgtgtctttttgtaacttgaaaatctgatatgtgtgtgcccaatctatctcatacacagttaaaccga

SEQ ID NO: 12433 - DNA, 631 bp, Oryza sativa
  Intron number 1 from transcript LOC_Os05g14370.1 (locus LO C_Os05g14370) derived from phytozome v7.0 (chr-ID Chr5; po s 8087208 to 8087838)
agcacaagagaaggtatgatttagcatttttttttccactattcatttggactaattgctgtgatttgtacaacagttgctattcatccatgttctttagcttgcttaattgttgtgtgcaataatcatagttgcatatattatagttggattaattgtcacctattaagaggatagagacattttttataagagtaatgacactagctgtactagctagctatttttttttctttttttgaaagatcactagctagctagctagctaatgttgagtgtgtgaatgacacaagtagctaaagcatatgttgctcttcatatctttatcatcccgatatattgcttgtagatacctatatatatgttgatcgatgttgctatatatgaaaggtccctttcctaataaagtgagttcgatcttgatctactttggattgtctttcctcattggcactgcacttaggactctgaattgcctcagaaaattatttgagtgtgcatgtgtagatgatttgaagttggtcttgaagctagcattatgtttctattcatgtaaatatttcctaattgaattaattttgcccctcatgtttcagcaggagatacactaactcaacatcacaaatcacag

SEQ ID NO: 12434 - DNA, 708 bp, Oryza sativa
  Intron number 2 from transcript LOC_Os03g60820.1 (locus LO C_Os03g60820) derived from phytozome v7.0 (chr-ID Chr3; po s 34552106 to 34552813 reverse strand)
ccttccgtaagatagctcccctctccatctctttggtcagtgacatttggggataaaatcggacagtgataggtgataagaggaatgcatttctagtttggttctagcttcccaatgttgagggatagcattggcacctaatttcaattcaagggagagagaatgctttttaactgttcagtagatattgcttgtttcatcgtgttgatgagaacaatcatattaaattagggcagactgtacaatgcattgtaagtaagatgcaatataattctgcactgtcttctcttctctgctttaatgctagataagaacatattataattcaggagatgataggtttgcatagtattttgattacatactgaagacaaatgttatagttggatgtaaaccattggtggttattatattaatacggcttggaatatggataaaaaaacaaaagcataaaggggaaattggaaaatatatcaagctttaactacttgtgggtcaatgtttggaacctaggttcttgttccctgcattgggaggactcctttttggttatgacattggcgcaacctctggagcatgcatatctctgcaagttagtccctattttggttggctatgcaatctgttatagttgtcatgtattgattcactctaatggtgtttattcctccagtctgctgaactcagtggaaccacttggttcagcct

SEQ ID NO: 12435 - DNA, 906 bp, Oryza sativa
  Intron number 1 from transcript LOC_Os04g39160.1 (locus LO C_Os04g39160) derived from phytozome v7.0 (chr-ID Chr4; po s 23100187 to 23101092)
ggcgccatcttgctgcaggtgagctgccgaccgtattgctctttgtagtactatatgctattgatacactagtcactactagtcagacgttgctgtggcagagtgttgacaacaagtgttctgtgaggcaaaagatggcatgaagataatacgttgatgtgcattttttttcccgtatgtgtcaccttgattttgcgctcagtagtaaggccgcaatagtagattagtagttcatatgatgtgcttgaagtcatggttcaatctacagctgttactccctctgggctgataatacttgtcgttttggataagggtgaggtcaaactttagaatctttgattatgaattatttttaaaatatttgtctttcaaatatggtgactacatgtataaattagtcttaaaaagtactttaataatatcatatatttgttaacacttttatacatattataatagaaaataatggtcaaaattgttttttggagaccgtgcccttgtccaaaacgacaagtattatcaacccggagggagtagttctcaacttttttcaaagattatgttgatttagatcttactcgttttattaaatgtgacctagctacccaaatgatcgcaagagcttttttacaatataagatttagttaatttttacttctttacgcttacaaaatcatgaaacttttatttacttgacatatttgagtagattttacaaatggtggagtaaaacaatctaaaaaaagagtagcattcctatgccaaacaacattaccattagcggctaaattgttgtactataacctcttggactacgatttcagatgcaccattctttcctttttgtatacaatttttatctgacaaatatactgtttacttctaatttttgtttcagctcaatt

SEQ ID NO: 12436 - DNA, 934 bp, Oryza sativa
  Intron number 1 from transcript LOC_Os06g36880.1 (locus LO C_Os06g36880) derived from phytozome v7.0 (chr-ID Chr6; po s 21731615 to 21732548 reverse strand)
tgggggaggagaccatcgcctccaacatcgcccaggtaaaatccctcttctctggtttagaattcgaaacagttgtttgcttctcccttcgttttatattttaagttgctttgattttttttatattcttttttgttttacagggtttataaaaaggatagcaatatttcctatacaaaacaaacatattatcaaaatatgttcaatgttatatttaataaaattaatttggtgttatagatgctgctaaatttctctaaagacttagtcaaacctaaagaaattagggtaaaaaaaaaaggcaaagcaacttataatataattcagagggagtattcaagttagttcagtcttttggggtgtacaattcaggatttggaatccatttagagtaggtttaatagttagctataagggaactataaatatagagaaattttacagttcttgagaaaattcattaatgtacctaaattttatgctaaattttttggtaccttgaggtactattttgtgtgcaaaatgtggtacatcgaggtatcaaaagttggatggtaaaattgcacaccaaattttacactataaaatatggtacctccaggtacatttaaagatgataaaattacccataaacatatatggagcatttgctctcacccaagagataactttacacttgcttcaagataaataaattaaattcacagcgagaaaaaaagaaaggaggaaaacaatagaacaaaacctataactaatctattatacattatacatgtttactctaatatgaatttatacctattagttagctctcctattaaacttgctatgagtgaagatttcgttcaagattaccctagctcgagttaaaaaaaataaaagcgttgtaattaatcttgttgttcagctgataggctggacgccactgattgag

SEQ ID NO: 12437 - DNA, 698 bp, Oryza sativa
  Intron number 1 from transcript LOC_Os04g31900.1 (locus LO C_Os04g31900) derived from phytozome v7.0 (chr-ID Chr4; po s 18934248 to 18934945)
agcctgagtaagtggagctccctcgtcgtttcccttgtcgattcttggttggatagaccttcctgtgagttgacctggggtgagggtcgtgttcttgaccgtggcccgtgggtgttcttgattcctgatgcttgtcgtggtttctgggagtaagaaaaagatggcctttgtctagtttgtgtaggaaatttgaccctgctttgatttatttttttgggtggggggattttggaaatagatttcttcggtccttttatgtcgttggggcaattgatcaaattaagtgttggtatgattcttactaagctcgggttaccctttgtttttggtttgtattactgctatttaagtaaacaaaagttgaattgtttgctcgaggttgtgtatttagttttgacgaggctgtggtccatgattccgtatgcaggagttggaattaaattaggttatcttccataagaaaatggcattctcgagtctctgctgaaaagttaatttggggttttttgttctcaagtttttgtagtatctttgagatgacaagattcaactcattacgatgaatatggaataagcaactaaatattggatatataccttaatgtggggtttagtacacacaactagaaattatcttatcttatcttctttctctgattataggttttgatatcaacgtgcttcacaaagaagcaagg

SEQ ID NO: 12438 - DNA, 1006 bp, Oryza sativa
  Intron number 1 from transcript LOC_Os05g37150.2 (locus LO C_Os05g37150) derived from phytozome v7.0 (chr-ID Chr5; po s 21647925 to 21648930 reverse strand)
cccgccgccgagtgcgtgcaggactccgccgacaggtccgtgtgcttttcctttccttaacgttctttctctgtttctcgatctgtggctctctgctagaattgtgcgcgtactttggtttacaaatctcggggggaatatgccaagaaatgtgtagttggaaggattcgctgcgtgctcgacgggattacgtggctcctgttctggagcacgggaattcttcgatgcggtttgttccgttcatgtgaatctgcgtggattactggattggcttctgcgactaggagatgctaggctgggaattggtggcaaatggcagacaacgttttgtttcccagggtttcatggccgtctttcggatgggagattctggagatgtcagcttggatgggcacgctccgtcaggattgagcattgtttggggaataatatgcaacttcactcaactttgagaaacttctcttattttggggcacgcctttctgggatgcatgaatgactgtctttctgttgcaagagcttagcataatggtaccatgtgcctataacattttttccatgtaaataggagttgtataaattgaaattaatcatgttttgtcgttgtggtgctagtcttgtgtttgattatcatttaccttatagcaaaacctggtttgttaccgtggtaaatagtaaatactagccatcaacttatgtgtctatgttccacctttctatgggagttgaattttgtattttagttctaataagaggtaacctatacgcctccacatggtaccaccgtaccagccaaatctaagtgttttctccatatgcacttttttgcactgtcatgcaaatagtatagatttttctctgtcttgatcaagctaggagttataatgaattttctgtcttggttagtgtaagagcaattagtgaattactgaccctacaagtaatgtatacaaataagatccttttctaacaagaagttataaccataattttggattgggacagg

SEQ ID NO: 12439 - DNA, 748 bp, Oryza sativa
  Intron number 1 from transcript LOC_Os06g29380.1 (locus LO C_Os06g29380) derived from phytozome v7.0 (chr-ID Chr6; po s 16797652 to 16798399 reverse strand)
aagaaggcattgaggattggaggaggaaacatcaggtattactgttcagttttatatttgattcatgtcgttattagttctgatatacaactcctaacaacttaactgattgtttcatgaactacttggtgagtccaaacaatttcggtgtctgttttcttgcttttaatagtgttaccccccactcatacacatctaggtttgcatcactaaaggcaaaaggcgttgcattattctatgattatggatgacacaaagtagcgatgtatttaaagctaaatgatctttctttatataataaacctgtgatttatggttacgaatatgcagagaaatacaaagttcttttatctactaaaagaataagttttgatttttatatatactggtatataaattttattatcctagaaggaagctggcaaactgagttaccaaacacttatctcagtcatagcgcatgatttatttttagaagaactttctttcatttctttatgtgaatcgatcaataattgagctcatttggacattatgaatttatggtataacatggctaaaattcataatcatcttcgttttgtttatctggtttaaatctatttggagtgatggtcttcatgcacacatgttcatctgaaattttactgcggtgccccctgaacatttagttagccaggatattcgagtacattctatgtgcaattggtacattaattggatatatgtaattacttcgcccaggatc

SEQ ID NO: 12440 - DNA, 868 bp, Oryza sativa
  Intron number 1 from transcript LOC_Os04g55080.1 (locus LO C_Os04g55080) derived from phytozome v7.0 (chr-ID Chr4; po s 32568602 to 32569469)
tttaagaggttctttcatttaccttaaaagcagttttcctatgtttgaacaccttatacaaatgttatcttgtcactttccagtagtttttgtcctttctcctgtataaaacggaaatcttttgttgtaaaactaactttgttacgtccacagcataatcacgagtgagcccaagcctcagccaaagagtcgaactcgagctccaaatgagcatgtctctacataacttttattgtttatttgataaattagtagatcaaatacacattagtgtgtaccaacagcagttccgcacaatgaattagcatgtattggcatcatattatcttagtcccttttcttctcttttattaatgtaattaactagaaatcaattttgcttaccaagagattatccataaaatatacattatactgttcatgagccaaacacggtagccaagattgaagtcaagccaaacgtttctacttggaagctcgaagattacataggctcgttttgagcttgtgttgagctcgagcctaggcagtcatgctcggctcgttgacggccctattatgtgtctttgtttaccattcttcgcatacatattttcttaggttgtataggtagtacttcggttttttctgtcagggttgcctaatcttgtgtttcttgaacaaaaacaccaaatctaacccgagaattgcccagtgcatttaagtgctcctttggtccttcctgctagaatggttcagtgtaaaaggacagtttcatgtttctatcaaatgttatatgtttgacaattattactgtgtgtacaacattgctgttcttgttttactgttgtgattttcttaatcatatccaaataattctgcagattgg

SEQ ID NO: 12441 - DNA, 419 bp, Oryza sativa
  Intron number 2 from transcript LOC_Os04g09620.1 (locus LO C_Os04g09620) derived from phytozome v7.0 (chr-ID Chr4; po s 5164594 to 5165012 reverse strand)
atgtaagatacgttcccttctcaagtatttttcttttaacaaattactatttatttgtttgactttgcctatggtatgcctaaactttacaaaagctttcaatatcagagatcctttaaggcttcgatagacaacaccgtttctgatacaatggtttcccacgtacccttcaagctttcaatgtactttttgtttagtttctttaatcctaaataggaagagtatttcacttttaaagcaatgaataaatgtatcaatctggcattacttggtatatcatcatcttcccttcctgttttggttttccctaatcatctgttcgctataaagcataaacgctgaaacaattctggcttgctgtcgaacaaaacctgaaccggctaggctgatcgctttctctgggagctgttccatcactc

SEQ ID NO: 12442 - DNA, 450 bp, Oryza sativa
  Intron number 1 from transcript LOC_Os06g48300.1 (locus LO C_Os06g48300) derived from phytozome v7.0 (chr-ID Chr6; po s 29209306 to 29209755 reverse strand)
gccgctggctcgcctggcagtggcggcgggttcaggtattccgtttcgcttcatctctctttctgatttcgttttcgtttgatccgttttaagcaagttgggggccgaacagccaacgaataagccaaatttaaaatttttaaacttaattttaagattgattttgagatattttcaacgtagtttctttaacaacattggtttttaaatcacccagaacgcatatataaaagttttacctacaaatttatttttatttcctaataagccgttttggcttattatgaaaaaagccaaacgatgggggtttttatttattagatgggtgatttttcattttggattgggagtgttagtttcgaatatctgtatatagccattgacagagaattcgtttctgttattattacctgatattgttgttcttcttgtgttatcatgacagtgcaa

SEQ ID NO: 12443 - DNA, 421 bp, Oryza sativa
  Intron number 1 from transcript LOC_Os04g52700.1 (locus LO C_Os04g52700) derived from phytozome v7.0 (chr-ID Chr4; po s 31195019 to 31195439 reverse strand)
ttcccgccgggtgggagaggcggcttgatctcgtgagtcctcgctctctctgatctcgtgagcgctggtgatttctgagtttcggtttatgtttcttgcctctgacgaaatttgagacgaactgttccattcgttcagttattgtttttttttctttgatcggagacaaattctgcaatgtttgcaacgattagagatcggttcatgtgttgcatgctgtatttcttccgaatattaggagattaagcactctgttcttaatatgaagaacataaaaaaaacttgttccatctgaatttagtttcatgaggctctgatcttgccatgttcttggtttgatcttgaagaaatggagtttactgattttttttttgttcttcttgcagtcagggaagacgttcttgactcctcggctccagtg

SEQ ID NO: 12444 - DNA, 790 bp, Oryza sativa
  Intron number 1 from transcript LOC_Os06g47800.1 (locus LO C_Os06g47800) derived from phytozome v7.0 (chr-ID Chr6; po s 28928231 to 28929020 reverse strand)
ttgagcccctcggctgtgaaggtgagatcactaccttgtttttgaagtcctttacttttatactgttgcatatctgtaagattatgtctgtctacttgcgtacaattgttctagttggatgaatcggatccagaattcacttgatagttcattgactaaatttcttgctattacgcatgtaaccagtagagttttacatctaccgttcctatagctatttttcgtggtccttgcagtgatcagctgctagctattttagataatggattagattaaacccggcctctacaagctattatctctgctctcttatatttgtccaactgtggtagacaaagatattggttttagtttctttacgttccaaacgactttgctctttcacactcctggacgtggagaatatatttctaaaattgttaagaaaaaaaattccacgtcataaaaatgttcttccactgtcaatatgaaatgggcatgccaagcatggcatcaaagaaacgtatctactgttgtacattgccttgaatctgttggttacggagtatttttgtagtacccacaagcagggtttgaaattttggtaatttcgtcccccaccggcaagctcacatctcgcccgaaattttcgttttttttcattttttttgtgaatttggtcaaaattttattcaaaatcaatcaaaatttcaaataatttcggcaaaagaattcgaaattttcaaaatttcgcaccccccaacgcaaaaatactaattttgaaattgaaaaccctgcccacaggtacact

SEQ ID NO: 12445 - DNA, 457 bp, Oryza sativa
  Intron number 3 from transcript LOC_Os05g13660.1 (locus LO C_Os05g13660) derived from phytozome v7.0 (chr-ID Chr5; po s 7567107 to 7567563)
ttcttggttagcaagctttgaatatattatacgtatatttaaatattatttaattgtgattatgttgataagaaccatggcttcattattatttttattttactacgcagaatcactaagttttgttcctctaccagtgcatttggcttttacaagttctaattcttttcctcttttgatttaatcccctggttataacaaactatgctaagcccaacatgaaaaagatgttacatattgatatcacattcatatattttgctaatatatcttgattgtcatatacgtaatgtgggattaaccgcctgactaaatttactacttcctttggcaagaaaaaaccctgccgtttgagttatatttaagcctttggggtgtgaaatgttgcgtagcataggtattactagttaggtatgtaatagtatgtcgttatgcgtatctgttgactgcagtctgg

SEQ ID NO: 12446 - DNA, 1007 bp, Oryza sativa
  Intron number 1 from transcript LOC_Os03g46681.1 (locus LO C_Os03g46681) derived from phytozome v7.0 (chr-ID Chr3; po s 26413699 to 26414705)
cagctgcgcgactaccagatccgatcccaacacaagtaaaaaatcccccctcgcctcactctccattctctgcaaactcaaccgtaattaggactcccagttttattctgtggcaattggcataatcagatctcgggctcccccggtaggctttgtctctaagctagggtttggttcgaagtcgcactgggctaagttagtgttcttgattggtagtaatgcgatttgctccctagttgtaacctggtggacgatatggctgcttgtttttttatgcgagcaagcattgctgttttataaatttggattcaataacattagtagtacagaaggaagtttgcagcagttgctaaatcatcaagtctactctagtggatcttccttaagacattgaggtgctctttcctctggatttggtttgtggttgtgggagtgaaaataatttgttagtgaagttctagttctttaccatccttgttcaaggtaccaggggtattgataattctaacttgcgaagttgtgaggcgccattgtttggcatctcagttaccaaattttggtacctttcgaaggaccacgtgctaatgtgttttcgctgagcgtgtttccaagtttctttacttggttctgatgagtggtggtcagtgttccgcagtgataaggttctgagaatgtgccgtgtgctctgctaaatttgtttgctgtttcttgaatacgaaccccaaaatttgctagcagaccactttatcttgttataaatggattcaagccccaaaatttgctagcagaccaccttatcttgttataaatggtttcaagtcagaagctaatagttctctcgatgtatcatgaaatcgtgcaaaacaaaatattatcttgtattcatccaaaatgatttcctccatgtgagtcgctcctcgatcaaacgcaactgcactaccacctcaatgaactgaaaatggctctgcttctctgttctgcaggcgtgacataattggagcagtctc

SEQ ID NO: 12447 - DNA, 934 bp, Oryza sativa
  Intron number 2 from transcript LOC_Os05g30390.1 (locus LO C_Os05g30390) derived from phytozome v7.0 (chr-ID Chr5; po s 17554992 to 17555925)
gaccccaagcatctgggacacttttactcattcaggtaatcgatcttaatttcatccattattactaattaaatcactacttgtaagttcatgtagcgaatgcatatacaattgagatccagtactgcagaggacctgcatccatgcatatatgatcaagctacctagctactaatctctactcttctctcccataaaaaaacaaatctaatatggcatgtggcacatgttagtaatacgaatgatagactctattagaatgtgtcgtatcccgtaataggtctgtcttttatgggatgggagagtaagttacatgatcaagaaaattcatatatgtgtccaacagaaagtttatattttctatggtcccaaacataaaggtaattgtagctcctcaaagtcgttttgagcatgaggtcactttgaaacataagatatgaaaaacgtgagaacagaaaaaacgaaggcatcgaagtatcaaagaaagaattaagccaaagtaaagttttcaagagttttgttctcttacttattttcatatggaattgattgtaggaatgcaattctatgcaaaatttcatactttcttcatatatatgaatcaaagtggcctacaggatcctaagaaaattgaatcctccaaaatcctttgtcaatcctccatttcaaaggttccctatgttgttttagaacttttagttatttttttatcatattttctttcatgtttacccttctcaaataaatgcttctcctcgcacaagccaatggtttacatttcctattagttaaaatttagggcaactataatttgagtcaattttcttaattgttatgtacaagcctaaaacctcctctatttggaatcatagggagtgcgctacatcgatctttgagattttccgaccatctggttgtgatatttgcagggagg

SEQ ID NO: 12448 - DNA, 1035 bp, Oryza sativa
  Intron number 5 from transcript LOC_Os05g30390.1 (locus LO C_Os05g30390) derived from phytozome v7.0 (chr-ID Chr5; po s 17556700 to 17557734)
acctgatagataagctagtcaaaaggggtaactctgaacagatagtgctgtatttctaggatttttgtgatatcagactggattttaggatttaagtccctctgtttatgatcataagagaaaaaacagaattttctggtttacttgatttttcttcaacatatctttaccatatataattttttcagttcatataaattaacaacggaatagtatgctcaaaaattattttttaattcaaattatctccccaattttcttcagaaattatggtgcccttgaagtttttttaaagctgttagtgaagggaccacctatatatttgtcgacaaattttctcctaaaaatttgacagatgtaattatagtacaatcgtagtgtaattacactgtaatttgcatgtaactacagtgtaacttatatgtaagtttcacgtaattttgaatcgctagatctattacaagatttgttttggtgaggaacaaaaaaaattacagcacacatatatgtgaaagaatttgttcccacaacctccattttaccgaaataacatgttatggagagatttttgaaagttacatacaatttacattatagttacagtgtaattacactacgattgtgctgtaattacatctgtcaaatttttgggggaaaatttgtcgataaatatatagcaaaattgttagtgaaacattgtaatagctccatatttaaatatagactttgttgattttattgggtctttagtatgtaactttgacatctatttttctattagaatataagaataatttgtaacaaaattataatattctaaagtgcttataaagaaaaatctacgcatacaacttttatttttttttcaatcttaatatttcgagaattgttgatagataaaatttcaaaagttcgacagaataatatcgtatatttatatatcactcaatccattcttggtggtttcctgctaaactctaaggtgcacaaatcttttgcgcaatccctaagaaaggagaaatttgtgattgttct

SEQ ID NO: 12449 - DNA, 781 bp, Oryza sativa
  Intron number 2 from transcript LOC_Os05g35720.1 (locus LO C_Os05g35720) derived from phytozome v7.0 (chr-ID Chr5; po s 21143753 to 21144533)
ctgtttcttgcctgtgagttttcttgtttctttttgcatatttttgcagtatgtttaggactgagacattgtcgtcggagaagagaggctagggtataataatattttggtagtataatcttccatttgcataaaccgaaccttgtcgtagtaattgggtcaatagcaactaacagtttaaccgagttactgcatttgcttaaactttagcacatacagcgctcacctagatgctgctttgagcacaaagaagttaaagcagaattggccactaaacctttctaaagatgtgatgccttggcagttggcacaagacaaatattcaggatatcgcaatgcgaactatgataagggtttgagtggaaagaatgtgataaaattatgtcaggaggctaaaacttgtaatgtgaaaggaatgcataaggctgaaacttgtaatatgaaacagagggagtgcactataaatgatcaacattttattattctgtcaataatgtagaattagagtattcttggtgtctgctagtgtgccactcaaagtctactacagagcttgagtttgtggctattgtgagtttctataattggtatcttctcaattctgatattaggaagagacaacggatatctcaggacgttaggtggcagtaaattatctagaataaaaacctggttgtttgattgatcagagtaggctgcttggtttgattaattgtctgattggttccatggttgcctatctgcagattcaggagtttatcttgctgaaaagataaatagc

SEQ ID NO: 12450 - DNA, 713 bp, Oryza sativa; identical to SEQ ID NO: 9815
  Intron number 4 from transcript LOC_Os03g62260.1 (locus LO C_Os03g62260) derived from phytozome v7.0 (chr-ID Chr3; po s 35255645 to 35256357 reverse strand)

SEQ ID NO: 12451 - DNA, 484 bp, Oryza sativa
  Intron number 1 from transcript LOC_Os03g54050.2 (locus LO C_Os03g54050) derived from phytozome v7.0 (chr-ID Chr3; po s 30982939 to 30983422)
tcctcgcattgcaggcggctgccgactgaatcaaggtgagtggtgtgtgttgtgtgccttcctctctgtaactctgttcatcagtcggagttaaaagacttaatgagtttatgtggtaggattgggtattaattttgatggtgctagctggcgttcttgatgattgcaggaaggtgactgtccttccaaggattaatttcagcttttgattttttggagtgtgtttcactcttcgaactagtcctttgctttttcttccttcgtgtgcttagttcctctcttctttttgtatctagtttggtactggtagtcgattatgtagtcataaatcagttgcaatcagatcaatactttggtctcaattcttctccgtctttagtcttctgtagtagaggtttagtttctcaaccctgctctgcttttgaagaaaaagaatattcaggtaggattctgagttctgatcagtgggagctttgcgttgcag

SEQ ID NO: 12452 - DNA, 370 bp, Oryza sativa
  Intron number 2 from transcript LOC_Os03g46750.1 (locus LO C_Os03g46750) derived from phytozome v7.0 (chr-ID Chr3; po s 26443038 to 26443407)
agtgtaagctctaaacctgttgtttctatctgttcagttttgttctatcttgtattgatgtagataataatcatttaaatgctttaataatggaatcttttagttagttttttggtcttctcatacaaagcataggaacataagacatcctgttttatgtcttagcagtctaaactattgtctagtggagcttgttacaaagtcagaaaagctaaattactactttattaagcacttgaacaagaagttgtacataattttcctctgcgttgtagtacttggataatactgagcattactgatattactgtcaaatgtcttacagtttgattgtctactgtaggtagagtattgcaggcatcattctggt

SEQ ID NO: 12453 - DNA, 678 bp, Oryza sativa
  Intron number 1 from transcript LOC_Os03g45870.1 (locus LO C_Os03g45870) derived from phytozome v7.0 (chr-ID Chr3; po s 25907120 to 25907797 reverse strand)
ccgccgcagcagcaactgccaggcacgactccgtggtaaggccgtgttcttgacatatctctttcttcttcgctgttcaattgatgcttgattggctagtttggcttgtttagttgggtaattagagcgggagttaatgatcacaacctgctcagagtagtgatttatggccgtactgcgtgtttggtggaacagcaccgcagagtaacacaaaggggaggaattaattcgatccaagattttttctcttttcaaatttggtctctttttttaatggatagacaggtagataatcctaatctaagaaacttcgagcaagccattttaaatactagcaggagtatgttcattactaaattactttgctttgtcagaatatctactggccgattactcaatatgcgtaagagttggtacagtcaattcttttttttttctgtggccagtttatcttcctctgccgtgttatcttggcaacaagaattcttctcgtaattccaatggaaagaatgaaagcaaatattggtctcaattcattatttttatatgtaaccttgaaaaattcacagttttttttatccaaaattggtttatctttctcctctgatccgatttctaccttgatctgcttgtgtttgtgcagtccggcaagctgtccctgcagaagcagacgtgccc

SEQ ID NO: 12454 - DNA, 967 bp, Oryza sativa
  Intron number 2 from transcript LOC_Os06g38564.1 (locus LO C_Os06g38564) derived from phytozome v7.0 (chr-ID Chr6; po s 22839658 to 22840624)
aaggactagagaacttactaatcaggcaactaaacgtaccagtaatatgcccattctaacgctagggtgcaattatatttttaaagaaaaaactaaaaaaaattatgtcagtgaaatatattttcttatgatttgtgcaatagagttttagttcaattcatgccgtatatccagtgtacttaaggcgacaaggcggcccacccctgctcaattgcctaggtgacaccttaagcgtttaagacaagggtaagacaacgcattacacacaagtacaagaggcatgctagagatctatgaggcagaaaagagaggaagaacatgaagggacgaggaagagcatggagacggattcattggagaagaagggagcagtagaagggagagaaccatcatctctttccatctttcccactccactcccctcccctcccctattctctttctatcttttcctgtcggctgtcgctatgtttccaatctctgctcgtcctattctctgttctctttccatctttcacccttccgtctccctaaattgtcactcacccgatttccatcctatctttatgcgatttcattcccagcatgcgtaattctatacagcgtatgcacccttgaccctaccttgcccatgtctacctaattttacgagatattaggatccaagacgtgtagaaaggtaggcggtggcaacgctttgctccctgatggtgctcagacgcctaggcaacgcttttaaaatcatgcgtatatcaaatttaatgatatgaatattgtatgaaaataataattcacaatcatccacaattaatatagaatcactttcatataaaacatactcctacttgtgcagcggcactctcactctgtgaacctgtagagcttgaagtggccaccatggcaggtttgtgtggttcatgtatggggtgcaggtgcagaggagcaccgcctgcaccgcctgcacctt

SEQ ID NO: 12455 - DNA, 494 bp, Oryza sativa
  Intron number 1 from transcript LOC_Os05g05220.1 (locus LO C_Os05g05220) derived from phytozome v7.0 (chr-ID Chr5; po s 2545148 to 2545641 reverse strand)
tcgcccccaaaggtaaaatcacaaggcacgtggggtcgagcgtgtggatgttgctgggtgatagactcccgagtcttctacctcgtggttcgggttgtggtagtagtttcgaatcgacgctaaagtttgtgttcttggaatgcttaatgtgaaaaatcgcttcatatagtcgcgtcaagctggttctatcaccatttatctatatatattgttttgatactgtgaagattagttaaccttcagtttgggacctgaggatatgctctgttacttttaaccgctccttttgatatttaattataaagtggttcatatcagcaatgaattatctcacttgcttcaaagtaggcgcaaagtttctaaatgagttaatgtttattgtgtctattccctcgtaacctctgtgtttcctgctaatgtatcccttggtgtgttggcacttttgtttactggctatagatattcctgtccaaaggaagattgagaagaagaga

SEQ ID NO: 12456 - DNA, 883 bp, Oryza sativa
  Intron number 1 from transcript LOC_Os05g14480.1 (locus LO C_Os05g14480) derived from phytozome v7.0 (chr-ID Chr5; po s 8177487 to 8178369 reverse strand)
ggtattaggtagagctaagggcaattttgtatttttgaaatttctctctcctctttttataagaaatgataaaatattgtgtcgggtgtcctacagcaaattacacaaattttatggtgtccatcagcagcgacgcaattttacagtgactcctaatcaattacacaatttttgggtgtcctagggcaaatttttcctttgtatataaaatatttgaatctgaatttgaatttgaatcgggtatgtaaacttttgacttataaacattctctttacaaattttaggtggataagctttagatgtgtaaactttagatgtataaacttactaaaagagaaaaatataaaatatttgaattcaaatttgaatttgaatctggtatataaacttttgacttataaacatttgctttataaactttaagtggataaactttagatgtgtaaactttaggtgtataaatttactaaaagaggaaaagaaaaaaaaacgatcgctggcagcgatctatcgtccgttagccttctcgtttctctagtcatcatccagcagctacaaaattgacctatatatatgcagctccatcctataagcgtagggatgggaacatagagaactaaaattacggaggagagaagctgttcgtagatacagtttcttcataccactacttgtttgtatcctgcattgatctttcctttccatttagccatgcaacttagctaatgagaagtaaatacttgatagtttgcgacatgagatgagaatggtaggcatcaggatggaaagctgaacattgtctgaaattgacaccactggtgagcaaactgaatcttctatctgtcaggacggtcgcggaccagcaaaggcgtgttgggccgc

SEQ ID NO: 12457 - DNA, 655 bp, Oryza sativa
  Intron number 3 from transcript LOC_Os05g40770.1 (locus LO C_Os05g40770) derived from phytozome v7.0 (chr-ID Chr5; po s 23841607 to 23842261 reverse strand)
agcagcatcggccagctcggccagctcacgtacctgtaagcaccttcttctatcatcagttcatcacccagcttagcaaaagttcaaaacagcatgattttgcaggctatgaacttgggattttcgaaattttgttcatgcttctgtagcagttcagattgtgaattcaggcaatcaggctaggaacttctgattgaaccagtcaaggggcagattgtcagaacagtttgcttctagtttatgaactctgcttttttttttcttgaggcttagttcagctgaccagttcatgtttaccaatcttaagctttgactatttcggcaatgtgacatggattaggttcatttcttaccaaatgaaagaaacaaagatatgatgccaagttacaatagtaaatagatctggatgaaatatctgaagctttgactattttcgcaatgtgacatggattaggctcatttcttaccaaaagaaagaaacaagatactacacttgaagttaaattatcaatagcaaacgtacctggatgaaatgatccgtgacaaagttctggagtacaactaatttgtctaagaagaaatagtctagtagtagtagctgataacagaaacacttgcagggatctttccttcaacatcaatctcggtggtccgc

SEQ ID NO: 12458 - DNA, 455 bp, Oryza sativa
  Intron number 3 from transcript LOC_Os04g59510.1 (locus LO C_Os04g59510) derived from phytozome v7.0 (chr-ID Chr4; po s 35204004 to 35204458 reverse strand)
gttttgtgggagatactgtaaagaggtaatgttttttatttataagatgctgcagtggaagattatttagttagtcactaagcctagttcagttctggctctgcattctttgttatacacaatagtttcatctacctcatgtgctccaccagaatcaaaccactaaacagtagaattttagcatgtgttgcatatattgttcctaatgcttggaaaagaaaaactttaggtgcagatctatggccacaaagaatcaaacctagtttttctttcatgtcactacaaattcactctaccttcgcataccttagaaaatgcagattttagttttagatatttcttggaaactggttttgaatgttgttttcttactattcaatatttcctcactaaacatttttgtgttgttattggtaacagatatttattggattacacaatcacgttggaataga

SEQ ID NO: 12459 - DNA, 806 bp, Oryza sativa; identical to SEQ ID NO: 12000
  Intron number 4 from transcript LOC_Os05g26902.1 (locus LO C_Os05g26902) derived from phytozome v7.0 (chr-ID Chr5; po s 15561970 to 15562775 reverse strand)

SEQ ID NO: 12460 - DNA, 903 bp, Oryza sativa; identical to SEQ ID NO: 12131
  Intron number 1 from transcript LOC_Os07g01780.1 (locus LO C_Os07g01780) derived from phytozome v7.0 (chr-ID Chr7; po s 458161 to 459063 reverse strand)

SEQ ID NO: 12461 - DNA, 778 bp, Oryza sativa
  Intron number 1 from transcript LOC_Os04g27820.1 (locus LO C_Os04g27820) derived from phytozome v7.0 (chr-ID Chr4; po s 16264518 to 16265295)
gcgtcgccggcggtgagctagggtttcggcatttttgagatttttatttttttttcgatttttaatgtggctgatttggatttggctgttgattttgattcggatatccggcaaaaaaagtccggatagtttccaaccgcaaccgaatccgagttctgacggataccatcgctactgtattcgaatccgtttccaagaaaaactatccgaattcgtatccgaatccgaaaatatccgaaaaaaatccgaccgaagcgatccgtatccgaaaacacggtcggaattcggaaattatccgtacatccctagccacgtggcaacaaacgtcgaactcagcccatcttgccgaggaagaggcccaggcacgacccatttgttgggccaagccgacacaggtccaacaacagtcgaggggtgtcatgcggtccaggccaaaaatctctgttctatgggccggaccattgggctacgggtcttttggccaactatacaccacaggcagccgagtacgagcgaaggggagacaaggtcatactgtcgcagcaccatccctctgctgcaacagccatcgcaagtgttccatatcggccatgccagattgtcgccgctcaagtcgtctttgactcctcgtcgacgccccgttagatctacccataggcgccgctctatgtgccgatgctgcatcgtcgtttccatcctgactcggtcgccgtcgttgcaaccgctcctccgaacttctattactagtatgccactccaacggttttcaccacagccc

SEQ ID NO: 12462 - DNA, 1016 bp, Oryza sativa
  Intron number 1 from transcript LOC_Os03g55670.1 (locus LO C_Os03g55670) derived from phytozome v7.0 (chr-ID Chr3; po s 31688402 to 31689417 reverse strand)
gcctctcgtccagcgcaccaaagaccagatcacaggtaaagctgctgggttgtgttgctgctttagccgagagcccgagttatcacctcactgcctgttttctagcaatattttgggattattttactgcgtgggatgcggcttcctgccgaggtttaggccacttgctgtttagttttagtagcagtgcatgctccagttctgagatctaagttgctttagttaattaggggtaatttatgaggattcgtggtaatttcttagtaggattcgtgataacttcttaggaccagtgatgctgccagatcaaactaaaatatatccctactaaatgttgtgtgaacaagcataagaattaagtagtgctataagcctacaattagcgtgtaatgcaagatgtagaggcgtaaaacagtttcttcaattggagattgagggtcttaaatagatgctttaatttcaatgtaagatgaaattattgttgctgatgtctgtaaggttgtgctgtagtcaaacagaggaagggttgttttgtattatatataaatcatttaatcattatatgcaattattggctttcgaggccaaatgtacagagctaatacagtgatctgaataaaatttcaactagatgaaatgagaatggaaatgcacaaagaaaattcaatttgtcgtgatctgtaggcttgtccccttttcaggttcttctctgctgttggtcgtttcatcaatcttttgtgagatgtaaacctatgtaaaacgtcagctgggttggctctttgagcctgtccaacattctgtgtgcttaccctgataccctccttaatacaaggatacacaatcctcttgcatatttgtggaaaaaaatgattcagcttgtgtgaatgtgattcagttagaacctgatttaagtaggtttgtctctgcaacatcaactgcataagaagttgtctaatcatttcctaacaattgttcctctgatctggatacagattattgcacaaccctagaaggtg

SEQ ID NO: 12463 - DNA, 776 bp, Oryza sativa
  Intron number 1 from transcript LOC_Os04g16762.1 (locus LO C_Os04g16762) derived from phytozome v7.0 (chr-ID Chr4; po s 9127622 to 9128397 reverse strand)
cggggaaaaaagggcatttacttattatagaggtgcgatttgactcttttttttgtttttttagccctacctacaccccggttttacgagaaagagtgggggttcgcggagagaaaaccaaattagtaagggaaacccacgcttagggaaggtgaggtgaactaacaactccttctgtcgtgtatcctcgactgacgcagcctcggatgcttcaattgtagattttagtattgagcgaaaggttacacctacaggataggttctgtattacaggctaatcctactctactagtactaataggtagcataggggataaaagcactacacctagaaataggaatcaacaagagaaaaactttgttagaaattaaccctttcctgattggtatcagggctgggaagaatggttgggataacaaacaaccatcaagtttgtactttggatacccctataaccatcaaagatcgttgaagtggctaattcctctaaataggaggcgttgagaacaaagaaattcttggagctatcgttttcctctagcattaatagaattcattggtgttaagaaaaacctcttgtgggaaggttggctagagatttcttggaaaaataccagcccctttcggtccataatgagatggaactaattctatttttattctctagattttttcgcttagtactatgtacagaagggaggagccgtatgaggtgaaaacctcatgtaaggttttggaacggagattttttgaatagaacgaacgaccgtaacgg

SEQ ID NO: 12464 - DNA, 593 bp, Oryza sativa
  Intron number 5 from transcript LOC_Os06g47290.1 (locus LO C_Os06g47290) derived from phytozome v7.0 (chr-ID Chr6; po s 28659270 to 28659862 reverse strand)
aacttttcaccagtataaagttagttgcttccttttcacttattccttctatcttttcttttatcaatcaataagattgatgtgtgcacacactcctagaacatatgaattctggagacaagcaaacaaggtgattgccgctgcttgtttgcggtttgtagttgtctttcattcacacattgcattgtccacatatgtgatgccactatagaggcatctacttcaaaccatgtaggggttagcatgtattatagggtcaaaattagcttattttactataggatgccaacagtcttatacaaccgaaaagtgcaagggcaaaggaaaattgtatcactaggacaggtactgcttatgggcatttttttccttatttattcttccttttttcccctcttgtcatgatgttgaatgattataatatgtttctattttggtcatcactatctgctgtgttttcacccatagttagcagttactatatgtgctatatctataattgattaacactggaacatagtcttccatgaatgtaacttattttatttttgatgctgattataacaggcgaactgtgaaaaatattccaaagt

SEQ ID NO: 12465 - DNA, 509 bp, Oryza sativa
  Intron number 1 from transcript LOC_Os05g05130.1 (locus LO C_Os05g05130) derived from phytozome v7.0 (chr-ID Chr5; po s 2495075 to 2495583)
cgggagccccccgcctgcgtcctctccctcgccaggtacgcgcgccccccacgcgctcgaattcgtatgctgctctgcatcgatcgatcgagtccccaatctcaggcaagcctatgcggttggttgccttcagaaaaatgttgccgatacagagatttggtttggatttagtagtggaggaggctgtgtttgcgtcagtagtgtgatgagacttggctagtgattgagctccaatgagcagagagatctttagacccaggaaagttcagagaacttgtcagtttccaccttatatgaatgtgtcaggaaatttcatacaaaggtttttcttaaaaaaaataataatcttcctcttctcagttgtatgaatgtgattgtaacttgacaaggcaaagcgctattttgttttctcttcttttttttgataagtttatggtggtgtttatttaaatttgtgtgtatttgattgtgcagaaaagctgggggaggttctgtcacgccacacgttc

SEQ ID NO: 12466 - DNA, 898 bp, Oryza sativa
  Intron number 1 from transcript LOC_Os07g07160.1 (locus LO C_Os07g07160) derived from phytozome v7.0 (chr-ID Chr7; po s 3543937 to 3544834)
acaaaactattcgcaccgtcctattcatcttcaaggtatatcatatatatacagtggagtatattatcttcacgatagatcaaattaatacttcttgtttcatattataaatatatcgttttgactatttttctagttaaactttaaatttgattaaatttatagaagaatatagtaatatgtttgatacaaaataaacatatgataaaaaatatattaaaaattagttttattaaaaccaatttgatgttgtaaatgtttctaattatctattaacttaatcaaacttataatatgaaaaacgaaggaagtagtagtagtagtaataataataataataataataataataataataataataataataataataataaagagtgaatattagggaatgacctagctaatatcaaataattagaagtggtgaggcttaaaactcaggtcgtttaacccaccaccttgtggagctggccaccagaaatgccctaggcatttctcgtaataataatcaaatatagataattatatgtatggattaacttgtttatgacaatagtttattacttccttttcctttgtcccaaattatatgccctatatttttttacacggcctgcaataacatagtttgaccagtattttattctattgtatatatattcccaacaaatataaaattagcatcactgaaagtactttaaaatatgaatatgaatctagtgatataacatgcataatacttaatatagatatagttattatgattattagttaaaagttaccgagtttaattttttttaaaaagaggggcgtcctataatttagaacgaaaggagtaattatttaattgcatgcaggtcatctgcttcgccttgatcgcattggcgtcgag

SEQ ID NO: 12467 - DNA, 862 bp, Oryza sativa
  Intron number 1 from transcript LOC_Os03g40240.1 (locus LO C_Os03g40240) derived from phytozome v7.0 (chr-ID Chr3; po s 22364312 to 22365173)
ctctagagaccgaaaccgactactacactcatcgggtttaagtgcggttttggtcagactcggagtaacaggccggatatacttcctccgtctcaaaataaagccattttgaggttggcacgggtattaagaaagtaggtgagaatgattggaggaagtgtgtgattggttgaaaagagaaagtaggtgaagaagaatagttgtgattggttgagaggaggaggtaggtgaagaaatagcttcattttgggacaagacactgtgctagaaatagctacattttgggacggatggagtaccactgtccgacatcaccacgtactgatcgcttctgacatgtgcacatgcatatgcacagactcaatacgtgcccaggcatgcattggtttgccgtcatatacatgcaccgaagacaattcaacggctactaaggctagttaaggtaattagtagattaattaatttaatcaatctactaattccatagatatatccggcatatatctacacaagtacgcaatattttatatgtaatttatcgtatctatccagatcatgcagcattgtcagatcaataatttattatgtttacctagagcatgttttttatataatgtccgttgtgcgagtacttccgacgataggccaactacggtctaacgctgggggctcgctctattttcttctgtataaatcatgcttgtttacggtttacataatgcctgatatttaatctgctcgttatatcctgataatactagaagatccatgcaattttttgagtacatactcgatattatctgctatatatcttgccttctagaaaatatttttcaggaacaattgagcactcgagtaggtt

SEQ ID NO: 12468 - DNA, 945 bp, Oryza sativa
  Intron number 2 from transcript LOC_Os04g48700.1 (locus LO C_Os04g48700) derived from phytozome v7.0 (chr-ID Chr4; po s 28849585 to 28850529 reverse strand)
gttacagtcgcgaggtgtttttcagacgagctaaaagatgctttgactccctccgcgtcttggtttgtttgcttaggcatgtttagttaccaaaacaaaaattttcacgctatcacattaaatatttagacatgcatagagtattaaatttaggaaaaaaccaattacacatattacgtgtaaattgcgagacaaatcttttaagtttaattgcgccatgatttgacaatatggtgctaaagtaaatatttgctaatgatagattaattagtcttaataaatttgtctcgtagttttctggcggaatctgtaatttgttttattattagactacgttaatactttaaacatgtgtacgtatattcgatgtgataactaaatctagaattttttttcaactaaacaagtcttatatggaaagaacgaaatgctagcatatccgagcaaaaatcaaagtcggagcaggtttgcaacgcgatcagggaagagattctgatgacctggaaagaagcgggcatctttgagagagtagactagagggttctccacctgtcgggcggcttacccgtccggcagtttgtttgtttcctccttctcgacagtttaatgtcgatgtggattcctattgtttgagagaacatcctctcatcatttacatatcatctaaatagttattaaaataatttaaaaaatcgacaacatagattaatatggaatatatcactccacaaatatgtaaaaccaaattcaaattcaacttctaaaagttgtaacaaaaaaaacaaattaaactgaaaatagttattgtactcgtagctatatttgttatttttattacaacttgtagaagttgaatttaaaattatatgtttgtggagtgatatatttaatattaagctatgttgccaaatgttttttaattattttaataactatttaggtggt

SEQ ID NO: 12469 - DNA, 714 bp, Oryza sativa
  Intron number 2 from transcript LOC_Os05g49310.1 (locus LO C_Os05g49310) derived from phytozome v7.0 (chr-ID Chr5; po s 28234542 to 28235255)
gggcaacaggtaacgcacattaactcgatcgcctccatcgcaaaatattgctatgacatacagcatttatgattccgagatggtcttccgtttcgggctctggcggaatgacggttttcacgaaatccggtacaaagccggtagattccgaacaaatttcgtaaaccaaactttaaatacaacttccctgagtttaccgataagctcgcgaaaaccggtcagatttgttaaattccgagcaaaatcatcgaaatttcatcagtaactagaaaaagaggtaaactgagattgtttttctttttttaatttgttattcttttctttcgtactgtaaatttcagtaaatacatggaatacatcttttttttattttataaatatcatactatttataagattttatttaatttttttttccttttttatcaattcaaatttgaatttggatgaaactcatcaaaatctcagacatcttctattttggagcctcgtcgaaacctcgaaatttcgcgaaattcgaccggttttcgttggaattgtgaaccctaacgacacatgctaatattacgaatctacgtatatatatatccaaaattatagtattagtatgtctcatttagtactggctgacaaaattttggaagggatcatcgatagattgatcacttggattcttcaggtggtccaagattgcaaggtaccttcctggccgga

SEQ ID NO: 12470 - DNA, 522 bp, Oryza sativa
  Intron number 2 from transcript LOC_Os06g11140.1 (locus LO C_Os06g11140) derived from phytozome v7.0 (chr-ID Chr6; po s 5842244 to 5842765 reverse strand)
ccaatatactcttggccggataagcaggtgattctttactgtagatatccgtagttgagaaccccctgttatttggtggttttccttttcattttctttgcgagttggttttgttttatatgtttagttgttcgccaaattctctatttcatgatgaagcataattcagtatatggaaatcccaaggggacatacttcggtacacttgattcagagcttatgacatgcattaaaatacagtgtgtagatactcacggaatatagttcaatttattataactataaatcaattggcctatactgatggtgtcttaagtgcatgttttttgactcatgagttaatttttttcatatttttgttttgtctatgcatgccaggctgtgaggataaatgtttgaggaaaagttagatttacagcgtgcttatgctataaccactatatttgtataattgtattactgaatatgccctcttccttattttcagcgtccacgagtgtgcatcttgggtggtggatttgg

SEQ ID NO: 12471 - DNA, 808 bp, Oryza sativa
  Intron number 2 from transcript LOC_Os05g05980.1 (locus LO C_Os05g05980) derived from phytozome v7.0 (chr-ID Chr5; po s 2987972 to 2988779)
ctatcgcatcctctacaagaagcgcacccgccggagtatgtttaatccgtaaccagtttcttgaacaaaagtagccttttgttgttgtcatcatcttttgttagtgcgtcatttcttgagcttccattggttagcttacacaatagtaggggcatggtggaccgggttagtgatagagtacattgtatatagttcgaacggtcaggttgtcgttcacaactcaatggccacataccatgtgcctgtgtttatctgcccaaggtggtatgatcgcaaggagcccttgaactcaaaaaatgaaaaatctttgagccaaaattaaatgcaaacttatctttactaaaaactgttgtagtatctctcgtaccctgtttttgagaactgaattttattcttgcggttatcctttagtacagtgcaatattctatctgatgtgtatcaatgtagcttgcaatttgcatgtcatactttttaaggaaaaatatttctttcagtaacacattaaatggggaaattctgtttactttttttttttcgaattgtagctctatgggctagtttgtagtccactttttccctgaaactttctctgaagattgtttgtatataagaattttgtattccatgtcagaccagttcagtggacttgagctagtgacgacactaaaattatctgtacaatgatgtttgatgggttattaagctctgagtaaaaggaaacaagttgaagcacacaagtacgtataataatcatctatgcaataatttcttttgtaccttacattgctgtggatccagcaaaaaggt

SEQ ID NO: 12472 - DNA, 689 bp, Oryza sativa
  Intron number 1 from transcript LOC_Os04g25390.1 (locus LO C_Os04g25390) derived from phytozome v7.0 (chr-ID Chr4; po s 14692708 to 14693396 reverse strand)
caggttataaccatgtttaaagttactctgattcagggaaacattgtaaagatggcttttctatgtagtttgcatgctttatgcatttcacttaaattgttaagctgatcggttatactgaccataacactgaaagcatctatgtaattattttcggtccacacagaacatcattttgcatatacatcattcatcattttgtcttttctaataaaatttaatgacaccttttatggtgctacaaaatttcacccctttgttgttcttcattttagaactgaggcacagtttatcctggcccataaaaatagtgatacaacccaccattaattattctttgtttccactgttttactccatttgtgtgtcaagagctgtcaattgctgtattttttttctaacatagtattctacaaagtacaccgtgatttgagttgctgcaagttgagattataccattgttctgcttatgaattaacaaaatgctatgagataagagctcacaatgtcactgcagtttgttacttcaagaatccctctatttgtgtgtatattgcagacgccttttcctctaaatgtgtgcatgcatgtttttgtcttgtgtatgctttattaaaattatcaggtgcttttattaccctttcattccttaacgtttttcatttatttcagcaatactcatcaggagc

SEQ ID NO: 12473 - DNA, 573 bp, Oryza sativa
  Intron number 1 from transcript LOC_Os06g39390.1 (locus LO C_Os06g39390) derived from phytozome v7.0 (chr-ID Chr6; po s 23379288 to 23379860 reverse strand)
atccaggtacatacgtgaattaatactgcattattcctgcttgctttttttttcttttttctttttggctttctagattttgctttgcactgttggatctcgttatgtttttcatgtgtccttgaaattgatatggcaacaagcatgcggcagtttgaatctatcaatcaaacatgcacgtcaaacttaatttcgtgaaaagaaaattaaattaatactactgctagctcctgttgtgcattgtgagtgtactgcacttgattagtacaggagttaactgcatctacgactctagtaccaacgtgattgcaacacctagctagattaaaaatacctttttcgtctcctttgccacgaatttgaattgatgttttattctcatacctatactatgtactggagtactcctgaaaaccagtgtagcttgcagaaaaaatgtcgaggtcaaaacctgggtacagaaccaaaaacaaagcaaaaaaatgacgcggactcatcagtcagttgattaattagttggaggtcacgtgatttgcaggtgacgacgttcacctgcggcggcttcgtgatcgg

SEQ ID NO: 12474 - DNA, 752 bp, Oryza sativa
  Intron number 2 from transcript LOC_Os04g02980.1 (locus LO C_Os04g02980) derived from phytozome v7.0 (chr-ID Chr4; po s 1205511 to 1206262)
ctcgcctctgttttgggaaggtaagaatgcacatcgttactctgtccatttacaaatattagtcgtactacctaacaacacatcgagagttggatcactatctgctcactgaaagtgtgatggatctaagtacaaattttatgtattgcaaaatgtgatatggaatgatattttttaaaaaaatatatatagtagtcaaaagtgacaatgtttgtttacgattaaaaatggagaaccttatatgcaaccgagcaaacgaacgttatgaaagatacaaatatgtccgtatattattaagaaaatacaaaatcaaaatgatgcccttgataatataaaaccttaaaatgaaagggtacacaaatacaacaactggtaggcaaagaaaggaaaacaacgttgctttaatggaaacatgcatggactctgaagtagcgggaataaaattagattgaaaagggcaaatgagtgcataattagtaaatttgtgtatatgcgtgtgcgttttcctgtgaggaagaaaaatagccacacaaatctttttagcaagtaatatgtgcagaagaactgcatgctaatgcgtctatatgttgattgacaaacaaactgtagagtaagatttgagatatcgtcactaacaatattactacgtgcatatctacggtgaactaaaaattatttcgagtattattaaaataaaatatggttgcatctttgaagcaaggaggtggctcttgagtccatcgtgtacagct

SEQ ID NO: 12475 - DNA, 480 bp, Oryza sativa
  Intron number 1 from transcript LOC_Os04g10910.1 (locus LO C_Os04g10910) derived from phytozome v7.0 (chr-ID Chr4; po s 5909529 to 5910008 reverse strand)
tataaagctgtaatcttgaggtattatagccctaacgaaatattcagggcattgctattattcaccaagtagaataaagaataaaaaagtattttattatgctattgtgctgcaaattgtaggaagataaagctcttttggtgcaaccaattatttttcagcaaacaattatccttctctaaagttttggttatacgttagaactgaatgagctgagaggttcttgtctgttgttgctttcaattgcatcttttggtagacaggaaagcatgatttgtaaccctttcaacatatgctttttgtcatgtgtttctctttacttatgtactccaacatatattgaaaaaccaatatattttgattactctgccatttgtatgaaatcggaatgtgctggaaaagtgtggtcgtcgattctgccttatggtttgtaatggtctgaactctgaaaattttgaacttgtgcactacagggttcca

SEQ ID NO: 12476 - DNA, 1051 bp, Oryza sativa
  Intron number 1 from transcript LOC_Os04g47040.1 (locus LO C_Os04g47040) derived from phytozome v7.0 (chr-ID Chr4; po s 27704527 to 27705577 reverse strand)
gagtccttcttgcattggtgggcagactggaaagagtaagctagcgttaattttccctttgtttttctccgtctatatgcatgggttatcttaaattgcaggttatttctttaatttgtccattccagtaccttcagcagcttgttcttgttcttcgtgatcaacaagagatcgaacagcaagctagcatagcagtctaccagctaacttacaggctatctcgcggtctcgccatgttttgtagatcagctttagtgcaaaactacagattataaggtacttgattaattaattacatgtagagcttaccgctagcctaagctagctagctagctatacgaaacaattagggataaccatatactacgcttgatatatatgactgtaacttgtgaattaattcgtaacctccttcattctacgcttcttttgcttgtacgtactgacagtggcagagccaaaatttactgaaggttagagctaaactatatctcaattgatgggttgttagattttatctaaaatttacattatgatttaaagagatataaacttaattttagagataagactactttagacctgcataagcccctgcgtacatgacagtatcatcaccatatgtttgtcatcttctttccttattttgcacatacatacgcccatctcacaaacgaaaaataatttgtgaataaatttttatatacgtattcttagcctaaaagccaaggctgaaaaataaacttcgatatgaaaaatcctgaaattaactctaaatttaaggttgaaaattcaaattttaattgataagtatatgtataaacacttattttgggacagatgcattatatacaggacattaaacagctactataagtttctacttctagtgtggtgatggctgtgccctaggcctgcattcgcccctccgtactgatgacagtgtcattaccatatgcttgtcagctttatctgcttgtctgattctttccttgattttgcgcacacctatgcaggaaattaaacagctagataggtttctagacttgtg

SEQ ID NO: 12477 - DNA, 482 bp, Oryza sativa
  Intron number 1 from transcript LOC_Os07g06940.1 (locus LO C_Os07g06940) derived from phytozome v7.0 (chr-ID Chr7; po s 3393998 to 3394479)
ttcttgacacttggttctcaaggtttgtcttccatctgtaaagctgtatgctcgtaatgacttagcatacatgtattttcctctccttgtccgcttcctgaagtttttttttgttttgctttgttcataacatgggcctaaaatagcttttacaacttgcattgtagagcagaaatgtgtttattaagatgtctgaataggttttagccatctccttgtattatttttcatgtacaacagtaagatgaatagttaatggagctcctatactgcagtattctttttcccttacagtttctgattggcatctgggatatctgtatgaaccttatttccatgtgctgtaccatgtagaagtataaacactttcagacacaaatcgctacaggtattaagaaaactgcatatagttttttgttgttttgacttgttgcagttgtcctgcagtgctctgtggcctttcagtacacttggttggccag

SEQ ID NO: 12478 - DNA, 927 bp, Oryza sativa
  Intron number 1 from transcript LOC_Os05g22990.1 (locus LO C_Os05g22990) derived from phytozome v7.0 (chr-ID Chr5; po s 13057436 to 13058362 reverse strand)
cagaacaacttggtatgttggcctcttgtccgtttggctccctacactgtcattttggtctgatttcggtataatctttctctatttctcgaaggatgttgtctataatcacttaaattcatttagaatcgtagtctctatagagaaaaaaaatctgttctatattgttcacgtttggtttaattgtgtaagttttgtcgacttttatataaattgtggataaaacatgtgttagaggtaaatgcggaactaagcaagttcatggatatatcccttccctttttgttcacatgtctatattatatccttgcagttgagggcacaagtgacaactggataacttagggatttcaactgcaactttctaaaaaaaacaattcctaatgaatttatttcaatcacggatgtgcatggagaatgtttgatattgcaaatttataattgctatcaagtgtcactgcacataatttgattacaagcaatgaatcacctgcactaatttcaacatatgttctttctgaaatttctgaaatcatgttaagctattcaactcgttttgttatatgtccttcagagtattaaggacattatgtgttctatttatgtatttttgaactaatggccacttaattacaaaagtttcctgcctctttatcactgcctgttgtaaaaattatcactagaacaaacatatagcacagtgtacatttgtcaataccatttctttgttatcctgtgccacataatggtcttaacaatatgggtgagtttctgcaatctaaaactattgttttcttggtttcacatatttttggttcttcgatgaaaaggaaaatggattagaatttttccactaatatgttcacctttcttttgtcatttatttgtgtagccatacagttgttggttgggtacttgctttctcgg

SEQ ID NO: 12479 - DNA, 720 bp, Oryza sativa
  Intron number 1 from transcript LOC_Os06g42720.1 (locus LO C_Os06g42720) derived from phytozome v7.0 (chr-ID Chr6; po s 25689564 to 25690283)
gatccgggaggggactgagcctccgaagttatcaggtatccccttttcttttgcttcagttttgagttcttggtgaggattcttgcttggattgggaagatcgttgcttttcttggggggctttgtgtcggtggtgggattcctgatcaattctaggagaagactggttctgagtagctggttcgtgggtcgcagtgattttggggataaattttggatatgtatgctgattaggatggacttgaagtatcattcgtacaaccgtgtcgtagcctcgtaggcttatgcccgtggttgtgaattgtggtggaaaggttggattttttgggctgagctttagttggtctaacatgatcttgcagcttgtttctttgtgcgttttgtctcatattctggatataattttatttactttatgttttgacttagagagttgcgtttctaaattcttaaagtcttttggtagaagagagaatgaacttcttgcttcaagggagtacctagtatcagaaatttcttctctccataagtccatacttgcattaattaaaaatgtgatacattcattttggggaatattaaagctgaacagcataagaaatggaaaccaagttaaaactgtctgattcaaagaaagttagatgcatgataataagcatacttggttttccagataaaaatctgactgaatccttgctatccaggagagtgaaagacata

SEQ ID NO: 12480 - DNA, 792 bp, Oryza sativa
  Intron number 1 from transcript LOC_Os06g17970.1 (locus LO C_Os06g17970) derived from phytozome v7.0 (chr-ID Chr6; po s 10444210 to 10445001)
tgtgcacagatcccagggtgtgcacagcagcataggtaagtaaaccccgaatttctgcagttttttttaaaagataaagcaggagctctgctattcaattaagcagggaagattatttgggtattttccgcagttttctggaaaccatttttttccccaaccattttcaggtttggctatttttcttgcctgtctgttaagctaaacttgcagaacttagcataaagttgtaatacaagcatagtttcaccaatatacaaccttttgttttaagctacaacattcacctcaaggaagaaaaagtaaacttatgaactgttggacttgggctgatatcactcggatggcggtcccctcatttttatttgcatctccttacgattttttttttcagctggcatatttgtcaacttcctgtaatctttttgaagtataactcatggaattcctttgtgtatattctgttaacccagtggttttatgacactaattaagaaagttaactagttaagagattataccgtttgagtttgggctttggagatgtcactagctagtggtcgacggtaggcaagtcctttctgctttgctatgaagaacctccgagctcagtcaatgtccagaaaaaagttggataactataagtggaagccatttttggttggttttctgcatgttctctttgtccctgttttattatgtcatgtaaacttttcattccccagtttgatttatacatgtctatttgacattgcagataaatacagttgtagcctgaaagatagaacttat

SEQ ID NO: 12481 - DNA, 866 bp, Oryza sativa
  Intron number 2 from transcript LOC_Os07g05580.1 (locus LO C_Os07g05580) derived from phytozome v7.0 (chr-ID Chr7; po s 2613131 to 2613996)
gcgtaagttcttgcaaccaacttcttcttggcctctgctagttccatgttttttctctctctatcctcgtagcattttggatctagcctgttcttgctgttgctgctgttggtagaacactgttattactgtgtaattgttgctgagccttggctgcgctactgctcgctcaagaatcgtttggtcttatcatgtttgagttgtccttgattggggaaattgtcatttggtttccatttcgatgggatcattgagtgaaaggatgtgggagtcatgagtgcgattgctcggatttctgctgtactggtatggggtcttggtgatttagaatttggcagctggtagtatagttggtggattcgttgtatgtgagccgtctagtttagcaaatacaatcatgattcatatcagatgatatgtgcctgttctgtactagcaccaaggagtgtagacggtaaattcacagccagattgaaaaaaaaagctcaattgcttatcaaactatgtttatatggaattgaattatccaacttaattgtcttgtttgcatccaagaagtactgaatttgtacagtgtcaccagtagtgagaaacaatgcattttttatattatgggtgctcaattcttgtataaatgtaacaccacgtacatgccaaagtatttggacctccattattgaaagagcagtcaaattagaagagaactaaaaataccttgtaaagtgtattactagtaattgttaatagatcttatgtgcatctcggtctttgaaacattgatgtattgtagcgagcctattcattttcgctgagatctaaacacttttacagggaggagaccccagttgagactccagctgccccgg

SEQ ID NO: 12482 - DNA, 502 bp, Oryza sativa
  Intron number 3 from transcript LOC_Os03g63720.1 (locus LO C_Os03g63720) derived from phytozome v7.0 (chr-ID Chr3; po s 35973928 to 35974429 reverse strand)
gttctgtatccttttgccgtaatgtactacttagtattgtttctgggtgccttttggattatgaacattgtacttgatataggaatgatttcagatttttggctactagctgcagtagattggcatttgaatttaatttcctgtatctctgtgaatctcataagctaactgctaatttcagctggttgtctacagttaggataagtggttcgttgttttattcctgaattctttgcctcgcaaaatgtttgttttggccggctaatataactgacttgtgatgagaaaatgccaagtattgatggaagtccctggttccatgctttttctgagtagtcttccaatcaacatactgtatacagcgtgctttatatgaatgggcatggcctgctatagcagatatcaacatgtagtatgttctttgtaatattcacagattcttagtatttcggtcttcaagatttcaatcaagcacaatccttgactaagtctagcttcttcc

SEQ ID NO: 12483 - DNA, 968 bp, Oryza sativa
  Intron number 1 from transcript LOC_Os04g58470.1 (locus LO C_Os04g58470) derived from phytozome v7.0 (chr-ID Chr4; po s 34598733 to 34599700 reverse strand)
tccagcttcggattcaaccagggcaacccactcaggtgaggtgacccgtgacccacccactcgccttcacctctcctctcctcaagattcgccgatctgtgctgtcggtgctgtttaatttcggttccctgtagctagatgctaagagcgttcatccggggaacttttcctttgctgggtggtgattaatgccgcggtacattttgagctgttcttcagacagcaacaatttaccaagaacggagcattttcaggtgttacgggctatgttccttgttggatgtgtttgggtgtttagtgcataccttcgcattcttgttggctcatttttttcgcgcggatcctggtcaattcttcaacttgatgtgttattttcaggctttcagtctaattgaactgacatagagtgagaaaatgagggtgccacttgctactatggaacattcagatgacttttttttaggctattaaatactttaatagcagatcttgcttatttcggaatgaaacttctagctcccgactttgttatttgtactctgaatcgaataatctttgcttgctttgtttcaacctcccaaccggataggtaaagaatcccacttttgctttgcagggagaaaatgtgcctttagtggttactcttatatattagagttgtgtggtccttggaattgtattccctccgaaaaaaaacttacagcccagctatacaggatttgtgctccctaaaagcaattcacactacggttatatattaatagaaaccaaaacccactactgagtgctgaccaaaagaaaatttgtttagggataaaactcagtgctgtgcaacttttgcatggctatcattttactattattcagacactatgatgagtaaccatactactcctatttagtacatgctgcatgtgtatctaagtaatacagatgtcttatattgttttgatgacacaggcttactt

SEQ ID NO: 12484 - DNA, 543 bp, Oryza sativa
  Intron number 2 from transcript LOC_Os07g11060.2 (locus LO C_Os07g11060) derived from phytozome v7.0 (chr-ID Chr7; po s 6111072 to 6111614 reverse strand)
gaatttccagcttagagcaggtatgatctgtaacatggaccttttcatccttagagtttaagaaccgcatttgcatacattgaggtgttcatggtcttagtggcatgctgaaagaagaattgaggtacttaagaatgattttaatgttctcaagttaattttcatattcttttttacataatatgttcagtttttcaatcttgtcattccgcactttgatcgacttacttacatgatttgactacacattcactcatacccaggaagctagttctagaatctcatttgtattttccaatgaccaccaaagtagtcatgagatcttaatttatacttgccatccgaaagtactgtatgcagaatgtggttgcttgagctatctgctagtttggtggtaaacttcttttttcccttctgtgtttttcttattctactgcaggacgtttgattggattgtccattttattcgtttttttgggtgctttacattttaaccctacttttttggaatcaagtattgattatatgttttcttgtcaaagg

SEQ ID NO: 12485 - DNA, 731 bp, Oryza sativa
  Intron number 1 from transcript LOC_Os07g11060.2 (locus LO C_Os07g11060) derived from phytozome v7.0 (chr-ID Chr7; po s 6111666 to 6112396 reverse strand)
ggtttttagcaaccgagtaagttggcaatatgcagttccattaaatatttttccatatcatttgttgaattagaagacactattgatagtgaaagttctcatgagtttccaattagggtactgtccaagcgcttcagtaacaacgttatttggtatctttactgttagttagtcaagttattgttttgattagtctataaaatagttgttctgaagcatggagtgaaatgcctttctccctgaaagttctttcatcctagtctgtggtctcctccctatcctaaagtgccttcccttcagccatgtcactcctcagtatggaagctgccctgatgtactgagttgcatagcatgatgcatacatggaaacatggaaatatatactatataatcaccatttagtacttcatgatgcattcatgcaatcacttccctctcaccaaatcagtatgagataatctagttgttgttattatttactcggcatatgtataaaatttcaagttataattcattatatgttgagagtaacaaacatgagaaaaatctgaaaaatgatgaattggagaaggataggaaaaataacacaataagttctgtaagtatataatcataatacatatgttatcatttttttttctcttggttaagactggaactaattttattattctaatccatgttggaacattacagctacttggagcctttgtcacttgcactagaggtcg

SEQ ID NO: 12486 - DNA, 516 bp, Oryza sativa
  Intron number 1 from transcript LOC_Os06g14340.1 (locus LO C_Os06g14340) derived from phytozome v7.0 (chr-ID Chr6; po s 7991103 to 7991618 reverse strand)
cgctcgtcgtcctcctcctggtcgtcgcgtgcgtcgtcaagggagcgatgtggcggccggcggcgatttttgctctttttttttaattttttggttttttttccgtgcgggtggtataacacaaccgcacgggataattgattatcccgtgcggtcggcccgcccgcacgcgaaaatactgattttcccagacactcggctgcagacgggccgaacaaccgcatggaaaaatcacatgtaggtcagggtagcatatcataaattttgcaaaatttgtgtggcatggttcaaatttttcctatttaaaacctaacggatggacttatacacctccgacctcaccaccacaccacatgtgctttctctacttcgggttgtataactacgcttgttgttccaaaaaaaaaagactaattaatattcactaaataaaagaaacgtaaattacacattgaatcttcttcaactttgtatggtttagtttctgccaagcttgcagaagaatcatcatagagt

SEQ ID NO: 12487 - DNA, 725 bp, Oryza sativa
  Intron number 1 from transcript LOC_Os06g34120.1 (locus LO C_Os06g34120) derived from phytozome v7.0 (chr-ID Chr6; po s 19867929 to 19868653 reverse strand)
ctgctccaacggccgcctcgtcgtcgacttcctcggtaataccttagctcctcgtccatggcgtctcttctttctcttgtccctctcttggccttgccaccgcttcacatatactatttctttgtttaatggagtcattttgcaataaccaatagaaatgtctctgtcttgctattagtactcttattaaaaagtgtcaattttgggaagaccattgctctgacctttggtcatgatgcaattgacccttcttcttttcctgtttattttacagaacacctcaactaattaatcaaatttctcttcaacctttttttttttatgttccgtgtttcaaacctcaaaaactctgggagtagtaaaagagtctgcgcttttgcaatggtgaaattattgctgcctcctttctgccacatcaaagcaatcgattatgaaccaaagttccttcttcttttttcctctcctccaactcctaaaaagaaacacaaagctgatagtataattactgttgcaaggcctctcaaatcgacagcatatctgcttcccaatcgattgcctgaaccgcgttctgaacattgtctgcttttgtttcagagcaaaaaagaaaaaaaaaagcagagcgatttgattccaaacttgcgggttttttttgttcttaatctgatgggagaagcgatccttggcttgcagcggagcacttcgggctgccgctgccgccggcgtcg

SEQ ID NO: 12488 - DNA, 641 bp, Oryza sativa
  Intron number 2 from transcript LOC_Os04g39280.1 (locus LO C_Os04g39280) derived from phytozome v7.0 (chr-ID Chr4; po s 23185695 to 23186335 reverse strand)
cgagatcggcgcggccgtccgcagccgcggcaccggtgagcctccttctcgcccgcactttcgagtcccccccccccccccccctgagagcagggtttagggttttggtcgctatagcggatttggagctgtttggggttgctactggactaataattttcagtgctcaaatgtgctcggtcatggtgggggagattaggtcgagtttccgcacccgatttgcgagctgttctgattgtaaatgctagggaaagaggaagatgtggggttttaggtgtaggcctatagccatgccgaagttctgaacactgaacagaacagggtcatttttgggggatttttgctgttaattggatgaagaagcaaacctggtgagttctaatggctgtatctgaaatcgccaattatagatgagcttaccatgttccaccttggaggagtttctttggttggttattgagctcaattgtgattatattcttatccatttgctattgcagaaatgcctgtatgacaggtttaacaatttttgttttttgttgattcttttgtgattatacctgcaattgacgtcgtgctacttatccatggctatcatttgtgcagatttcactcttacgttgaggattgtggatcactca

SEQ ID NO: 12489 - DNA, 863 bp, Oryza sativa
  Intron number 1 from transcript LOC_Os06g20630.1 (locus LO C_Os06g20630) derived from phytozome v7.0 (chr-ID Chr6; po s 11887902 to 11888764 reverse strand)
tggcgctccaaggtacgctctgcatacaatcaaattatcgcaaaattgacaaaaatgcaagagaaaatctgatcacctatagaactgcacaacattttttttctcacgggaaggggacccctgcacacgaaccactacacaaacacaacaagtatttgacaaattaaatgtagctaaacgtgcagtcttcacaaatttgaaatcgtttgagatcgtttggctggccaaatatttattataaactctcatatcttttttttcttttgaaaataaggtatttttgtaggcggttctttatgatgtccaaactttgaaagttcatagaaaacccattttaaatctgattgaggtgaaccatagtcaagatagttgttttagggacataaagtctcccatagttttgaaatgctttataactggtaagtagcctacacgtgaatgagaggatatcggtttgaattctatatttcgcatgaaaaatcgtgtgatttgtgagtaactattgctgtataaatgctcactaagttataaatattttttgggtgtttcccatgaaaaatgaaaaatcagaaattttcacaagctgttgtggatccacttgtacaaatcgctgatttctcgaggacctcaatcagaggcaatttgtacaggcggttaataatctagtatttattatagatccgcctatataaatcagttatcaactgcctccacaaatggttttcctggtagtgatatgtaatatttgtctttttatattgacattatataaatcaatgatcagcattacattataatcctccctgcaaaaaaaatccatggtgaaaggtccctgaagagctctcaagtggcgtccatctgaa

SEQ ID NO: 12490 - DNA, 517 bp, Oryza sativa
  Intron number 4 from transcript LOC_Os05g41010.1 (locus LO C_Os05g41010) derived from phytozome v7.0 (chr-ID Chr5; po s 23979482 to 23979998)
ggaaaaaattgctgcgtggacatttcttcctaaaggtatttgactccattaagacaataacaatgcactttactattcatgcaattcttagatgttctatataattcataacttacacatgtgagatattgtcattttacacctaataatcaacctccctctgggcctttgttttcgttcctgtacctatgggcagtcttgaagtgaaagcctctaaaatagttatgctccacttggcatttcatttctaaaataaacaaagtaaagcctttaatgttgagcctccttacctgactttggggctaattcatccaaaggttagtttcaagcagtatgtcattgaaaaccacgctcaataattgttttttttcctttttctttttgggtggggattgatagtagggattcttttttatgtgtcctcatgttgtcttccttcatacataatccaaatttatgttaactttatgtgtttttattttttttcttgtacatattatgtgataataatcagaga

SEQ ID NO: 12491 - DNA, 853 bp, Oryza sativa
  Intron number 2 from transcript LOC_Os03g51880.1 (locus LO C_Os03g51880) derived from phytozome v7.0 (chr-ID Chr3; po s 29739097 to 29739949 reverse strand)
ttgcttttgctgaaaagttgcaaactaaatcgaaggtattgcttctgcatttgtgatgtgtgataaactgttgttaagatagcatttgtttttcctgattgtgctgatcgaagtgtctgtataataagccttcggtttgctaggcagctgcaagtctgaacctagttaatgctttaggattgttttgcggtgactatcacttgagttcagacaaaggggaaaaaaatacggtgtattcccttgtgtggagatttctagttgatacacttcaaatatgtggttgatttaatgcagataaactgaaagggacttcaaaaggtagctggttgtgtggagtcattttagaagaattgatcttagctgacatttgaaattgaaatagaacataccaccacatattttttgttatagtactgttcaagaactagtgcagaaagataacacctttttcttgtttgctgatgcttctctaaatcataacgtccaataggctcaaggatgccaggctcataaatttacagagtatgcattacaaaaatcgtatgccaaattttcagctgcttgcctttttattccagacagcagctgcaacaatagggtaatatactgataagctgattagtacttgaacgttatgcttttatatttgcaaaatgcaagcatgtaacgtccgcattgctagaataacaccgagtaaactgcaaattccatatcaaaattatagattgttgaacatttggactgttagctgaagtctgaagatgaacacatgcggtgcttgattgacatttatttcatattttttgtttctctggtaggaattgagctcaggagaagaagttttcactacttc

SEQ ID NO: 12492 - DNA, 768 bp, Oryza sativa
  Intron number 1 from transcript LOC_Os06g43800.1 (locus LO C_Os06g43800) derived from phytozome v7.0 (chr-ID Chr6; po s 26377104 to 26377871 reverse strand)
tggctgtcgaggccgccgcgatcgccgtcgagccggtgagttttaagtcatttgatgttgccgcccctttgcctgacaggtgttcggcgttatgcggacctggcagcaggtcagctactaggtggtctggagctagtggaaatctcgcagcgattcttttttttttcttgcgcactgaggcgatttcttgcctctgctgtaaatggttagctgtttctatctcttctttgctataagtgcataggaggccatatatctgcaaagaagcttcgtagaatactgacaagatacattatctgtggatgatcagctgagaagttacatggacttatggacctataagttttttgagacttgagactagtgaccacttgggtaaattgggtttcgggtacatgctgatgatgactagcagtaacggggcacctacatataccatggtggttttgacttctgcttattcaaggtgcccacgtatgctggggcagagatgggcttgtcaataatcacattgcgtctgaatgtctgatgtttctcattagaccctgccctgctgtttgtgtgttatatcttggacttttggagttccaacctgacaataacgatagcctttttcgttctgtgtgaaactaaagaatttggctgtagcttctttgaagcaaaggctggaatgaattccattattaaaaaaaaaactgaagaattgattgtctctgtgttttacacttaataggaaaacaaagtaccgcagagtaacaattcagaagc

SEQ ID NO: 12493 - DNA, 999 bp, Oryza sativa
  Intron number 1 from transcript LOC_Os06g11170.1 (locus LO C_Os06g11170) derived from phytozome v7.0 (chr-ID Chr6; po s 5859001 to 5859999 reverse strand)
acggaggtacgctctcccttcttcctccgcaattttccggcatcgcgcgttgccctgttgccctccgccgcccgctgtggggattcgcgcatcgatctgaacgaaaccacggtgcttttttctcctttggggggtttctcggtgatggtcggcgtcttccgagtgcgagtttatacaggattagctgatgtttagggattttgcctctgttagtcacttggtctcgtggatttcgatgaattagggttagtttcgtaattcgtatgctgcttgtgcatgtccctgtgtgttcggatgctatgggagagtagatagaatatgcggcttggtgaggctggactgaggaagattttgcctctggactggagtgattccatcttcatatgggtgcttcagtcatcttatgtttttgtagattgagatagttaaccaaatagggctttgattcttttggtaggttaatggtattttttagtacttgtttgtattcaactgtaattgaatttgaaatgctaagtggagattagagactgaaagtcccaatgtgatgtatcatggcaatattatcaattctctttctgaataaatcaggatacaaatgcctattgtgttcgtttataggagaatagttagttgttttttcctttcgaaaaaattcgtgtccaatcattcatatgatctatgttatgctcttaaactctgttgttgcaagcatccaatcctgctaattgactttttggcatcaatattttttaccattgcgagaaagagattatttagtcactatctgaaaaggtgacagtacaagaagcaactgtagtttccttctggtaggaatacagggtccctattagccctttgaaagttatctgcgatcatcttctttgacatttaagttgttgtacactgtcatcacaagcatccaactttgcaagtgtttttgttataaataactttttcccctatctttttccagtactgggtgagccaaggaaacaa

SEQ ID NO: 12494 - DNA, 668 bp, Oryza sativa
  Intron number 1 from transcript LOC_Os05g51190.4 (locus LO C_Os05g51190) derived from phytozome v7.0 (chr-ID Chr5; po s 29301255 to 29301922 reverse strand)
acttacagttgaacgacggtgtttaatttggattggtgggtgggcctcttgttatctcctcagttttgcatgtttccactcagctactaataaacaggggaggggaagcttcccgtgtttcccgacggaatgcggcgccaatttggattggaaggaagcttaatcgccatggatggagatggaaggaatcccccgaaatccggacagagacgatggcagtagcagacacagtgggtggccgcccaccattttgcccttcttccccgcgtcgccatgcatctatccgccaagcccgcagcacccatataaaagttgcaatctttctctcaatccgcagccgcagcgactcgctcggaccccctccctgaccccattcaactagccctgcaaaaaaaaaaaaagacggccttttctttcttttttgtcctgtggtttctctactccacagtcaccacaacagtggagtactagtgtttactgtttgcctgcttcgtctccgggcattaaagtccccggagctagcctagcggtgcttgtctctctctctctcattttggtgtctttgaattcaatttttcatcacctgttggttctgctggtgttcacttcatttcttgctgaaaccgaaatgcttttgaagcactaggaggctgctcgagctctcggac

SEQ ID NO: 12495 - DNA, 739 bp, Oryza sativa
  Intron number 2 from transcript LOC_Os05g02510.1 (locus LO C_Os05g02510) derived from phytozome v7.0 (chr-ID Chr5; po s 869488 to 870226 reverse strand)
gcgtcaattcgatcgtgggtggagcaaccatagaggtgatttcatttcctcttctccagattatgcccttttttttacagtagtgttgtgttggtgaagtgttttgggagaatttgacgtgagggctactacttctccctttttgaagtacggtttaactcctagcgtagttatggagcaagtagagtgagctgagtgagtggtaaaaagaagacttcaatgtggaattactgcaaatattgatgaactggtttccagtgaaattcagcttataacggtatagcatagctaaggctgaacttctctaatgcaatgaacttgattttttttaatgagctagctatttgatttttgcgcacttctcagtagatgcatcaactcttgtggtattcttggaaactctgatatgaaatgctcatattattgtgggttttatcaaacgaaactaacggttggtactgtttgtggagtgtgttgattgatacgaacatcatctctgaatattttagagttctactgccaggcttggggtcttggggccttgggggcatgggttcaactaaagtagccctcactcatatacagtttagctttgccggttgtgccccctgcaaactttcagagaactgaagacaaacgttgctattaagttataatattgtccaacatttctcttttatgcacaagtgtatgaaaactgaagctgtattttatctatccttgtaggctaacaccatat

SEQ ID NO: 12496 - DNA, 905 bp, Oryza sativa
  Intron number 1 from transcript LOC_Os04g38750.1 (locus LO C_Os04g38750) derived from phytozome v7.0 (chr-ID Chr4; po s 22842527 to 22843431)
cgagcgccggcgaggaagcgcaggaggtaatgggctagtagccgctccaaaccatgccagtgactgaaattacggggtttttttttttaccgagtcgagctcaatttcagaaggaagtgttgttttttgaagaggatggagttcaatcacatttggtttcgcatgaatttgatttttcttgaatcaattttggttaccgaactgattacttgagctcataggtgaaatacagtacgaggtgtacatttgggtgaattcacgagtagagtaaatctttagacacaatgcacagctgaaagcttaagagaagtcacaagtagagtaaattagagaagttctagtctagttgagcatgtttgggcactcgggctgtccttttggtgcagttttgcacttctgcagataaaaggtgtatgctagtgatgaagaggcgaagagcacatgaaagcatgtccacaaacttgagcgtgtgccatttttggttgtatgtgtaagcaagaactgaactattgaacaaactgtagcattgacaggttttggtcatgaaaggagttttttttcattcagctatttacgtgattatgtaacaacattaacaggcacaataagttcctttttcatcactatatcagatttcagagatgtacactaaaagtggattagttttgattatatgggagttaccctcacagttgaaaaatggggccttttgtagagaaatgaagttgtcaatggaacacgtacagtagttgttgcaatttattttactacgacttgagctgtgttaaaactgcacaatttattttactcagatatgcaaaatcagtattagcattatgagatttgaaacgaattgattttgtatcgcagtacaaggttaaggtgcctgaaaggcaggatccaat

SEQ ID NO: 12497 - DNA, 791 bp, Oryza sativa
  Intron number 1 from transcript LOC_Os04g07220.1 (locus LO C_Os04g07220) derived from phytozome v7.0 (chr-ID Chr4; po s 3824350 to 3825140 reverse strand)
tcttgtgcgccctaaccgggctgcgaggtggagtggtgtgtgtgatgttattatgcctactatggatataactattgttcacatcatggatcaacaagaagatatcaagataagtcgttcaagtgttgaaatctgatccggcaacctgctacattgtttgtcttcaaactgctgccaaatatgcatacgagctttgttttgggttcatcaatactcgatgaaaagctcttggactcctctttccaacagttctagtctcatctccaaactccatcttagtcggccgcaataaaaaaacaaggagttgtgttaatataatgggcatatgggcttgtaattttatctgggacctagggtaaagtagggtgcgccccaatctagtggagcatgatcctagggacccttagctcatcctcgcacctccataaatagctaggcaccccttcagagtttcttgggttttgtgtagattaaagtttagacattgttactttaccttacagttacgtgtgccggctagaccatcaaagtactcgtctctgaaaccccaacttatcctggactttaattcctatttgcaattcaggttgcttttatcttgttcttatttgtttcttcgattttgcttgcaaaaataaggttgttctgtatcagccagatcaacaacccacgaagaagtgtatcgaagctaaggcacaacacaacatcatctcgtacgattgtagtcgggttgacaacttctctcacaaatcatagttatctcaattcaccaaaaatcgggtcaatcaaag

SEQ ID NO: 12498 - DNA, 700 bp, Oryza sativa
  Intron number 1 from transcript LOC_Os04g49510.4 (locus LO C_Os04g49510) derived from phytozome v7.0 (chr-ID Chr4; po s 29347276 to 29347975)
tgttgcgattcgcaaatattgtagcgtcacattagagttaacatgcatcggttaatccattgtctgaagaaaaaaaaatggaggcaacatgcaactgcaattctcagtttctgaataattagttgggcatatagtggaacattcaagggtagcactacagcagtgggaacattgttaatgagttcattgcatcctgcaaggtctgaaatacacgttcgttggggagcagctgaatggcagagtaaactgatggaagctagttcactgggaggatttctgagttaaatgtagtggaaaacgatggaagctgaacgacatcttgttctaataaacatctgtaatgctgtattctgtattgtggggaatttgatgtttccataagctaaattaggttactgtaggcatatttatatgagcttgtgcctccttttattcttcgtcttcttttccatctcaggtcaaacttttaccgatgttgtcggaagcccatattacgtagctccagaagtgttgttgaaacactatggaccagaagctgatgtatggactgcaggtgtcattctctacattttactaagtggtgtacccccattctgggcaggtaaattttgatttcccccttcaattaacctgggaagcttgttttctgatgattgtagcttgacatttttcgtatgtatacaatgcagagacacaacaa

SEQ ID NO: 12499 - DNA, 1068 bp, Oryza sativa
  Intron number 1 from transcript LOC_Os03g48840.2 (locus LO C_Os03g48840) derived from phytozome v7.0 (chr-ID Chr3; po s 27816159 to 27817226)
ccgccgccgccgccgccaccgactacccatcgacggtatgtatttctctatctctgttattttttttctctcctcgctcgtactgtggataaagcggatccaatccatgacatttgggtgatttgtagtgggtgctagtatcgatccctttcgtggattctgggtgctactggttatcgttaggtttttttaggggaacatttctagcttctttgtaatttttttttgaacctgttaggagttttggcttccagttcagtctggaatttttttttcattcttgaacatttcacacacaaggaaccacggtatgtcttagcttcaatttaggggccttttgacaccacagtgtgtcataaagttgatatggatatatatcccctcaaagtaacttagttgattgaacttaatagcagtgaaatgctaacgtgtgttgtttcttgtatgtgcatctgaaagttattgcatgtcccaaattttctttgtttgaaccaaatagcaggggaaagagccattcattaggaaatactgagattgactttgacatgtaaattcaggattattattatttttaatttaatgtgcacaaaatgctagctcattctttgaagaagcaatttgcagcccgttgcacatgcacactatttatgctatggaagaaaagaaaggtaggattcaaaagagaagatgcctacctgatacaatcttcctagagtaaagttgtcatttcctgcttgtggtattgttagcaagtcctgcaagtctcaaatgtcaagacagctgcgtcagtgttatcagctacattttgttgatttgctgctgcttttagaatttcagtgatgtattcttatggagaaaggtgatttctccttgcttatttttttcttgtggagaacagttctcacctttttttccctgtgatattctcggggttttagccttttcaccctggaatctctttaactcttggatgttgcaaaagcaatggcagtgcgatatatctctaagtcttcgtttgcttttttttgtacagtcagaaattcaaatcccccctgtggcagtttgaac

SEQ ID NO: 12500 - DNA, 982 bp, Oryza sativa
  Intron number 1 from transcript LOC_Os05g02450.1 (locus LO C_Os05g02450) derived from phytozome v7.0 (chr-ID Chr5; po s 836077 to 837058)
atctgcagccgcaagaggtaattaattgatttggcaaacatcgtctttgatctccagccgtcttgtttctctccggtgaacccaaacggaagaaagatttctgagcaccgcatttcttggccggccatggccgccgccgcccggccggccggcggcgaaatgcgtgtatgagtttgctgttcttggagtcgtagcggatgggggcgaatcatcgatgtgttgtcttgtccctctcatcctttctctctctctctctctctctctctctctgcgtgtttgtcgtggtcaagacgggttaggcaagcttggggactcgcgacgccatggctgacgtgctggaattcttctccttttccatcactagttttgcttcttcttctttcttctttcttctttcttgtggaaaattcactccaagaagaagactcacttcttgtaacttgtctttggttcggttcacagaagtactagtagaatacaatttcaggtttggtttggttcactttttttctttttcaacaaaagtttggcactgtagtgagatgctgtacaatgatgttgtttttttttcttttcctccggtccctatgaggagagagaaacagagagagagagagagagagtgatttgtttttgtatataattatattttttccaagcatgcattggactgattccccaagtgaagtggtggttgcatgatgcaatcatttggaagggatcgaaatcatttgccctctggatcatgctcatgcatccatctcatctcctccctgcccttccattaccttgtgtctcctcatcatcaactctactattaactcctaatctctctgcttaatcacttcgttaatcctctggtgactaattgcaattatccatccaagaaagtataattgatagtactagtatattttgatgcaaaaaaataaaaataaattgaggttgctgactgaatatatggtggttaatgattcagagc

SEQ ID NO: 12501 - DNA, 692 bp, Oryza sativa
  Intron number 1 from transcript LOC_Os06g36170.1 (locus LO C_Os06g36170) derived from phytozome v7.0 (chr-ID Chr6; po s 21169508 to 21170199 reverse strand)
cgcccgcctcaacctccacctcgccctcctcgctggtctgctcctggttcccccccttactcattgttgaagtatttggtctaaactatgctatatgtttaatccaggcgtctagaactagagtttagcactgcaatccgttttacctgtcgaagcaggtggtataattaaattgtttgctaattcagttatttcgaataaccatggtcaaatagttcgaacatttcagtatataatactccctccatttcgaaatgtttgacaccgttgactttttagcatatgtttgaccattcgtcttattaaaaaaatttgtgaaatatataaaactatatgtgtacatgaaagtatatttaacaacgaatcaaatgatatgaaaagaataaataactacttaatttttttgagtaagacgaatggtcaaacacatactaaaaagtcaacggtgtcaaacattttgaaacggagggagtaatataatatcagtgtggctgtgcggataattcgaattctcggaaggttgtgtaatatacagcttaataattcatgttactgtgatttttttcaagaattttcacttgctaaatatgatgcttgatgagtgcaaaatgcctttaacacaagtaatttgtttttgtctattttttctctgggcaggggagagaggagggtgcataattgttgattcaaca

SEQ ID NO: 12502 - DNA, 1016 bp, Oryza sativa
  Intron number 2 from transcript LOC_Os04g08390.1 (locus LO C_Os04g08390) derived from phytozome v7.0 (chr-ID Chr4; po s 4484370 to 4485385 reverse strand)
cgtcgggaggtattttttttttgttcttcctcagaatgcagcagatacatacatatagtattgttaattatacagtttaattgtatatgctttcgaaacaatgatagatttgcgtgtgcgcactcagagggatgattgtgcgcatattgtgagtggcagtgtttataccgtgtttcttaaaaaagcattgaccagttggcagttgtattatcaactgttggtagtgatggacaggaaaatatacagtggaaactacatacgtagtgagacctgaaaactaccgtttgatcaaaaaatagacgtctgagattcatccaatcattaaagtaaaagttttactcacaaattcacttatgagtaaaaattactcatggtgatgtggatgaatctcaaatgtccattttttatccaacggttgtttacaaattttcactacatatgttatatgttgtttgcactacatattttcctgtgatgctgtacagtgcctatatacagacatcgtctcgttttttccctttaataggtaattaattaagcaattattatttgttagcttaagtagtcagcgttcacagtaaaaacaatttatagaggagatgtttgagctaataattaaattaacctaatcgccgcatcctttagttatctctgatgatgatgtgcgcccgggtgtttttttgtttctgtgcatgcatgtatgaccacaaatatggctggttaattatttgtgtaatccggaaaaaaaaaattgtacctgtgacactgccacaacgtaaccaggattatttctgcggccagctatagctacctttttctgatggatctgcaccttttaaataactaacaatctatagatatttgattattaaaaaaacaatctatagatatgctatataaacctaaactaaacattagtagctagtataacagactaggaattacttatgtattatttgcggtcagggagtgagagtgacatcaactaatcaatcggcatataatgcagcgcattg

SEQ ID NO: 12503 - DNA, 981 bp, Oryza sativa
  Intron number 1 from transcript LOC_Os06g06390.1 (locus LO C_Os06g06390) derived from phytozome v7.0 (chr-ID Chr6; po s 2981397 to 2982377 reverse strand)
ccagcaaagctgagggaatacctgcaagacaaaaggttagtactcccttcatttcagattataatcagattataagttgttttaactttagttaaaatcaaattgctttaaatttgattaagtttgtaaaaaaaaagtaatattttcgacctaaaataaatatattatggaaatatattcaactattgatttaatgaaactgatttggtgttgtaaatattactatatttgtctataaacttattcaaacttgaagtagtttgattttgatcaaagtcaaaaaagacttataatctgaaacgcgaggagtatttcctttccttgttcaacttaatttctcgagttacaacaatgtagtactactatactaaccagtattactataacaactaagaaaaagaacattagtattactatactaagaaaaagaaaatgttcaagtaactaagaacactacttcagctaagtttgactttatagaaaaaccgtagtaataccaaattagttttattaaatcaaacattaaatatattttgatactatatttgttttgtgttcaaaatgttgctacatttttctataaaattgcttaaagttaaaaatgtttgacttagaaaaaccaaaatgtcttataatatagggggagaattaatgagttacagtaacacaaaattgtttccaacaatgacactcttccattgaatttatcctattagttttattaggtaggtttgatgaagttcaaccttctcctgctcgggttatttgttctctattagagaatcataatctattgattagttgaaccaaactcgattttactactattcaactcagtcttgccggttgtacaaaatttccttccagtagcaggtagtagctaaaaaaacagatcatatatgtagttaattattttatttgttgccgagtttgttcatatatgtggaactattacattgtataggtacattgtgatattgg

SEQ ID NO: 12504 - DNA, 826 bp, Oryza sativa
  Intron number 1 from transcript LOC_Os03g42020.1 (locus LO C_Os03g42020) derived from phytozome v7.0 (chr-ID Chr3; po s 23340173 to 23340998)
gcgcgctctccagctgcaggcgagcatcgcatcatgtccgtctcttccccctcactcgcagttctgttattaatttagtagtttctgctagaacttgctactgcgatccactgatcctctcctgctgctcgatttttttttttttttgtattctcgtttttaccttttttttttttttgggcactgggttctgaattctgttaatatgcgcacggattgctgcgttagaatcatagtgtgtgtgtgcgcgcgcgcgcgaataatccatatcgccgggtttctcaattgacatccttagctggctaaaaatcgccgggtttctcaattgacatccttagctggctaaaaatcatggacataggataatgcaatgataagtactaatttctgtcgtggcaattggtctgtaataacggcttttcgacaagtatttagcaactaaaattcaaccttgaattttattttcctgttagaactgtaaaattaaatcacacgtggtagtttgcttggatgtaaaatcaagtatatttatgatacatcgcatccttttttctgtaactactgtaacgttctatgagctagaaaatattgcttaacctcctgtcattgataactctgaacatgctataattaacattgtctaatttttaatgccattataaatccttttcaaaccttcatattctcaaacttgcattagtagtgttagtgcactaaaatgctaggttcttttgcttgtattcctctaagtgggtttgaactttgaaatttaagcatcaagtgtgtggcaggagaagttacaggttgctgcactgccatccaaagc

SEQ ID NO: 12505 - DNA, 639 bp, Oryza sativa
  Intron number 5 from transcript LOC_Os07g01940.1 (locus LO C_Os07g01940) derived from phytozome v7.0 (chr-ID Chr7; po s 575101 to 575739)
acgaggagtctagtgtacaggtaagttaatataaaaaaacgtttactggtgctcttgaaatcaaattaatgttgttatagcatatttcatattgtaccagaaatgtttggcatctctcattagtttcattccgcaatgttgtatttataggttgtggatctattgtgatgtgtatatggatttcatcattacattttgtacacaaatgtcgataacggtagctattagttactgttacttggcaaattgtctttcatgttaaaaaatcaaaaccataccgcctctttgagttagatagggtaagttgtggatacattaagaattaagactattttctctctttctttgcttttgcaaaatgttgaacctcctaatctaggttccttttattttcgccctttatgcatgtgaagtttgaacattgtgcttgaaggtccactggtggtcccttcattcatctaatattttttttcctgcttgatgtcttaaaagtgaagctaacaggttgaggcttatgatatatagcaattaacaaaatatgccatgtacatctttggaacagcaatattttgtcttttttttaacatccatgataattaattcaggtagatcttcatttccttctctgtaggatcttgt

SEQ ID NO: 12506 - DNA, 443 bp, Oryza sativa
  Intron number 4 from transcript LOC_Os05g46620.1 (locus LO C_Os05g46620) derived from phytozome v7.0 (chr-ID Chr5; po s 26930751 to 26931193 reverse strand)
gaaaggaggggcttcctcagtaagtcacgaattttttttatgtctggtaaacaatgggtgttcttctcaaaagataaaagggtggcaactaaaaaactgtttaatctttaatctgaacaagtgtgctgagaatatagagcgggccaatttggtaaattaattgcacagtgcaacaagaaaattggagtgtattcaaatgacctgtcaatttctatgggttgatacttggtagatcactatttccttagctataaaagcacatctgtttaaaggaaaaggagacttctctaggcacgttatgaaattcaaacagtcagttatggaacacaatattttcagttaagatgatatttatagttcaatagaaactaaagaaattatgcgttgtgctgtaccctttaagttggcgtcttacacattttacacggcatttcagggataac

SEQ ID NO: 12507 - DNA, 547 bp, Oryza sativa
  Intron number 3 from transcript LOC_Os05g46620.1 (locus LO C_Os05g46620) derived from phytozome v7.0 (chr-ID Chr5; po s 26931223 to 26931769 reverse strand)
cggcgcagaaatttcaggtagttttttttttctttttctcccgtgccttctgttgatatctgtgattctgtgctagtaatttgatttgttggatttgattgtggaatgaaaagtaagactacgtgttcacaaaaacatgttttttctttatgaattggaatagtttactgcaagtgtcaaagctatgctatagctagaagaatgtgaataggctggagtttgcttgatttttaccaagtgatatcagatttttgcaatgcagcgcctgtgttacttgttaagaggcatagttttatcgtcggagatgccatgattttcagtatgagcatcttctgggtgttaagaggcagagttttatcgacagagatgccagtatgttttttgagcggaatgtttggttgtttggtgtatatacattgaagctattgtgttgattgtctattcggcatcaaatgcctgcttaaattatttccctctatgaattattgaattaaatagcttgatgttaacaggaactcggagaggcataccaagttttaagcgatcc

SEQ ID NO: 12508 - DNA, 572 bp, Oryza sativa
  Intron number 1 from transcript LOC_Os07g10910.2 (locus LO C_Os07g10910) derived from phytozome v7.0 (chr-ID Chr7; po s 5971396 to 5971967)
atcccaatcttcagtgaggcttcccattgtttaatttctcttgttttttttttctttcaaggaaatggtgatgattcagtgcatataagtttcctgtgtcgtaatgagggttttgaattttgaaacatgggtttttgccggtggggaccgaaagaaccgaaattttgtttttttaaaagaattttaacatattttaactgaatttaaataaattttaatcaaatttacaaatatttgataaaaacaagtaattttggggagatttttgcttgccagtgggggccgaaattaccaaaattttcgaaccgaaatttcaacccatggtcgtaaaacaccttgtagaaaagaaaaaaaacctttcgtaaatagcgtaccatgaactcaggactttagggtgctagtcaggtcacttaaaccactagcctatatagcttttcgcaaggcgtctttgttgtgatgttggtgggtggtggccgaatttgtggggagaaaaaaaaagagatacttgagattaagatcctcccaattttgtattccagcaggagcaaaggtgccttcaattgttctcaagg

SEQ ID NO: 12509 - DNA, 933 bp, Oryza sativa
  Intron number 1 from transcript LOC_Os04g43220.2 (locus LO C_Os04g43220) derived from phytozome v7.0 (chr-ID Chr4; po s 25393427 to 25394359 reverse strand)
gacccgccgtcgcctccagatcgtgctccgcccaggtacgcggtttcattttttttttaaatatattttcttcggttagttgttgcggcctcgctgggatttggggattttcggcccaatctcgcttgtggcagtcccctcccgccgcagcggcggttctcgataggcggaggcccctcccctgatctcgcgtggagcggaagggagatccatgatccatctagggtgatttgtttttactggtagttttgatctgttgttccaagaacgattttgttctttgctgtgtgcaatcaaatacgtatctcagtatttaataagacacccaaatccatcatatcacttgtgtggatttaatcgatttagttctaatagcagcttatttccccaaatttttggttcacgccccactttaagacttctcctaagagatggggtgcagtacaagattgttaattcgatgttagaacagccatttacatttcttctattgattttcagatgggtgaaatattgatgatgtatttgtattttagaggggggtatcattaccctgccattttgtagctggagttatgatttttctctctgtcgagttgaaccaattttagttctttaacagtagtagtaggtcataggtactgatttccttataatttacaaagacaaaatatctcatctttagacccccatttgttgcaagttcatatattctgttttgaatcaactctagcaagcggtggatttcacgataagtagaaagtactgattattatttgcacttgaataattatatctggaagctagaattgagtattcaaggaagcatgctctttgaagaaagtattcacttgatccagtccagtttgttgtttacttctacatttctttctttggcaatatatttgggagcagcttgtgaatccagtgaaa

SEQ ID NO: 12510 - DNA, 900 bp, Oryza sativa
  Intron number 1 from transcript LOC_Os03g38260.1 (locus LO C_Os03g38260) derived from phytozome v7.0 (chr-ID Chr3; po s 21238316 to 21239215 reverse strand)
gccaactcccgtgagaactcccctcctcgtccctcccccccataaccctccccttgccctaccgtatgatgttctgtgcctgctacttgtgtggtgttgatgcgtgatttgcttagatctgaagccatgctgctaatccgcgcgaaaatttttgcccccggcgattctggtaggaatattttattgcttcgtgggaatcgcgtgctcccagttctataggagttgttaggttgttgtgctgggtgtatttgtttggaagagaacattagagaaatggccagtatattgaccttggagtgtatgctatctagattggaccatgcagtgttgttaccgattgatcaaggttgtcgttaggggttctaatccaaggcgctgttctgggaatgtgactaactgtcctctatagtgattaatatacaaagagacaaggggatgcctggcgcatttagatatgcatgtgcatttgtgcttcttcgttgagttattcgttacctaaatcagttaggatgctggcaattcatgcccaaatgatgattaccattaaaggatcagttttttgtcagttttgcaattgcaattccaacttctaaagctcattggttcattttgattctgcatcaccatttgtacaactgtggtatgatcctgtctgagcgtatgaattatggtgtagcttatctgcaagcgagtttgtgtaatgtcctattggaataggtcacaactcatttcctgcaagaaccaataaaatatcctattaattatttactgttctagatactgaagtttgttgccctgtatatatctgtgactcatatcacatgcctgaaattcttggaaggctatctgattttttttcctttgtgcttgcaggtcagaacatccgtaagttggtcaagg

SEQ ID NO: 12511 - DNA, 1008 bp, Oryza sativa
  Intron number 1 from transcript LOC_Os06g21760.1 (locus LO C_Os06g21760) derived from phytozome v7.0 (chr-ID Chr6; po s 12571645 to 12572652)
gggagtccagttacctcaaaaacagtaaagctcaggtaacaagtaaaactaaattaattacctaaatgccacaacaatttattgaagtttaaattctccttatttatatacgcaaagaattgatggagttcaaattcagcatgcaactttagtttcaaaaaaaaaaaatgaaatcagcatgcaagtagaggttattttgtttcctaagcaagttccttccctgtgcttgatcgagcgaaactggcaacaaaatgcagttgagaaacctgcaaatgatgctgtatgccctggaggagacactggacacgatcccgatccctccccgcgggccggggaagcttcttctgctgacggcggccgacctcggctgctcctgcggccgcaactcgcacgtcgtcgccgacgcgatcgtgcagcacatgaccaagctgtgtcgcggtcgcggcaagcgtgtcgactgccgcgaccgcgacggcctatccagagttctgcttctacttctccgacctcccgagcaatgacttcaacaccctcttcagcctcctcccgccgcacgccgcttcctccggtgacggcagtgggcggcgctacttcgccgccgccgtgcctggctcgttccacgaccgtctgttcccggagcgatctatcgacgtgttcacctccaccttctccttgcactggctctctcatttacctacgcatcaatatagatttcaaggtgtgtaattcacctactccctccgtctcaaaatataaaaagttttagagttggacacggtcattaagaaaaatattagaagtgaatgataggattgtgactggatgagtagtgaaggtaggtgggaaaagtaaatggttgggaagagaaagttggtgaagaagttgttatattttaggataaatcctaaagtttaaaatttgttatattttgggacgaatggagtaattgaaaggatgggctttgattacacaggtgctggacgaagtcgccgatacgcggtcaccggc

SEQ ID NO: 12512 - DNA, 887 bp, Oryza sativa
  Intron number 2 from transcript LOC_Os05g41030.1 (locus LO C_Os05g41030) derived from phytozome v7.0 (chr-ID Chr5; po s 23983369 to 23984255 reverse strand)
cgtctcgccctccggtgagggcccacagttccctggtaagcatgtacttgctctcactaattatgttgttcgttttgtacttttaagaaaactggagttattaattagcttgatcattcgccatagcttttgttgagtagaattgtagaaatatgaaatatccgtagtttaattttgattgtttgtcagtgatggctaaggcaggaggttcacaattttgaaatgaagtattaggaatttaatgtatgaggagcctccggctatagatattttagtttgatttagtttggcaaagatattgttctagttcagtaaatcagtcccttttagcgtttgaaatatctgaaattgcccaccttttttttttttgaaattccaacatataaaagctgagtaatacacacgtcacataccagcaaagatttagggaagcatctaattttaaccagagatttgtgtttccagccggattttttttttcaaataatcttttttcacgctgtataaaaaagatgctgatgaacacatcactactaatgcatactacaccagtaaatacgtctcctaactcacattgtctaatatgctttgccttatacacgcaaaaaaaagaaaagaaaaaagaagagggaatcgttatggttgttgttcatacaatttgtgatgatgctatcatagaggaataaacatttaatcggctacatgtacaaaagcatcatatacagtttatgatggcaattaattgctcgacagtaaacactgacgtgccgtaccgttaggttcatgtgcctgtcacgtatttatacggccgctaaattcgagttcatgtgaccttaataacttcatctgcagggacctcaccgttcgcctcgccgccgtcgacggcg

SEQ ID NO: 12513 - DNA, 706 bp, Oryza sativa
  Intron number 1 from transcript LOC_Os03g48410.1 (locus LO C_Os03g48410) derived from phytozome v7.0 (chr-ID Chr3; po s 27560881 to 27561586 reverse strand)
aagccggttagcgcgtgttgcggcaagatagatagaaacggattagccggttagtttgtttcctttccgattaaacttttccatatttttgtgggatcaattaggattgttaaagattgattagagtgaccagtatatatactggtgacgacagattagaggaaaccccgaacaaaattatcaatctactattttcctgttatttactttcctgttattttctattttgttttcatggctgagttttgacaaccctagaatttagttaatctttgccgttttgcgctgaaaaacggtcgtgcttctccaaaaaacgagaagattatcctttgctagtttgctcggaaactagtcgttcatcgtcacgtaagtacgatatttatcctctttgctaatttgcttgtaaattagtcgtgtgattccgcgaaagtgaattaatctcgaaatcggtttcactagccgattttgatctatcgattttggcgactctattgtttacaccgcaaatcattaggtgatattgtgttggccacaaaaaaacgtcaacacatagcaaattgggtgtagataattttacatctacttattgtacacatactacttttattcactatttctattactgatgtggagatttttggagccagcgatcggctatactattaaacttgctcttattgaaacagatagtttggaggtggtgggg

SEQ ID NO: 12514 - DNA, 706 bp, Oryza sativa
  Intron number 2 from transcript LOC_Os05g49060.1 (locus LO C_Os05g49060) derived from phytozome v7.0 (chr-ID Chr5; po s 28067347 to 28068052 reverse strand)
gtagtgttgcctctgttgtctcggctgcagataaggtgtggatattgcatttatcttgcttatttttttggtttggttctttgcatgtggataaagtgtttgtaccaattacgttctaggagtagctttgcaggcttatctgaaaaactgaaatcatgtcaacgacaaaaacaatgtattgcgtggctatcatgaaatccatccctgaatatagtaatactagtattcatttttacccagtcaacacagtaatgttgagttgcctactgatgtgctccgtagctataaataatttgggcttatgtcactcctgattttctcgacaaagaagtctacaagcaaacggcactgcagtctagtgcagacgacctgttgtttagctgataattagagtcataattttagcgcacagcatttactatgatatatcaatgaaagttcgctgcatcacccaagtatgctctttgaagtcatacaacttccacaaaatcagtaagcagccattaatttttgaactaaggcaaccaatattgccatctcattctcttctccaacagtcaaaatattttctaaatatttgcagaaatctctgtatgaagtttgttaataagttaggtaactttcaactagaacagccaaattttggagggaattacacatttgtaatgctattcagctattttatgatttcagggaggtgccaccc

SEQ ID NO: 12515 - DNA, 1057 bp, Oryza sativa
  Intron number 1 from transcript LOC_Os06g24920.1 (locus LO C_Os06g24920) derived from phytozome v7.0 (chr-ID Chr6; po s 14606080 to 14607136 reverse strand)
tgtcgttggaggagaagccaattgcaaaggggaaggtggccgtggagtaggaggcggatgaagaccaagacgacgacgatggttattcggtctcgctcgtcggtctaggtgagcgccccccgtcaaccctcaccccgcccggcgacggcgaatgagatttgcgattagggttaagtttgccctatttgtattttagcttctgtacgtacgttccacaaactgtacatttgaatttttgttgttttaatttgctgcctgatggatggatcgatcgaatttaattaggtgcccagctggggaatggtggagtgatcttggtactgtttgagacgcccactggatttgcacttttcagctatgacggcatcaaactcctccgcccacatgccctcatgttattaattcgctagctacttgtgttgaatttgaatatgagtatgacctaactttcctacattctcgatctatgctgtgcaggatgtatggggagaatttgtcatggaatttatgcttcaatacgttagttcgatcaattccttccccctagctagctactttctctctttcttattatgatttgactcttctgatgatgattgttatttctttattatatactagctagcctatttaagtcttgcatttgcgcgatttcaaccttcatctatgttagatcgatgtacatgttactgtgttgtttatagtaaatatttatacaagtatatttttgcacaaaactcatgatactaattacaatagtaaagagtgattgttcttcctccccaagagtttttatacaaagaatttgtaagatcaaaaaaaattttagtcgagggacagtccacttcccattagcttagcacatcgatcagcttatactgagctgcactgcaattattgacgacttgaacaggctacaacttaattactccccttgcagtcaagattaaggcatgacaattgattgactgtacgtttcctcttcccttaacatgctagcttgttgctgttcgtttttatagcatcctgtttggctgaaagagtttcaagctttcga

SEQ ID NO: 12516 - DNA, 853 bp, Oryza sativa
  Intron number 1 from transcript LOC_Os03g41400.1 (locus LO C_Os03g41400) derived from phytozome v7.0 (chr-ID Chr3; po s 23043950 to 23044802)
ggcagcgccaagccgtgccgggtgttgacggtccggtaaggtgggcgcacaagcggcggcgagcaccgatgcggcctagacatcatcggggggaggggggtggggcccaaacttcccgttgccggcgagggacggtgaggaggggactccaagacggcgggcacgcagagaacccaacacggctgtgaggaggtgaaggcggcgacgccgcttcccggagagctccgttgtgctaaaggacttcgaaattggtaagtgaaaaacccgaactcaagcctaatttgcttccatttggattttggggcttatggcttctcacaccgaaaaatagagattagggttcttgagttttgggatttcgggtagattgattcaatctggcttatctggggttcttcacccaaaattagggttcttagcttcgggattttaggcctatttgatccggctcattgggtattttggaaaattagggtttcgcaaaaccgtggcttaattctgtcttgcttaatgatggggaatttcaatctagtttatccccaccttcttgattgctaagtgctaccaaaaccgtaacttcggtctaggaaagtctgagtgcgaggattcggaatttcaatcttgtttatcccaatcctcgttctcttatgtagtgtttggtttggggacgaagtgggatgggttagacctatcctagttttgtgggatgggatggttccagttgtctgtttggtttatggtatgggatggttatagttttctctttggtagaagggattgaggtgggatgggatggacgaatttctactcatcgttagtgccgtttgggaccggaggagcttggcggcagtca

SEQ ID NO: 12517 - DNA, 965 bp, Oryza sativa
  Intron number 2 from transcript LOC_Os06g06030.1 (locus LO C_Os06g06030) derived from phytozome v7.0 (chr-ID Chr6; po s 2771631 to 2772595 reverse strand)
ggcggatacatatgtgagcgctcggccctcttcctctctcgcgcttcgattttaggggcgtcttagggtttggcagctgcgcttaatttgtgatgtggtcgtgtgattcgggcctgagaagtttagatcttaatgcggaatttgatgcattggtctgtcgatgggtggagtagcaagatctcatacttataggtgcatggaaagttgcggacttgtggttatctacgagatttgtgttctccagtgatatttaggtttggaattgatagggagattcttaattcaataactagactagactagagtagggaaatctgcatacagtggttcttttacactttatcagagaacgaaggaaactagttggtagtgtttggttatgaatggtgtggtgaaggctttatactgtaaactagtttatttaggaagatagtttactttatttagtgttaatggatagcgtagaactatttgtcgacagattgggatttgatgtagtgtagataagctaggtttctggtgggaaaaggtttgctttgaaaagatttaccctaggatgcaagttgtgtacagtggtacatgatgagtcaaatgttttgcgaaggtcaggcttttatgcttacctatttatcatttatgctctttgtgctttggatggatataaagttcaaccctgtactctagagaattacactgttttgtgtggaaatcactgatctgaactgacagtacaacacaatgaccctaagtgctattattttcttattacaagttctaatccttttgtaaaaacttgtctttgaatattatcatagaaaagtaactttgtcaaaatgcttgttgctgtttcagaagaccttgctttattgcaaggatggtcacttaatcttacttattgggtcttaatatcacatttcttcttacctgcagcttcgcaaactgtgaggaaaattattgaaataaat

SEQ ID NO: 12518 - DNA, 1031 bp, Oryza sativa
  Intron number 2 from transcript LOC_Os05g33100.1 (locus LO C_Os05g33100) derived from phytozome v7.0 (chr-ID Chr5; po s 19347521 to 19348551)
tcttctctttcagggtttgaagcgccgaacctgaggtacagatctttgtgttatctgatagtactagtttttcgattccacctgtacaggatatgccactgttctgatatattttgggggaaatggattatcgattcccacctatacaggatatgccactgttcctatatagtttgggaaatgaattattcattattgggttgttagaaacttcgaaggtcttccgggcactttggggctgactgatgcccataccgtgtgctgggatttttcacatggttaataagtttttttttcaggggaggttggggggggggggtgtggaatttaaccacaattttgatgatgacatatgtgcactctttgaggtgtttcagcctgcagtagtaacttgtaagcattgtctgatgctatgacctatactatggaacctgatgtaattgcttatctcagaaaggaagatatacagccgacagagtttgctgcgctgggattttgatatgattttaaaatttgagtaaatttcacaaaactacagatatattggctaaatcattgcaaaactacatatttaagatattgtatcacaaaattacagatttaacaccaaaattatcacaaaactacatgtttaaggctaagtatcacaaaactacaggtttaacatcaatttaattacagaatttggatatttattagtgctaaggatttaaaccccaacatctttagttttttgataattttattattaaatctatagttttacgatatttagccttaaaacttgtagttgtggtaaatttttcgttaaatctatagttttgtgatacatcaccttaaatctatagttttgtgaaatttactcttaaaattttgaaaagtttaagttcaattttcatgatggcatgtgcctctttgaagtactctagttgtcttaagcgctaattgtctgctacctactgtggaagttgatgagtaatcacttatctcttgaaggaagatagccgacaaagttgcctcgtctggatact

SEQ ID NO: 12519 - DNA, 790 bp, Oryza sativa
  Intron number 1 from transcript LOC_Os03g47370.1 (locus LO C_Os03g47370) derived from phytozome v7.0 (chr-ID Chr3; po s 26782983 to 26783772)
gtttctcctgagagtcgttctggcttcgttacacggtacgttagaggcaactgttttgatcgtgcagttttcttgagccacttaatggcttccccgaattaaatggtttaactatatattttcaccacattccgcaaaagacactgcctgaaacacaaaagtccgttgtattgcaaacattgcagatagagacagacaaagatatgatggccgccgcctcgccggccaccgcttctaggtctctagacccctccctccgtgcccgtttgtcttgttgatcctttgcaagattgtgtctttgttagttgaaaagcatgctttttgcttcttctttttttttttgctgtttaaaccacttgtttactaaaattagattgtgttgcctcgtctttccctcccccagcacagggtgaggattacccggaggatcagacttgtgaagcaaacaagctggcatcacagttaattgattcttgcgggaatgggtcttctcctgatgttaggtgctgcgagacgattgtagtggtagttgatctacccaattgtctttgcctggtgtctctgcgccccaagattaaggagtcccagttttctgcttttactttgatcacctcttaccgagcatgttgaggtctccgtgccgtcaaacagaaggatgcagccctgtgctatggcttcaatggttagaatgtttctgtggttctctaatcaataaaatttcaaatgatgcgttcttttgcatgctagctagtactaaattggtactgtttttcgtgtgcagaaacagagg

SEQ ID NO: 12520 - DNA, 489 bp, Oryza sativa
  Intron number 3 from transcript LOC_Os06g03560.1 (locus LO C_Os06g03560) derived from phytozome v7.0 (chr-ID Chr6; po s 1372969 to 1373457 reverse strand)
tggccatccaacctagtgcaggtctctctgttcaggtacactgcttgaaaaccagagtagatagtatgacaaaaaatcttctcaccagagttgaattcttgcaaaattttgatccactcaaacctccacaccggcaatgcaagagtctgaaccaccacatatgttccacttggaagttggaaccgctgcagtgctgcaccgaactacaacaaaaatggaagaagaaaagtgacatagttaggagctgagggacctcttatatattttctctattattttttcaagaagcttccctagctaagaatgacaggacaaacacaaaccaaattctgtttgagtatagtaagaaatccaagatttaaacatatgtaaaactaaaactaaaatggagttgtgcatatacacattcttagctctgaaacgacaaagaagtttgcatttgcattccgtaagaaaataacttacatatttcttatactagcgcacttc

SEQ ID NO: 12521 - DNA, 974 bp, Oryza sativa
  Intron number 2 from transcript LOC_Os06g33660.1 (locus LO C_Os06g33660) derived from phytozome v7.0 (chr-ID Chr6; po s 19592821 to 19593794 reverse strand)
tgacaagaggtcttcggagtccaagggtgctgcaggttgctggcagaagcagctcttgtcaatggtagcacttttttggcatttcaaaatcaaattgcgaaattcaaaaccagctgtaaaaaagttgagccaagcgaaattgtagtcttttgactggctgccagcttattatatatacttttgtctaggtgagtccatgagttgatgatgccttagtatggatgcttgacgtattaacgatgcatagcaatgtcaaggcgcagattgaagaatatggtaacaatcactctcgcttctctaatttctcagcatctgtacacgatatcgtggatgagcaccatatccaacgatgagtaattttgaaagaattcattgtacgactttttttctatacagtacatgcatgtgactatgagatgttttctcatgtttttttcatcttttttccttacgaacttgcagagattgaaaatatactttattcatttgcatgattatttcatatgcaggatggctttcattagccataccaacaattatgtaggatgatgtgcagcaatttcacctcatccttcaaaggtaatttgttttcctcgaaccctggtccattaaagctataagtaaagattgaaacattagcttaagttatcggcaaagcatatgcatggttatagccttctatccgatctaatgattgtatgcttccctttatataaaggtacagagggatttcccttacccaaatggactggaactaatcaactaattagtataacctatggaccacttcgtgcaaaattttaaattctggtttgataactgaaataattaccctccgtgtgtatttggttaattcgatatagcaagttgtggtgtcattaagttaacctcatatttctcttccatcatttcgacaatggcatctgtacaatcttctaggtgtggacaagggtcaaggtgtgcaaattatagct

SEQ ID NO: 12522 - DNA, 737 bp, Oryza sativa
  Intron number 1 from transcript LOC_Os05g30530.1 (locus LO C_Os05g30530) derived from phytozome v7.0 (chr-ID Chr5; po s 17632810 to 17633546)
gcgcgcgaggagaacgctaaactccggtcaaggtgagatccgaacgccctttactctctcttcttcgcgtcgttcagttattttctttttgtttttttttccagttcgttcggtgccttgtatggtcagtccagttcttgatttaaaccaggatatgtgatcgtctagttggcgtagaattacgtgcattgtaccggtggaatcttgttgcctgtgttagatcacgcggtgagttgatttgttcggttggttagttcttactagatcggtctcttctttaggttcatgtctttttgatctacctgtaattctttgtagagcgagttctttgtcaaatatgttattttggatcagagatcattttgggtaagtgctctgtgggtgacaacctggtcaagttgttagtaaatggctcaacacccgttctattagacatccttttggtaattaggagttactttctgtaaaactgtgattcccaatcataaaacatcctttgatagttatgagccattccatctcaacattaaatgtttgatgaacgcatagaatcccaaggaatgatggcatagattgtaagtgcttatttggtgaatcttgtttttactgtattgcccccttttcatttctctcatttggattggttaaacgctatcaatatgtatttatcttgttaaaagaatctccttttctgcttaataggcgaggggtttgaagaagcatctgaagaggctcaa

SEQ ID NO: 12523 - DNA, 555 bp, Oryza sativa
  Intron number 1 from transcript LOC_Os04g42040.1 (locus LO C_Os04g42040) derived from phytozome v7.0 (chr-ID Chr4; po s 24712510 to 24713064)
aagtgtacgtctcttagctccaacatcgcagtactgcacgcatggcaatgagccaatgatgccaagaaagttccacaacatcgtatgcatgacaccctcatcccgctgcccctaatttttctattgcgctagtggcagcccaacacctcatgttctcccacagaagcatttgcctttagcagattttaatcggcgataaaatatgcaggatcgttgcatcaaaccctgagatatcacttctttgtagcagttcttttaagtggcacaaaatataaaaatcaaacctccttgatgtatttaggacggtcatgccgctaattagttttctactgaaaaggttccgaggtccccattttgattccatcctctttgtgtgcacctaaagcatagatgaagctaatgatccaacccactcttactcctccaaaaaagccactaataagcttgtttaattggtgtttaaaggtttaaacaaatctctttctctgtgacacctgtcttgtttaagtgttttttacagctaaaagttggcctgaagtggttggagctatccta

SEQ ID NO: 12524 - DNA, 903 bp, Oryza sativa
  Intron number 3 from transcript LOC_Os04g25960.1 (locus LO C_Os04g25960) derived from phytozome v7.0 (chr-ID Chr4; po s 15089752 to 15090654)
tttcaccatttcttccgcaccgtatcgtatgcaacttctttctctgtttttctgccatacttgtgtccattctgtcataatttctgtcaaatggattacagagatgttgcagtcctgttcttgactttaaaagatgcgtatgaatgactgtggcagtttatatgacatagttatggacttatggttgtggaatatacagagaaggtgaaggatgcaggttataaccatgtttaaagttactctgattcagggaaacattgtaaagatggcttttctatgtagtttgcatgctttatgcatttcacttaaattgttaagctgatcggttatactgaccataacactgaaagcatctatgtaattattttcggtccacacagaacatcattttgcatatacatcattcatcattttgtcttttctaataaaatttaatgacaccttttatggtgctacaaaatttcacccctttgttgttcttcattttagaactgaggcacagtttatcctggtccataaaaatagtgatacaacccaccattaattattctttgtttccactgttttactccatttgtgtgtcaagagctgtcaattgctgtattttttttctaacatagtattctacaaagtacaccgtgatttgagttgctgcaagttgagattataccattgttctgtttatgaattaacaaaatgctatgagataagagctcacaatgtcactgcagtttgttacttcaagaatccctctatttgtgtgtatattgcagacgccttttcctctaaatgtgtgcatgcatgtttttgtcttgtgtatgctttattaaaattttcaggtgcttttattaccctttcattccttaacgtttttcatttatttcagcaatactcatcaggagc

SEQ ID NO: 12525 - DNA, 971 bp, Oryza sativa
  Intron number 2 from transcript LOC_Os06g48020.1 (locus LO C_Os06g48020) derived from phytozome v7.0 (chr-ID Chr6; po s 29035382 to 29036352)
tattggcgctcgccgcaagagaatccgtctaccaggttagcatagcaagaaattttacagcacttcgagataccaaaattttcagtttaaatttaagtgattttatagtttttaaggagataccatgttttctattttctactgtttttttagatgaaggcattacgcccagctttcactaaaaagcataagagttcatacattgaaaaaagaggaaaagcagtaaaaactagggaaactgttttaagcactcgggtggatgtccacccgtttcttgcatgtcatctaaatagttatggaaatttttttataaaattaacatgataggttaatatgtaatatatcatttcacaatactaagatatacggaaatttgcactaaaattttgttatcttttagtacttttaagaactgtagaatatatttgcaaattttcatatatcttataatattgaagatattgggagatactccctccatactcataaaggaagtcgtttaggacagcaacacggtctccaaaacataattttgactttttatttctataaaaatatttattgaaaagtgatatatgtatacttttatgaaagtatttttcaagacaaatctatacgtataatttttacattttgaaactcaacaacttaagagttattcatgatttatatttttagggtttgacttaaatattgtcctaaacgactttctttatgagtatggagggaacgactttctttatgagtattaagggagtaccaaattttacattaaaaaatattatacctccggacggtaaactcactttagcatagcagattaaatttgcacacatgggcatgcatgcatgatgggtaaaaaaattgatcgtgagatcgcgcgttcaacgctgtaactaatcctgcatggatgcatgcattggctggttggtgcagagcggagggcccaactaccaggtggagctggggag

SEQ ID NO: 12526 - DNA, 967 bp, Oryza sativa
  Intron number 1 from transcript LOC_Os04g28970.1 (locus LO C_Os04g28970) derived from phytozome v7.0 (chr-ID Chr4; po s 17002003 to 17002969 reverse strand)
gcgacagtgaaggcaaccggtcagtaaagatgtagacgcccaacaacggtggtgtaaccatccaaccgtgtaatcaaggacaccagtcggcagcggaagtaggcaggccgacggtgaagacgttgatgcccaacaacggtgatatgacaaccaaaccgtataggcgaggacactagtcggcagcggcaaaggcaagccggtggtgaagacgtagacgcccatcaacagtcatgtgaccatccaaccgtgtaggcgagacaccagacggcggtgacgaaagtaggccggcagtgatgttctgactgatccatttccgacgcgtaggagataagcttaaagccatgaatccctattatgcatatctggatttggatcttgcagaacaaacatataggctaagtagtatttgatgcaaatacagtacttgagaaaaaatcaagtattttaaaatgtttataaatatgtatttcttctgtcgtcaattttgatttcctcgaacagatggctccttacgtttaaacactctgcccgactagtgattgcccccacgcaccgggagtcatccaaggcacttcccagacatgcaaatgagtgacatgagttcgtcattaatggaacaaagtttcacggatcagaatttactactcaggtacttttgcaattgtcaagagcagaaaataaattatctgacctctatgcttttgattttttttttcgagtaatacttagcaccttgtgttactcggtctatccaacaagacccgggtgctaggaatcggtcccaaggcaactatccatcgacaaaccaaacggaaagcatagaaagatagaattccataactcgatagacacttttgtacttagattatgtcgcaagcaatcaagataaatattatgaaatttgttgaaaaaatatgatataacatctgtagcccccgactcactagtcaacagtgaaccagttgat

SEQ ID NO: 12527 - DNA, 615 bp, Oryza sativa
  Intron number 1 from transcript LOC_Os04g53540.4 (locus LO C_Os04g53540) derived from phytozome v7.0 (chr-ID Chr4; po s 31720246 to 31720860 reverse strand)
tattgagagggaaacctgtagatcatcttcaacaggtttgttgttgcttgcttccttgttcttccaagctttttgggtctttgtgttgtggcactcttgaagaagaaacatatcgatctagctaccctttctttcttattcctctttgcaagcttgctttcacatcttctgcatataccaaagggaatcaaaaaaggagaaaagtttcttcacttagcttgtctcctcatcccttcctgatttaaagcaatcttccattttatccccaaatttttttctgtgtttttatgaagtatgaacacaccagatttttccttgcagaaatgagaaagttatcaatatgggttgtttttgttcatgcatacaattttttcttctatcttttccacaaaactttgaacttctccactttgtctagtatctatttaatgcatatgccatgtataaaacgcacggaataaataggtactactactgtaaaggcgtaatctgtggtaccaaattggtagctaagttttgctctttatgtagcacacgcatactaatcctcaattaattcgatctgctccaaaattcgcagccaaacttgctggataatcaccagttccagcaagc

SEQ ID NO: 12528 - DNA, 572 bp, Oryza sativa
  Intron number 3 from transcript LOC_Os06g06300.1 (locus LO C_Os06g06300) derived from phytozome v7.0 (chr-ID Chr6; po s 2926613 to 2927184)
caccgatattcctggtaccactggagcaacatttggtcagtaaactagtatatatatatagtactcatatcaatttcgatgtaacagcaacatatgtggcagttccatgaatttttattaccttggtcctaccccatatatatacttcaaaaattgcataatgacaaaattatactccctccgtattttaatgtatgacgccgttgactttttaaccaacatttgaccattcgtcttatttaaattttttatgcaaatacaaaaatacttatgtcatgcttaaagaacatttgatgataaatcaagtcacaataaaataaatgataattacataatttttttgaataagacaaaaagtcaaacgtttgttaaaaagtcaatgtcgtcatacattaaaatacggagggagtatctattttgtcaaaaattttcgtcagatttgaaggatagggctgtacttcttctatgccaaaatggagggtggtgatcccctcaaaacttgtagaacagccactgttgatatatatatggtgaataacgtagataattaaattgatgcagggcaagaggtg

SEQ ID NO: 12529 - DNA, 972 bp, Oryza sativa
  Intron number 1 from transcript LOC_Os04g39540.1 (locus LO C_Os04g39540) derived from phytozome v7.0 (chr-ID Chr4; po s 23360661 to 23361632 reverse strand)
gcccccgaatcccgacgaaccttcgctgctcccgggtgcgtaatttctcctccccctcgcctccgatttccgacgaaattccgcccccgttcgagccaagaaagtgcgggtttctcgacgatgatggcggcttctagggtagtttcttggaatttttttgttttgatggcctgcttggaaatgttcgtggcggcgtgcagtcaattggtcgtggatttgtgattgttcgtcaggtttataaatttgggcgtgtttatcggtaggcgatagcagtagccaagccctggacctgaatacctgattccctgaggctgaaattaagttctttctgtgttgtggattcgggttgttaggatggctctgttggattaagcagctaggcctagggattccgccccgtcgcctgcaaggttgctgctgcactcttcttctcccgctgaggcgaattgtggtgaagcagctcggtttgatggcgtggctagaggggagaattgttccaaactgcaattgagggagattaaaatttcgagcttggatagttgtgcttctgagaaggagaatctaattgggtaccttccgaagttacccttcgatgaggagcctgctgtacgcaagttatctctaccatgtgtagcaatgcaagaaaagtatgttttgcatacatcaccaagaaaagggtgtaggctgaggaggtggagaagggtgaggagggatctaagagacaacccattggatttggatgtcaattttctggtgctagccacgggatactcgctagggataggatcggggatatctggagtttgtataaataggaaaaggattaggatgaaggatttcgggggtgtggggcgaatcgcgcgcaaatcgcacccgaggggtctgagggacaaggaggaggcttgcatttttgagtcttactttgtaacatctggtgcaggtggtgctgttagcaacaacaggcatcaaata

SEQ ID NO: 12530 - DNA, 625 bp, Oryza sativa
  Intron number 1 from transcript LOC_Os05g45875.1 (locus LO C_Os05g45875) derived from phytozome v7.0 (chr-ID Chr5; po s 26517772 to 26518396)
gcagacgcggccacgtcggctggtccaatcctgtagtgagctcgtctctttgatccatcgccccatcggcctcttcgtcgcattgcatcgtgtttagtgtttctgtgttaatgccctggcgtccatagcttgtttagtataccgctattcttttttagagtatactccattcggttcatattataggtttaggtcgtttcgactaaattttagaaaaatacagcaatgtttccaacacaaaataaacatattatgaaaatatattaaaattttagttttaatgaaacggagtattatactgctgcaccgagacaaaaagaggagggtgtattatactgctgctttgggactgaactggaggttctttactactgttagtggctaagtttgattcgtttaggttaaatagcttaaaatctttctttggttctctggaagaaaaaaaagcttggatagtagatataagactgttgctttctttttctgattgagtatttcaatttgcagtctttaacagaagaatatgcgttcgtgcccaaaagttgcataacagaaacaaattagatgtatgcatgttttatactccattatcatcggtacctattgtcaccatgatgtgttgcag

SEQ ID NO: 12531 - DNA, 768 bp, Oryza sativa
  Intron number 1 from transcript LOC_Os06g01810.1 (locus LO C_Os06g01810) derived from phytozome v7.0 (chr-ID Chr6; po s 466383 to 467150 reverse strand)
acaagcccgcaaccaggcacgacaattcagattcggtcacaatattggctaattactaaatgcattcagtcttttcttgttttttcagccaagctgatacaatacattcactagtttgtcaaatcaccttcatcaagtaaggattgcttgtattcctttcatcatcccatagattattaaggaagaaatttagtttacttatcaacatggtaacactgaatctgttgtcttcagtggcctgtttgttttgggtctgggcgtctggctagcaaacatggttgctaactttgatttcgggttttccatacttttttactatatagcatcagcatcctatggtgatctttctcaacttatggtgcttattatatatgttttctaattgcagcttaccagagctggagctcccaaggaaacaatttcgagaatcattaactttctcattatttaattctacgacttgctgtttcctgattttttttcctttttttttttgacgcaactgatttttcgtattgtgctgcccccatagattccaatgtaaatgagaaccatctcaatcatgtgctgaaattggtcatgtgaagatttctctaggcaaagctccgtggatttgcccaatttactagcagcagattaatgaattcttcaagctttctttgtaatcatcttcacctaatactatcagtacatatgattctttgttgctttggttatattattctactttcaggtcatccgctaaagaaaccatccatccgtgtttgg

SEQ ID NO: 12532 - DNA, 778 bp, Oryza sativa
  Intron number 1 from transcript LOC_Os03g48720.1 (locus LO C_Os03g48720) derived from phytozome v7.0 (chr-ID Chr3; po s 27761455 to 27762232)
tccggtcggctcaggaagcgccaccactatccctcgtgagttgcaatgagagaggctaaagtagcaccttcgtcatcattgaacatattctatcgatgaggaccagattacataatatctcggattcgtcatcaactttcattttaatcctttcattatgtgaaaggtcattcattaaattgttttctatgcctaccctcgagtttataaatattttcacataaacttatttgcaatattagaaatgggaatcgagatctcacgggcttattcttcaccttaggaatgatagaacaaaggtgctttattcttcaacctcttcaacctcactggtgtgtttcatacgaagcgataaagttatatttgtattcacccgttgcgaagcacgggcattttgctagtaactaattaaaatatttataattttcctttcatcacactttttcgtctgtccaaattttgaccgactcagtgcgtcatccatatctaatttttcgtccatcctcgtcatccgcatgcttccgcacaacttgtaggagtccgcatcaaatacaaataatccacatcgattcttaatagacacaaacaaaaacaaaattgaacaaggacaggcagggaggataccaggttcaataggaaaggaagttggatgcggattcgatttgatctcaaacttgaataaaattaaccctataaatacaagaaagaacaagatacatagtaattggtgaaatctgacctgatttcacagaggcgggtttgattcatctccccatca

SEQ ID NO: 12533 - DNA, 810 bp, Oryza sativa
  Intron number 1 from transcript LOC_Os04g33960.1 (locus LO C_Os04g33960) derived from phytozome v7.0 (chr-ID Chr4; po s 20385335 to 20386144)
tggtaagtaaataaatgaggaaagagaaggaaactatgtcttgcatgagacatggtttttacacaaacatccaagacattatgtgagataagtagcattaaatttaagtatgaaatagtggtgtttgcattggaagagtagtgtctagtactaatttcttaatgatgtggagtttatgaaaactacgtctagtattttgggttgagaatagccttaatatatatcatataccgttgtagatttgtttttttacgtgacaatgagtaccggacagacatgcgacaattagttgatacaatcgatctggtcaaacaacagaatcgagcatcccgtagagtccccaacagaggttggggggggggggggggtttaaacaccgcctccggtttataggacaccagtgcgccaccgcccgtaggtgacgtgcataggacgctccgaccgctgcctccaattaaacttgtttcaccgactcatcgctgcccccgctaggttcagcattcagagaacacccatcttcgtcttcgtcgagggcacctaggagtctaggaccaggcgaagcaaagatatcgatggcgccgccaccggcgttagagagagcaatccggattccggccgacggcgagcgtcaagtcctgcccgaaccaattcaccgactccatcggccgtacatgcaaggaggacttgaatgggccgcatttacgccgcagcacagctccggctgacatcaatcaaatgaggaataagttcactatcgtccctcaactttacattgagtgtgtatgatgtctctaatctccaataccagaa

SEQ ID NO: 12534 - DNA, 636 bp, Oryza sativa
  Intron number 1 from transcript LOC_Os07g10530.1 (locus LO C_Os07g10530) derived from phytozome v7.0 (chr-ID Chr7; po s 5681395 to 5682030)
agaggctcaacaagccggccgtcaagagcatcgaggttgggtggccagttcttgaaaacatttgcttctttttattattatttcttttgggggttatcgctcaactttgtgttgttgatgcattgttacattgggagttcaaaatgttagtattttcatttcacattcttttttttttcacttttgtttctatgagttttggtctagcattgatttgctaagattttgagatggattgatttgcagagaagaaagtttgcccctcttttctgtgcttcttttgggctgttcttggtagtttttctcattgctgctttaaagaatttttcgaaaaagttgcaatcttttggaggtacattttggcaactcaagcaaaagaaggcagaaaagacgtgtcctgctttcaggctggctctggcaaagttgtattattctccaatgaaaaaaggggttgaatgaacaattcctttttttaaatctttctttacatttccgaacaatgatttctgcgttttccaaaaagttcaaaacctgaagcgtttgtcttcttttttttggtattattgttattattatttgtcatgaacaaatgtcctatccgtttgaaactgttttgcaaaccgatgcagagcccag

SEQ ID NO: 12535 - DNA, 559 bp, Oryza sativa
  Intron number 2 from transcript LOC_Os05g22600.1 (locus LO C_Os05g22600) derived from phytozome v7.0 (chr-ID Chr5; po s 12768663 to 12769221)
catagaacatttcgtattgccagtaggaacggtatgtcaaaaaaattactcgatttactttttgtgctattgctcagtggacaagtgcaggactgatattgcctgatttaccttgtattagaaaatactttctggattatctcttgtgtttggtaataattgttcatcgagcaggacttcactcaattcagtgtattgcttttgctgcaatcagtttcatctagatggtcttatcttacttcattatgttctccatttgatagatatatagaagcaaaaagaagtagagttgctcgcaaattagcatcatcataggaagaagatcctgatatgaaggcagtagggtacgtacgctcaccattccaatttttttctgaacatgcagggaaattttgattatattcctgtgagagtgttcattcgaaattaaaacaacctttcattctcaatcacatttgatgattcccacaaagaaaaataattcttatattttcaagtgatgtgtcttgacacaattaaatatgctcgttgtaggcctcttccttctcatcattggcac

SEQ ID NO: 12536 - DNA, 661 bp, Oryza sativa
  Intron number 1 from transcript LOC_Os04g32090.1 (locus LO C_Os04g32090) derived from phytozome v7.0 (chr-ID Chr4; po s 19072514 to 19073174 reverse strand)
gccccctcgtgctgcaggttataccattttctctttacttagaatgcgtggttaaattttttggtcatacttttgttactgagctctaggttccctatacctgtactgctgtggtgccgcctagtgtggcatgcttggtgtgatctgcggaattttggaaggcacttaagatcaaatatctgctagtattttcagggaataaatatgtgcttcaagcttgagcccgtcgatgtttacttgtttcagttcggtagttcatgattcatctgacactcaatagaatggaaagctgtggttttcttcttttgtatatcaactcatcaagtgtgccatgagtgctgaatttcgtagcacaaatggtaccgcgccgaaataaacatgattttgatagcacagtaaattgcttattctgaaaagtagttgtcagttcctgtgtatttctttcctagcactgatgcctttatacgtcttgtaagttcaatttccaatctccatacaggcatacactagctcatgccatattcaataattttttaactttagcatacactaattgtacattgttgtagttttgcatttttttttgtgataatgtgttctggggttttccttttgttctttttttcctatggtttaactgactcttgagtttgtaaggttg

SEQ ID NO: 12537 - DNA, 311 bp, Oryza sativa
  Intron number 1 from transcript LOC_Os05g05460.1 (locus LO C_Os05g05460) derived from phytozome v7.0 (chr-ID Chr5; po s 2717685 to 2717995 reverse strand)
tcttcgaccaatgtaatgtgtcgggtcgtaaccgaacttatgtgatagctcaactgatgagcccgtttgatttagattattgagtggattgttgcaacagatcatcttaaattgaatattttgagaaatgaacttaacaaatagctttaaagaagtggtctgatcaatacggtagaagaaatattataagaaacatattttcaaatagtggagtaactaatcctatctaataatccgaaaagaatagtaggctcttgttctgtttcgcaactcggcttctgggttcacctttgcagtggctgaaactgcag

SEQ ID NO: 12538 - DNA, 590 bp, Oryza sativa
  Intron number 1 from transcript LOC_Os05g05780.1 (locus LO C_Os05g05780) derived from phytozome v7.0 (chr-ID Chr5; po s 2874992 to 2875581)
gcgacaaggtgggtgtggcacggtttggtgatctaggtgctggtaggggttgggtggtttatgtttgaatctgttgataggtggtagcgattatgctatgatttctctttttctgaaacgaaatcagcagatttccgttgattatacagatttttttcctgtttccctctgtttagctgtaaagtaatctgttatgcgtctatactcctgtagacatttgagggatgatattagtgttcatttaaaattgtagattgtttttttttagaaagagaggcagtcctctcccgtgcaataggttgtaaattttagtaaagttgttcttgtttggtccatctggtgaggattcctgtatccgtttgggttttctttatgcgtaagtgtgctgtagcaaaatgtttaaagcttcgtggtatatttgtgctactgaagtagttttttatcgcaattagccaatcagcatggtttacagttatcaaaggagtgattgttagttctaaaaaagagtttcaaaatattttgaaggggagtgactactctgagtgtcactcaacatcactgagttgcttgtcttcaattgcagttggaag

SEQ ID NO: 12539 - DNA, 948 bp, Oryza sativa
  Intron number 1 from transcript LOC_Os05g03770.1 (locus LO C_Os05g03770) derived from phytozome v7.0 (chr-ID Chr5; po s 1667165 to 1668112 reverse strand)
agaagtggggccgagctcgccgtcgcctacctcaggttcgtcgtcttcgcgtaatctcttctccactcactgcaacctgcagctgcagctcactcttacttcactattaactccatatagctcaactaattagcagtaaaaacgattattaaaatttgagcaggaattcactgtctactccaagtgagaacatctgaaacagtagtaaaatgcactgacaaaattcagataacgagatagttactccaagtgagataattagttacggccgtttttctagggcaatttcgagcaagtttctcaactgtcagacagtgatgggcttggcataatatttttgagttttgaaagtttcagttgctggtaatttgtcaggaaattgtgtttttcaaagctttcagttgagaatttacaacaaggacaaattcttcccaaagaaattaattaaagttcaagaaggacaattctgtggtccgtgattcagacttggcaatgcaacttctaggtgacttactaaccagtccaagatggcgcaatccaaagttatctgaaacctgtgttttcttgtggcttaatcatatctcatcctgtttgctctgaaaactgcaaaagctctgaaaagccagctccctgatagcaacacatcactaaaagataattatcatagcgactgtagcagctaatagccatctgactatgtccccaattcatttcagacaggccccaaaaagtcatgaaccgagcagttaactagtaatgcattgttcatgtttgactgaaaggctcagtgtttcttaaaatgttctgattaggctttaccaatgtatgtagttattttattgtttatgttcatggtactacattggtactgacaggctgaatcatcatcactgtaaatctctacaaattgcagaagaaattcggcttgcaaacaatcaacagagctca

SEQ ID NO: 12540 - DNA, 994 bp, Oryza sativa
  Intron number 1 from transcript LOC_Os05g38350.1 (locus LO C_Os05g38350) derived from phytozome v7.0 (chr-ID Chr5; po s 22419751 to 22420744)
agtcggcgacgcgatccttcttgcccttctgcaaggtactaccacgtacacaccgtgcacgaacactcccggaactcgtccaaaccactaattaatctgcatcatatagcaaaaaactactgaatttgattatagtcagcaattttttttcataaatttgacagtgatttaaaagtgtcaatggagggagtagtagtatactagaacacgcacttgatcgatggagcaattaatgtgcgccattttcctaggaagaaaaaataatgtgtatattttcctaggagtagagctttagaggtgcttgcccataagcatgcgcgtcggtacatgttcccgtctaatatgtgcatggaatttgggcatatgcatgcatggacgaggatgaaccataccacaactaaatgcctagctagattaattctgaaagtcgtttacgcatgtgaccgccacagccacaagagtcaaacttaacccatcaatccatgatgcatctccaaatctgtgttcgatatactccacaacatgcaactcggtgcacatgaaaggatgtcatgatagtcggcaaaagttctttaaaaaataacccaagttgtcgggacaaatttagacgaataaattagtagtttagtactcgtgtcacaaaatttaaatttgactgtagaaattactatgtacgtatactcgtacatagtgagtgatcacgtgaaccttacatgtagaagtgtgtgtctctgtgtgtgcgcgctaagccatagctttcatctgaataactctgtttgaaaattgaaatgcgcatcgctattgtggttttaatttgtggccaaatacgcatcacttttctccaataattatgttaaatcgtggctcgttcaggtgttaattatcatgctatagttttgttgggaccaacatggcgagaaaccgcgaattaaacctgtaatttgattacgtgcatgcagaagcaactccggccgccgttctgtgaggacgacgg

SEQ ID NO: 12541 - DNA, 346 bp, Oryza sativa
  Intron number 1 from transcript LOC_Os05g07940.5 (locus LO C_Os05g07940) derived from phytozome v7.0 (chr-ID Chr5; po s 4301889 to 4302234)
cgtcgccccggatccttcgacttcgacggcgcgtacacacaattcacatccaatgtttttcccttcgatctggagggtttgtcgtagtcgtgattttcgctcagttttgatctcgtttcttctttaaaataggatatcttctttatataaaacgtcggtaacagtataaccgttcaaaaatacatcttatgtttttctctttttctcttcttttgttctggtctgattggtgcatgcaacgcaataatatcatcgatcgtttaattattggcaggctgtttaattatgggattggtatccatctgcttcaggctgaagatcctgacagcctgccagggaaaacaga

SEQ ID NO: 12542 - DNA, 754 bp, Oryza sativa
  Intron number 1 from transcript LOC_Os04g29750.1 (locus LO C_Os04g29750) derived from phytozome v7.0 (chr-ID Chr4; po s 17557711 to 17558464)
actcggcgaaacagacccgtactcggactctgccggtcagaccagtcacacaccgccggactgaccggccctcacccggcggtcagaccggcccacatacggcggtcagaccgtccccacagaggaaaactggcagacttccaaactttgataattttccctattttaatcctaggtgccaaatttgggtgtaaacagttatattttatcttggcacaatgaccaaggataagtaattttgttatgatccatttaaacatgctactagtattcattgtaaacaagcgattcattaatatttatatttctcgacactcatatagccaatcttgtgtggaagaatagagagtcacgcattaaatccaagaaagttattataaggataggtggttagattaaaatatgcctaaattttctagatatggaaatatacctatcaaaagtagatggaggtagtactattttttacaattgcataggctgtcacgttcaggagggccatagtggttgggggaggctgattagcgaccagtcgcgctccccgcgcggcccgcggtcagtttctcccctcttagtctctcttctccacagcacatgcatatacatttgtatatgtatacgaagtttatacatatatatatttttgtatatatatactttttaatatgtatatattttttatatttttatgtataaccaatatatacacattgttggaggtataccacgagaaccttcggccgggagaaccttc

SEQ ID NO: 12543 - DNA, 977 bp, Oryza sativa
  Intron number 3 from transcript LOC_Os03g51010.1 (locus LO C_Os03g51010) derived from phytozome v7.0 (chr-ID Chr3; po s 29144733 to 29145709 reverse strand)
gactggactggtgagtcttattgcaacgcttttcgcttatgcaactgcctgtttttgagtgttatgtgttcattttccgtactgaccttagctaactactcatatatttactggcttgagtatacttttttctttgaacgaatggcttgagtatactagaaattaataagtagtcgatagaaaattgggtgactggagcctctcacgaggcttcaaaattcatcaccatttcaaggacattgatgtatcttcaagttctcaatgattttaagcccgaaggcctgctgaaaatattgtctgtgacctggtaaagtaaggatagttggtgcaagttttgccctacaaaactactatgttattgtgagatgaatatatgggttatcaaacttcggtaagatagtattttgatggagttgtttactttggttagttttggtagggtagcaagccaaactagcctaagtcctgattgtgtatcagctcctattcctgcttaattatcttcaaatcccaatggttcaaaactaataggaaagagaggaaattggcacgttgactgattctctcttagggggtacacggtgccatttaaacatcatttaacaattccactttaccaattcctctattgccagttcagtatcagtcctttttgaaaccaaccatataaactgataccttcaattctccactttgtttcatctgtatttcatacctaacttggagcgcatagacatgtaactgcaatattctagtagttaggaaccaatgataatggtattctcagagagttggacaatggaccacctggtattcagaatttgtcaaattttatatgggctaaattgggtgttctgtaatcaatctactatgatggcccttggtaaaatactcactatggactgggctgtaatgtatttggttttttggtataggcccattggtctttctaacctacatacactattatgcaggtc

SEQ ID NO: 12544 - DNA, 605 bp, Oryza sativa
  Intron number 3 from transcript LOC_Os06g01972.1 (locus LO C_Os06g01972) derived from phytozome v7.0 (chr-ID Chr6; po s 546092 to 546696)
ccggtggttactttcttgatttcactcgttttcaggtaactacaatttctttgagaaatctggaactcttttcactgaagagcactttgtcctctatatatgtctctctttaagtagctcaatatcaggcaagcagttacatttgctactatctactactccctctggtttttaagatacggcgcaattgactttttttttcacaaactttgaccagtaatatttattcaagtaaagtaaaaggactaccactaaatctctcataaaaaatactttaagcgtgcgtaatatgcttgtgcaaatacttctagataaaaatgaattcaaaaggtcaactgtgtcattttttttaaaaaaaaacagaggtagcatatgttaatagcttttcatttgaagttgtactacaacaccttaaaatcaactaaggccccaaagcacctaaaaggaaactccagctttgttgcccagcagaaagaaaattgcattgggtcctaaggcaccttcaactcctcacatgcttttggatttttttttcagtgaaacacaaaagcagtgaagtacttctcacaaactagttccaattctttataggtttgaagcactta

SEQ ID NO: 12545 - DNA, 706 bp, Oryza sativa
  Intron number 2 from transcript LOC_Os06g02780.1 (locus LO C_Os06g02780) derived from phytozome v7.0 (chr-ID Chr6; po s 1011930 to 1012635 reverse strand)
tcatcaaaggtaaaattatttaacccacacatatgcaaaaagaagtaaaataattatataacaataataataattaacctattactagtaattaattagaaagctaagtttatataattaaaaaaggttaataattacccacaatatataatattaataaaattggctagaacttcttatgcattattgattgatctgatgaaaagaataatagatctagaacttattacattattgacgtacatgctgcttatcaaattcaaattcaacttctacgtatagtaacgaaaaaaataaatttaaccttttttttttacaattttcctttttcttcctggaagtatcttcttaagggaggaagagatttcctgttgttgttgtttagattaaatgagagatcaagatgtagtaaagaactggattctgatgttataatttattttttcttttatatattaataaaatcttaacggtggtggctttccctgctgtggttcttaaaaaaacttcttttttaagatgtagaagttcaatttgatcttacatattatttgtgcagtgatatattacatgttaatacatcttgtcaaattactttttcataaccatttaagtgatatgcaaattaacaacgtgaccggacatctcctcgagggatcgaaatatattaaaacgtactcacatgctagctgtccgatctcaggcg

SEQ ID NO: 12546 - DNA, 597 bp, Oryza sativa
  Intron number 1 from transcript LOC_Os06g02780.1 (locus LO C_Os06g02780) derived from phytozome v7.0 (chr-ID Chr6; po s 1012879 to 1013475 reverse strand)
ctggctcaagccaaattccgtctgctccagcctgagtaccgtcttaatttttctctctcttcttcctactctctccgtaattttttcatatataagtttatccaaatttatagaaaattagcaatacttctaacacaaaacaaatatattatcaaaatatattcaatgttacatttaattgaaaactaatttgggaccgtagatgttgctacgtccttttacaaatttaatcaaacaaaaaaactttgactagaaaaaaaataaaaacgactttatatatgaaacagaggtagtagtacctaagattaaaacttgaacgtttttaataagtagttaagtcagagcaattatactatttcctcctattataaatataaatcatttatcttctcgactctttactagactttgccgtcgttgggcaacttttaactatatattcttccttgtttaccttggtaaataacctctctaacaaatgaaacgaattattttggcatttaataataattattattaatatatcatattaataaatataattgttgtacgtggatgttagtgagcccacaccccaacgtgaccaactgggtcccg

SEQ ID NO: 12547 - DNA, 777 bp, Oryza sativa
  Intron number 3 from transcript LOC_Os03g51660.1 (locus LO C_Os03g51660) derived from phytozome v7.0 (chr-ID Chr3; po s 29576683 to 29577459 reverse strand)
agtgcgcgccgtgcgggcggtgcgaggcggtgcaggtgcccgtggcgccgcgtgccggccgcctccgcgccttcttcttctccagagccgccgccgccgacgacgacgacgagagctccaccaactacaagccgttgaactggaagtgcaggtgcgcagacaccaggagggcgctggatccatgatcaagaaatgcttgagatttttcgctcccggagatggtgaaattaaagtttctgaattccgttagtagttgttgttatggctttaggtgcagagattcagagaaacgattctgaaggtgttattatactctgaatccattgtgttctaattttgtagtactatgtttagtttgtggtgtaattaagtgtgtcatgtccattttccatcaagagttggatggatcaaaattccaagcctgcatttcataattgagtgttttttttaatcccttcaaaattcaaaaccaaaagttgtcaagatagtacttacattgtctttgctaccaagcttaatgtttggttatctcgttctttatcagcgagttagcatcttaacaactgcacttatattgtcttttctaccaagcttaatgctgcgcacattgcctgcaaaatattttccaagaagatgcaaaagcaatgcagcatcgcattgtccggtagtaagacaagaaaaacttttgtagtactggacttggatgtatgctcatcattgctagtgcgtctcttttgttttgaaggaagccgtaagcatttgatacactaccagggc

SEQ ID NO: 12548 - DNA, 952 bp, Oryza sativa
  Intron number 2 from transcript LOC_Os05g07250.1 (locus LO C_Os05g07250) derived from phytozome v7.0 (chr-ID Chr5; po s 3837741 to 3838692)
ctcccggccgcggggttctccggccgcctcccgcggtccgcgctgctccgccgcccgtcggccgtcgcgcccgagagagaagagagaggagaggggagagagacgaacagaggggagattgggagtgaggaggaagaagggagtgagattgacaggtggggcccacgtgggtcccaccttttttaattgttttttttgtaacttacatgtgggcctaacggtttttattattttctaaactaaattgccacgtaagcgccacgtcaatgccacgtgagacgaagaccgagtcaaattagctacataggcgccacgtcagccaaaaccaccatccaaaccgcctcgggacttattttgcaccggttttgataattgagggacctgttgtatctggttttctggttgaaggatgaaaatcagattcgttgacaaattaagggacctcaaatgaacttattccaattattagtaataaggaaaaagtccacttagactcccttactgttcaccaaatctaattcgtgacccttaaccagaaaaccgggtaagacgactccccgaattagtgaaaccagtgcaatttgactcctccggcgatattggagggtggttttgctgacgtggcgctgatgtggcggtgctaacccggttttcatgccacgtggcgcttacgtggcattagagttaaaaaaaatatctatgggacccatatgtcattcaacacaaaattattgtgggacccactcccacgtgtcatcctttctccatcctttcttcctccgcccactctctcccttctctcttttctctccccattttttctctttcccttccagatcggcggcggaggcggccgggggccagagtggcgacggcggcacgcgggcgagggctagagcggtgacggcggcgtgcaggcgacggccgcgccaccgcctgccccatctccaag

SEQ ID NO: 12549 - DNA, 705 bp, Oryza sativa
  Intron number 2 from transcript LOC_Os06g13215.1 (locus LO C_Os06g13215) derived from phytozome v7.0 (chr-ID Chr6; po s 7256544 to 7257248)
cggaactcgaaccattcagaaacttttcatcccaggtaatattttttaagatatatcgtttggccccttgcatgtaatatacgtataaaagatgcatagagacatagacggcgttgatacaaccatacatgaatataagctataattaagtgaaagaagtgcttggttgactcataaggcctgggtatgtaaaaatcagaaaaaaatagaaaattcaggcagcttgttagtttgttaatagatcaaatctatgcagtcaaataacagaagaacatttgagaactgacgttgtgaacaaagaacttatgagaacaatagaatgtccatgtgcaatgcttactaggaaatactcatatcccccaaaaaggtgattcaggtagacattgtaaaatccaaatacaagaattgaaactggacataacaggaatacaacaatttcagaatttacccgagtactccctccaccccaaaaaaaaaccaacctaggcacggatgggacattacatagtacaacgaatctggacatgctcatgtccagatttgttgtactatgtaatgtccagattcgttgtactatgtaatgtcccatccatgtctaggttggcttttttttgggacggagggagtatctcttaaatctggttacagttgataattttttgtgctctcataccatttgcagttagcagccttggactttattgc

SEQ ID NO: 12550 - DNA, 565 bp, Oryza sativa
  Intron number 2 from transcript LOC_Os05g38570.1 (locus LO C_Os05g38570) derived from phytozome v7.0 (chr-ID Chr5; po s 22565402 to 22565966 reverse strand)
aaggaaaggtatgtaatatctattcacgtctttaacctttcatctgtgtactcagtacttctcttttcacttaccaatctcagcctagtttaagacaaaatagttccactcatgtacttcttggacatggaccatgtatggtcaagaccaaagttaaggccattctacatgcacaataatactccaaatacatgcacagtgacattagtttcttccagcaatccagccttccatcacaatattctttgcttggtgaggtgaaaccaagctgtagtgcatttatgcaatagcaaaccatattgctgtccttataatgctgtttcaattttcatccacattttcattcaaaatgataagctgaatagaaatactgtaatactcaaattttcgtgtagcaactagcaaggctctacacacttcaaaattcaggacagtacccatgcatatgcattattgttgtttcatttgtactgttgtacagtcacattattattgtttcccttgtgtagttaaatttagctacaaagttaactattcattcttctccagtttgttattgctgtag

SEQ ID NO: 12551 - DNA, 416 bp, Oryza sativa
  Intron number 1 from transcript LOC_Os04g58730.1 (locus LO C_Os04g58730) derived from phytozome v7.0 (chr-ID Chr4; po s 34738638 to 34739053 reverse strand)
gaagcagcagctctcatcaccggttaagctttcaggtaagtgaatcaagtgacagtctttatatatgtagagagagggaaagcctctgctttgctctgcactgctctgccacgttgatatttatttaatctttagtggtagatttcctttttgtttgttttgtttactcaaatattgaattctgtcatccatgtgtactttacttagaaaagataaaaaaatatatcatgtgttgttatctttttcagaaaagaaaaacagtatagtattctgtgacttcctaattaattaacttagagaattgcataggcattcctcctacccaaaattgtcctgcaactctataataccaaaaaactttcagactaggaactgtcatgaccttgatgatcgtgtttgtgcttgtgcagggggca

SEQ ID NO: 12552 - DNA, 686 bp, Oryza sativa
  Intron number 2 from transcript LOC_Os04g40880.1 (locus LO C_Os04g40880) derived from phytozome v7.0 (chr-ID Chr4; po s 24084065 to 24084750 reverse strand)
gatctgcgccaccgcgcccaagggccccgatcccggtaaatctacagtgccatctatagctcacctctgtttcccatctaatccctttgaccagtgttgttttggcgtttgatcgcagcatgtgatgctttgctccgcggcgtgtcgcttcgatgcttggtttagtttggttttactgcaatcgagtgtgaatttagtggagcatacagcctatgcttgtatgagcatccttttgcagagcctcgtgtcagttgtgtgcaggaaatttcagagtttggtagtcggtagctcatctatagcaaagtcgcatgcttccagcatgtataagtttctgtagtataactggctgtggcattgatgaatttgaagaagtttagattgtgtgagctatgaaaagaaaaaaaaaacagtccggtgtgaagtatgcaaagaacatgagctctccgacaaattcctatttgttggcccatcaaagttggttcctttatttctgaagattatgaactgttgcaaccatggatgtatattggaacatctgcattccaagtcaatttgatcaatggatagaagttctctagttcttaaatgatcaagtgcttagaagaacttataatcgcacttaagattttccatatatctacatgttaagtgaaccactgtttatgaaccttaatgaatgatgctgt

SEQ ID NO: 12553 - DNA, 812 bp, Oryza sativa
  Intron number 2 from transcript LOC_Os03g47620.1 (locus LO C_Os03g47620) derived from phytozome v7.0 (chr-ID Chr3; po s 26956157 to 26956968)
ggcgtgtacggacggcgacgtcgcgcgcctcaagggtgagatcctacggctctaccccgcgcccgtcttactcccgaactgctcgtgcttcttcctgggataggggtttggttagggttttgagggcttttttttttagcttccgtgtggtggtgaactggtgatcgggaactttttttcagcattttctgtgccggctttgttgggggatattctactcaaatgtgttctcccatctttttgtgcatttgtgtaaacaattggatgagatggcttttagcctcatgcatcgtttctggttccgttacgatatgatcgtgtataccccgatcgtgcgtgttgttgatagaagtgtatgtgtgtttaatgcggcggagggttttcctgtctatttttggttcaaattggtactaatctagtaatctggatatgaatttgtttgtttgccattattcttaatagggattaataattactaataatacttctctttatgatgccatatttctgttagaggtctcttcctcttggttttgttttcttttgattaataattactaatactacttatctttatgatgccatatttctgtaagagatctcttccacttggttttgttttcttttctaagtgcttagatgtgattttcgtgaggtacttgtgtctccatttctctagaactttgatcttgttttatgcacatgcacacacaaaaaaaaacaacttctgcatgaactagaattacaatttgtgcaaatttgcgccttacttttcttttgaaactttcggtattgaagaggtggttgatagc

SEQ ID NO: 12554 - DNA, 1040 bp, Oryza sativa
  Intron number 2 from transcript LOC_Os03g59060.2 (locus LO C_Os03g59060) derived from phytozome v7.0 (chr-ID Chr3; po s 33615665 to 33616704)
gaggagagcaacgttcaagtatgatattttacagctctatgatgtctttcttgattcgctaggattagccaggatctcatttttgggcctgcttttgttcatcgcagtataatttaggtggtaatagttaagggaaaacatcagatctatttctcatgaaaactcaatgaaaaagccaacaatatcttatattcttatggcttttgagactaaggtcatctctaccagactagtcttctatgctgtgatggtgtcatctgttacaataccttgcatggaaaacttccaaaatttagtttgtctaaatgtgcaatactccagcttgttttcttggatcacttgcatgaaatgatggtactatttgactgacgaattagcttctatagtctttgaagtaatgggaacctatgagcatggtttgtctttgacaaggatgaatatttcatgttggcagtgcaacaatcacacttcattaatctcttaaatttgtcatggatctttgctcagatcactagaaatattcatctaggatcaaattcttttgtaagtcaaccagaaacgaaaaaaaaattaaattgtacatcaaacttggttacaaaatataataattaaagaatagaacaacaatagcaaaataagttgcgggtaatctagaggaagttggggtagtcttgagacgaaacccaggttgaaccacacaaggatttagtcttcagatcatgtatatgcatgtctcctcggaaaattttattctagtttcttgttctgaatttatgtaaatccataatattgacagaagtacttatatttggttttgttctgtattatgtgttgcatggtatagccttacaggttttgttttgttttgaaactgccgtgcaaacgaaagttaaagcagctttattttgtatacttttaacttacagtgattccttgagatggttatgtgcctcccatataataaattatgaattcttttgttgataatttaacattttctttgccatgcttctgcagcctgtaaagagtcctgttacaat

SEQ ID NO: 12555 - DNA, 749 bp, Oryza sativa
  Intron number 2 from transcript LOC_Os05g07670.1 (locus LO C_Os05g07670) derived from phytozome v7.0 (chr-ID Chr5; po s 4120090 to 4120838 reverse strand)
agctccctcggcttcaactttggtgggtgttgggagatctgggctcttttttttcctttgcttccccccaagcttcttgattggtcgcttgtgattcgcgtagatctgtgatgctctgcgaatttcgtaggggttgttttcagcgaggattgcttattgatttatgtgcttagatcaattgttagatttttttttgtagtgtttgatttttgtgaatttggccgtggtatttaatttagagatggggagagcatcattgtagagatagtggtaggataaaatgtttctcgaactcatgcagttctggtgaagcttttgaacaaaaaaaatttgctaagaggagtagtgaatatgaaactttgatggttttgatggtgtggattagattcacttgtttatactagtgcagtgaacaagctttagtagcacatctaccaggttgcttgacgcaggggagtaatatccttgtttgatctggtgctgcaatttgaattatgaactcatgcactgtatgtggaacttattgtcaagcttgacttgtgccttttttgtgcggaacataggttgacttgtgttgattgtagcctcctttttcacctaccattttctgttacttcttttctcaaatgcattgcaatgtattagtgtttgtagaatttacatgaatataaatgacaccaactgtttttccatacatggaattgtattttgcagccactaccttgacgagttggcatcttcttgtcaca

SEQ ID NO: 12556 - DNA, 867 bp, Oryza sativa
  Intron number 1 from transcript LOC_Os05g05600.5 (locus LO C_Os05g05600) derived from phytozome v7.0 (chr-ID Chr5; po s 2786153 to 2787019)
gcagagacggaggcaggataggccggcgagcaaaggttcgagttctttcccctcggattccacaaagtaggtgtcttttttgtttaagaaaaatagaatcaccaagttgttgttctcgttgagttttggttgtattttgtcactcgagagcctctgcatgttccaaaagatggtgttttattggtggtgttttgatcatgctagatgtggaggatggacggatcagatattctgttgtttactcgctttgaaatttatgcttgttttagtattatgcatctttgggcaattatcgcatggatggatcatacatgccatttctttcggttcgaatgtcttcctgtttactactttggaattatcgtttttagagtttcgaattagctgattactgcaagtacagttccccgctgtgtttttgtttgtgattctgaactgcaaactgatctaggatcgagaaatgttggtgtatttagagatttaaggggggcgactgatgtgtcaccatttagaaaatcaattatgcatttcctaattgtcatggctgcatgctgtcaagttaaatttgagataactgctgaagattacagaaggcctagaattctattaccccattcatagagtagctgtgattctgacaatacaatgcacagcaggtatttagaaaggaaactgttactacatggttgttaacagcaagcagctattattgatctgataaggaatgaagttctacagtatttttgacgcgacgtattagcatcagttttgctcaagattcacttactgttgcgtgcaactaatgtccaaatttcacatcaggtactaaagatcatatctcttcaaactggttaggaagcttactta

SEQ ID NO: 12557 - DNA, 476 bp, Oryza sativa; identical to SEQ ID NO: 9607
  Intron number 1 from transcript LOC_Os06g09679.2 (locus LO C_Os06g09679) derived from phytozome v7.0 (chr-ID Chr6; po s 4933069 to 4933544)

SEQ ID NO: 12558 - DNA, 958 bp, Oryza sativa
  Intron number 1 from transcript LOC_Os05g24880.2 (locus LO C_Os05g24880) derived from phytozome v7.0 (chr-ID Chr5; po s 14350843 to 14351800)
ttcgcggatctcatcgtcgccgacgagaagcagctgtgagttcggtttttcgcctctcgctgcctcgtatggtgatctccgtttggaagattagcttactccaagtggctctctctttggaaatccccatttttgggttaatttatcagtacatgccttaattagtgggatacagcatcacgagttatatttggttttctctttcaattgtcggatgcattttcttgtatgtagtcgattagttgttgaagcatttctacatcggcttatatctgttcgctcttctcatgtccgatcgtagagttaaactttctgctagttcggtaggtgctatgcagattttatagcttatgagaagggttgtttgcttttgggagtaaatgtttctttttaaaaactatttattctatgatatgtctaaatatggggatgtgggagtgggagagactatgctggttttcgatgaaaaagatgagaatgttgctgtctgtctctctatagatagttaagccttgatcccctaataaagaggtggaatctttcaattgtcgggatgccttaaaaaaggcgatgttaatgttgtagtgaggactggattgtattttgttttgttatttcagcttgatttcactagcaaacaaagcgcacagtatgtctcctgtttgtttatcttagcaatatgcaatgtataaatcaactaatacaatagctgcacttgtggtggttgcagttgcagagtaaaacagttagcactgttgtgaaataaaataaaggaagcaaatgttggttagatacttgtatatatgtgaatttctgaatttttgtatatgaggggctatctgtagttaccagaatttttttgtaagtataacatgcattttaaatcgttggatcagaatcataatcagacaggcgcacatctcaaagctaatgctttgtgcaggtctgcaggaaaaaa

SEQ ID NO: 12559 - DNA, 711 bp, Oryza sativa
  Intron number 3 from transcript LOC_Os04g42330.1 (locus LO C_Os04g42330) derived from phytozome v7.0 (chr-ID Chr4; po s 24863735 to 24864445)
agagtgtcatcggatcgtacgccgtctcagtgcaggtaccggtagcttgtacttttaggttgtttagctggcttaattggcttcgagcgactacttttttaatggaccgatgctagggtttaggttccggttccgcgcttctacttcgagctcaatggttcgggttaattggaagaattcgtcgtgttttttttctctctacatgtgcatgaactgtaaattgttgttaaccagagtctggattggagctaggaatgttattgaacactgtattttgattttttggactgcctacttccttgaattcagaaaacaatattatgtaacggtgctaggttagaattttcttttgatattttggttcatgtggtcaatgtagtgtgagtagatataatttcagataataaaatattttgttacataactcgaatcttctgtttgaatttgagtgattctcagagtttgttggtcggtggtgttcatgacatactgacatgccgtgctaagtacaacatatttgttgtaacaatgtcacaaaatagctgcattttcactatgttgctttaagcagctattctatgaggctcaatattgtaatatcttcattttgcacatctttaaaattatctgaagtaatttagctttcacaaacaactgaaaagtgtaactccaacctatctgttattgatttgcaggagcttttggtcattg

SEQ ID NO: 12560 - DNA, 838 bp, Oryza sativa
  Intron number 2 from transcript LOC_Os07g07300.1 (locus LO C_Os07g07300) derived from phytozome v7.0 (chr-ID Chr7; po s 3628348 to 3629185 reverse strand)
ccggccggcacgttttggtcgatattctgtcccatatttgttttaaattattttatcgttcaagctatattctactcactccatcccaaaaaagaaacatatccggtgaaaacgagctaagagctgaaactcgtgaaaatcatacctcaaagttttataaatttataaaaaaaattactagaaataggtgtagatatcaaatacattctcaccaaatcttaagtttaaactcaactttgtttaggacttaaaaaaaaagaaagttcaggtaaatagtaacatgatactattcagccaaaatttgccccttttttctattaaacgaagttgagtttggagttaagaattggtgagaatatttttcatatctacacctatctctagtaattatttaatgaatttacagaacttttaggtatgattttcacgagtttccaacccttagctcgttttcactggatatatcctccaaaaaaaaagtcaacttatacaaggatgggacacttcctacatgttaagattcattatactatgaagtgtcccattcttatctaggttggttttttttgggacggggagagtatgttaaacatgtctgtttgattatgtatagagtgattttataatatttgagaaggtatatattgagagtataaattttgatggtatctctcaggaagtgtaaattaaaattccccttagaaataagtatagtttaacaaactgataccatggttgccagttcaacgtaaaattatggtcatgtgattgtttgtgtatttacaatatgatgaactcgaccgtcttacttttgctgcagttccgaagcgaggaatct

SEQ ID NO: 12561 - DNA, 805 bp, Oryza sativa
  Intron number 1 from transcript LOC_Os05g08510.1 (locus LO C_Os05g08510) derived from phytozome v7.0 (chr-ID Chr5; po s 4644693 to 4645497)
aaggatcatcttacaacaatgtaaggcagctgattgaatacatctcgagcaggggaacaagaacagatgttcagtgatgtgttcttttatatcaccttttcttatgggtaatatcagtattttgataagaataaatggttcacgtccaaatcagttgctttcttgtatgatgacatatcgtttatttgcaaagttcaacataccaaccttacgattgaatattactgtcctttctctattatgctccgatttgcattgaggtggaatatgacactcattttgtgcaactgatcaactacttgataaattttaaagatataacttgggtgcaaactgagttattattgcattaaaatggaacagttatgagagaaacaacaataggataacagaatttcttaaccttaatttgatttataactacaatagctctgcagtagctcaaaaaagggcacaatttagcatattaaccataaactgacccttattctcttcttatttctaatgcccacatactgtaagcacaaacaatgttcaccagaagtgattcgaaaaatccagctgcattatccagcgattttgcattctacttccctaataaggacttgagtgataaattgtaatcagttgcaacatatcagtaaaaatgaaggaattcagtacttgttacttgttctactgaagcaaacaagtagtcgatatgaaacatttcagacaaactatagtaacgaacacaatgccacaacattttagagactgacaacaaaaatggactgcttcagattgttctcaagaacttcaggag

SEQ ID NO: 12562 - DNA, 690 bp, Oryza sativa
  Intron number 1 from transcript LOC_Os06g29400.1 (locus LO C_Os06g29400) derived from phytozome v7.0 (chr-ID Chr6; po s 16834277 to 16834966 reverse strand)
gccagctccgcgccctccccgcctggaagcaggaggtagagagctctctcggcgccctcagtgtttttcctcggaagcggcgttgattgtttcgcgtggtggtttgctcggtcgattccagctgtgagccatggcacacgcttttgctcctggtttagcatttgggggcttttggaggaagttggcaggcgatttctgatctatttttagggttatactatccgttgaatttgtctattgatgtttcgcggcagtcgcaatgcatttggccgcatatgcgcttcatctttgggtttggggtagtattgcatgtgataagttgtactccctcagtttctaaatgtttggcaccattgactttttagcacatgtttgaccgttctcttattcaaaatattttgtgaaatatgtaaaactatatgtaatatgaaagtatatttaacaataaatcaaatgataggaaaagaattaataattacttatttttttaataagacgaatggtcaaacatgtttgtcaaatatttaaaaacggagggagtacatatgtcttaacttccttcttctgtctatacatttcgtggttctatatgtcattgccataaagttacgcggtagatgatttgcttcaagtaattgtggtaatatgcttacttaaaaatcgagatggtgattggcctgcaggtgagag

SEQ ID NO: 12563 - DNA, 611 bp, Oryza sativa
  Intron number 3 from transcript LOC_Os06g42754.1 (locus LO C_Os06g42754) derived from phytozome v7.0 (chr-ID Chr6; po s 25708184 to 25708794)
ctagaagcaaaccaagctcaggtgcaaaacattctgttggaaaatgtgggcatggaggaagaaaggatttgagtatgaactgttattttagaagtagaaaatttcctccaggggttaactttgatggccacatacccttcacagctgattaccgtacaccccggcaccacccgcccaagaacaactagaagtatatagggtacatccaagtatctagaactagcatgtttcgcttaccctttctgttttctgttttgattggccattgtatttgtcaatttatggccttccctcttgttagatataggtgtttaataatcatgatataatagtaatctgttctgttttcactgtgtcataatagtactgttaatgctccttcaaaaagactatttcttatgctccaagtgcattcagtatatactaattcaatcatacttctttagttcttacaagcttgagttcaccaaaagggaaagaaatatccataaagaaaaggaagtcctaaaggaaacttactgtttagtacactaacaaattatgttcgaattgaatatattcttggtcttgatgcaggagagattagcaactactcatccaactcacgtgta

SEQ ID NO: 12564 - DNA, 926 bp, Oryza sativa
  Intron number 1 from transcript LOC_Os05g45590.1 (locus LO C_Os05g45590) derived from phytozome v7.0 (chr-ID Chr5; po s 26358714 to 26359639 reverse strand)
atcatcagctacgtcgacgccctcccttccgggtaaaatggctcgcccccttctcgcgcgatttgcatgtatcattgtgttgtatggggaggcgtagtctgaagagttggtttcttcgcctgattcgtttggataatggctgctgcgagggaacagtgtgaagtcccacagatctgcttcaaagttgaaacgttaggtggttaatgttttcttttaatttgattgcggtgaacggtgttgcggtctagcagcgcctgcaaaacgttgaatggttgcgcattgatgtcacggtaatgtgatgctgctaggttggttgcagtggcgggcgtctgattttgtgtaatggacatggtcttgttgataattttgatgtcggaaactcgcagtaatgttgatttggtctgaaagatgtgaacttgacaaaccaagtcatatatgtctttgctaatttgctactgattactactcaggaaagtacgtttctttcttgtgtatatattacttctctttagataaaaatgaacaaaatgtgaattcagctgttatggcattagataagaaaccaaccttattgaatatcatgagtctctcctaagtctgttggtgtaaagccaacttctatgcacttttaggttgcatctgatgtggttactataaccttgcaattactgtatcacttcacatatacatcagaaataattctggtatctatagatattttagattacagaaagggtgtcatagtaattgtccgaagactgaataaaagaaggggtctattgttctaacgtgtaccacaggcagttcaaacttattgccgaggcgcaccctcgatcaaattattgaactattgctcttagttgtactttggattgacttctgatatgtcaaaggctgcatttgcagggaagagaagggggtgtttt

SEQ ID NO: 12565 - DNA, 365 bp, Oryza sativa
  Intron number 3 from transcript LOC_Os07g10770.1 (locus LO C_Os07g10770) derived from phytozome v7.0 (chr-ID Chr7; po s 5856509 to 5856873 reverse strand)
cccccagtgcaagaccaagtacaagcgccacaagggtaaatgctaccatctctctcttctcctctccctcctctccatttccgccgatctcgccgccatcgactgtaaataagttcagaaacatctcagaaaaaaaaagtctggatctctagttcagaacagtcaaaacgagcattcttatagatggatcctgttgctttcttgttaggaaggtcatacaagatccaatgtttgttgattttttggaaattcagaaaaaaataatgtcgattagtaaacgatgttacagtcatgctaaggctttgctgaactgtgtatggaattattcagggagcccggcgatccgtggggaggaaggcgaggat

SEQ ID NO: 12566 - DNA, 634 bp, Oryza sativa
  Intron number 1 from transcript LOC_Os03g44230.1 (locus LO C_Os03g44230) derived from phytozome v7.0 (chr-ID Chr3; po s 24851257 to 24851890 reverse strand)
gatgtgaggtttctttccaattttttttcttcctttattattaattattaatctctctctcgctcacaagcataccatgcgtttcatgtgccattatgcctcatcagtttgatatgatatacggtatggatggtctctagtctctgtcatcaatcgatcgcatttactacatagatatggaactaacatggaagaaaaagttgtcagattcttttcctccaatctgtattaggaaaaataatttgtcatcagttgatcgcatttaatacatagatatggaactaacagggaagaaaaagatgtcaccagttgattcttttcctccaatctgtattaggaaaaataagttgtcatcagttaattatttgtatttttcgtaataagtgtgtgtgtggaaaggacattcctccaatttgtattaggaaaaataagttgtcatcagttaattatttgtatttttcgtaataaatgtgtgtgtggaaaggacagggaagaaaagaacttgcaaaagtgtaattgcaaggcaattgatttgatgctacttttgtgggggtgctcctgtttatttatatatatgcctattcttttgcactaagcagcagcaccagctcgacgaggagaaccagagagccgc

SEQ ID NO: 12567 - DNA, 964 bp, Oryza sativa
  Intron number 1 from transcript LOC_Os06g44050.1 (locus LO C_Os06g44050) derived from phytozome v7.0 (chr-ID Chr6; po s 26569574 to 26570537 reverse strand)
gaagaggaggtgcgcgtgggtgactccgaccagtggtgagttcttgcttcttggcttcttgattgtatcattatttgattttaatttgagtagtagggaatataatttgtgcttagttcatactccatttatgtgttgcagcttctgttattttatcataatttagtatgattttccactcagcatacttattgagaattttgttgtaaatataggcaaaccctgctttaaaaatttaccagcagactaatgctggcttcttgacccaaataaaaatgacaaattgatcatctagttgttatgttgttaaactatgtttatccttttggaggtggctccatcattttgcctacattggataaagtgagcattgtctcctttgtcttgcctataaagcgagcacgttctccattgatgcccttttcattcttactaccttcaagggtttgttgattccgtgttaggtgttagcatctggttatcaccttgcattgttacttccacacaggcctaatatgtaattagctcactaggctctagtttgattcattgaatggacattctaatagaaaatgatgtgttttgctgtataaccatcacttgattagtcccaattcagagttttctgttgcacgtgcttggtagtcatcctgccatgaaaatctgccagaattatcttgcaatgaactgaaactatcagaaattgggtaatgaaaaggccactctacctataggtaaaatgataggctatatattaatgggtagcttcatctataccccaagaatactaaagcttcaggtaggatgcttgctttgtttgacattgtcacatgctatggtttcccagatctttttctttaccttactgatgaagtatttcttgctttctgcatcatttgtcatgaagaaagctggcttttcaatctcttactgtccattcattgtctctgatcagatccttgct

SEQ ID NO: 12568 - DNA, 768 bp, Oryza sativa
  Intron number 2 from transcript LOC_Os04g47120.1 (locus LO C_Os04g47120) derived from phytozome v7.0 (chr-ID Chr4; po s 27799295 to 27800062)
caggatcgccgacgccgtcctggtgaagcgctacggtgagtagcacacggtccccatcactgtatcactcgctctagtttttgcgaccttcgattggttggtggttatggtgaacgtggcggcggcggattcctgatgctcgttggtgggagatttttttttagattagtaaattagcggtattctccaattgcgtacccgatttttgtggagctcgctggctatgtttgatttgctgctgtgtatgtatatgtataggtttaatcaacttgcttaaaaaggtgactattagaggcttagagcatcaccccctataatagggtgcttccattcaacgcccaagctagctactataagattcattttttttagaacaataacaatgttatagattttctttatagatcatggggaactggggatatcattggcaatagtacacattgatttgacatgtaatgcttgagagaaaattggtatcagttcaataacgaagatcaggcatccaaatccttgcaagcgaggactcaagcctgggtgttcacctacgcctgccacctacctcacttcctctcactgatttagtgatttttagttctcaacgcatgtttggcattatcccctttctagagaagtgttgtttctttttttggtactgaaagtgaatgtggtttcaagttggaatcaagctgattacatgtctgttcgttgtgatacttttcgaattttgcagaacctggtggttacgttgctcgtgaaggtgaccct

SEQ ID NO: 12569 - DNA, 525 bp, Oryza sativa
  Intron number 4 from transcript LOC_Os05g45010.1 (locus LO C_Os05g45010) derived from phytozome v7.0 (chr-ID Chr5; po s 26102820 to 26103344)
gctccctagatctaaggtcagcacaacccgtctcccaataattaacacaccaaccacgacaaaaacatagtgcaaatatttatcttatctttgagcttctttgaggtccttgggaagtactaagatgcacttaaaaactcttcattttttggtagagacggaaataatccaaacttatacaccaatggcaattcatgcaagcttgtgaaaaggaacaacaagttagtgatctacatagttgttcccatagttctggttatggtgatagtaccaatatatctaatactcttttacctgaaaagaaaaaggctaggtgaggctttctacaaatacatcactcatgtggtttattaatagctaagcatatccacaaacaaaactaacccatttcatatgcatcctttgcatatcaaggaccaaggagcaattccacagaaccacaaaatgagaaggcagagtatgcttcgaaaaatcgtggccacatgcatagttcatcactacagcttgagaaccgtcggttcacat

SEQ ID NO: 12570 - DNA, 745 bp, Oryza sativa
  Intron number 1 from transcript LOC_Os03g49710.1 (locus LO C_Os03g49710) derived from phytozome v7.0 (chr-ID Chr3; po s 28294500 to 28295244)
gccgcagctcctccgtctccttccccgttcccaaggtgagaagcaaagccacccctccccccgcctcccccctccgcgcccacttcttgttcggccatttgctcgctcgtcctgttccttggttctgtgcgattgatatgtgattcacgcatgacgcatcgtacatccgtatcacttattgcaactcaacccctgggatcgttttgttatctttgccatcttggaggttggggaggctagtggccgtgctttgtgtactacagtactaattttgagtatgtgcaattcagtagttttttttccgtgatgttggaagaacagtgttcctgtgcaattttagaattattggcatctgtgaggaactagtatttatatgcttgtatgcttatgagtttgaatctctgcccctagcacatatcatgttggaagaatggatagtgttacgaagtagtatttctttggacagcagagtgtatatgtaattcatgtagggactaggaatagcaaagaaggttaattatgcatataggatgtaaaaagaatcgtaattccttgttagtactccctcagtttcatactataagtagtcaaagttctttaggtttgaccaagtttaaagaaaaaatttccccaccccattatctttacttgcccagtcatttgtaggcctgtgcttttaactgtgttgtggttttgattcttttttttttattattgggtactggacagaaagggggtattggtc

SEQ ID NO: 12571 - DNA, 625 bp, Oryza sativa
  Intron number 1 from transcript LOC_Os03g60480.1 (locus LO C_Os03g60480) derived from phytozome v7.0 (chr-ID Chr3; po s 34379958 to 34380582 reverse strand)
tgaagaacactctgacgcaggagcaggtgagtaattactacacagagtttgtgttttgatttttcaaggtttaatatgcacttcattttcttttccttttgcgaagataccaagttttgttcataaaaggagaagataaattaagttgtacaaaagtactactcaatagatgatgcaaataattagtactaatatcaggatttgtatgctatgattttctattagatactgtggaacttccacctaaagaaaggcaaatatcatgatgacgaattgacatacatgctaccttcttgatttcagtgagatttgtacgtatattaaaattgctggataactgactcgtaggctcgtaactaagcatgagagattcagaccaatccatagaaaaaagaggagattcagcacgtatcccttaaacaaagagagattcagaacatgacagtattttaagactacaacatgacaacttgctacaaacatgacagcactgcacatctgcatcgtttctgttttaaatttcaaaaagccaacacatagttgctttgaattaattaaccaccggcatttgcattgggtatctttttcaggtggttgtactgaaggtatcactgcactgcaaagc

SEQ ID NO: 12572 - DNA, 609 bp, Oryza sativa
  Intron number 3 from transcript LOC_Os04g32970.1 (locus LO C_Os04g32970) derived from phytozome v7.0 (chr-ID Chr4; po s 19762978 to 19763586)
gaccatcatcgccttctcgataggttttttttaatgatctcgcttgctttacctgttaattcttcacatttatttcttgcaatgttaggccttcatttttttagcatataaatattttaattctacaatcatttgtgcattaacatttcgcagatcctgaataactacacttgcctgcataatcttatggcaaatgtttggacaagcaaatcattgatagtcaagaattggttttgcaaaggcttaaagcatgattattttaacattggggattttatgtgggattttaggaagacactagataaaactgcatggctaaattaaaattttgcaaggttttacttagttgccattcctcatcatgtccttcccatctataaaacatactaccctatcctttctgacattccaaattaatgttgtattttcttatgtacacaatctttagccattttctatcattccatgaatgatactaaaacaaacctcattcccatgcatgctcttcagtaattatatataaaagtaacttagaactatgttaaacttatttgagtgaatagatggattagcaatatgtttcctcacttaatactttttgtaggctaa

SEQ ID NO: 12573 - DNA, 917 bp, Oryza sativa
  Intron number 1 from transcript LOC_Os04g46970.1 (locus LO C_Os04g46970) derived from phytozome v7.0 (chr-ID Chr4; po s 27662080 to 27662996 reverse strand)
agcggcaaggtcggcgggcagcggggaagagggtggtgagtcagagtctttgtttttttctgaacaatcttactcagatatagaaacacgttattatttatttacgaacatatacccccggcactcgaaaaaattggaaataacaattaggaaatgtgaaggtccaaatggcggatcttaatagagtttagtggagctcaaaaattcaccgttagcctccacatcttcaaaatcaaaatatattaattagaaagaaatactcacgaatgtgtatagaataatagaaagatgtactagaagataggcgcgcttgttggcgtgatcgctaattaagcatgtgtcttatcttatttgttggagattatatatatgctatttaaatcttttttggaatttacatttttatagcagttagttacatactcataaaatttcttataaacaccatacttttaaaggtatgttttagtgtgttcttagtttcatgtttgtagaattatgaagagaaaaaaatgaaagtatgatagtaatatatgcttaaaaagcattcaaggtggtagttagtttaatgtagaaaactgtatttttggaatcttttgccacttttgtgaattgaaagtatttacatataatctgtttgaatttggggaattataagaaaatacatatactagtactgattgttttgcattctctggttcttttttttttcattctctacgaatatagatataggataacatcattgttaacttgcttgttaggaatttcagtttcacccattgtatttcttggagttgtttatatccacacttccctaaacagtaaaactcgtagagttagcattaaatgtttttacaatttacaatttatattttatttgttatttgaaggaaggataaaagctttgctacttt

SEQ ID NO: 12574 - DNA, 712 bp, Oryza sativa
  Intron number 2 from transcript LOC_Os04g35130.1 (locus LO C_Os04g35130) derived from phytozome v7.0 (chr-ID Chr4; po s 21178200 to 21178911)
aggtacaagctcgatacccagataccaggtaccaggtattagccggtactagggtaccagggtaacaggtattagcctggtaaccaaggtgccaggtattagccgatactagagtatcaggtaccaggtaccagccggtacctaaggtaccaggtaccaagtattagccgatactagggtatcaggtaccaggtaccagctggtatctaaggtaccaggtaacagccggtaaccaaggtactagcagggtttcctttacaggcttaccacggggtacggtaatataaataccgcggtaacctccttaaattcaaataaatttaaaaaataatttaaatttttgataaattttgtacggttttgtacggtttttcacggttcccgcggttaccgcgcggtaaccgtgcttaccaccgcggtaaccgtgcttaccgccggggcgcggtaaccccggccccggtggtttgagaaaccgtgggtactagttattaaaattcttccgttgcaacggaatcccgttgtgtaggagttccctttttctttttccaaacggaaccgtttgccctgaaaattttccgcgtttcggcaagggaggacactgcccccagctgcaggggctccgcgtcgcgtcggtagtcagccacagacagccaagcctaccaaacccccacacgcaggtcgtcgtcgtctccacgcccgcacgcctcccctc

SEQ ID NO: 12575 - DNA, 344 bp, Oryza sativa
  Intron number 4 from transcript LOC_Os04g57390.1 (locus LO C_Os04g57390) derived from phytozome v7.0 (chr-ID Chr4; po s 33968635 to 33968978 reverse strand)
cttttgctgtcagagttactgcacaagcaaagaaggtaatggtaggatcacatcgttgctcatattgcttaataagccaaaatgacttattaaagaataaaaaactaatttatagataaagcttatatatgtatgtgtttcttagcggtttaaaagctaatgctgaaaaaaaaactacgttaaaaaataattttaaaataaagttcaaaaatttaaatttggctttaattttgatttattagggcaaccaataatgctcgtagtattttaacggaaaagaagagctagagctaatgaccagctcatgcatgactgcaatggtaaataatcatgctacagctaca

SEQ ID NO: 12576 - DNA, 1023 bp, Oryza sativa
  Intron number 1 from transcript LOC_Os03g57690.1 (locus LO C_Os03g57690) derived from phytozome v7.0 (chr-ID Chr3; po s 32877998 to 32879020 reverse strand)
ccccgtccggggccccaagctcggctgcggcgaaggtgagagctaccaccaccatgcatgtcggcgctgccatctctctcccttctcgatcttcttctcctttctcgtgggaatcttgagctatactggtcaaatccattccatttgttcattcctttcttagtctgtccagtttctagtctgttttgacggtcaagtgattgagtctgcgtgtagtttttctcgccaggtaaaatctccatgtatagttaagtagtactattactgttttatttggtgttttccggatgtggccacagaattagtactgttttttttagcaccatttagctcacctgatcgctggagtacactagtattgtgctgatgtacagtatttcacagcatgagaaaactagtggagtactacaaaacatgtcctccaggaagaggaaattaactgtacgtaagtacatatcgcgcagaatagtgtagcaataaattaattagaacaaaccaagaagaaggtgcccagtagcttactggattatcgtgttatttgcagttgttggagcgaagtagctagcgacagcgccatctcaattctaaaacgaatcatccagctttccgcctgcaaattgttttttttttttgtttttcttttgtcctttttctataggtatcactatcaggtagcaagtatatatgcaactactataacagttctcaattctggatacttccagcttttctccttaaatttaatccataaagctgagtggtccgttttccacaatgcttttcctgagataatgagaaaatgattttctttgaattcacaaaagttaacagacacctcatcagtgactgacatgacagttcatcagtaatcagatgatgtttctgcatcagcaacagtgcgcaatacaagcagttgcaatcagtagacctaaggatttctactgtactaagtaacagtgatggtaattatcaattagacagtacgaataacttactgaggatatcattttttttttcaggtgg

SEQ ID NO: 12577 - DNA, 645 bp, Oryza sativa
  Intron number 1 from transcript LOC_Os04g58570.1 (locus LO C_Os04g58570) derived from phytozome v7.0 (chr-ID Chr4; po s 34639453 to 34640097)
ctgcgccaagggcctcgaggacactgacttcttgagtaaacacacatccttctacctcttcttgctgtgtttgcaaagcttttgtttttgattacgccatttcttctcttctttgctggttgactgcttaatcgtttctttaggattgtgaacctgacagattagatgcatgaacaaggcatcaatagatatcatgattcattaccagtgaggatactagacagagtgatcgaggaggggcatttcgcggttggttaagcaattatcagcatgttgttctagctagatcatgggtcaacggtgacttatagtgcttgatgtcctgttgttaatgcctaacaattgttttatttcacttcattactctaaagcaaacctaaaaaaaaatatgtatctgcatgcgaaaacgacgaaggatggataaaagcacgccagtatatcgtggagttttgcttgtgctgtcctgtcctacactcctactcgagtaaaaagttaaaaacatcatagcgttagagtgagaaagcatgtgtacgtaggggctagacatactcaatcacaatcttctcaaactttatctgagaatcactgttttttacgctcttcatttgatgccaatttgtgtgtatttttgccaaatcagacgac

SEQ ID NO: 12578 - DNA, 503 bp, Oryza sativa
  Intron number 2 from transcript LOC_Os03g41170.1 (locus LO C_Os03g41170) derived from phytozome v7.0 (chr-ID Chr3; po s 22891249 to 22891751 reverse strand)
aaaagtgaaggtatgcttgaatcttccattatctttcatcaaattattatttgacttgctatttggttgctaatgtttgtattcttcttaaaagagacaggaaggtgcattaatgaagcacttatagcagttcctttcactaatttaatttatgttccttttgaggttgtgaattcttgaaaccacatgttgtacatgagtccttttctgatgagaagtgtttcctacggtgaactgggttgttaagctaacaactgaaatgggtagtgtatgacattggtgtgaagcatgccactgcccaaaaaataaattatctttgtattgaaaaacaaatcaactgtaactaatcataactttctgaaaaataaattattttcttgataaatcccttttttttttgcatgattccacaacgagaaaaatgtttatcatctttatcgcaattggtctttctttttgtttatatacctaagaaaatgaacttatgtatgtgcaggaaaaaa

SEQ ID NO: 12579 - DNA, 949 bp, Oryza sativa
  Intron number 1 from transcript LOC_Os04g55840.1 (locus LO C_Os04g55840) derived from phytozome v7.0 (chr-ID Chr4; po s 33060275 to 33061223)
aggttagggttattgaatcgcgtctcgtgctcttccccccccctcccccccccctctcccatttcctgtgttgtcttcgggaacacaccccgcatcgaggttttttttttctggtgatctttgcgttaacgagttggtgggaactggtggggtttttctcgttgcgatgcgaggcttgttgagttttcccaacgcgcggctcggctgctcttgcggtgaaattttggttgggagtagtcctgcggggagcagcggggatgggttttttggggtttattgggtagtttctttgaattgatcggttgttgtttaccgtgtgtttcttgtcttctggttcttggattctaatctgtttgtcggattagtttcgtggggttttgtaccatttgttcttggatttttttccccctctctcagctctgcctctgctgcttcggcttcaccataccgctccttgtgcattggattgtttcttgaaggttttaatcgagtttcaaggtagttcttggtctctatctagtttgattgtcttgacataggcaagaattagggcatttctttctttaacctttgagtttgacgaattgcatctccccactcttgcttgcatgattctggacttgatacttcagacaggtggaattaatgtcagaaaataatacgatctgcttctgctgcttgcgtgttggtttctggtcgatttctctatgttttcagcgacccaaatagataactcagtgtcctaatttagacttctgatagctttgctgcctgtgagttttgatcttgttacttgtatatactattgtgaccgtaatattggattctattgtgatcgtaatgttgcctagtactgtgaaaatgtttgaaagtactacctcaggatttagatcacgtggttttattactgaggatcacatggttttattgaattacaggatcagggagc

SEQ ID NO: 12580 - DNA, 1012 bp, Oryza sativa
  Intron number 1 from transcript LOC_Os03g58940.1 (locus LO C_Os03g58940) derived from phytozome v7.0 (chr-ID Chr3; po s 33556957 to 33557968)
ctgctccatcgccgccaccttctccgactgcccaagtacatcacattttacactttatttaatcatcatcaattgattgatttattaattagttaactaacaccgccttaattagtttgttagctagtttggttgatgccatgccggccgctttgtttgcttactatccgtcttagacaaaatttaaatggtttttaatcgtattctattttctagccttgcctttgaaacggctaacgatgcagatatttgaagggaaggatatccctccaaatatttttttaagagaaaattatgggcgtgttaagaattaaacataagatatcggattaaaatcactatctcttaccacttcactatttagaaatttcttttacttataaaatattgtgattgctctgtctatttttttactatgatcgtcggctgtagttcaacttcatagctttgcattgcatggacgtgctcaatcaagtttgcttcgtgcatgctgcaaattaatcggtttaattttttttaaaacaatggatagatatccggtttctatatccacaagcgaacatatacaaccaaaatgggtatggatggtataatttagttttggatgttgttcctgtacagtaggagtacaactacatcgatctcgatctggcgaattgaatgaaacactaacctggagtggtgctggaccatgcttgcttgttagaactgtacactactatgattagctttttgtcgtgcttgcacaccgtacagtaacacgtacgttaattgcacggtgcaagcagggtccggtcgatcgaccaaataattaagtactttctagagcaatttgctacagaaatcagaccacctctgcttcaggaatcaatactttcttcatttgatatcatcattgccatgcctttttttgcttctgttgatctgttcgtgattaattcgtcggtaattagcatgactgaactaactgcttgttactaatttggatcgatggccatgtatatatgcagag

SEQ ID NO: 12581 - DNA, 982 bp, Oryza sativa
  Intron number 1 from transcript LOC_Os06g08170.1 (locus LO C_Os06g08170) derived from phytozome v7.0 (chr-ID Chr6; po s 3961930 to 3962911 reverse strand)
cctttactggttgccgttctatatccggcacagtatgtcctatatgcttcaagtacattctatttcttaatttttcagttgagaatcagtagagtatgatcttattgcttgatgctagttttttataatcaccgttaaccgaatgaagactgatagtatctactgtctagcactctagcaatgggtttaactcaactatctgcgctgcaagtttgttaaccttgcatcctgagccctaactttgctgtcaaactctagaggcttggaattatgttgatgccagaagtttcaagatgctgggttttaggcctgattcaaatttgttggatgattagatagttatgtagcatcatcaatacatcaattgaattcaaaaaacaaaagttctatttatgagaccgtggtttatgttcccctgtttgatttagattagtgagtgaattattattgtgcattatctacttgattatagggataaattaaatattttgagaaataaatttatcaaatagcttaaaacaagtgctctaagcaatgcagtagaataagttttcgtgagaacttactttttgaagcgtgaagcaaataatccgcttcaataatccagtgaataagctgaaaagaacagggtatctagaggatactggatctttgcatgtggaagcaccatttagttgttgattgaaaatactatgcattaccaacctagctttccagctagaggcatgaaagaactaatagaatttgatgcaagtggctaatctagcttattaagcataactatgcccttctatgatgaaatgaaagtttgtcttctatctgtaggattttgtgaatttctggtagcattatttctgttctcgttgtctggagtaagatatctatcattttagagcaaacataagagcatgttctatttactcaacatcctatgtttgattttgcagctgtggcaggtcagttcttatcacacaaggcttca

SEQ ID NO: 12582 - DNA, 406 bp, Oryza sativa
  Intron number 2 from transcript LOC_Os04g34570.1 (locus LO C_Os04g34570) derived from phytozome v7.0 (chr-ID Chr4; po s 20743259 to 20743664)
agaaagtaaggaagttcagcaaaaacaaatcttttcctctctttgaataccttgggtgaactttatgatggtaaatttacttgatgccataattctttgattccttgtgcttacgttcagtgcagccaaccttgttatttgttttcttctctcgttgtttggcactgctaccttctttctttggcttcttcacatatcctgcacctgtactatgttccttttgtatgatgtagtcctcttaggaaacaacagtaacatagctgattagttatgcatagtgacatttctcatatccgcatattggaaatcaatgccaaattatttggttgctcatgatgtttactaagattgaggctttaaatggctgattctgtttgctagtgaacacattcttttttggtgcagt

SEQ ID NO: 12583 - DNA, 972 bp, Oryza sativa
  Intron number 1 from transcript LOC_Os03g58910.2 (locus LO C_Os03g58910) derived from phytozome v7.0 (chr-ID Chr3; po s 33535741 to 33536712 reverse strand)
ccctcctgcgcgacctcttcctcgtcgagggcaaggtcagttttgcttgattagctgcagggacaacaatagtttgcaattaattgttgctactatgtatccctgcaaaatttgtatatgttctgttcagtcttaatttgcgtgcaattgctaaattctaaagctgaagtttcatgagaaaattgtagcataggtatgaaattctgcactgtgctgggtgcgttgctgtcgacatatgcaaatttcacgtttctcctttagtattaacttgccatctttgtttatttctttacattgtttcttttgttatataattgtatcacttgctgaatttccatttcttttatgtttttgctataatgttgtccctttacgttggaatggaacgagactacaagtggtacaagttctattcttcttctgaaacagaagaaaggaaaacaaatatcaaacggttgaaactttcttagcctgaaattacaaattgtttcagctcttggtgaaagaattaagcagttaaataaattaccaaagtcaatgttgcatagcatgccttggcagaagatagataatcagttacttatatatagtactgcgattaggtgacgccgtgataggtatttgatgcaaaggacccaaaaaggtggaatgatgtatgatatgggagataacataattctaaaagtagcaaactacttctgatataaaacaagctgaatattaagaacctttccatgcaaacatcattattgtgaaactgtgatattgaattagtttgatgtcgcttatttacaatatgtatcgaatttatttgcttttcctttgcacttttgagtgagcataaagctgctgaacttttgttgttaatatcaaatcatcagtatttggttcaattttacttcgtgatgctgcttatttatttcacatgggcatggccttttttttgtcaggtgaatacattcatccattgct

SEQ ID NO: 12584 - DNA, 800 bp, Oryza sativa
  Intron number 1 from transcript LOC_Os04g56110.1 (locus LO C_Os04g56110) derived from phytozome v7.0 (chr-ID Chr4; po s 33233673 to 33234472)
aagctcaaggaagttatctagattctactagacaagtaagccttttttttttctctgtgcccagttgatctcttcttcatttggttttcatagttcagttgtgttgtgatcttcttctgtgttcctcagctgcaaaccaagttctactggttgttcttctccttttcagtggaatcagaccaagccttttacgtgttcttgaaaaacatcgttctgagtcttgtagacaccataaacaaacacagttgacatgtgttcctgtcatgcaggccacaagtgattcttttgagttctgagatgattttgttcatgcatgaagtcctttctgaagtttattatggtgaactaaatatattttctgtaatccttaaatttaagcacgtggtgtagttccatctgttggcacatttgtaaacttaattcgtatttttttttgtcttcacgccggccgccgggcggctaaatccgtacaaagaataatcgcccacactcacccacacacacacccaaaagaaaaaaaaaaggctccaaaacaaagcagagttgttagttgttcctttcttttctatgaggaaatcaaaagcaaactaactgtgctcagctcagattaattctgaattaatcaaactaatggtggaactggtgaaatgtgaatagtacaaactatcaatgttaccttacaatcaagatatattactgctaattaaaatgtgcaatgatatctctgatttttatgcttgtctgatctatgcaatgacgtactagtacgcaaactccagagtaaagacaagctcaattag

SEQ ID NO: 12585 - DNA, 1001 bp, Oryza sativa
  Intron number 1 from transcript LOC_Os04g21820.1 (locus LO C_Os04g21820) derived from phytozome v7.0 (chr-ID Chr4; po s 12356053 to 12357053)
cacacgtgacgaaggtgcttttttacatacacatgacaacttgcagttaatctgtttggtttgcaaagcttgcaaatttgatttctggtttattttctatgtatcccactacttattttttctgtctatcaactccaaagtactattttgtgataacttatctcgattctcaacggacaaaacagagcagtgtagccttaattttagtagctaccaaatcaatcatgtattatgagaacataatttggagtatgatgtagagggtcctctttaagaggaaatactaaactattttcccttttgatgcataagagtgatggttttattttccattttttttatcatatcgaaaatcttgtaatgaaaaatacacgatgtttcataatattgcacgtgcacatagattcttttacttggataatattatacatactaaatcttctagtattagacgacatgtgttagttgttttaaaattaatttcaacagtgtagcatcattaaaagattgtgcaggaaattaactcgcatcaattttacagaatgaataagatatttttagataaaattgtttacgtttccatctagagaacgaataggtgtcttcagttaatatgtaactttcatatatactagctttttaagttatcattaatggtataaaagatgtttgtttttagtaactatgaagattttgcttaggttctttgttctaaaaaataatttgagcaagcatgaaagtttattaatcgttgtagctaaaagtcaatagcattacatcaactatcattaattttgacatggatattgtactcctgagtcctgagaagcccttaatttggagctcaaattttcgttgtagtctactagcttatcctggcactgcaatagttcagtcatggtttacagtactaactactaaaaattactagtagtgaagttcataaactttgttcactgaaatcaggatattatccagttcaacaaaaggcaaactgctcc

SEQ ID NO: 12586 - DNA, 872 bp, Oryza sativa
  Intron number 4 from transcript LOC_Os06g07474.1 (locus LO C_Os06g07474) derived from phytozome v7.0 (chr-ID Chr6; po s 3592137 to 3593008 reverse strand)
tgtttgagcaatcaccctggactagataatgtatgtacaaggtattttttttattatattacacatttgtactagcagctatactttattatatgtagtgttcccccctgttttataaccattcatgagctacgctcatttttagtattgttttgatgctttaaattccattgccgaaggtcctttataatttcatatgctaaaaaaacatttctattaattaaaattatgatgcgtctttttagaattttaatagaataaaaactttgtaatatttttttggctatgcctttggcatgtttgccggatcaaatggaatacagttaacaaatgctgtcacacatgcattgggtcatttagccctgaaaaattaaaatgcgatgtggaattgcaaagaacgttatttgtactatattgtccaaggtgacttagactattctttcaaaagagctagagcacataatatctatttaagttgtgatacaaataggtactggtgacattgtgagtcagaagtacatttcaccatttttataaaagcagcaaatgagttgttttcatgtttaaataaaggaaaccttgtgaacagagcatggtaagtaaatggccattaaacttggtaaatttgttttttttttgttgccataagagaagtttaattttctttcccatttctatgaatcagatgcacaattgcaaatgttcaaggtttctggttcttaatacaatagatatattcacattcttatactgtctactccattttaatttatttattttattttgaccttcttcaggtttaaccttttgttttcattttttttgacaattatacagggtggtattctgtggtttcataacttgaccgagtt

SEQ ID NO: 12587 - DNA, 996 bp, Oryza sativa
  Intron number 1 from transcript LOC_Os06g07160.1 (locus LO C_Os06g07160) derived from phytozome v7.0 (chr-ID Chr6; po s 3427881 to 3428876)
cgacatccacgtcgactcctccttccccgacgccggtgagctcccctcacccgaatcctgtggacatgtaccagggccgtaagctcaaattctatgcgctcgctcggttttgccggtctccgctcatgctgtccccctctcggcggcgtcagatgatgtcagagttgcgctaggggattgatgcatttgctcgtggggggtgattttggggggctggggaagatgattgtgttgttgttctcatgcaaatgcgaaggcgcattctgcagagattctcagtttctcatgtccgtggcgatgagatgctatctgagttctgcatatattctgttagatacatgacacttattggttgatataatccagttttgttaggcacatgatacttattgttgataatctagtttggttaggcacatgtggcagcaaggctctttatctaaaagagcacagttagatatatatgtaggtttgcttttatgaacgaaaaaggttatagtccattaatgactaccgtttgctaacactaatgcggcatcagataattgaatgccacaaccagttctgtgttgcaaggacagcttctaaaactggctagctgaaatttcaagagatcttgtttaaatgacagtaagcagctcatagtgagtaactggctgtatcgttcgagcgtcagagtaacttgcaagcctggttgttttctttcttcggtttgatgttaaagggatttggaagggtggtggaactgagggacgaaacatctggggtttgggtgctgaagggtggagttctatgaaagttaaaggggggatgaagtatgtcccacctgtccgtaaacttttttgtagtgtagagggggataaacaaaagaaagagcatatttgatctttacaatggtagatacttgaaatcttggttttttcctactatttgtaaagtatattcactgctcgctgttcttataccttagttttcattccacagatcacataccat

SEQ ID NO: 12588 - DNA, 486 bp, Oryza sativa
  Intron number 3 from transcript LOC_Os04g46190.2 (locus LO C_Os04g46190) derived from phytozome v7.0 (chr-ID Chr4; po s 27174209 to 27174694)
ctttatccagaatcaagcttggtaatttcaggagtttatatgtttatttgcctagtgttctatataacatgtcctcatgccttagaagtcagaacagctctgttatatattactttaattggatggctacacatttataagatttaactgatcaaggcaattctgcgtaaccttgtaaatctgtctgtcttgccaaacaacaaatatcaaattgtcaggctatttaccagtccattcggtcaccaaagtaatttgcataatccctcaagaaccccaaacgtctgctactatgcctatcttaatgaaaatttgaatatatcaccaaatatgctattgggcactatagcttcttcccatcacgcatagaattgtgctaagtatgcaaaaaaaagttaccgtaactttgtgagttattttggcttatagataatttgtactttcttctttgcagttgaggggtcatattttgacagattttacaaacaa

SEQ ID NO: 12589 - DNA, 861 bp, Oryza sativa
  Intron number 1 from transcript LOC_Os04g47020.1 (locus LO C_Os04g47020) derived from phytozome v7.0 (chr-ID Chr4; po s 27683029 to 27683889)
actcttcggctgctcatcctcctcctcctcctcaggtcagcaagattcatccggtttcacttggattgtctgggatttggtagttgaagcatttggctattcttgttttgcgcatgctcctagttcgtctgcgtgggagaaaatactgaaaagggggtagttcgtgtgtgtgtgtgagcatgccccattgtttggcattttgttggagctgtatatatgtgtcattggctagaactttgcaatgtcactacctgcttaagctcagcaattgtgcttcagttcgtgcaaccttttgtactaagctgaacttttattttttcctctcctggtacctacaataaccttgtctcagatgcaaaaggatctctttagtaaaaggcactttgcttcatgtagtattattgctgtcagatgctggcaaacattattggggctcggcattcttttctttctcgaactcaaattagcagtttggaagagtgcgtcctacaagtagcaatcgtataccgcaatagtgtgaagtaagttgcaaatcaaatgcatatggcaatctagtatattgacaacttttgccgctatgcaagttttttgggagaacttaagctccccaaatataagttgcacgttttgcggaacttgcattgtccaggagaacccccaacctcccacaaaaactttgagtgacttaacttaagattgatgatttatagggccttctgttccctctaatatagttgcgcatttttgtacttgtactgatttctttgtttttaagacaggtcaagtttgattcttctcttgttctctttgttctttataggagcagaaccagacttgccacgaaggatttgataatctagg

SEQ ID NO: 12590 - DNA, 964 bp, Oryza sativa
  Intron number 2 from transcript LOC_Os04g24600.1 (locus LO C_Os04g24600) derived from phytozome v7.0 (chr-ID Chr4; po s 14121082 to 14122045)
gtcgactgcgaccacgaggtatgtccctctccttcgtcttcgtcttcctcctcgcatatcatcatcaagctcttaagtttcttcttcttcttctcgaattgctagctctcgttgactatgagttaatggaactcggtttgattttaattttgattcgagtagatagaatagaaggaatgacgcagagggatattcccgtgggttgctttgttgtgaccagggttaaacctaacggtttagccgatttgatcggtgcccactgaaatgctgaaatttttcggtccgaaattttcgaaattttgaacaaaatttaattgaatttgaacaaatattattaaaattcatgaaaatatttgaaaatttcgaccgaaataatatcgtatcggagggggtccgaaatgaccgaaatttccaaccctggttatgacttactagctgttgtgttgtccttatcttggtttattctgtcctggttggtgagcgacagaaactgtagagtgaaagcaagttggagactcagttctttctcacttgaagcaagttttttggtgctttggatgagaagtaattattttatttaaccaaatttatcccaaataaattcgattgcgtcttacacattttgtagtagacttcacattttaaggttgtattcttacctcttaggttcccaacctccactctctcatttaccgcacgcatgcttcctgaattattaaacatttttgcaaaaattcctatagaaaaattgttgtaaaaaaaccatattaatttattttcaagttttttagctaatacttaattaattatatactaataagcaatcctgttttccttgcccaaaggagagtcccatcatctccttccgaacacagccttatccacatgttatctttaccatttttaatttcatcaaaaggtgcagctaatatatatgctatgctcttgtaaaatttgcagtgtg

SEQ ID NO: 12591 - DNA, 960 bp, Oryza sativa
  Intron number 2 from transcript LOC_Os06g32674.1 (locus LO C_Os06g32674) derived from phytozome v7.0 (chr-ID Chr6; po s 19001484 to 19002443)
tgcgcctataatcaatagtaagtgtgttatctaaatatacacaatagcatgacacattccttcagtacttaattaactttcactatattaatgccgcagtgcccattggatccttctggtcataacacctaagtggagtacatatcactacctaaactatgattggaccccaattcaactagcgatagatgaagcgtgggcccaatacgtgtaaagaggaagcctcaggaagacaggacatgacaccctcatccacaaataggtgaccagtgcggattccatgtgtgccacaacatgcaccttctgtaaagagaaaagttgaagactttggctgagtttgaggtcggtggtctcttgtgatagactaactacattttagtacttatatatgatcgatcaactaatctgaaattatgacaatgtagggcacaataaccaagtctctgcctaccagctttgaggaggttcgcgaggagatagccagcttcatcctccgcgaaataattaaccccaaaggaatgtttaggcttaaactaaaataatgaataatgttgaacttttatgtttaggcaattgtgaacacttattatgcaactgtgatgatgtaactgtgatgcttatatttatgtatatatttcatatgtttatgttaagacttgctaaataaatatttgatccaattaactccgttttgcaggtgaaatatgataaatatttgaatggatttgaaatatgtgaatggatgtgaaatatgtgatggctgtgaatgtgtggttgtgtgaaatatattgatgtctgtgtatgtgaatgcatatgtatatgaatgggtgatgctggggagctggggatattggatatctgtgtttgtttctgtcatttctgcagcgggcatggctagcaaaggcctgagactagccaaaaaacaaaattttttttttttgtggattatagtcatctggg

SEQ ID NO: 12592 - DNA, 996 bp, Oryza sativa
  Intron number 1 from transcript LOC_Os05g06050.1 (locus LO C_Os05g06050) derived from phytozome v7.0 (chr-ID Chr5; po s 3031346 to 3032341)
caacgccgccgattaccccgtcgtcacccaggacggtatggtcatccaaaaatatcttcagtttttttttctttctcagaatttctcgtctctatttatatggatcatatgtattcaagtctcatttctgtccagtatcaattcaccaaatgctgcatttgatttgcattgccttgtttcattttgatcagaattggccactttaatttcatctatgtatctatggtaaaaattaaaagctacttttaccagctacatttgtatagattaaccacaatcaaatggagtgtccaattgtccttatttgtatagattaacatcaaccgaattttaaacaaacaggcaacagcggatattttgcttaggtcctagtgccttttactcacgcagatcttgtgtcatttggttatttgttgccacttgccaaggtagtaggtagagcttcatatgtttatgcattccaagtaaaattgcatgttagaagtaaattctggcccctctcatcagtttgttttgaacttttcttgtctctaaagtgaaatagataatgcacatgccggaactagttttgtgaaaaagaaaaacgatagggtatcactgagcgactaacaggaatacgtatgagtagttagagccatgaggatggtttggaaatcatgttaatatatgtatgcatttacctttataatatgggggttctgaattcatagtcgtgtactcttcaataataccacatccattcatgaaacaagtcaggatttgccatccatttcttttggcatttgaggatttgaaattcttccttgtctgctcaaaagacagaaagattgatctgtgaaactcttcacagctcacgacttatcaagaacatttcacagttgtattacaagcatgtgttccttttactctcatttttaagcaagtggacatacttttatgcaagtttgttctgatcatggcattcttataccttttgtcctattgcagacttgattt

SEQ ID NO: 12593 - DNA, 826 bp, Oryza sativa
  Intron number 1 from transcript LOC_Os04g44930.2 (locus LO C_Os04g44930) derived from phytozome v7.0 (chr-ID Chr4; po s 26401132 to 26401957)
ccgcagccaccggagccctctccaccacgacgtgaacacggtaatcattgctcaatccctttccttcaatcattacggttcaaattcctgattctgtgtattaattgtacggtgacatgtgaaaacggaacagaacatgcattttattaacaagagattctggatcctttttctgcgtgagaagagatgcagcggccatatgattaaagtaacaaaatctgttgtaatatttagctatggccatggaatcagagcttggaagctgctaatttgtgtgttcttaccatataaaatatattccaccttttgtttgcttacgggagctacatttagcactgcatttctcatgctcacagttacttattttgataagatacaatggaagtgagaaattagtgttaggtagttttggtttttccttaattctttactatgcccaatataaaatgcgcaaaattcgatgctaatgctgtgacgacatttgacaatacaaattaaacacgcgcatataaataggacagatgggtggtatccaaaaacatataacatgactttttataaacattgctttaaactatattcatgaatgtaaatttaagcagaacatataaatagtagatacattatttctttaatgtaggaaacatctagaaaatgctttattatatatttccgtcctaaaaatacatctccatttgctacttacattcacgttttaagcttggttttctcatctactcctaatcactgaattcatttcttaatgaaaattcaacttgatttttgtgcagcactttttttttttttttttgcaaggagaagggca

SEQ ID NO: 12594 - DNA, 620 bp, Oryza sativa
  Intron number 1 from transcript LOC_Os06g05590.1 (locus LO C_Os06g05590) derived from phytozome v7.0 (chr-ID Chr6; po s 2531635 to 2532254)
tccagcccttcccctagctgagcagattgctacaggtttctctccgaattcgtgcttgtttttaactgatctgttctagtgttctggtatggaacgtgtcagattatttatttatttatttattttgcggggaaacgtgtcagatttaagactagaaattttaatgcattggtccatatgtgcatccacaatgcatctgtatacaggtcttagcattccattcactaccccactacaaagaacacattttagtgtgctaagtacttcaaattcaaaaaaaaaaaaaaccgccagtgtatgaaagaatgaaatgatatgctttcattcttttcctgtggaacaagaagcccctttccctaatgaaaggaaaatgggaatgcgccaggatttaatgatgctgctgctattgatgatagttttagaagtgctgttgatgatactgattacttgaaagaatcatcctttctgttctagcctcatcaaacacagaaatagtgtaccccgcaaaaaaaaaaaaacagaaatagtgtaaatagtgtaagtgcttagtaattttaagtgcagagtagtttgttaaattctgaactctttgtattttcttgttagatttcaagtcttgc

SEQ ID NO: 12595 - DNA, 998 bp, Oryza sativa
  Intron number 1 from transcript LOC_Os05g32850.1 (locus LO C_Os05g32850) derived from phytozome v7.0 (chr-ID Chr5; po s 19170677 to 19171674)
ccgagaaggcccaggctggtatgatccggaaccctagccgcgttcttctctcctcccccgtgtcgtgatcgatctggttgcggtttgaggagccatttctaggagggtcttatgttggaacagcccacttgtgctcgatctgatcgcaattttgcgggcgattcttatggggtgttgagttgggatagcaggtgctatgttacgtcacattggggattcacgatatctgtaacacgccatgattagtttctgctattttggaatgaggatctattgctgttattttgctaaggatttgctgactctgatcgtgccggtcatactctagatcctctgtttgttgtaccagttgtatttattttctattttaagttaacagaagcgaatatacatcaataatgctgataatcagaaaaagtagaacacacaaaagggtagtaaggttcctctgccaaaaaggtagtaaggtgataagaaaaggagacgttggtgggagttggctttattcaagattcacctctttctgggggagatataaaatgatcctttggtcagtgagaattggaactatgcaacggataggcatagagatgtacgcgctagaagttcctgggcctgccatgttgcttgtgggtagcgtgcagctgagccttttcacacataagatatgatccatagttttttggtgcttttgtttgtactactaattttctgtgaaatgatctagttctgtctgaaatgcaatatgggcattttagatgttcaccatttgatctaatgtatatgctaaaattgataacttgatatggtagtagtgatggtgcttgtgtagtattattacaggcactttcagcacctcaataactcgttttcactttttagcagatgctactgttgctactgtattttcatggatagttctgttgttgatcgtttggctacttgtatgtcatctttttgtagctgccatcctcccagttgttcaaaagcagcaccag

SEQ ID NO: 12596 - DNA, 855 bp, Oryza sativa
  Intron number 1 from transcript LOC_Os04g47020.3 (locus LO C_Os04g47020) derived from phytozome v7.0 (chr-ID Chr4; po s 27683029 to 27683883)
actcttcggctgctcatcctcctcctcctcctcaggtcagcaagattcatccggtttcacttggattgtctgggatttggtagttgaagcatttggctattcttgttttgcgcatgctcctagttcgtctgcgtgggagaaaatactgaaaagggggtagttcgtgtgtgtgtgtgagcatgccccattgtttggcattttgttggagctgtatatatgtgtcattggctagaactttgcaatgtcactacctgcttaagctcagcaattgtgcttcagttcgtgcaaccttttgtactaagctgaacttttattttttcctctcctggtacctacaataaccttgtctcagatgcaaaaggatctctttagtaaaaggcactttgcttcatgtagtattattgctgtcagatgctggcaaacattattggggctcggcattcttttctttctcgaactcaaattagcagtttggaagagtgcgtcctacaagtagcaatcgtataccgcaatagtgtgaagtaagttgcaaatcaaatgcatatggcaatctagtatattgacaacttttgccgctatgcaagttttttgggagaacttaagctccccaaatataagttgcacgttttgcggaacttgcattgtccaggagaacccccaacctcccacaaaaactttgagtgacttaacttaagattgatgatttatagggccttctgttccctctaatatagttgcgcatttttgtacttgtactgatttctttgtttttaagacaggtcaagtttgattcttctcttgttctctttgttctttataggagcagaaccagacttgccacgaaggatttgataa

SEQ ID NO: 12597 - DNA, 596 bp, Oryza sativa
  Intron number 4 from transcript LOC_Os06g16300.1 (locus LO C_Os06g16300) derived from phytozome v7.0 (chr-ID Chr6; po s 9289076 to 9289671)
tgctctgtgggccacctcaagagcctccagtacttgtgagtgcagctccacagtgcaaactgcaaactgcaaagcctttgaatgctgcctgctcccctttttagacaattttcaagcactgctgcactgttcataatgatttggaattatgtaccgaggtggtttttttttccctcgagtggatgctcttctcgtttcttccacatcgaaatatttatattttttttataaaaaagcaaaataaatcatcatgtgatatatcacttttaaaacatataagttcaaattcaacacatataaatttaaatgaatataacaaatcaaacgcttagctaatatataattttttaattttttcaacatttagttcttatatatatttatatttttaaaacaagattcataactatttaaatggcatgcatgaaactagggatatcatcttaacagagaaattgactttaccatatactattttgtatacatagttatagttgtttctttgttgccatgctaagttgggagcctgtccatctattgctctcttgtaactttgatcaggagactgaacaacaacaccctgtctggtccaattc

SEQ ID NO: 12598 - DNA, 452 bp, Oryza sativa
  Intron number 1 from transcript LOC_Os06g42340.1 (locus LO C_Os06g42340) derived from phytozome v7.0 (chr-ID Chr6; po s 25437240 to 25437691)
ggggagagtggagcagtgtaggaagttggaacaaggtagtaaaggatgaggagatctagatgtccccataaaaatatttgctactctctccgttttaggttataagatattttgactttggtcaaagtcaaactgctttaaatttaactaagtttataaacaaatatattaatatttacattaccaaattagttttattgaattaataattaaatatatttttataataaatttatcttgggttaaaaatattactatttttttctataaacttggtcaaacttgaagcagtttaattttgatcaaagtcaaaacattttataacctgaaactaagggagggagtagcttattttatcaacgcataagaaatgaagaatgatccggacgaatcaaatccaccaaaaaaaattaagcatatattctccctttctgtacattgttgtcagataa

SEQ ID NO: 12599 - DNA, 715 bp, Oryza sativa
  Intron number 1 from transcript LOC_Os03g54920.1 (locus LO C_Os03g54920) derived from phytozome v7.0 (chr-ID Chr3; po s 31215484 to 31216198 reverse strand)
tcgccgtcctcaacctcctctggtgcttcctgcaggttcgctttgctcgccttcctcgttcctcgtcttctaattggatttggtgggtcgtggaactgcctctgcttggttgcttgattagaagtatcgatttgatggctgtgacatgatgcgtgttgttctagtaacgatgagcgatgggtagggttgttcctgtaaggtagggtaaatgattttgatgtgacactagtggaataacctattggggcagaataatcagtgagaaggttgcaggttctgaaatgcttattattaaccttgtgatgtgattttttttccgctgggtctaccctgtgaattgtgttcctggttctgatgaacagcaatgtgcggacatattagtatttgattggggagtagcacgcgtgggttgatgaacagtgcaacttttgtatgtttagttaatgttttgttgtgaagtagaataagtgagggtggaagttaggtggataggtgtgtttcattggacaagctgttttggtgaacttgcatttagtttttttcttgataaaacttggcaattaagcgggtggaggttgggttgtgatttgtgaactggtgatggaaccaagcaagttttgacctattttaattctatcatatgctacactacatattgttatttctcttattcttgtataacagcctttttatttctttgttggcaggcgtggca

SEQ ID NO: 12600 - DNA, 975 bp, Oryza sativa
  Intron number 1 from transcript LOC_Os06g10250.1 (locus LO C_Os06g10250) derived from phytozome v7.0 (chr-ID Chr6; po s 5258001 to 5258975)
gtgaggtatgatgctacagttgagtgagcccttctcatttaaagccttgcataaatttggaaattccaatcggtgtactccctctctcttaaagaaaaattgtatgagtgcattatttagctgtggatattcgcgtagtgaggagtgatgatttttggacttttggattttggtcctacagatacccaagttatcatcaatggttattaaatattttccgcaatttagccataaaagataaaaaacagttacaataaataaatctagccaatactccgtatgatatagagtggtgaacatatgtatcaatatgatagtagtatctgtacttctattacatgctatgaatgtcttctgtgtaatagaaaaaaaatataaagcctattgttgatcaaggtacaattctaccaaaacctcttattgtttgcttgttacaagtttattagacacccaaaattgttgatgaaagtacgatagctattatcaaagcttcttgtcgtttgcttgttagcttattagttggaaccaaaaaataatatctgaaacttaactttagatataatgttagggtttttttattatagtttatttttcaatatttctttttaaaccactaatcacgtaaatatattagttttatctttagattattttcgattgtttcattaatttttcatttcgctaagatacatatttgacctcagttttcgttagcacccttttaaactgctaaacggtatgtttcatatgaaaattttctattctatatagtagttggattacaatatcaaataaatatattttctaactttctaaccttaattaattgtgcgttaatggtttactcattttgcgtgcgctaatttaattttcatcatcatcccttcaaacggggcaaattatgctcatagctatttcgccaacgacctacaatgtgcagggtttaccaaaccgttctgggtggagttagcgcca

SEQ ID NO: 12601 - DNA, 554 bp, Oryza sativa
  Intron number 1 from transcript LOC_Os03g62820.1 (locus LO C_Os03g62820) derived from phytozome v7.0 (chr-ID Chr3; po s 35531906 to 35532459)
catcaagcttaaccaatgtaaacaaagaaaaacaaatcgaatgggatgctcatcagtcgggataacaccagataaaatatgacatgctcacagccatcaagaaagaatgttgatggcagcggcatgcatgccaggagatacttaacgatcttctccaccaagaaacagcacaacccatgtcataattaacatgcagcatggatctggctaggccattgaatgaagagtaccctgagctaaatcttagcaagagggaaatatattaggtacgaataaaggttttatcctaatgaaattatgttgctaggctatcgagaaaaataaattgtatttaccattagcttccaggtgttgataatccatcaatatatgcatatttccatccaaatagttcctttttgaatatcttctgttgttttttgatatcttccactaaattgatgcaagaggaaatactaatagtgattctcataggtaaattaaaaacatctttttacattgcactaactttacttgacaactcatatgtttttaatatgcagagctagctgacg

SEQ ID NO: 12602 - DNA, 316 bp, Oryza sativa
  Intron number 1 from transcript LOC_Os05g39600.1 (locus LO C_Os05g39600) derived from phytozome v7.0 (chr-ID Chr5; po s 23188892 to 23189207)
cgctgaagcagccccgcgtcgtgtccgagatcgcacgtccaccccctcgagcctcatctttcttcttatgcttacgtttaccagccaaattttatacttccaatattttgaggttttttatcaaagttttttattctttgtttttatatcgctaagaacacgtatataaaagttttattcacatattacttttcgtttgcatatatgctttcgtttccccgatcctttgtttgcccacagtgacatcgacatgatcgaagcttctggcgcgtgattttcagggcgggatcatacttgggccgtccgtgctgtcgcg

SEQ ID NO: 12603 - DNA, 645 bp, Oryza sativa
  Intron number 1 from transcript LOC_Os06g47360.1 (locus LO C_Os06g47360) derived from phytozome v7.0 (chr-ID Chr6; po s 28706639 to 28707283 reverse strand)
cgaagggaccgccaccttctacaccgtttacacccgtacatctccaaactgctccttaattctgaatgatgtgtttggtttgttgtcggaaaaaaagaacttgccaataataccaaattttgataggagaaaagctctcgccaaattctctgatgagagttttcggattgcagagtgcccaaattactaaaatttgctagggccatgaacttatgatggtaataataatgtgtttggtttctgcttgtaaaattttgataatgctaaaatttagtaaagatgaaaataacataaaccaaacatgtggtggtgtttgtctgtttgagatagattaagataaagatgatattagcgcacacaaacgataaatctattagcgcatgaataattgagtttcaattattacaaacttaaaaatagatctatttaatagtttagtttttgtaaggaacttaccgtttagcggtttgaaaaacgtgtcaatagaaaccgagataaaatttatacatcttaaggagaaaagaatggggccattggacatttggacagtcttctactattccatttctggaacatattttctgtagtaacttgtgctgttgcggtgcagcgtcggcgtgctacgggttccaggaccaggggacg

SEQ ID NO: 12604 - DNA, 822 bp, Oryza sativa
  Intron number 1 from transcript LOC_Os05g38530.1 (locus LO C_Os05g38530) derived from phytozome v7.0 (chr-ID Chr5; po s 22538856 to 22539677 reverse strand)
aacccaaccaacaccgtcttcggtacgttaccctgcatcctcccgccctccctctccctgcttccacttttgcttgcgccggttgtgactgtgaacgcgatctgcaccgtggttttttagttttggatgtgtaaaagagtgtactagatcgatgagaatatgatgccctgttctagtgtcctctggtaattatgtttctgtcctctgtaatctgtatgggttggagtagctatggaatcagttctgcaactccgtggtttcttcttctgaatagatgtgttaggagaggttctgcgatttgttcacgcgtagctaaaagttgagcatatgttacagatcaattttacttgcttactgctcgtgccaattcccaaaggagttaatatgtcaattttgctttggttcattgtgcacaggcatgttgttaggtccactggaatagtatatgaacagtttctcgaccaaatcgaaatcgtgctttttatttagtgaagatttgggtctcactgctgtgtagaattttgatgaatgccactaaaatagatggagattatgtttgcttcttggatttactttagtagattagatttggaattttctgctgaatcaatggaccaatcgaactcattggagattatgtttgcttttatatatttagtgaagattgagtctcactgctgtagtgctgtgtagaattttgataataaatgctagttgaacagttggaccattgtatttgctttgttgatttgaaattttctgctgaatcgatggagcaatcgaactcactggtgttgcgatttttctcaatctcaaacgcag

SEQ ID NO: 12605 - DNA, 1028 bp, Oryza sativa
  Intron number 1 from transcript LOC_Os06g40630.1 (locus LO C_Os06g40630) derived from phytozome v7.0 (chr-ID Chr6; po s 24223030 to 24224057)
tccgccaacgaccgcgtctccggcaccttcggcgtgtaagcataatccccccctcccttctctcctccctagggtttgcactagattcgccccgagctaagcttaatctcacttgcaactgcgtctcggtagggatcgatcgcaggtagttgtcggatcgtctctgtgtggattctggattgtgatgatctccgctatgtgtctactaggtaggttaggttacatctgaagactggatttgggccaagagttggaatcatcgtaggattggaaaaagcttctgacgagttgttattgtgctctaaagcaatttgcccaatgcccagtgactaattttttcaccaacgatctcaaattaaaagcgtacaagttctgtgattagtgacatgcgtgtttttggaaaagctgacatgaagattcatgagatgttaagagttaattttgaagttactccctccgtttcatattataagttgttttgagagaaatacccaggaatcttccaactagccggcttgggttcgaagcctcaccccttctatttatttgatattagggacttccctaatattcgtgtttttttataagtcattttgacttttttctggtcaaacttttttaagtttgaccaagtttatagaaatttatagcaacatttccaacacaaaacaaacatattaccaaaatatattcaatgtcatatttaatgaaactaatttggtgttgtagatgctgctaaattttctataaacttggttaaacctaaaaagtttgactgggaaagaagtcaaattgacttgtaatatgaaacggagggagtagtatttagttagttgtaaagcaactaggaagtgggaagaccgagaaagagtgaaaaatggtagtgttaaaagatggaattgacttaacccctggcctctaggtagttacatgtttcaatttgctaatgaggtttattttctctactgatggtttgtgattctatttgtctagggtatctaaaggtgttctagggttgccaggcagct

SEQ ID NO: 12606 - DNA, 1023 bp, Oryza sativa
  Intron number 1 from transcript LOC_Os05g09410.1 (locus LO C_Os05g09410) derived from phytozome v7.0 (chr-ID Chr5; po s 5279500 to 5280522 reverse strand)
aagaaaaatcttttcgatcaggtttcatgccttcacttttgttcctttgagaaatgagatcgtaattaattagtgtattgcactagacactagttgatgttttattgcttctcagttcctgagctgcaatattagatgagatagttaactaggagagagagttagtttcttcagtttttgtcttacatgtaagtatataacaaagtttgattgcacccttggacatcccctgagggcacactgaacccctggagaaaagcattatcaatcaatggtcagatatgtggtcatgtggagcttatatcattcatgcactctgtttcaattgtgaatttcatttgcaacagcataactcagttttgtagtgtagtctactagtctgggatgatgcaataatgctcacttagcagttggcacccatcttatcttatctaaaagttatacaactttcttttacatcacatatgcatgcattatgataatgagtttaagcagatcgtcaaggatgtaatatgccatagacaatagcaaaccactttcttaatttcctttgtactattccattgagaatatacaaaaagtcaggtctttcaacctttagagagtaatcatagagtagcatcaatttgatgatacattagtatctcctaggcaaatactagatttcctttatacttaactagggtgaagcctactccctccatcccataaaaaaccaacctagtaccggatgcgacacatcctagtactacgaatctagacatatatacgtccagattcatagtactagaaaatatcacatccggttctagattcgttttttatgggacgaagggagtaagtcacttgctggaacctgactttttttttaatctttgactaattatatagatttacccttgtaaattagtacacttatttgtattatatggactgcacaaaagttttttttttggttgtgtatttcatgcttctttcttttgcctataatctacctcgtggttttcctgcagggttaccttg

SEQ ID NO: 12607 - DNA, 739 bp, Oryza sativa
  Intron number 2 from transcript LOC_Os06g24250.1 (locus LO C_Os06g24250) derived from phytozome v7.0 (chr-ID Chr6; po s 14197035 to 14197773)
tccaaaagcatctgaggtaaatagctcccttctaatagcctgagttgtgccacaaattatctattatctattctcagtgatgattcaatagtggtttggcggcatatgatcttagaaggaccacttctttagacgtatatcgcattgtgtcaaaaatcattgtggattatcacacataataggtagggtaagtataacaatgttgaacattgttcttcaatcattggagcgaccccccaccccaccccctaggaggttgagaaattgaccataaaagagtgatggagttgctctcactatttcagtagtatatatactattacacaaaatgatttcattttcaaacctcgttgctcgatatggcttgactccttcctcttttgaaaggtttccagttggtacagttttttttactacaatttatttacaaaacattctattttactactggaattacttcacaggttagattatacatgcctttcaaatctgtatgagtcatagatccatgcaaatataaatgtgaattttcatgttgcaggggtggctcataatccggctgcaatagattttgatgttgtatgttttcatttaacattgtaaaatgatgaatgccttctttgtgatgttgatcagggataagatgcccatgctatatatgtttctttgtcatttgagatcaagcattatgttccatttacgtgaactatttgcagatttattaacttattgaagtaca

SEQ ID NO: 12608 - DNA, 1040 bp, Oryza sativa
  Intron number 1 from transcript LOC_Os04g40680.2 (locus LO C_Os04g40680) derived from phytozome v7.0 (chr-ID Chr4; po s 23961186 to 23962225)
tacagtttcctgtccttgatcaaactaaaaattgaattttctcatctttgcaaagtttgcagaaaagtttgtaagttttgagttcttttctctttcctttcaaaagttgatacggtcatggttccttttttgtgttaaaagaagcacgcatggatattctccaagttcttttgtaagcacgataaaggcttgaggactgaagggtggcatgcacaatggcactccttttgcacagttcagttgttgccgacttgccgtgtagcacgtcaacatagttcagtttgcagagcaatgcatcagtaaaaggatgctgctagttcagttgcttttgattttagatattgatgccatatgcataatatcactcctagtttattttcgttcgaatttagttttgtagtactacctaaatgccttctgatatactaacttctgaaagtgaagtgcagctccgaatctctgacgagaactataaaccattcaccctcttgtggtgtttacacactaaaattcactcgttctaccaaacgcttctcccaagtgacccttgtgagctcttgagttttacttaccacatagatatatcacataaaacacatgtgtccattagaaaactagcatggtcagtcaccagcttcataaatcaaaaaaaaaaaaaaaactgacaagagaacaggcagtaccgtgtactgttaccttctccttcccagcaactccatagcccagaatactagaggttatggtggtgttcttgcaatagaaaacacagaaaatggcgtggacatgtctgaatattgatcacagatggcggccgtctaccttccctgccaacagcacacatgatgtgaaggaacctgacctgaaccttcctgcatttcatttgctacgtacaaaacattagtttgtttgtttctttgttagaacaacaccaaaattaatcctaattgttgtgctggtttggattgatcatcgagatctaaacatgcgatgttgcattttgtgcaggtgagctgaagacagtagtgtctatagtgacaggg

SEQ ID NO: 12609 - DNA, 521 bp, Oryza sativa
  Intron number 1 from transcript LOC_Os03g46480.1 (locus LO C_Os03g46480) derived from phytozome v7.0 (chr-ID Chr3; po s 26290819 to 26291339 reverse strand)
tcgccgtcgctcgtcctgctgcttccgccgcatccgtacgcacatcctctttcccatctctctctctctctctctacccacgcactttttctcgaagtgcgttaaccctatcttctgttctagaaatttgccttttaaccttaatactagtaacagtttgatggttcccgaaaaggtttgggggttcaactgaatccccatgtcccatgttagatccgctactgtgaaaaaccagattggctgacatgagaaagaggatgggacaaaagaatgtaaactgtatattgatgctgatcattgaattgtcacattatcagctttgcagcattatataaactgttctatgagttttgatcgttttcatgtgatgctaagccactagacattcgcatcccttgcaaataagtactttttgtgattttgtacatgttgagaaattagaattattttctgtttctcctgtccttttatttattgttcattttgttattataatgctgcagctaccaagtaagagagta

SEQ ID NO: 12610 - DNA, 622 bp, Oryza sativa
  Intron number 1 from transcript LOC_Os06g35330.1 (locus LO C_Os06g35330) derived from phytozome v7.0 (chr-ID Chr6; po s 20598984 to 20599605 reverse strand)
ccggtactagtcctaggaaacaattcctggtacccacagtcaaccgagatacatcattgcaactaaacatagtatagttaggttatacatttagaagttacatgttcagagcaactcctgaagtgaaaccgtcaagcaaagaagcaataatggaacctagcgcaactaaacccaatccacaagcaatgacttgggtttagtacagaaatgcggaccttcaacttcacttcactttgctctccctggggaaatcaataacaattgagtacatacgtacttagcaagccatgggaaatgtgagtatgcaagcttcaaagaagggttggtttggtttcgcagacttttgaaaacatttttcaaaaggacaattgcttatttgaccccgttttgaaccgtaactaccaatttgaccctactttttgaagtttgcttatttgaccctccattttagaaacaaagctcccgtctgaccccctttcgatgactccgttagggttgaatttaaaaagaaaaaagaaaatgcttctaatattcctaatgtccaaaataccctccaaaccctatcctttcactcttctctggtttagggcgctctctctcgtgcaaactgcaaagtgtgcgg

SEQ ID NO: 12611 - DNA, 637 bp, Oryza sativa
  Intron number 1 from transcript LOC_Os07g09150.1 (locus LO C_Os07g09150) derived from phytozome v7.0 (chr-ID Chr7; po s 4774461 to 4775097 reverse strand)
cacccaccgccccgtccgctggaacttctacaccggtagatccatttgatccctcttaagaaatttcttttctgttcttgattgattgattgattccaacactattgtaaacattgtagtagtgtagtgctcactttgtattcctgtaatttcttggtctggcaatgtgatctgtttcatatggtctagcttgctctgcagtttataaatttattcaattggtttcttgagtctcttataagcattatgatgattctaagcaatatttatttgataatagagtaatgcagtgttttgatacttatgtgcaacattgcaaatgccaagcactcactattagtctctgtctctagttttgtgaaccagttaatctgatgattgatatggtcttgcactgtaatttgtagtgacgcaaccagtaaattcagtccatttcttgaatcattgatgctgtattgttatgttcctatgatattcttgtgcaaggatacactattatttctgtgatcaatttagtttggatatgacactgccctttgctttgcggaaatgcagcctaaatgtcttcattggttcagttcgttcttgattcagaaatgcaatgacttttgtttttttttttttttttttcccaggg

SEQ ID NO: 12612 - DNA, 922 bp, Oryza sativa
  Intron number 1 from transcript LOC_Os06g33330.1 (locus LO C_Os06g33330) derived from phytozome v7.0 (chr-ID Chr6; po s 19414580 to 19415501)
ggtcctcgccggcggcggctcgctgccttccaacggtgagatgttcttgggatcgatgctgttgttgctttgctccttttcaaccgtttgtttttcttctttttttttgtttctttactttttgggttgtttctcgtgacatggaaacgcagctgaaggaaaggaagtactctagtagcagtactagtggaggagtattagtgtgacttttcgctctcaatttgatattttggcacaaattcagcatttttttgatcgaattaaggggattcggaacatgaaaagaaattgtatatatcttttttggtaactgagaattttccattgattgaacttgaagatggagggatcaccggatccttggttaaacaagggaagaaaatgctgaaatgtttattacacatgagagtaaattgtaaatattttcttcttcgataaaacgatccaatcatttctgaatgagagggttaatttctcccttcttatcatgttcgcgtgatattatagttaattactcccgatatagtttattgttcaggtgccaggtctgtggacctcagtcttgattcttgtgatttgtgtctgaccccagatgcagtttgaacaataggtccagtgtcaccttgcaatatttttgagcgagagatgactcctgatgactccagctgtaaggctttgattgatcactttcattagtttagtgaaaaaaaaatgaggttaaatcctctatggaagtgtcggtgtgggatctggagctatggaagctttccctttttaatatgccaaaagggctctctttgcgtgtaccctcaatttgttccatactactacatgtttagttacatatacttatagtattattccctttgtaatttaattaccatacatttcctgataaatgcaggaagttgtgatttattcc

SEQ ID NO: 12613 - DNA, 999 bp, Oryza sativa
  Intron number 1 from transcript LOC_Os03g48471.1 (locus LO C_Os03g48471) derived from phytozome v7.0 (chr-ID Chr3; po s 27605614 to 27606612)
caagaggatatcttgattccttagaaattggacaggtaaagaaatttctggatgagttacgtaaacacctaaaagatactaaacctcaattccaagaaattatatcttctagcaagacattcaccgaggaagcggaaatccttttgaaggaagctattcaggaacaactcgaacggttttcccttcaggaacaaacataaattttgcacgtctactcttgttagtagaagtagtagaggagaaatcgttgagaaagatttttcatttgaatcatgcaaaaaagttttcttagtttttagtatagttatttaaagaatagatagaaataagattgcgtccaaataggatttgaacatataccaaaggtttagaagacctctgtcctatccattagacaatggacgcttttttcatattttcttctttcttttcattttttatcggaccaagagaaaaaattgttagaccaaaactcttttaggaaagaaaaacaaatgcatatacaaatgtatgatgcatatatcataaagaaggaatatggagcgggtagtgggaatcgaacctgcaaccccacggttatgagccttgtcagctaccaaactattctatcccccaccgcccacagtccatcaggtatacgggccccgcaggcatccacggtccatcaggccttcacacgtgaccatcgggccagagatgttaacctagcctagctctgataccaattataggatcgtaaagggcctttcccaccccaaaagctagcctttgaggtgaggaaaagtcctttacgatcctacatggcaaacttttccttcacttgaatttctccattccaaacttaaatacttaatctaattgttttctctttcctaatatatgtcttgcattttcttttctcttagcctatatcttaaattacaccatttaagatctaattcatgttcctcattcttggtttcagattgctcaaactacagtggacattaaccttactgc

SEQ ID NO: 12614 - DNA, 710 bp, Oryza sativa
  Intron number 1 from transcript LOC_Os06g40550.1 (locus LO C_Os06g40550) derived from phytozome v7.0 (chr-ID Chr6; po s 24174926 to 24175635)
gccctctccctatattccttaaggtgtgtatatctatctcttcttccatttttcggtatgcgcgaaaacagatcaagtttatccttgttgatgttcaagaaagtgttttaatccctcgtttatggttatgaaaaattatgaaaacaataaatagattatccctataagcttttataggtaagtggatacatatgtgcatgtttgtaggtatgtgaaaagattaatcagaatgcttacacatgttgatgttctccctatgtagtgtgtgtatatatgtgcatgtttgatgtttgtagcaactgaacaatttagttctactaagcagagtttgaaaaagatcgatattactaccaggatttattaagatactaaaggttttaccgtgattaatcatgaaatcatgaaaaaaagtttgtattaattatttcttatgcattttatagagtctaattttgaactcagagatgcaaaaaatgccaaacaaaggaaacgacctgaaatagacatacttaaggagggaaggtacaagttagttggttggcaatttgcatgtctcattgctcaacagtttcttatctaattgcaaaaacttcttgcatggtgtttttacttctttggcatgcaatatagctaacaaaaaaggagcaaattcctggtctaaatttttgcttgatatataaatatttttttttggaaagtgcagtttgaga

SEQ ID NO: 12615 - DNA, 832 bp, Oryza sativa
  Intron number 1 from transcript LOC_Os06g32379.1 (locus LO C_Os06g32379) derived from phytozome v7.0 (chr-ID Chr6; po s 18838624 to 18839455 reverse strand)
accttacaatcatttcacccttcaccgtaactcgggtaaaacggacttaactattaactctatttctctattcttttgtactgttaattaatgttgcaatatttatttctaaactccccatctcttagttacgatttcacaagcaaatttcttatataaccgccagtaaaaaaaatagagtaccgctataaaaaatattttttctaagtagtgcgtggcacattacaaggatttggccgcgtccagttataaagtttgttgatgacaagaagttgtacgttagtcagaaacctgcattagcttgcaaatacccaatcctcatgttctcatggatcgctactgttgtgctcgagtgggctctaatgctactgatatgtttacatatatgtacctatactaacaggatatttactagatgcttccaagttaataaaaatatctagccaattattagctggatatgttatactatcatatccattgatcactaaatctacgtgtgtttgttatagacaatactaaaatctgtctatcctaccccacttctgaaacccccatctacttctaaatcccatctgctctgaatactgttccatcagctattttcgaaataatgtcttaaatttctttatcaaacttaataagcagtattatagccgatgaggcatgtttagggtcttttattctttgatctatccagtctatagccgatttggtctaactccatcggctgagacgaccaacgatacgctatcagccgatcaactatcggctaactctgcttctatctttcttgctgattgcagaatcaaatcagctatcaagcccttga

SEQ ID NO: 12616 - DNA, 1041 bp, Oryza sativa
  Intron number 3 from transcript LOC_Os06g02028.1 (locus LO C_Os06g02028) derived from phytozome v7.0 (chr-ID Chr6; po s 588119 to 589159)
acaggcaccgtgctattggagagaagtatacaaaggtatcacaggaattaccttctcttacatccaccccatattgctttctctaggccttttttcaggggctaggatggtgagggatcctggccatccacctgattagaataactttcattcacttccatattggcccatccaaacaggccctaaggttcatgccctctgtcaggcatattttgaatgtaccttttaagaatgaaccttctaaatatggatgtggtgcagtgctcaggtcacttctctagcgaaactgtgatgcttcattccatttagtaagaatattgttactgttcaagatttgataccatggagtgtctgtgtctggtatggatcagcacacttttctggtgtttgatcaatcattgttagttgctataatgcttggactttatattaagaaatagaatagattctttatgacgtctaggaataaatcgtagcagggtgctaactgaagtatgttgcttttatcttcttcttttttttgcgggatgttccattgtgagctttacgctgagcactggtctgtacttgtaatagagttgccacacacagcaagaaagaggtttgttcttgggaagtatgtaggttaatttgtatcaaggcgacaggggtggggagttatgtggggattatagtggatattcagttctttgaaatgacttgtcctcctcagtgattctctgggacttcatgttttggttcaggctattttgttcagaggttttgatcttagcgaaactttatttaggaacaataataagaaatagggccttagaagtcataagtgctgtgctgggactttatatagagcatcatcattagatattcacttttcagctatctattttgtagagctcttctgttttcatttcgttgttattatttagaactttttcatgccagtactaatttctaatattttgtcaatttcatgtttgtaatgagtaattgaacttctttggtgtttcttctcagggtttggaaaaaattctggaccaccac

SEQ ID NO: 12617 - DNA, 666 bp, Oryza sativa
  Intron number 1 from transcript LOC_Os05g14720.1 (locus LO C_Os05g14720) derived from phytozome v7.0 (chr-ID Chr5; po s 8363653 to 8364318)
ttgtcggcgggagggcccgcgcggcgaaggccgaggtttgtgcggtatggcttgttgcgggattttggggggttatgttgctcggccgatttctttggcggtaagattgtttgggttctcattcgttgaaggaaatggagtataaatgtagagaaggggatgagttcgtggcatttctagcatgttttattggatcagtttgattaggcatttattaatattaccctcgtcttgatcaattttgtgcagcatttatacgatttcgcagtgtttactaccatgaacgaatcatccgtttcctgcatcagtttctcgtaacaaacatataattatttcggtgtctgcgtcacttcattttgcttgtccaaccagctttgatgcaacatttgattggattcggtgttgtctgatactctattttcgtccatgcatcaggctatatgtgttcttcttattcatgcatgttccatcatttctctattttattttactttatgtttgggtcatccatctgttaacatattatgtatgtcataattatgtcgatgacacactgcttcatgatctttttttactacgaatttggtggcactattgaactgaaattcgatggcaattcaattctgtttatattgcagaaatcgagtttgactggtagagttgcta

SEQ ID NO: 12618 - DNA, 1021 bp, Oryza sativa
  Intron number 1 from transcript LOC_Os05g27500.1 (locus LO C_Os05g27500) derived from phytozome v7.0 (chr-ID Chr5; po s 15937115 to 15938135)
ggcttctcaaagtaccaggagggcatcggaaagaggtattagctagttaatcttataacgaggatgtatgtatagtatgtatactagaagtataggaatagattcttttctattttctttccactcagcttagatagtttaatatgagaatgagtagacttatgtttgtgtgtcattgtaccctttggattatattaacccctgcttagtctatgattattacaagtaacatataaactattagtacggttctctctcctataattttcccacgggattaaacaaatatgatacccttggaatactctcgagtgaaatgctacaatagtatattcatgcgcttgcggataaactctgtaaccataatataccaagtgtatttctgcgccattgctgggaattatatttctagtaatgtcgttaagaaataccaacagtcacaactctcacctacaacactactacaagttgttagcgggctttggtattacaaacgcactattgattagccccatcaagatcagagtcattctctaccctcaacacatatatattcaaatctaagtgtatttttttcctattgttattcgtgtactctatgtaatttcaattgatggtatcttatggaattaacaatgaccacttcaaatatcttgaaaattcattcaaacattaaaacaatgaatttaatgccgtattgatgatatccaatatatcaaatcttatgcattcaatgctacatttatgtatgatcttctcatattgtttatttattcccttaaagcattaaaagaagattatcaaatctattgcattgaatatattaattcttttagtagactaacagctatttagtaaccattggagttctacagataatatatcttttccaagtatcaataccaatcttccaagattttcaaaatgaaagaaagtcaagtgattatcgtcactcttcttctattttgtattgttctaatcattaggggggaagaaattcaacatataaacccaaggagaa

SEQ ID NO: 12619 - DNA, 970 bp, Oryza sativa
  Intron number 1 from transcript LOC_Os03g56130.1 (locus LO C_Os03g56130) derived from phytozome v7.0 (chr-ID Chr3; po s 31969059 to 31970028)
tcttcacaccgctggagaaagggtttttatccccggtatccgggaatctgttacatgaacatttcgaaccttgtatttccttcgttttcgttaatgaaagcgggaggggtgcggcctctctttatatataaaaaaaccagtatccaggactaaaggtacatctttaatcccggttgaaatacctaggattaaaaattcatttttagtctcggttgatgttaccaaccggctaaagatggagctaggccaaattggtagggtttttttcattgtttttaacattgaatattgatttcactacatccccaaatcatccccaaatcgtgaaatcttcgaatcgatcatcacagaacaaaatgatcatctccaaatccctaaatcgatctccaaatacataataaattctaaaaaaaaatacatcacaaattctaaaaaaaacacatcgatcacacacagatcaaatacatcacaaatccttaaaaatacaaatcttcctatggttcgaccgccgtcgctccaccgccgccgcctccacagcccagtcgccgccgaccccgctcggcggccactgtcacatctcccgccgctgtctgccctgcgccatgcggctgccgtccttgtctcatgcgaggggagggggaggacgggcatggtggtggaggggagaaggggatcgagcagtcgtgcgtggaggcgctggtgggagagtgaggcgaggagtggtgggtggataagatgaggagatgataaggagagcgagcagggaataggaagatgaggcgtttgggaggataagtcctatggattatatacaatatatcaattttgagtcaaccaggactaaaaattgaccaaccaatactaaagatctctaccccatgacaccctctgacagtaaatgaaccgggactaaagatcatttaggaccgatagagttttaaactagtggtttttggccaacccagcaaag

SEQ ID NO: 12620 - DNA, 989 bp, Oryza sativa
  Intron number 3 from transcript LOC_Os03g57610.1 (locus LO C_Os03g57610) derived from phytozome v7.0 (chr-ID Chr3; po s 32829909 to 32830897)
tttcagtatttgcttgttcctattacttctcagtagtatgtaactgaataattgtcttatttttgctggacaacctaattgcatatgcactatgctgctatgcagagagaagctgtttatagggtgtttgatggttgattgcggcgtacaatgtctgacaggtacgcggaagtttccgatgcttaatttgaattgttgatattgcaaattaaatcagtaaatctcattctaagtcttttaactcctgttattcattttttattccccgcacaacatacacacacgcacaagttatatctcaccttccagtatatatgttttttaagattgcttttgtattctagtagtttttatactgcataagagtagttttttttttaaaaaaaacagaacagttagttaatttgatttcattggtttgtagctctacgacttatggaatactgagatgaatataaacctaggtggtacctgtggattgtaatttaaactctacacacatgggtaatcttatatgtcttttcgatgaattaaaaagcttcacaattaagaaaacataatgtatttaaataataaaacaataacgcgaggatctctgcgtgcacaataagtttaggccattaagaatagaatgactgatctacatgatatataatagatttcaaggttctatcacaaagcagaattccatcaagtttatagtgacaaaacactaacttttgaaacattaacaaagttcaggagatcaaaactcaaccaaaaatagcaaaattagaagagacctttaggtgttctatctaaaagaatagcatgcaaagtatatttatctagcaagatattgattaggagattatgtactggtaaaaacaaataattagtttacattatgttaaataattagtttacttgcttgattctcaagtaatttatctctctgaccagaaggtctgcatgatgtgtctgttctagctggaaggccatattggtgt

SEQ ID NO: 12621 - DNA, 650 bp, Oryza sativa
  Intron number 1 from transcript LOC_Os06g51170.1 (locus LO C_Os06g51170) derived from phytozome v7.0 (chr-ID Chr6; po s 30954720 to 30955369 reverse strand)
ctgccccaggtccgtatcccatcccatcttgctcttttcttttctgtatttatatataaaagattcaatctttctgtttttattatgcctttcatatggactttcaccatctctcttgtttgttcctgcaaacaatcatcttttccaacagcactatacccacccggattacttcttctattgctaattaatttacttctatacactcactctgtaattcgctctattcattgatttatctattttaactgaaaaatccattcattcacctcctagattgattgctgccaactgcacaacctttttttttatttttttctctcacaaattcactccataaaacatactccactaaacggtagtaccgttccccctcaaattaattatttttcagttctataaacaaattcccctgtatccttttttttttttttgctatgctccatcggtgccgtcacattcgaccatcacaaacatcaacaccacatttctacacattcactgaattatacttccaaattttaaccattaacctcgcttaaggaatatatatcccagaaatctttgttctaacaataatgtatatgagactgctgatttgtatccgcttaactcaaacctcacatttaatatcttcataccatgtagga

SEQ ID NO: 12622 - DNA, 352 bp, Oryza sativa
  Intron number 1 from transcript LOC_Os03g56720.1 (locus LO C_Os03g56720) derived from phytozome v7.0 (chr-ID Chr3; po s 32313270 to 32313621 reverse strand)
cactggataagtgttttgaggtatccaaggtagaagatgacgcaaccgatgtgcatgagctcatcgatgctccagactcgagaagagggatgtggattttgcccgttgaaaaaaaaatagagatgttaatgtttggatacagtcggaaaactatataatctctatgaaatcgatgttgatagaaattgaaaaattcaaaatttatatatggctagaattggaagcggcatcacttgtacaaaacatacttggttggaaatttccgccaccgttttgaaccctagttgaaaggttgtaaagaagaatcattttccgaatgtaactgatttattatttgtttttgcagtgcttg

SEQ ID NO: 12623 - DNA, 814 bp, Oryza sativa
  Intron number 5 from transcript LOC_Os05g01010.3 (locus LO C_Os05g01010) derived from phytozome v7.0 (chr-ID Chr5; po s 35476 to 36289)
ccggttataccaactaccattttcgccatagataggtaagcctttgtgtgtttcttcttagatctgttggtcttcaatcttcacttcttagaatcaaatcgaatggatggatggagggatgaactgggtggcggttcttgggcatggcttctgctttcgattgaattgttttttggattagggcctgcggattttaggatgtttatgtatatgatgaattatttgatttgagtgatataaaacactatgaattttaggataaagggtcctgtgttttcaatttgctcagcagtatgatcagtggcttgggaagcgaagctggccatgctgttgtcaggtgtcccttgcagatatctgctgcaggtaatgagacaaaaaattaggtgttcagattaggaacaatgtaggaccgttgaaccagagttgtaatttcagaaaataggcgctcaaacatgatgcatctatacttagttagagcccctgctaaccactattaccgatgctttagataaatgctgctgctattttttttcattgggatctattccgcgactgttttagtaattctactaattgaattgaaatttcccaaaagcaatccttctgttaagcttggttggactgaatagcagttttaccttggccatcagtgctcactttgagttgtcagataatgaatagctcatcactgatttttttttcagaaaaaaggtgctcatatatgcatgcatagatctctagaaaaaacggctggataatgaatagctcatcactttcctgttgatttgatgcaggggaggaataagctggttgg

SEQ ID NO: 12624 - DNA, 724 bp, Oryza sativa
  Intron number 1 from transcript LOC_Os05g50510.1 (locus LO C_Os05g50510) derived from phytozome v7.0 (chr-ID Chr5; po s 28902207 to 28902930 reverse strand)
gaggtcttcggccccgtcacgcccggccaagtaagcgcgtgcatcccatcccccgccgcgagaattttgattttcgctttgctgtttcttctaccccgtttcggtttcctccgagcgaattccggcgagggtgcgtgcagtgttcgttcggtgcactacagtagtatattcctgtggcggcaagccggcggcaacggagtgcggcatgtgtatcacgagcaatttggtgaaggttcttatggaatttttcttttttaaggtttctccttcctggattcgtgagagaattgcgtgcctaatacggcgcgcttgtcacatgagcgctcacctaaccgctgtcctggccttccgtcccctcggaggtgtcttagcttccaagctagtactaatttagttttaacttcgcatgtttagccaaattgaatcagatttttgatgcccaataaaaaagttatgacttagtgaatgttgtgaaggggaatagaattcttgtgtctgtatgagtgatctgtaagtcgccgtggttgccatttctacttccattcttatatgacacttcgactgacgtttacaatctgaatttttaggcttagtgatgatacttaaattaaacaaacatcgctgcaagttaagctcactgtctggctctaccatggatgaacataactccatgttttcatttcttgcaggtttcgtttttgctgggtcttttccctgtcctcat

SEQ ID NO: 12625 - DNA, 889 bp, Oryza sativa
  Intron number 3 from transcript LOC_Os04g59130.1 (locus LO C_Os04g59130) derived from phytozome v7.0 (chr-ID Chr4; po s 34992451 to 34993339)
actaacttatcatctctacctgtgccttagctctggtaagttcctgtaatctttttccacttacccattattgctctaatcggcactatttttgatattataacagatctgtttgttggcagataaactagacagtactcataggagtatttgttttgttactattttagtccttaactttgtcaatccttatcctagcatccagtgactgtctttatctattcttgtgtaaaacctccttgtagaatcaatttttgacttaatgcttggcgtagtagaattttggtggtcattttcagtaattttgaaaaatctgttttagtatgaaattttagtctgttcaaaagcgactggaaacgaacgtactatagtataaaccgattcaacttgctgtaagaaagtgagcttgttgagtgatcgaaaagaatatgattactcacgcatgctataagcaatatggtaattattgccctcggaacagtcttccataaactttcttctcgtccgttgattgctaccatttttgtaaacgacgtatactagtcctattgtctctctgaaagcaatgtatcttggtaattgatatgtagatattgcagttatgcaaacactcacctatcatttaatgcgtagggatgccagcactggtcttttgtggctctaatgatgctgcttcggaacctcccatataacatgatttttaagttaaagtaaacacgtgatgtgccgtagttccatgttttctgctgtataaaggacttcttcgacacaattttagagattacctacagcattttcagataactcgttacaatactctgagtagtatattgaagagaaagctagaaattgcactaacaattttaattgcatcttgtagctgtgcttg

SEQ ID NO: 12626 - DNA, 892 bp, Oryza sativa
  Intron number 1 from transcript LOC_Os03g57670.1 (locus LO C_Os03g57670) derived from phytozome v7.0 (chr-ID Chr3; po s 32860702 to 32861593)
ctccaggtgatcactgatcactactactagtagctagctataccacacatactaccacactcatatttctaaacggaaattacacgagctggtatgttttttcttttttttgagcgtggtatgttttttcactaaaataattttaccattattaataaaaaaaataccaatgtaaatctagcagtatttcgaggtatcaaaatttctcttttcactatcacttggtagtgtgcgtgcgttggtttacgtcttctatgcaattgaaaaaaaaacatatggggctatattggtgtcactagctcactcactgtacaccttattcagttagaagttggcacgtgatcgaagttgttacttgttagtgataaaattgttgatgtgtagtgtaattggggaaagtgaattcatccctcgagaggatatcccgtcgtttcacatatgtcacataaatagttattaaaaaatatgaaaaaaatttagtaacatagattaatgtgaaatatatcactccacaaacatacaagtttaaattcaacttttacaagttgtaacaaaaacaacaaatatagttgtaaatgtgcgataactattttcaatttaatttgttatttttgttgcaacttatagaaattgaatttggttttgcatatttgtggagtgatatattttatattaatctatattgtcaatttttttttaaattatttaataactatttagatgacatgcaaacatgtcctctcgagagatgaaaatccacgtcctaataattgggctgcaaattggaacagagctatactccatatgttaatttcgcagtgatgcgcgtctcaattctatcgttgtattgcgtgcagcaactgccggtgcaggagcgcgggcgggcggcgga

SEQ ID NO: 12627 - DNA, 782 bp, Oryza sativa
  Intron number 1 from transcript LOC_Os06g48770.2 (locus LO C_Os06g48770) derived from phytozome v7.0 (chr-ID Chr6; po s 29522063 to 29522844 reverse strand)
ctccccgtcccaaccccgcggccgcttcgttcttggtcgtcctcggtgtgttcttgttgttgttgttgttgttcggatcgagttgatttcgtgcccctcccattatggaatcaggtttcttcagggtttctctgatgtagggtagaagattgtttggagaggccaagaaaaaaaaagttcttttggagttcagctgaactcgttgttaggtcgtttgcccctgatttagattcgattctgaggtaataaagttgcggaattgtggatgtccggaggatatccgagggttttatccgctcaatttgatgtgatcaagcaaaaaattcgtttctttttatgtttaaaggccttaatactacacaagctagtagtagtttgttttcttctgctctactgcaaaagtaagtactccttgtttgcatcccttggtggctttccagtacctaccatctgatgttgtagctccttggaaactgcttgcttatccctttgtcatgataagaatgtggtgtgaggaagaaacctgtattctttgtagttatacgctttatttgctttccttaaactctgtctttgtctgatttaatgtaaatacaagctgtcgcgcgaattcgttatcttgtcatgacttgtcaagaacagaagaacagtcctttctatgaagaagttttgagcctattgtatgtgatcggtagtgactaaggaatgctgatttggatttaccttcttgtacttgtgacattgcagaagatcaaccgtctggccgggagcctagagttgtt

SEQ ID NO: 12628 - DNA, 994 bp, Oryza sativa
  Intron number 1 from transcript LOC_Os04g27080.1 (locus LO C_Os04g27080) derived from phytozome v7.0 (chr-ID Chr4; po s 15842214 to 15843207)
ttgtggctaaccggcagggggtgtcaggtaagtgatgtcctcacgctagcggggttgttcggtggtgggcaatggagcaatagctaagctaaggatcgactcgggggatgcggtcggttcaaaacttagcttgtcattgccaagcccacaacgatggagctttagtgccattttacctcttggggcgctgtggagccgtctctctccctctcgtggggttatcaggtgaaaaacctgtcttggttctccttgagacctcgacaaatggcgttggcggtgctcatcgtctaggaagctcccttgtcaaattaagcttctctcagacagcttgtacgtgctctctctagatatgattgtcctcttgcggcggtatcctagctaatgtaagatagtcatgttgacttacggggaagagcactttgatcctttgctctaaccctgtctcctccaattccaaaggcgtagatagagttgagtgtggtgttaggctgttgggtttggtttcgggcggttgagctatagcttttttgttggcctagcgggagcatgtcaccttagtagcggccggtttatagtgctagccttctctggggttcttcgttggtggtgtttttttctttttgttttataattactacttgtcaaaatgctagtcttgtaatttttttatactctattcaatgaatcatcgctccatccgatgttggttgtaaaaagaaaaaagaacttgtcacaagtcatctaaggtggatcatccttcaacatgttccggacaatctcccatttgatcaacgtttgctttctcccccgtacgacccacgagggcgaggtcacgacaacgtgcaccatgaattgtcatgcatgatcgatgcatcccaccctcatgcaggcgtagagcagagaggatttggggccaagagaggattgggattcggtgacattcccccgtgacattcttggtgacattgagtcactgacatgtgggtccaggcac

SEQ ID NO: 12629 - DNA, 606 bp, Oryza sativa
  Intron number 5 from transcript LOC_Os04g40340.1 (locus LO C_Os04g40340) derived from phytozome v7.0 (chr-ID Chr4; po s 23800212 to 23800817 reverse strand)
tacaggttaaagatgtgtacatgatccttcataatgaaatcctgatgtacatcggtacatatatatgccaattgtttctggaatcttaacaaattggtctacaagaatatatacttaaaaaaaccttttttttattattatcaattacgctcattcagggattgtagataaatgtatatgatatagtactacatggcagatgtgatttttttcccaagatatatacttcaaaatataaaaagttagttggagagttcaagttttgatgttctttgcttagttgtccttttcctgtaaatgttaatgaatgcgaagtaatgtcagtattccttcattgtacaatactggtaataatattttgtgggcatgtcaatgagttttcttgctgccacctttctatgcttctgtttttaggtatgaatgttttcttattgtcttcttttgatgatatatgtggtcttcatatttcttatcagataatttaggtttagttccacgatagcatatcatgtttatgctatcggaaggttttgcctcaatttccttccttctccaacaaatcatattttatttgttaattcgtcgtgcgctaattcagtacacata

SEQ ID NO: 12630 - DNA, 404 bp, Oryza sativa
  Intron number 3 from transcript LOC_Os04g40340.1 (locus LO C_Os04g40340) derived from phytozome v7.0 (chr-ID Chr4; po s 23801277 to 23801680 reverse strand)
ttattcagtactaaagtttaaacatcaccgtccaggtacagatcaaatcctctccttctgtcctgtatatattgtattggaatttaatatatgttttcaggttgctgacatcattctgttgattgctattatgtctacaaaagtttgaggattactgcagctgcctatatgatatgattaagatcttttgcactgtaatagttgacagattttcttggtcatctgtatatgttttttttacactatatgaatgtcgtgctaaatcaaaatagctttatataggagcagcaaaattttactatgaaaatattattatagaaaatggatttgaaatgtatattattatggattctcaaccatcttctcctaacagcatttgtgcccctcaccaatagcctgctacg

SEQ ID NO: 12631 - DNA, 836 bp, Oryza sativa
  Intron number 1 from transcript LOC_Os06g07640.1 (locus LO C_Os06g07640) derived from phytozome v7.0 (chr-ID Chr6; po s 3695526 to 3696361 reverse strand)
aaaagaagggtgatttggacagaggaagaacacaggttatttatcttcttattatctgtatccctaattaattatatttttgtttactatttttgtttttatctatgtgggcatggtgctaattatatcatctaaaaatgtttttctatgttattcgggtactaaaagctaactagtacctctctagtcgcgaaaatatgttttctaggatatgttcgaggttaaactttaaaacaattttacgtcaatgtcttttaaaatgttttgattggatgtaagaagacatatgtataggccagcttcaaaaaatacttttgacaatattatatattttttccggggttttagatggtttgcactaaaaaaatagtggtcaaacattgtgtttcgactttcaaaggccaaagacatatataaaaggatatgttttcgaaggccaaagccatatctaaaagtagtgaccatgcatctatagtttcttcaagcaagacgaatttggacgattacatggttgagaacttgggattactgttacatgtgtatacacgatcatgtcgtttattgtgaattatatatatatatatatatcttgtttatttatacaaagtaataatttattagaaatgggttaattctcaaaccttagtaataattaattacatctcaagttcaaatccccattttcccctagtatagatgaacatgcatgcacacacgcatactcctctaaatcagtaatccatcacttgttcttgctcgatcgagccataaaaaagtttggattaatcggttttgatcgatcgatcgctgcatgtacgcacgcacgcaggctgttc

SEQ ID NO: 12632 - DNA, 966 bp, Oryza sativa
  Intron number 1 from transcript LOC_Os05g51240.1 (locus LO C_Os05g51240) derived from phytozome v7.0 (chr-ID Chr5; po s 29324127 to 29325092 reverse strand)
ttcgcccacatcttcctcgtctgcgcctccccgaggttaattaattatcgatcactagatttcattcatttttgctgttccttaattaattaagcccctcaagatcaaggatgacatatatagcctaattaccgttattattattacagctatttaatttaattagttatttttaagcacaattatattagttagtcgttgtgcaacacgtgtttggttcatccagataccactcccagtagatagcagctatgctagcttttgagttttatcattgtcaactttgtgtgttaattgtcagcgtgtgtacgtccacgtcagcacactaatcgcgaccatgcagcagcagtcacgttcactgttgctcacgactcacccaacatctagaaacatcatcaattgcatagcttcattcacaggaagaaaacaaacgcctccttttcgattctttttccctagatagcgcttgtcaaatctgaccaatgaacagcaattaagatttggccggatcgaaccgggacgtcacaacaaacacttgctgctagctactctagattagatcaaagctagctctagtccggatgagatgaagcaggatcgatcaatcgtggcctcatgttagttagtccataacctgtacgtgtggctaaaaaataggaacacaagaaattatccatgtatcaatcagtcaagatgtttcagatccttgcaactaactaattaatattctattgccaaaacatgcatgatcaagcatctaattgattacttagcatttctacgatcgattgcatgcaagtacctgttgaaaattcaattgggcatgcagctgccagataggagtaagctactctgacagtacaagaaactgatgaacaaaattaaaactgaactagagaacgtatagctgatgaaaacgggtggtggatcgatcgatcaggtacataaacttggaggaggaagggt

SEQ ID NO: 12633 - DNA, 844 bp, Oryza sativa
  Intron number 1 from transcript LOC_Os06g18830.1 (locus LO C_Os06g18830) derived from phytozome v7.0 (chr-ID Chr6; po s 10692258 to 10693101 reverse strand)
ccatctggcgagcagagaagggggaggggatcctggtgagcaaccacatcctctttctgattcatctctctctcccaccttctttcgtgtggaatttgcttgcgctaaccatagcttctctccaagatctggaaggaagaaactttttctcttaatttcagagccttaaccttaatacaagaaacagtttgtttgttcctcaaaaagggagaaatgccgttaatctgcggggctgtgcttgcttgcgttcatcctccatttcctgcttgcaatgtggctgcaagaaaagattaaaagggcctctctcgtttaggtcggggtgctaggaagtagggaaacacctttctctcttcttttggtaggaaaaagatggcgcctttgatgggacaagccatctttgctgatccctagcacttgtttattccaaagtggggggagtgatggtcgatagatctgtagagacagtagagttgtatgattgcggttagtgggcggttggacaggttcagtgttttcgacattagcttttgtgatgatgcctttcttttgagcgagttagatggataaaatcagtgggtggcttcggttgtgacttgtgaggagtgagtctcgttgtagtggacctgtgggaggttgatggatctgcgtgtgcaggttggttcttgattattttgtttttttttttgtttgggattgttgggggatgatctcttgttcatcgaattggtggatttctgtatttttttgtgcagttcttttgtatctaggcatgttctaatcaattgaaattcttttgctgccctttgcagattctgaaggcaagtgtcaacaccaagcttataaa

SEQ ID NO: 12634 - DNA, 710 bp, Oryza sativa
  Intron number 3 from transcript LOC_Os05g09530.1 (locus LO C_Os05g09530) derived from phytozome v7.0 (chr-ID Chr5; po s 5389001 to 5389710)
aacgaaggtaaatatgtttatgattttagagattattttttcttcttcggaaaaaatggcatgtgctttctaagttcttaggaaacattaatggtctatccttttttttgccctacattaacatcatgttccatgagataagaatgtagtttgttctataggtaatctgttcaagtaattagatatattaaattttcttgctgatagtgatagattaactttttagcaatatatgaacatctttttgatacattttggtgttgattgcacaatcttcaccaataaattgttcaaagtcacagaataacctcctctctctcactggtctggggagtggcgacatgttttgacttaatggggctactagtcctctcagtttttcatcttgggaacaagcgtaccagtttagctagatccatcaaacaaccagataactaatcaacatgttgtttttgttagtattgatgctaggtttccagaggttgtatttcacttcaaggaactgcttactttgcgagtctaccctcatgaatatatgtttcacaatatggaggtatttcgtaaagaaactatgctgttgctcaaatatgcactgagaaaatattgtgatgtatattgtgttataaactgtttctctttaggagcactattactgtcttgggtttttgagttcagaacaaaggaatcatcgagagaaggacttgttcatt

SEQ ID NO: 12635 - DNA, 818 bp, Oryza sativa
  Intron number 1 from transcript LOC_Os04g28490.1 (locus LO C_Os04g28490) derived from phytozome v7.0 (chr-ID Chr4; po s 16703940 to 16704757)
gggggggggggggcggcgggaggcggtgcacgacggtgcggcggccggcgatggctgtggattttttttattttgtgaattttttgtagtgaatgatttgtatattttgttggagattcttttttttgatttggggatgattttatgattgatttgtggattgtggatgtgtatgtattggatgattttgttgtgcatgatttgtgggaatttgggtgggggaatagatacaagcaacaaaaaagaaaacaataaaaaagaaaaaaaaataccaacccggacgtggccctatccatctcccggtaccaatcgggactaaagatggatgtttagtcccagttatttcacccgggactaaagatacccatctttagtcacgtattcgtactcccggttacataatcgggactatagggggttacgaaccagggttaaagaccctttctccaccagtgtatatgtgacaaacataatttaattaatacgtgcattaattatgcaaacaagggaatagattttctcaacatcacacacaaatatatacattgaggatacatacccatgacacttatgaattttgacacaactataactatattgaagaggcacacagcagtactactcgatggaaacaaacatccctacccattatacacctgatttgaaatagattcacgcaccacattcattgcttccgcgttgttcggtgaatcgtaccactgagataagggtggagcctgtggtatgttctggaacccgttgtataacgaattctgcatctagaagtgcgggttatcactatcaagtctgaagttgtg

SEQ ID NO: 12636 - DNA, 838 bp, Oryza sativa
  Intron number 3 from transcript LOC_Os04g42320.1 (locus LO C_Os04g42320) derived from phytozome v7.0 (chr-ID Chr4; po s 24858824 to 24859661 reverse strand)
tttcaccacttcttcagaaccatatcgtgtgtaacttcttttgctggttcatttcgtattttcttcaccttgagaatgccgattctttcgggttcttaaattgactagggatatgttgtggttctggtattgacttgcaagatgcctgattaatattatgctgctaatttggcatgattatgtacatggagaagaagttagaactgcatttgcaattacactcaccagttaagattactttaagggaaacatcatgtattagtattactatggtttgtcgatatcattgggcgttgttgcgtttgattttttacttgaagcaccaaattgaccgcagctatcagttctgattgcaaatctttggggaataacattttttacatgcatatcgatgctaaattttacataccgaggagttgccatatcccattccccagtttttcattgttagcttatgttcatcatttattttaaaaccgacaagcggttgttccctgcgtaaaatataatggcacaatctgccatgaagtaattttaatcctttgttgtcctctgtctgtttgtctagaacctgctaatttctgcttttctcttatcacataataatgtgcaaaagcatgcatgatgatttgttccaacaagtttacacagttcacaatttgctttgacgtgaaaactcataaagtcacaatagttcctatgtgttttcctgtgtatatttgctttatgtctatgttcatggttctgccctgcgtatgttctgttaattttcttaagtcttctttatcctataattcattactttgttatatttatttcagcaatactcatcaagaga

SEQ ID NO: 12637 - DNA, 629 bp, Oryza sativa
  Intron number 2 from transcript LOC_Os05g34390.1 (locus LO C_Os05g34390) derived from phytozome v7.0 (chr-ID Chr5; po s 20322416 to 20323044)
gccagccgtcctggctggccaactttggctagtgaggtggggaatttagccagccggatggcttggagagccatttagctagtctgttggagtagatttttttgtccaagttagctaaattttggcttggagagccatttagctaggctcttggaggtgctctcagtgaagtcactttcccgaccattccttctacatgctagaggtctctgtctcaaaatataatataaaatgtaatagaatctaaaatacccgtaagaattggtttggtaatctaaaatacccgtaagaaccaaccgacaggtttggaactcgtttttttggacggaaggagtaaaacaattagaaaatctagaactttgattattgcaaggttgaaaaaaaagaccaggatgtacagtagtgcagtcaagtcagaggagtgttctctagctctagccggcaatgaaatgtgttccgagtcatagcagtaatttgctccgaaatgggagtacgtagatcggaataaaatagctaggaatatcatttgttccttcgtgaaaatcttgagcaaaattaagtccatggcggcgaccacgcttgcttgctgtttctcttcctccatggatctctcctgcagcgcacggctg

SEQ ID NO: 12638 - DNA, 856 bp, Oryza sativa
  Intron number 1 from transcript LOC_Os04g42270.2 (locus LO C_Os04g42270) derived from phytozome v7.0 (chr-ID Chr4; po s 24824004 to 24824859 reverse strand)
cctcgcttcgcgtccgccgccgccgtcccggagaggtaaggtaagcgtcccccgccgcaactaccaccacctccgcccccgccgtcctcgtgctcgtgttcgtcttagtcaagcgcatttctgtgctctgtagccgcgcgggatggagctcgcgtctctcccttaatctgagggcgaggctggatccgctacttgcgcgcgcttttcgtcgatttcttgtagtggatttcaggtcgttgctcatccagtagttggtgcttttcttctggagattcaatttaggatggcgtgttacacagtctagtacggtgaatctttagaactgtgggtgatgtttagggatgctggcgatattagtgtgctcgttatggttgatttgaacttgatgtagttgtttgttgactattaaggtggttttttttttgtgtgagttctgaatctgttgtcttggttagcttttggtggttgattggtttcacatcagaaattaccctgtttggattataatacaggatacattttgattaccacataggatgtatcgttgctgttagcctgttactagtactcttatacttactgaaatggtagggccgaacttttgcctgattgcttatttagatttacttggctaatgtgaaatgtgtgagcaagataccttttcctcctgaagtgtataacgactctactgtgaagcagttctatgcttagttaggtggctttctctttctatattagtaatgtattatgaaatagctgaattcgcaatggtgtattgtttagtttttctgtttcatacttctgatatcactgttctctttgtgtgcagttcaagaggcagccctgtgaagctcca

SEQ ID NO: 12639 - DNA, 810 bp, Oryza sativa
  Intron number 1 from transcript LOC_Os05g18650.1 (locus LO C_Os05g18650) derived from phytozome v7.0 (chr-ID Chr5; po s 10802249 to 10803058 reverse strand)
cagcaagcacctcggctctctattgcttccctcaggtaagccacattcattctacctatgaacaacgaggaaatttcatcaggtatttccttcctatgttagttttgagtcctttcgagtacatcggttgcagttacttcgcaaatttccatctaaattatgaattatatcatttgatttttatagcattgttttttatcctttgcatcaagtgtcagtgatgagttaaaatcactcgaagtttgaagtttgaggcttcagtaagaaaaggagtagcatatataaaagatggggtaactataaagcaaagatccaatttcacactatacatagtttatgctctatatactaaataaaagggtttcttttcacagcattattacagagtgtttctgctgctacaatattgggaaatacatggagactgaaatcttggagataaattactgaagaaccgaactctatttgtgagtatcagtgtagggttcctgttcttttaaccttgaaggatctcatttgtaacagattttaaattcagtcaacattacttaagatgattcagaataatttatactctgtttggatttagaataatttattacctggtagttttatctcagaatttgagaaggcatccaagtgcgttgcaaacatgtggctataattaatctgacgctcaaacatgtggctattattataaagtttactgtactattccattcatccaataatgtgcatccactacttaatcatttgtacattttgatttattattgtacaatatagacaatgtacagtgcaccagggagg

SEQ ID NO: 12640 - DNA, 894 bp, Oryza sativa
  Intron number 2 from transcript LOC_Os04g42140.1 (locus LO C_Os04g42140) derived from phytozome v7.0 (chr-ID Chr4; po s 24765175 to 24766068 reverse strand)
gctatacaagagatcaacttctcgaactgcgtgaggtacttgcaatctgttgtgttattcaatatcagtttctggatgggaaatttgctgtgaatatcttagtagacatgttctgctttacgtgctccctgtcgtttggttttgttgaaaaatgcttgcagcgtatctggcacatttgagctaaattagagcagaagtttctatttggaatacttttcaacacatcagacatggaaaacaatatcgcgtaggtggtgtttctgcaactaggtgcatagcacacaaacatcgaaatataccacgttaatgtcccctaggtattcgtgcagtgaaagttgaaacacaaccaactttggctgcaataaatgtagaagtgtctaaattggccacattgaaatggttataacagaaattttgctggtacgagtacttcgatggtatgcgttgctagcatatcattggaaatttcagtgatgaatgatttaactttagactatgctatatacaaagtagcaccgatctaggatggaaatagaggcactcacaggatatttaagtgaaactgtacctactagcctcaagtggaagagccgcagctttctttcgatataagttttggttacttgtttactctgtagtcttgaaatgcaataaaagagaggggggggggttgagttttagtaccctattttcgcagttcggtcgttctgttttaacctggttttataaatgtactacaccttctattgagacaacattagacagtgtctaacattcaactggcatataatatttatattgcgaccttgtgaagactactaattttttgcgtactaattatgattttacttactaacagatcgttgacatacctgaggccatcttaagaattaa

SEQ ID NO: 12641 - DNA, 742 bp, Oryza sativa
  Intron number 4 from transcript LOC_Os05g46860.1 (locus LO C_Os05g46860) derived from phytozome v7.0 (chr-ID Chr5; po s 27063844 to 27064585)
tttgaaaaggataccattaagtttggcaatagtaggtatgatcattgaaattgaagagtaactttccccctctactgtttaagataactttgcttgcttcatgccctcatcatatcaattaaagaaagcatcacttttttgtttatttattgctcaatgtatatgcatctttggtatgtgatgacttaaattaacaacttattatgaaagtgacagtctggcttttggcattctctttagttagagattttattttgatttgtggtactcttgggataaacattttttctccaataatctaagtaatatctttgtaaactacgcctaattgtttttctcaatacaatttccaaatgaatctttaggtggtatattaatgtttataaatatcaaggaatctcaaaatatctacattatggaaacataattttcctttatggagccttgacttgcaagctcaatcatgtataaatgtataacatatattcagagctgtggagattttgaagtttgcccatagtgccccttcctagttcatacggttttcatccttcagaagcctcatctttttgttcttagatggatggtactatttctaatccagatttagggtccttttgagtccagttgcccaaaagtaaataatataatgatgtgatgcctccgcttctatatgcctccttactaaccccgttcatctaaaatatgacaaatgttttattgtatttttgcagccgggagt

SEQ ID NO: 12642 - DNA, 986 bp, Oryza sativa
  Intron number 1 from transcript LOC_Os03g47240.1 (locus LO C_Os03g47240) derived from phytozome v7.0 (chr-ID Chr3; po s 26726072 to 26727057)
aagtaccgcctgcccagtaagctattatccatggatagtagtagtaattaagatgaggaggcgagatcaaggaagagtagaatctacaaacctggtcacctatgtgcacgaaatttgacattttgacactttccaaaaactaattccgcaaatgaatcgcggccaaaacttatttcaaaaatgactcttttgttcaacgccaaatcgtatggtgctgaatttagatatatcagcaccaaatagcacggcgttgaatgcacgttgtcatgccgactcatcctcccatacgcggtgcacaacatttagcggcagttgacgtggcactgaggtgtctaaattcagcgccatacaatttggcgctgaaaaaaagtcatttttgaaataagttttagctacggtttatttgcaaaattagttttcagaaagggtcaaattatcaaattttgtgtacatatgggcacgctagcaaagcggatgagaggatcacactcgagaaactaacttatagcatacgttgtgcgcacatggaggggatcccgtccgaaacgggaggacgggagcctggaaaatattattttctaaaaaaacaaatattttcttttagaatcaaacaatacagaaacttagctccagtgctccataatactgtaaaaatcgtgaaaaatgcttcgatgtaaatttcaaaccgtccgatatagaataacccagggccatcttgatcggacggcgcaggaggcgatcgatacttctctcccctttcttggaggggttctctcttcggggcttttaactatttgccacttttagatttggcaaataactatttgccacccctatctcaatgacatgtgggtccacatatgtctatgacatatgggtccagtggcaaaaagttaattgtcacatttaaatgtggcaaatggttaaatatctctctctcttctgtctcagcttcgccgtctctgaccggagaaatcgtggggaaa

SEQ ID NO: 12643 - DNA, 427 bp, Oryza sativa
  Intron number 1 from transcript LOC_Os06g06160.5 (locus LO C_Os06g06160) derived from phytozome v7.0 (chr-ID Chr6; po s 2854840 to 2855266)
ggaaggaagtctgaagcttgagccctgtcagttctgtaagatttgagctgattcttggcttccggtttattgccttttgttgtttgattttagtcgaattgttttggggaatcattcatatttgattcgagaagacttcaggatagaaacaaaaacaagggttcatttctcatgcttgcttctcatgtttctgtcaattgacagaaatattaggatttgcttcttttctccatgtaaattttgatttggttaatgaacactcagagagattcagaatgagccaataaacttggttcatcaggtgtaattttttatttcggcatgttgcaccatcttatacttaaaaacaaaattaaccctgtttttttaatgatttttttctgtgatctaagcaagggggttggacaaggattaatctgtgaggctc

SEQ ID NO: 12644 - DNA, 926 bp, Oryza sativa
  Intron number 1 from transcript LOC_Os07g09670.1 (locus LO C_Os07g09670) derived from phytozome v7.0 (chr-ID Chr7; po s 5130193 to 5131118 reverse strand)
cgagggctacgcctcccgccctgccgacgagacaggtgagctcgcagcgcggagatcgagctcttctgattcattccattttactaatttcattcggttcgatttgatttgatttgatttgattggattggattcggatttgcttcaatcagatcgtctggtggtgtgattccatgattgcattccgttagtttagaatcggcaaattcgatgttgatgatctggagttaggtgtgaagggggcggtttgttagttaggaaaaattagaggcgtcaacttcagtggtctaaattgcgtggaatagctttgcttggtggaaattggccagaaaggttcagcctttggcaagaaatttctagagaagggctgggtttgtttaccaatttctggagaatattttgatggtgattgtgtttgacctgaaaccgtgtctgttgcctgaatgtcgagtttgacttgataacgtgctgcggtgtcggtgggaagtgttaacttattattcttctctttttcttcctcaattagagggagctcaacgggttgattgcttagtttggcttgtaatagcctaaacgtcaaattggttgcaattaatctaatttagcaaatattgtgggagtgtagaagcttccaacttgcaagcatgcttgataacagtaggtctattttttgaatgagctataccagagtttgttctaaaaaaagagagctatacgagagttgcagcgagcatcttaaagcttgcagcatctcataactgggcattcttcaagacaaagttggaacatcattttttgcagcagatctagtttcttgtgatacaggaaaaagacttgtacttacaattaaagttacactgaagatctcttctactttaagagtgtagcgactttgcttcatggtgatgtctttggtctttcagttg

SEQ ID NO: 12645 - DNA, 699 bp, Oryza sativa
  Intron number 1 from transcript LOC_Os04g52120.1 (locus LO C_Os04g52120) derived from phytozome v7.0 (chr-ID Chr4; po s 30771301 to 30771999 reverse strand)
aggtctccgtcgcgcagcacatcgaggacagcgaggtgaggggcctctggcttgcggtttgatttacttcggtttgctttttttttctttttctttttctttcgtgcgtgtgcttgtgcgtcatttggtgcgagagatttggagaatgatatggctgtcacggtatgattaaagttgatttgcccatgcgattagaatcatgaggaaaaatggcaacgattaggcatgtgtactagttacttttggtttaaccttgtgttggacgacaatgagaatggtttgcaattgatcagatgcctaagggagatgtgatgttcatgatcttgtgcgatcaactacaccgattgtctgacaaatcacctgccttttcttttaaataaaaaactacactaattgtttgaacatactcatctagaaaaaaaaacattttgaagattcatccaagtaactgcgatttttcagggaagggaacattttgaagactcatcagctgaataatatttgcaaacatcctttcaaaaaaaaaaattgcaaacacccgaacgatgggatattcttatggtacatcgaaataattgtacctagatcctgaaatgtacacgctactttgaaaaaccagctagcattattgatgatgtttccttaattatcttccatatggtttatttacatgtgcaggagtttgattttggcaggaca

SEQ ID NO: 12646 - DNA, 578 bp, Oryza sativa
  Intron number 1 from transcript LOC_Os03g59670.1 (locus LO C_Os03g59670) derived from phytozome v7.0 (chr-ID Chr3; po s 33967008 to 33967585)
cgaccccaaggcaatacacgcatataccaccaactattttcccctgaattttctgcaaaaactgatactcttctaccaaattttagatcaattcaaaacaaaggaactgcgtggttcaagaataattgaataccatttgaattggattggcagattggcatctagcttcttccggtagctagatgctaagcatgcatatgcgtagagccagcacgcagctaatcgttgtgattaaagctgagtatagcatgcatgagtgcatgacactagctactactaccatagattagggcttcttgtttatcttgttcttctcatgatttgtggctattgtgtccccatgcattcttcttttgtgcctagtaccatgttttctagaattctagtactaatcattcacataattttttgttaattcaatcgtctttatgtatgattagaccctaactgggtatagggtttgattgtgttttgagatttgagcttgatgaggtctgaaaaatatatggcttcttgatggagtttagatgatgtgatgtgcagatagacaaggcgtcgctgctggcgaaggcggtgga

SEQ ID NO: 12647 - DNA, 620 bp, Oryza sativa
  Intron number 2 from transcript LOC_Os04g27760.1 (locus LO C_Os04g27760) derived from phytozome v7.0 (chr-ID Chr4; po s 16237640 to 16238259 reverse strand)
ggaggttcatcaattaaatagctgatgaaccaagcagtttattaagtttatataatgcagcttacctcctcgttcacgatgaaccagaactcgaagaggccatctctttttctaggcaccatctaaaatcaatgatgcagtgtggtaacctcaaacaccctttagctgaccaagtcaagcgtgcccttcacttaccactaccgaggacatacaaaagagtggaaacattgcattatctttcggagtatggacaagaggaagggcatatttcgtttcttttggatcttgcaaaggtggattttaatattttgcaaggggtccacttgaaggagctcaaagctatttctgagtatggaatctctttgatatatacccaccaagtagaaaataagtattgcagtagtatgtattcatctcaatcttattaaagcttaatacactatacatataatttatatgtaaacaatgtgttgaacatacatgtctgacaaaggtgtattgtccatattgatcctaccagaattggtatgtgcaatgctaataataatcttaaacatactatctaggcttgtacctaattaagtgcttttattttaggtggtggaaagaccttactggat

SEQ ID NO: 12648 - DNA, 874 bp, Oryza sativa
  Intron number 3 from transcript LOC_Os03g41380.1 (locus LO C_Os03g41380) derived from phytozome v7.0 (chr-ID Chr3; po s 23019861 to 23020734)
ttgtgcctttgatccagggtggcagggaacatcaggtcagcattaggcgaggttcactgcctccgtctcaatcttgtgtcaccagtccacctcaatctcgctgccttcacctccatctcgtgtgtccggtgagaaggaggaggatagagcctccatcagtctgactgttcgatgagaagtggagagaaaaagaaagaggaaggaggaaaagaagaatagggtttgacatatggatccagtaagggtagggccagtccatatgatgacctagtacagtcaacatgtgccacataagctaaaaccaataaaccgttaagagatttgatttacactagtttgagaaattgggggacaagttatacccaattttacggttaagcgacgcaagtcaacctcgactcctaaatgagggacctaaactgaacttattccaagcaaatgagaccagtaaagcaatttcctatgtggcccagcaagccgtcatttcatcatcatttcatcctggaccattctatatgtgtggccaatttagtttgggaactcctgctccataccgaaaaatgcataatacgaagttcaaacctcttaggctcttacttggcgtagtgattgaattttaggctaagttctgtccattttttttatgtggacatatccaagaaaagaaaattagttaatcacctgatgtttcagaaacgattattgtactaaagaaagagtccacacagaggtaatttcgttacaaagaaaatgaatggagtgaacgttttggtgcatctactatagatgttatatagtaattaacagagtaaattgtattggcggtacttaaacttataagcaggttttgtctaggtctacgaacttccaaaac

SEQ ID NO: 12649 - DNA, 506 bp, Oryza sativa
  Intron number 1 from transcript LOC_Os04g31750.1 (locus LO C_Os04g31750) derived from phytozome v7.0 (chr-ID Chr4; po s 18831997 to 18832502 reverse strand)
gcctgtaagtttacggagttaactttacatatgatcaagtctctttagaatggcaagaaatttatagatattttgtagtaaatgtgttaatcaatatgaaactcctgctattctttgagccttgcactggactgtgttaaggaatgtttctacagaacttgttccaatattttcgatatattccattaaaaccaatatctatccacaaacttgttccaaagtttattactctatagtcagttgctccaatattggatctttagatctgaagattattcggacacatgttggtctgataagatcacagtttcacccgctcaaaatcattgaagcctgatgcctgatgcgggtccttgtttagaaaaaaaataaaataaaatgcaatcatacagagaatatgattctatacctttgatttttctgcatagaaaaccctgttttgatcatcttatgatgtgcttatgcttgcagggttttggaattttctaagtggaagcaacctgcag

SEQ ID NO: 12650 - DNA, 959 bp, Oryza sativa
  Intron number 2 from transcript LOC_Os03g53970.1 (locus LO C_Os03g53970) derived from phytozome v7.0 (chr-ID Chr3; po s 30936986 to 30937944 reverse strand)
aggagactgctttctctctggtaattttcgcttgctctaccattcgtctgctacaattataatgtgtatgtatgttaagaaatactgaaaaagtttccagatgctccaccatttgattgctactatcatctggtttacttgtacttcataagttgccttcaaattataaagttagttccaactggtttgtactcgaaattgacaatctgcaatgcaaaggtagtgccttggctcatttgttaataacataattgaaagtcccatactagcattcttgtccagttctttacattagataggttaattcaaattgatcggcgggctgtcgcctgtgtagcgaaaaggatagggtaattccttttcacaaggtactcaacgagtactcctatgtgacaacaaagaaaccaataggctttttgttctttatagttaacacaaaagctctcctttttcacaagcacttgtatcacttaaccagaaggcacctataaatcccagtggagatgtagaagacaaatcacagatagcgaaaaatgccggtttgtactctacactatctcacgttttgacatatattctgtcatgggggcaatgcaacatatattgacacacacattcttgacctcactttgcttattatttagttatttctgattttcaatacatgctcttcacctaagtgatagtttgcaaacaaaatttgcagaagctagtcgttaccattttttatggttaaataatttggccatagattaagtcttatccttcctacaaactatcattttggtcttccttttcttttaaaaagttcctctaacaacataaagcctacatggcaatggactactatagtgctacttgtaatagaaactagaaagtaccataaaggcgcccctgtgcatgccagttattattgcgcctatcaaaagtttactaatgctgtttgctgcaacgcagga

SEQ ID NO: 12651 - DNA, 751 bp, Oryza sativa
  Intron number 1 from transcript LOC_Os07g01230.1 (locus LO C_Os07g01230) derived from phytozome v7.0 (chr-ID Chr7; po s 129331 to 130081 reverse strand)
ccgccgccgccgctgctcgccggcaagacaaccaggtgcgcgctcctccctcgtcatcatcactcgttgactggatggatgcatcatttcatttggggacattctttttcccctttgtgtttattcatgcaagagatttaatccgttttcgatcgtcacgcgatttaatgccttcttcttcatcatcatcttttctttttcttaaaacaaatatagatcaaatctagttggttgtaattttgacttttgtccactaaagttgcctccttttgtgagttttgactgcccaaagattatttttttccccttcactcggcggcgccccttaatttgatgatgatgatcctagtcttgtttggcaggcatgactaatttggtctgtaaattcaattcaggtccaaattgattgtcctttatgtacttgtcttgtgtttgattccttgatcagggcctgacatttgtgtactactgctagtacctgctgttgctggtcccttcctttttattacccccaattccccaaagctaaatgcagcaagcaactataactgtaataatccgatagatcgattggctcttgataaaaataaaaaaaaccaaaccatatgccaaatcatagaatgaaaatgcaatcagccatgtaagctttgtgtgtgtgggggtgaaaaagatatgaacgaggagtctgattggggattgctttttttttggtgcagcctaggcctagcctccttggtgttggtggacggaa

SEQ ID NO: 12652 - DNA, 605 bp, Oryza sativa
  Intron number 2 from transcript LOC_Os05g30650.1 (locus LO C_Os05g30650) derived from phytozome v7.0 (chr-ID Chr5; po s 17695953 to 17696557)
gaggaagaaacctttagaggatgtaaacaaataagaaaatttgcaggtgaagaaatgttaaagccataaaaaggtaagttcgctatcaatctgtcataataattcattcaactttgcacttttctgatttcatatctgataaatttcctgagacatcactaacatgataatattcaatatttatctgtttaaaatggaagagactgatagacaagggcacaacaacatctatagttctagactccaaacataatatttttacagtccttgaagtaggtatcaagagataccaaatttataatagaaaaggtggtatttcatggtaaaattgttctattatttaggatatggagaatgttttactacatatactcgttggtttcagatattccacatcccctacatgagtcttcttgttctcttgagtttgtgagagctagctctgcgttggtttggttatgtaccctacccaaagttgatggagccaaaacattggcattgttaaatttgttaggatagagatgaagaatatgtttgatttagtgctaaaattgtgaatatatggcattgccaatttgctataatttttgcagggtggcattgtg

SEQ ID NO: 12653 - DNA, 223 bp, Oryza sativa
  Intron number 2 from transcript LOC_Os06g36840.1 (locus LO C_Os06g36840) derived from phytozome v7.0 (chr-ID Chr6; po s 21701527 to 21701749 reverse strand)
ccactctgctctgtcaaggacaggagtgccctcaggtgcgttcatgcaaaacatcgtcatagttttctgattgatatagtgcacttgtttcttcagttgtttacattttttagtcagatcaaattatttacaaaattgtgtttatgtgagaagcatctataaaaagtgttaaagagtttcaaaattgccttggcatttgcaatttccatgtttcttctgcaga

SEQ ID NO: 12654 - DNA, 810 bp, Oryza sativa
  Intron number 3 from transcript LOC_Os05g50920.1 (locus LO C_Os05g50920) derived from phytozome v7.0 (chr-ID Chr5; po s 29159560 to 29160369)
tcgggagcatccttcttgcggctgactgcttacaagtatgtataaatcgtgcacgcatgcatggcttcccacgaaactgaattcacactaaactgaataataagtcctcatttatttatttgtttatttatgttgcacttcatcgttctctgtcaagattatgtagaaaatctggactttgtattcaagttgttatcatcttttctttgtgggaagggatcatacagaaatagaataactgaattaattctgcatactcctaacaaaatgtttgcctttgtcaacaatattggctacagtgagttgacttagagttgcattgtgcaataccatgatctcacctcagaagttgaaatagcttagacaagttgtacttttatatttcgtagataatggaagaccaagccgtactttttatatacgacaaggacagagaaaccctgagtttgaccacgcaatccaacttgtccaagtggtactgaggctggtttagttcccaattttttcttcaaattttcaattttttcatcacatcaaaactttcctacacacacaaactttcaatttttccatcacatcgtttcaatttcaatcaaactttcaattttagcgtgaaccaaaacacaccctgaagagtctactactgtatgtcctagccactctgacttgtggtgaattacgaatgcttggtaatttcatttcatcggtgtgctgatttatgtgtcaattaggaatgtttactatattttttttgacattctgaaactcctgtgagacatgatgatttcacttcacatatatgtgcagata

SEQ ID NO: 12655 - DNA, 460 bp, Oryza sativa
  Intron number 3 from transcript LOC_Os05g33090.1 (locus LO C_Os05g33090) derived from phytozome v7.0 (chr-ID Chr5; po s 19343716 to 19344175)
tccgattaaccgctgcttagtggtaccgaatgatacaaagttgttcatatcaaaaatcgccattcctgagattaaccacccgccgggggagtttataaacaaaaaaatatcgctaattccatcttctatactgagataggactgagacacggcccagactcctacgggaggcagcagtggagaattttccgcaatgggcgaaagcctgactcccaaactcataacacataacatagcagatttctttgatttctagtgccccaatgcgccgccataagggaggaaagaaagctcaagttctgtgagttacggccagtaagagtagtcacagtcactcgaagttggcaaagaagcagcgacaggaaattgctgtaaagctcatatggaggtttttcattctgacatgaaatttgctgggcacgcagattggtcactttgtcaagatcttccctggggtcga

SEQ ID NO: 12656 - DNA, 621 bp, Oryza sativa
  Intron number 2 from transcript LOC_Os06g10570.1 (locus LO C_Os06g10570) derived from phytozome v7.0 (chr-ID Chr6; po s 5457226 to 5457846)
ctcacaggaggtaagagtgctgaagaactgcaaaaaatgcagacagaacaaagtctgtttgaaatttgagttgactgaacaacactacaatagaatgatagtagatgcacattcaatcaggttactactcccatttattagtgttgtttttcttagtttctttggttctactactactactgtttcatagtgggtgacgatgcaaatgtgcaattataaattggttttagacatttagtagtacacttcctgtcagacagaacgggctgtaggcatgtccaccacccatgcatgatggattgatggacgcatcgatccacccataataattcaattatatttaggccacttcttgttgggggtggatggattttgtttggtctctagctctgctgatcaatcaggctcgcatcacaggccacagcctgtttggtttggttgtaccctcgcgtaatcttgcttggcacctagcgagttcggcacaacaagttccaggggcaatgcactagattgccacttgtattttgatcacatttttgatcagttttggtcatgttttgtttgtttgtttgtgtgtgcaaatgatgcgttttgtgttcttaatggcagcgtgccattgcc

SEQ ID NO: 12657 - DNA, 738 bp, Oryza sativa
  Intron number 2 from transcript LOC_Os03g59750.1 (locus LO C_Os03g59750) derived from phytozome v7.0 (chr-ID Chr3; po s 34007589 to 34008326 reverse strand)
agctcctgtctaacaagaagcttatttttcaggtcagacattttaagctctatgatttcaacttattttttcatgtttttcttttgtttgtgctctattcatgtggcacctactctctcttatgcatgacgtgcatgtgtcttcattggttcattgtgttttgtgaactacagttatacagtatattgcatacagattacattgttttgcagtcatccccttttaactcagtgatatttgcttttctcgtaaaaagatctacggtttctcttagccaggcaatccacccatatgcatatggaatggggatattaatacattacttgtgtaatttttagagaaaaaacactgcacttattgagagggtatagtgaaggggttatcctgttcagttgctaacaatcaagtatgcatgatgccggtcaggggttggttgatggtttagattatttgagagctgaaattaatgtggttattcgagagctgaagttaatgtggtctttatttaaggtgtgatgaatggacaactaaatagaaactttatgatagtagggatgatctttaaccttttctccaaaggggtaaaaagaatgctatataggctttgtaaaaagaatgccgttaatgacacactaatttgatttgctatctgagggatatctttcgcactgccatatgttaactcttccttctggtgtttcagcttattttacaagaggcaactgacttaaagaacaa

SEQ ID NO: 12658 - DNA, 376 bp, Oryza sativa
  Intron number 2 from transcript LOC_Os06g12200.1 (locus LO C_Os06g12200) derived from phytozome v7.0 (chr-ID Chr6; po s 6537252 to 6537627 reverse strand)
cggcccaatcagccagcgttcatttctccaacgtcactagtcccatggagacatggaattatattgattaagtctaatttacctcccttaactattacccgtggtccaatcacatccctcaaccgcaaaactggcatagcgcatcgtctaacttcgaaaaccggtgcaaatacactcctttggtggtttggaaggtggtttctcctgacatggcaggttgaccatagtcaaactcactgatgtgtaaacataggatcacatgtgagtgacaaagaaaaaataaaaaaaaactgtaggacccacgttgttagctactcagctccactcttcttcttccgtccctttcttctcttttttttcccaaccaagctgacca

SEQ ID NO: 12659 - DNA, 696 bp, Oryza sativa
  Intron number 1 from transcript LOC_Os07g03150.1 (locus LO C_Os07g03150) derived from phytozome v7.0 (chr-ID Chr7; po s 1215690 to 1216385 reverse strand)
tgaggtacaccctgttctagtattttgtttcttgcagtttgttgcccttcacagtgttctgctagttcttaagttggagggattgtgatttgtgagaatgtgggattttctgttgctatttttttggtcagttttgtcttaggatggcaaaagatgaggggtttggtgtgaattttaatgtgaatttttaggagtgtggaagagtagttcatcttggttcatgtgcttgtttgcccctccgttcttcatgatgctttgcttcagattttgtggtttgaatgggttggagagtcttattttagtggttgaaagttgcaaatttggttattccttcattctgattccaaaggtagttcatttttttatatgtgatgaatatgtacctaatactaggaatgaaatgagagttaatgtactgggtaaagtttaaattccggctctatttcattggggaaaatgtgaatgggagaaaattagctatgttctattaggtaaggaaaaaaaacatgaaaaaggaatcaagaaaagaaagcctgcaagtgcaatgaatcatgccatgttctgttgtttgcttactggagatctttttgactgcatcccctatttcagttattcaggtgaattttgactcttcagttaattattgtatgtctttgttcaggggtgtgcaatagtgccaatcataaggtcaaaaga

SEQ ID NO: 12660 - DNA, 549 bp, Oryza sativa
  Intron number 2 from transcript LOC_Os04g58030.1 (locus LO C_Os04g58030) derived from phytozome v7.0 (chr-ID Chr4; po s 34380190 to 34380738 reverse strand)
attccctcacaatagcagctgtacctggacctaaggtaggcatgttttttccccttcccttggtaaacaaatctttcctgtttattttgattttgatgatttcatccttcttcttggtaacaaatgcttttcctgtagtttattttttatcttgaagttcactccgataatggccctctctcggaggtttctgaatctgatcatggacagccgcttcccagaatccaaatcgctgcgctgcatcgacctcacgctccacaatttcttcaacgctactccaccgaaccgaaacggaccagagtccaaagttgtcgcggctgatgcctgcatccagaagcagaacaataataaggaggaggccgccaccgccaccgtaagcagcatggataggattcaacttccaagccccatcttcaacttccaagcttcacgttcaggtattgacgactattggaagatagactgcttgccgctttttgatcgcagggtggtgtgtgcagaccagtcgggacgctgctttatctttgaggcggaagaagacgcgtggtt

SEQ ID NO: 12661 - DNA, 832 bp, Oryza sativa
  Intron number 2 from transcript LOC_Os03g50330.1 (locus LO C_Os03g50330) derived from phytozome v7.0 (chr-ID Chr3; po s 28707254 to 28708085 reverse strand)
tagttaaggagactaaaaaagtatttcgctcagaggtactatcctcttagatttgaattctttaccactgttattctattttcatttccatttttcatgcccatatatagaggtatagtcttatctagtgcagacttcttttacaagctagcccgtgcatgagaaactgtcacacatggaccattgtattaaagacaaggttagctcagcggttagactgcgaaataggtaaatgtcgtagttcagtcttgttcgagtgattgaatctccatcatgcaggaatgcaaattttggcgcctctgctaggttttgaacgtggcatcttctacgacaacatcaatgctaatgccgcacattatgccactttccttttggaacaattaataattaatccatccttgtagaataactgccatttgtcctaattttgtgcgtctgctaggattagaatgtgggacctcctgctaggaaagtgacaacctgaagcccactaaccaatcatggaaagtctagattatttggttgttgctatgtagtatacgattttggaatgattggtaattaatctatccttgtcgttatattatttagtagagtaacattgtttaacttattatagaaaattataactgtgttataaatgatcggttaaaacatcttttgcattatacgtataagatgtaaactttaattgtttaaggcgccatgctcagatgatctactgtttcaatcagtgttgtcgtgacctttgcaaatccataaagctgtatgcgatctattacctttttgcattaaacagtacaataacttttttcctttcggcacatttagg

SEQ ID NO: 12662 - DNA, 830 bp, Oryza sativa
  Intron number 1 from transcript LOC_Os05g27090.1 (locus LO C_Os05g27090) derived from phytozome v7.0 (chr-ID Chr5; po s 15696350 to 15697179 reverse strand)
cggtatgtctttgtactatctctcacacgcttattcatcttttttttccatggaataaacttaatttatcctagctagatgaacaaataatccagagaaactgcaagaagtttttttccattgtgcttgcctcgtttgattgacccaatttcttttttttttgtctattattaatgaacatatctggtgatttctttcgagttcctgtaagctgcctggcctaaatttaccttgaaaacattttcttagttcttaatttgtttcttatcctttgtgaaagaatatatgtcacgcatatcaatttatagaaattaagctttttctctctgaagaattgtagagaacaatttgaacggctttcgatctttcactctttaactgtagagtatgcctgcaacaagttccagtaataaccccaggtgtgaaaattaacaagttccagtaatctttgacctgcaacaagaattatattaagggccgtgaacaaactagctatctgtacctaatgatcgacgggaaatattgctgttgaatcttggagatatgtagtctacgttgtagagatatttttatcgataatagaaatcaatacagcctctatatgctgcctccacttatatattattacagaatagtcatccaatataaagttgctaaatgaaagaagaaatattagaagagtttaataaccaccctaacatcataatatatatcatatagatttcctttcaaaaaatatatcatatagatttgtcttttacaaaattaattaactagtttaaagtgggaaactgaattaaatgtatacgtttcccacgcaggtaaataaa

SEQ ID NO: 12663 - DNA, 903 bp, Oryza sativa
  Intron number 1 from transcript LOC_Os03g40270.1 (locus LO C_Os03g40270) derived from phytozome v7.0 (chr-ID Chr3; po s 22381114 to 22382016 reverse strand)
agaagtacgtcttcaccatcgacgacgactgcttcgtaagttcccctctcgatctcgatctcgatctctctgtgtttgttttggtgcggaattccgcgtggatctggtgggggaagcccgggatctgggtccggttcgttcggaattggccagatctggcctgatcagatctggatctcgcatcggcggatcttgatcccttgcttcacctgagcgtgagcatcagctagtgtggtagatcacattggttggttggttggtaggtaggtgcagtgttcgaaaaggattagtacttttgtttggtttctggctttatgtgttgttaaaattattagtatatgataattacgcatgcctcaatttctctagttgatgttagatcttgccagttagttggttagttaaatgattgtcattagatgggtccttttcattttggttaggggagttcgtcttatcttacgcggtcttgtctgcttcacatgtgacaagttcagtttgtcaagtattaaccaaacggtatcagagtgctttggtatcgctagatctgggataattgcttcagatctgatccaagttgagggtgcatttgaggtcaatttcaggcttttttacttttctgatgaaattgacataatgatgtgattttggctctctctcctgtgcgagatccacaacattttcttaatcaaatatattaagaaccagtttgatcttccattcaagttcaaagcttatgtagcattttctagtaatgttgcgatcgaattcattctattggtaatggtaatagcttagcttgatgtaataatgtttcaattggtagcattgcattatagatctcataccaactgaatgacttggcattgtaggttgccaaggacccatctggcaaggacatca

SEQ ID NO: 12664 - DNA, 877 bp, Oryza sativa
  Intron number 3 from transcript LOC_Os05g10580.1 (locus LO C_Os05g10580) derived from phytozome v7.0 (chr-ID Chr5; po s 5758943 to 5759819 reverse strand)
atcacctggattccatcgtacgtgtgctgttcctaattttgttttgatgtttttctgcggcctggctgctcgatttcgccgctgcacgtttaggttcttagtgcggcgataattgttgcagaatagggttctacgtttattctggtttgtctgcgattttttttggcgaggaacccccttgtctctagcatattgaatagtgcatcccaactaactgtgtcaaatgctttgtgaaaatcaagctagaattggtttcttcttcttgagagcattcacatttctgaggctaaaatgaagttttcagtgatggatttgtttttaatgatacctgattcataggatcaaccaaattggttatctccgattgcactctattagcataaactttgctgagtaacttggtgaggctgtgaaagagtgagattggtctgaaatcagcctgaaagacttcttcaagatttggcactaatttgctgaggaatattttgtagaattcatttgtgaagccatctggcagtaatgtttggctcattttttttttctgctcctgcaatgtgtagaattcatttatgaagccatctggcagtaatgtttggttcatttcttttttctgttcctgcaatgttgcaacctgcaagttattggtcttccctgtgtatatcctcaacgagttcttagagctgcatacatatgccttattgatgataattctttgcaatgaagcaagttagattgattctctactttcagtgcgaggcacatttgttgggatcgatgattgcatttgatattccatcttaagaatgacaggatgagaccgttcttgtgcttttttcctaatctatatctctgatcttgtaggtgttaccctccttga

SEQ ID NO: 12665 - DNA, 882 bp, Oryza sativa
  Intron number 1 from transcript LOC_Os03g40690.1 (locus LO C_Os03g40690) derived from phytozome v7.0 (chr-ID Chr3; po s 22622770 to 22623651)
gatcggcgccggcgtgctgcccgccgccacctcaggtacatatatatgtatccgcggagaaggctttcgtttccatcgaaaacaaatccgtgtttgaacgacgcattttgcgtctgtggcgactaatttggttgttctgcttatggctgtgtctagttcgtttgctgcactcaagctgtttgctgaaatgcttgcttggagtcatgctcatgacttatgtttctgtgtcatgccatcgtgatactttcttgacgcacattccttttgtaccaaacctggcaaactcatgccgttagtttttataaagcatgctaaagtcgctgttgatgctcacgaaacatttagtttcagtcttgtgctaatgcataaatccttttcactggaaaacctttgaggtgtagctaaatgcagctttccatttttgtcaacagaacaattggtaattggcaccacttccttaacataacgttgtctgatcagtgtagcttttgcattttctttctgtggaacatgtgaatatgaagtagtaaaggggaaaagatggcataaaaagaagtgagaatttgttgctggtagaaaattttgctagtagccaaatttaaacttctaatggtaatgcgtatgtggagctgtattgtataagtgatgacactttccagtgtctcattttactgatctcctgttggaaaagcaaggtatattgcataaatgactgatttgacttgttctgttttattccacatcttctatgcagatttactttacttgacttctgttctcatgccgcaattactagcttaattggaatagcctactgtagttttgcctcttagggtggcatcaatttctggttcccttgatttggtttttccttttcagttc

SEQ ID NO: 12666 - DNA, 585 bp, Oryza sativa
  Intron number 2 from transcript LOC_Os05g07810.1 (locus LO C_Os05g07810) derived from phytozome v7.0 (chr-ID Chr5; po s 4205850 to 4206434)
gggcgtcgcccacctctgggagcagcaaggctcacgtaagcttactgctaccactgtcctatactacctccgtcccaaatatgggtaaccgtggatatccgcgtctagtatttaactgtctgttttatttaaaaaagaattatgaattttttttaaaaaaatactattcatattttatcatctaataacaataaaaatacaaattaaagatttttcaaataagacgaacggtcaaacgtcatgaacagggtaaaactatacttattttgagatggaaggagtattataaattgctttaattttttttatagctaatttttaaaacatttgattaagtttatatataaaaaaaatactaacatacgaaacaaacgtatcactaaaacatatttaatggaactaatttagtgctatagatatagcaatatattttttttataaacttagttaaatccaataattaattagaaacaaatttaaaacgactttgtaataccaaacggagagagagcagagagagggagtatttaatttctttcttctagcgcgtgctaatggcgattcctcaccggccggagtgcagcg

SEQ ID NO: 12667 - DNA, 727 bp, Oryza sativa
  Intron number 1 from transcript LOC_Os05g39730.1 (locus LO C_Os05g39730) derived from phytozome v7.0 (chr-ID Chr5; po s 23256519 to 23257245 reverse strand)
gcgtccgtcgtcctgcttgctgcggcctgcagctggtgagtgaaccgcttctctctcgttcatctctagtaacggttagctactggatctgttcttgcttctgtgctcgctttgatggagtgcgctgtaggttgcctcgctcgcttgccttcacttgtcttcggataatatatcaaaaaaatttaaaaaataaaacataaagttggaatcatggttttcctcaatcaaaaaataataataagaagaagttagaatcggtcatggctgtgtgttgggatagatgggggtttattcactttattggctcaaattacaaacgtttcggtgcccaatttggtggtatttcaaccttcaggcgccagacatacaatggataatcttagtacgaatgaggcgtgcacagtagctaatgcttgcatggatgataaattttgctctttctgctggctattctccattggcagctaatttagcaacaaacattagcatgtaaaattacgcattacattccagttatccgtccaaaaaattgataccaatatggcgcgctttgcttaattatgggtctctttctgtttggcgcagagcttggcggacaataatacatatgcttgtccttgcaaacctatagtacagcgatcctttctgtggaacattgcatcagtctagaaatagattggaaaggggtttagcttgcgtatactatctgagactctggctcgacaga

SEQ ID NO: 12668 - DNA, 976 bp, Oryza sativa
  Intron number 1 from transcript LOC_Os06g51250.1 (locus LO C_Os06g51250) derived from phytozome v7.0 (chr-ID Chr6; po s 31012971 to 31013946)
aggcctccgctctcccccaacccgtcctagcccaggtattcaatccccccgcccctccccacatagatcttgcattcgattcccccgaccacctcaatccgcctcaattccgcgctctcctgccctctagccctgcggatttcgacccatgctatctgtgctcatttcttcatgctccctcatctcatctactcctacctctcactcatcgctgctgctgctttatctgcttcctaattcaatcactccctttctctgtatttttctactactcatacttaccaactactagttcacttctcttaccctatggattgtacctatttggagtacctctcaatcaatatatatatagtcacatagatagggaactctactcctccgaggagtgtcattttcttttatcatttataatctacacaattttgtgccccctgttacctcaatgggctcaacttggatcctagttacttctgcactacaagatcacactgtttgtctaattatgctgaccttgtacttcactgtttggaatctactaggtgcttaaaaaaacaactcaactgtagctcgaatcttgaatgatttatggactgctgctttctgatgccaaaatttaggacctttcagctgtgcctgttttcagcgacattaggtttcgagattatgtgattttgttttcaaaggaagggagttgtatggtttggtttcttaaaaaaaaactggaccctggatcttttgtatcattgtcaatatgaccctgttccgtactatcctagaacactcacctctcaaattttcatgcgagtatattggtttgaggtgagaatttcatttaaaaaaaaaaaaaccatccgtgaactgatcttagtgtgttccctttactttctggtattcttaacattctgctttggcaccctcaatattttgcttactaattgcatgccacttaattttctgctgcagatctggacgt

SEQ ID NO: 12669 - DNA, 947 bp, Oryza sativa
  Intron number 1 from transcript LOC_Os06g36520.1 (locus LO C_Os06g36520) derived from phytozome v7.0 (chr-ID Chr6; po s 21447221 to 21448167)
gctccggcatcctcgacctcaccggcaagaacaaggtctgcgttacttgatgagcaattgtccctatatagtaattcccttcgttctaaaaatatacgatgacgctgacttttttataatgtttgatcaatcattttgttttttttaaaaatataaatattgtttgttttattgttacttgttttattataaaaaactataatctaacttctatttttacaaatttatattgaatttttgaataaatagatggccaaacaatatgtaaaaagttaacggcgtcgtatgttttaggatggatggagtatacttcttcattccttgtaatgatgcttgcgtttatttgagggtgaggctctattcggttgagctaaggctgaagttgtgaaaaaaaaggttcaagacatatttttggtaaaattattatgggctgatttggtttaaaaccctactaaaatactggtagtgttaaaatctagataaattttgacgcggtcaaattttgtagggcgatatattactagctaggtaaaaaatttggtcttaatccaaataccaacaaaacactatttgaaactaccaaaacaaattggaaccaatccaaacatcccctataaatctattcttaaaagtttgaaagccacaactagaaacataatgccataaagaaacctcaaatcaacttataaactaagcatcaaaatagattgcttcccttggatggatggttaggagttttatttatacgcattgcttgcgatgggttttttataggtttcatttttataaattgctctgttgtacttttttttcttaatgaaataaagtgtatggttcttgtgtttcaaaagaattaagatgtaaaattagccagcttaattgctaatttgtgtctgtaactaatcttattagggagaggtcttgagcctaaagcagcagatcaccaa

SEQ ID NO: 12670 - DNA, 1008 bp, Oryza sativa
  Intron number 2 from transcript LOC_Os03g47640.1 (locus LO C_Os03g47640) derived from phytozome v7.0 (chr-ID Chr3; po s 26972080 to 26973087)
ggcgtgtacggacggcgacgtcgcgcgcctcaagggtgagatcctccggctctaccccgagcccgtcttactcccgaactgctggtgcttcttcgtgggataggggttttgttagggttttgaggaggccgcgcggtggagggcttttttttagcttgtgtgtggtggtgaactggtgattgtgagtttttttttcagcattttctgtgccggctttgtgggtagatattctacacgaatgtgttctccgatgtttttgtgcatttgtgaaaacaattggatgagatggtttttagcctcatgcatcgtttcttgttccgttacaatatgatcgtgtatgcccgattgcgcgtgttgttgatagaagtgtatgcgtgtttaatgcgggtggagggttttcctgtctacttttggttcaaattggtactattctggataggaatttatttgtttgccattattcgttatagggattaataattactaataatacttctctttatgatgccatatttctgtaagagatctcttcctcttggttttgtttacttttgattaataattactaataatacttacctttatgatgccatatttctttaagagatctcttcctcttggttttgttttcttcttctaagtgcccagatgtgatttttgggaggttatgtctccatttgtctagaattttgatcttgttttatgcacaaaaagaaacttctgtaataactagaattgcaatttgtgcaaatttgagccttacttttcttttggaactttcggtattgaagaggtggttaatagcatggatgaggatgatcgggaatcgctcgccactgtgaggatggaggggtattttgaggcagcaagctcgggaaaaattgatctctgcaagtactttggaggagctcgggttcgatgtcaatgctgaagctagtcgtgattctggtatgtgccttcctagattattgcattgttttattatgcttaatgcatctcctataggca

SEQ ID NO: 12671 - DNA, 674 bp, Oryza sativa
  Intron number 2 from transcript LOC_Os03g47760.1 (locus LO C_Os03g47760) derived from phytozome v7.0 (chr-ID Chr3; po s 27094629 to 27095302)
aaccccaattcaacctacattctgaagaagccaatgtaagtgattcttaagaaatgtgttgcttttaatttctcatttgatgattttctattgtaaattattctgtctgtgtaactaatgatgaagaataataatcatgtgttttgttgcaagtttttgtgtgctgcaattttggctgattctaagtgaatctgcatttgatccttttatttaatcctctgtattttaagatacaatatttcatctccaatcttgtgctgtatgtgcgtttttacatgttagtatttcacattagaaaacggggtttcccaagcatgattagctatgcaaatgactaaaccacacatcggcttgtgtcaagcatttttttttctcaaataggcgctgtcagggctgattgttttccccctcaaataggttatatctctttgagcctttatttagcttctactttgggctcccagtttctatgcatgcatatatgctcatttatcctttatattccctccttttgtgtggctctagggaaaagacttatgaagttgatcgttatgtaaaaggttcatgtggattacggtattattgctacaaacaaacgattatgtctttggaagtaaaactattttctgtatgcaccagggtaggtttctacttgctgcagccagtgggcgtgt

SEQ ID NO: 12672 - DNA, 727 bp, Oryza sativa
  Intron number 2 from transcript LOC_Os06g05820.1 (locus LO C_Os06g05820) derived from phytozome v7.0 (chr-ID Chr6; po s 2652133 to 2652859)
gattgctcgagtgcttgggggtggggttgttcctggtaaaacataactctgaagtatgaactttcatggtacagcttgagaagaaagtcgtaactgtgtatagggctgtaggttcacatgtcatatttgtataaattccataccctgacatggattttacaatttatcaacgcttttgaattgcacatgacaatcatatatatcggtaaatatgacagcatttaaatggtatttaaagtgttatggttatatgttcttttgccttttgaaactgactctgaaatgaactatacattcctcacagtgaatgcatagataatttcttgaattggctttgatgtttgaacccacatcttctgctctatatgttttacttgtttttaacgttcttatcatttcttttgaacatgtaacatggtgaaataccaattatagcagagttcatacaccgaaataattatggctgagtttcagataaatctttaacttgtacctcaccatgttgttgtgactctatttctgtaagttttcttttcatgtcgtaccattctacttctgggttatgtttatcaagtttgagaaatgtacatgtaacatgtcacatggtccacacggatctttttgttactacatgctatcaatgggatacatgctacctactgtataccatgagttgttacataattttgcagggtccttgattctagtaggtggggatccaggtgta

SEQ ID NO: 12673 - DNA, 753 bp, Oryza sativa
  Intron number 2 from transcript LOC_Os06g06400.1 (locus LO C_Os06g06400) derived from phytozome v7.0 (chr-ID Chr6; po s 2986455 to 2987207 reverse strand)
gctgaaaaagttaggcagtatttgctagacaaaaggtaactagtgcttttgttttattttactggtaattgattatctgttagactcccctttttcctgctttggtgaatatatctagatgattgatgcattgcttgcgaaaaggtttaatcaaagacaatcatgcaccttttacttcaattcagcaatgaaataggagaatttagtcctatgtcagatcttgaccattgatttccaatgatctctgctcacatagaaaggctgtctaaatgagaaatagagggtgcacgaccttccctgtgctgctctacataggaatggaaaggttgtttccaccctgttccctactgttgcccgtatcaccaagttttatgctgtgtaccaggattactggctgatagcactttcaggtggttttttttgctgtaaataaactcactggatgtgatgcagaactggtatagaactagaaagtgttttgttagccaagagaaaggcttctaagtttttcgtatttttcaaataaaggtatttaaggtacatatattttccccttaaaatcaggatcatccctaaagccttaatttgctaatcgtgggttaatgtgctcactcctttatataaaatatatgtagttccttctatcctttttgttttgggtaagaaacactgttatcttctatgataggttcatgactgataaagtgataagtactttttttcctgtaggtatattgtcatctttgacgacat

SEQ ID NO: 12674 - DNA, 573 bp, Oryza sativa
  Intron number 1 from transcript LOC_Os03g59020.1 (locus LO C_Os03g59020) derived from phytozome v7.0 (chr-ID Chr3; po s 33585874 to 33586446)
ctccgccatcacccgcacctccctcggccccaacggtgaggcccccttccctctccttccccgctctgtgctccggcgtcttcgttgcccgcgttttgatccgagaagtttgggatctagcgatgtgccacggcggactcgatcgatatatcaaatctggggagtgtcgcgcgcgtgatgtggtggtacggtagaaatggttaggctatggcccttgttgctgcatccacagtgtgttaattatttagctgcagaaaagatgagcttttgtttgttcaacccttaggtaatgaggttgaagacagtattgtgatgaagtcgttagtagtgtttcacatttagctaatttaatggtgcagagaaaagttgtggatcttttggacactaaaaaattgtggtgcctgtcttgcggttttaggttgagttcagttaatttttcagcgatttattgttagaggccagcagtaaacatgctcctgcgctacatttttctgtgatgtataatatctgacagattcatgttagtatcagaagctagtttcttaacagcatcgctgttttgttttggtagga

SEQ ID NO: 12675 - DNA, 524 bp, Oryza sativa
  Intron number 1 from transcript LOC_Os05g43290.1 (locus LO C_Os05g43290) derived from phytozome v7.0 (chr-ID Chr5; po s 25124605 to 25125128 reverse strand)
gtttctggtccgtccctgaccttgccccctgtcgggtgggcccagaaatgattttgtctcaaagtttcggaaggaaaataaaaaggcaaccgttcttagcgtcaatgatgcgttgggtcaagaaaattattagagcttgaaattctcaaggaagaaaaccaaaccatcattagcacaatagcaccagtgcaacggctaaggccatgtttctttcagtttatgattattataatctagattattgagtcagattactataagctaaattattataatctatagtagaataagcggttagttgtttctttcctaaattattagagtctagattattaggtttgcaagtctaaagagggagtggggtggcatggtaggtaatttttcatccaataatctggaaaaagctcacctaaatgagcttatcagattataataaactggactccagattataataagctacttcaataagttgtctatttctttcagcttactcctaataatctggattataataataccaa

SEQ ID NO: 12676 - DNA, 1016 bp, Oryza sativa
  Intron number 1 from transcript LOC_Os04g40310.1 (locus LO C_Os04g40310) derived from phytozome v7.0 (chr-ID Chr4; po s 23781004 to 23782019 reverse strand)
acgaggtcgtgcccggcgtcgtcgagagcctcaaggtacgggccaatctcgcgtgacgcgcgctttgctctgttgttgtgtgttggttggagaatcgccacccgtgcatcgattttgacgtctaatgtgttccttttttgtgatgttattattatgctgcaatttcgttggcgtaattgctggtactgctcatacggatggtagattttgcagatcatacttattgtatagatgagagtatcctattgcaaaactgcgaggctttgaccacattgttcattttgattgggatttcactagcctatgatctcaatatgtggtatactgaattacagataagtccacggttagagttatatatgcaatttctagtgaagttgcatatatctaatctgcagaattgttgtcttataaggatgggatggtgtgaatgttttaatatatattgttgtcttgttgacctgatgtttggcatctgctttggttgtccaatcttgagatgtggattagcaggcgttttatcagtacagaccagcttaatcgaactcacggtttgttgtttgctgtttgcctggtaaagcgtttggtacaatctatgaatttacattatttgcgtgttgattaaattgtaaaacgtgctagtttagttcctgatttgtttattctgcatcaaacactggcctctttaagaatttaatgacgtgattatttggcccagactgttaatatgacgtgtaatcaggtcagcttcatggatttgggatgtagggaatggaatagagggaataggtagactgatggttaaatttattgatttggggcacatggactcatcagatatgtgcttatttcttttctttcaattgaaccattgattagttttgtgttacatgattgccaatggaatgaaatgcacccttttttttttccagttctctgagcttcttttccatcttagtctcactgactaacttttgtcaggtgataacaaagttttgctctgagaggattgccaa

SEQ ID NO: 12677 - DNA, 725 bp, Oryza sativa; identical to SEQ ID NO: 12326
  Intron number 1 from transcript LOC_Os06g48050.2 (locus LO C_Os06g48050) derived from phytozome v7.0 (chr-ID Chr6; po s 29067841 to 29068565)

SEQ ID NO: 12678 - DNA, 432 bp, Oryza sativa
  Intron number 1 from transcript LOC_Os04g29030.1 (locus LO C_Os04g29030) derived from phytozome v7.0 (chr-ID Chr4; po s 17029407 to 17029838)
acaccggctacggcggcggcgccggtgccctcaaggtttgctatcttcttcttcctcctgatttaatgctctacgagtgatcgagttcgtaggatattctgcactactgctctgacataaaatttgatcatgttctttttcgttttgtcctggaaaaattgcatttgtcgattatattgaactttgtttatttctagtacaattttccgattcatctgtaattcatgagtctagttgcttccaagaaatagacgacacttccaggacatgacttatctgaacattttcatcaaagtgagaatatatagctagcaatgattttttgaagaaaatattgaacacaccatatgtgtatgtaaaatttgtttattctattattgatttaaatacagtttagtttcacttcagcacgtggaaatccctgttccttcg

SEQ ID NO: 12679 - DNA, 850 bp, Oryza sativa
  Intron number 1 from transcript LOC_Os07g05260.1 (locus LO C_Os07g05260) derived from phytozome v7.0 (chr-ID Chr7; po s 2368318 to 2369167)
tcccaccgtttcgctcttcatccaccgcctctcaggtgagattcaatccaattcgttccccctcctctaccgatacggactcaggttctcatgttcatgtgcgatgcgacacctcgtgattttacacctgcttctacattttttactcttccgattcaccgtttacctatgtgtgccttgcccttgcccgtgccgatgaacctttagaccctttgtttccttcaaattatctagtttctttgctactacctctctctctatatatagtactaccttatatgcgtgtctctgtgtcggaattaaatcttctttatttgccccccgagatgagcaaatcgaccctgttatttccctttgcctgtttttcttcattattatttaccaataacaagtagaagagtagcatttccttttggtccctaagggtgtgtttagttcacgtcaaaattggaagtttggttgaaattggaatgatgtgacggaaaacttggaagtttatgtgcgtaggaaatttttgatgtgatggaaaagttgagaactaaactcggcctaatcttatatagtagctagcctctgtttctcacctagtcttcttacgcgtatgatactcgcctcgctggctgttttttagctagattgatcaagccagtccttccaatttgatgttagattcacaccttacttgattaccagcgcatgtatatagtgtctttgcttccagcagttcattaattatttctggtactctggttgattttcgcttaccattgcatcgccatctgaatttttctcttccatcttatatgcaactgcaggataagcttgcagccgtcaaagaacgctctccaca

SEQ ID NO: 12680 - DNA, 974 bp, Oryza sativa
  Intron number 2 from transcript LOC_Os03g41300.1 (locus LO C_Os03g41300) derived from phytozome v7.0 (chr-ID Chr3; po s 22960152 to 22961125)
aaaagggtctgcgtgagttgtttattttcttattgacatttaaagagctggttagttggcaaactcttatcttatactccctctatcccaaaatataggcatttttagcatagtgtcaagtcaaacattttttattttgattgttaatagaaaaaaaataaaaataaaaaagatcaatcatgtaaaattgatattactagatttatcattaaacaaactatcataatatatgcaaactctttttatttaaaacatcttattttatagatattgttagttaaaatagcatcttgaagactatgtcgaagttcgaaaatgtttatatcttgggacggagtgagtagttatcttgcttgttggattgttccattccttttgtagcagttgtctatagcatcggaatttttatgttcatattttcatgtcatagtatgtcttatgtcttctaagcataagacacgaaatttgtatgtgatgtttaacattgtatcccttgcactattttatcatgagtcatgctgtttgaaacaatggactaatttactttctcatatatccttttatttcaatgaaatagatgttgattaatatcctggtatgtttctttgccactcttgacttgattactaacctggaattagtatcctcaattgcgtaagagtgattagcacgatacattccttggggtacacaaatcattgttagctaaatatctggagggtagtgccgaactatagttatttattttcagtatagtattctgttaactgaatatataaattttatctttgacaagagtgtactcttcactgattcatgttctttactgttggactatttgtgctccacatgtgtaaaagttacaaatgaccccttcctcttctggtactagttagtaggaaaggctgcattcacaaacaattggttgagctgttatagctacatttgtttggcagtttcgcttgatttcttca

SEQ ID NO: 12681 - DNA, 773 bp, Oryza sativa
  Intron number 1 from transcript LOC_Os06g51110.1 (locus LO C_Os06g51110) derived from phytozome v7.0 (chr-ID Chr6; po s 30916976 to 30917748 reverse strand)
caatcttcttcctcctctctcgtcttctagatcgtgtaaggctccttcttgcggtagattgatgcgttcttggtcggaaatttgggctagaggaggagattttcattttgaggggttttttttgatgtggttttgcgttcgatttggttccctgagctcgttttcccttggatctccgcttggatggagacgtggacgagtaattcagggaaaaagattagcagctagctgaaatcgaatcgtcggtactctagcctgtaggattggttcaagattagatctttgatgtttttgatgggttcttcctcctggttttttctaccaagaacggaggaaactcgacagggagatgattccgcttcttggaaggcatgttcagcaacttcttggacagccttcctttttttgtgggtgttttttcttttcttttattttctgctgtggaatttcttcgatctctccaccctgacgagagagttcaagcacagcaagtctctcgagttggaattacgagggttctaatctgtttcttctcttggtttctgccatatttgacttcttgggggtcgtttcgtggtcaaaactggaatttttaagacatctagcgaaatatcaggagcgaattcaaataataatgtcttgccttttgtagatccgcgtggctcgtaatgctacatgttcatatcgctgcctgtttcttcgatttctgacaaaaaaagcgttcgtgttctgacaaaatttcggtttggtttttctacagtagaacgtcagca

SEQ ID NO: 12682 - DNA, 702 bp, Oryza sativa
  Intron number 2 from transcript LOC_Os05g40260.1 (locus LO C_Os05g40260) derived from phytozome v7.0 (chr-ID Chr5; po s 23581190 to 23581891)
ttgaaggctggtctgtgggactcccttagatccgggtaaaatacattgtgtcccttgcttaaaccctatgtttatattttcacataaatctacatactatagcatgtagtatgtgttaatatgaaaatggtctcgttagaaattcctacctctatgagaagtgaaagctactaatttctcacattacctgcgacaaagggggaactgaaaaactaaaaaatataaagatgtagtaggaccggaacatcctgggtgtttacagactaggcccttacgtttttttgtttggaagttgcaacttccccattttccggtagcacgcttcccgacccaaactgctaaacggtgcttttttttgcaaaagctttttatatagaagttcctaaaaaaaatcaaatcaacccattttcaagtctgtaataattaatactcaattattcatgcgctaatggcttgcctccacagccaacagccgaaaagaactcagccttacagttcaggtcttgtagagaaactagattgataaaatttctatatctttttcttcaattaacaagggagtatgtagactaactatgtgctgtgtacatttgaagcaacatgcttatatcatgctccttagatctgtcatgtatggtaaagagaatctaatgcttttgctttgcagatttttgaagagtaataacagtacagagacagtag

SEQ ID NO: 12683 - DNA, 1052 bp, Oryza sativa
  Intron number 1 from transcript LOC_Os04g43020.1 (locus LO C_Os04g43020) derived from phytozome v7.0 (chr-ID Chr4; po s 25268511 to 25269562)
agcggcgctgctcctcctcgctctcgccgtgtgtatgttccttcaagattgtgtgtttcttttcttttttttttctttctacccgctgttcttcttgcccggccgggcgggcgatttcttcggggtttgaggttgcaatgcggagtggaattgttgtctggtttgtttcgttgcaatgggatcgccggcctggaagaagagcggtcatggctggctggcttgcgtggcacgttccccaggggttgtggaaagatggtttcgcctttgcttcatggagctgttcctcctgtgattcgtccgagcgcatcggcatctgaatccagtaggcgtggacatggcgtagattcccgtcaattttctccttttgattctcctctctttccctttcttgaatcaacccatgccgagtctgagaaagtttggaatttttatgcaaatctgttgttaaaaatttgctgcattggcgctgcccgcagcgattttcggtgggcttttactacgcttgatttgccggcttaaacccaccgcgtttcagtactgcaccagctgtagtggttggtgtgcatttgcctttctgttgtattgaaccgaaaaagttaacaagcttttggtgcaatgctcgattagtggtcaaggtttttggcgaggttcctgctgttctgttctcgtcttgcaatcttgcagacacatagttttcgttgcactctgcattgctcatctatagtaattttcttgtttttaatcaaactgtaattttgtagtaattcgcactcattcgtcctgcattatctgtaatatttggctgtagtttcttcaaaacaaaggccggaatgaattccattatctaaaaaaaatatatacagtggcgtgcaaaaccgtgtgagttactgcattagtattccagtttccactccatgaaacatatgttcattgtagttatgctgaagtaatagttaagagtatacagatgttatgtatcatatgaacagcattttttttgggtcaatatccttgcagtgccactgggaacggcaagctcaacaactatcgcg

SEQ ID NO: 12684 - DNA, 765 bp, Oryza sativa
  Intron number 1 from transcript LOC_Os03g49240.1 (locus LO C_Os03g49240) derived from phytozome v7.0 (chr-ID Chr3; po s 28036655 to 28037419 reverse strand)
gcgctgccgacgccggaggagacgggcataaggtgagtgttagtgctgcttctattattctgcgtttagttagttgggatttgggatggcataaatacaatggtgatcgatcacgatgcccatgcatgctgtgggccaaaatcatccatgcaactgttcgtttatcaagactaaatctctatcacgagcaaaagtgcaaatatttgtcactttttatctccttttttctaatcattaggcattagtgttcgttttgctctagaaattatcattgaatgccaaaacatttcaggggtatatttgtccattcaccataaatttaacaccggtaccattagttaacaaagtaggggcagacggctacttcatttaaaaaagtaggggcaaaatcacaaaccctaaaaagtagggataaaatcacaattgaatcgtaaagcaaggatagaaacacaattgccccttattttttttatctatttttaatgctccatacatatgtttaaaaattcgtgtgatgttttttaaaaagtttttaggaactaaacagggcctaatctggttcatgtctggtaccatagtaatagaactggtacctaccataccgtgctgaagttacgttaatgtaattccgttcaacggtacggcgttatgtggtatgaaaatgctcctcttcgaacgttcaatcaaatgaaaaacgtcggatgcctacgaccagctcagttcttacatgctaatttctcctttctttatgttgatgccagggaa

SEQ ID NO: 12685 - DNA, 994 bp, Oryza sativa
  Intron number 1 from transcript LOC_Os06g04830.1 (locus LO C_Os06g04830) derived from phytozome v7.0 (chr-ID Chr6; po s 2109609 to 2110602 reverse strand)
ccaaccaacgacgacgacgccgcggccagcaagctgtgagtgacctaccgaccgacccacccccttcccttacctctccattccgcgcacggctcctctgttgttgcgcggatgctgcgctctctctctctctctctctctctctctctctctctctctaccactgcggcgtggttggtggtttcgaatcaattcggttcggggcgtgctgtttgttccgcgctgtgttgcggtagagaggcaaaagcgagatgtactttgatattgatgatgtaatggcaaggggcgtgtggttttaaccctaagattttgtgttcaatccgctcacaatttcttcttaaaaatatgtttggagggatgtatttcctccaaatctccttttattattatttttggacctaggcaaaagcaagagaagcctgtaaacctggtgctgaatcgtgatgctaaaaaaatgtcataacaagcaggagagatggtttgaacagtttccattgatgctcccgagttgcacacaccacttaggtgcctctttccggcgagggttcatgcaataaataattgtaatgataaattggtgacaagggagctattcctatttcaccaatttgtattgaaagacgtccttttattgcgcggcatagttggccggccacttacatatatatagttgtatgtgttcttaatttttccctgtttgtttggagcggattgatgctttagatagcggttagccgatattgagtggcattggcaccctcaacttctagtgcttatgtgggctagtagcgttcgtaacttcgtataaagagacgatctaccttgaactcttcagcatgcatttatgagactgtataggccaatatcttgaacaatgaacaaataaatgtatagacagtgcaaaaaacatgcatgcaagatgtgggggtattgcttatacacttatgtcattgtaggttgcatagtagaaatcacccatttccctttgcaggtc

SEQ ID NO: 12686 - DNA, 923 bp, Oryza sativa
  Intron number 1 from transcript LOC_Os06g48210.1 (locus LO C_Os06g48210) derived from phytozome v7.0 (chr-ID Chr6; po s 29163811 to 29164733)
aatcttgataactgcaggtatgtggtgcactgatttcttcaggaatgctctgcttccatggctaattgttcactgtcatcaaattggcattcatagcgctatgttcatatgttcagtatcatggaaatggtgggttttttttttgaagtatgaacagctaaacagtattcagtttagtgatataattgtagaaaatggtttttactactgcttatgactttgtcaaaagtcagaacactacgtttatagaacagaatatatgcaaactgcagagatggtcttccttgtagcttgtcaactggaaattgaaattcagccaaaattagtgatcagcttaagttttggccttttgggtgaagatgatacataagtacaactttcaagtaagagtagtcatttcgaaggggatgtggagagatgctaatattcgattctatctgcttgtgtaaaacaagattctatctgctaatcatatgaaagtaatagaaatgtcgatgctcaaagctgaaaaaatcaaacaagatggaaagaaggctgcagatgtgtcttgaatctactttgattcctttcagttttgagcctcacagcatagccaaatatactgattgtatgcttccagtaattaaaccatttgttcgagcctcatcgatttcccatatttcctaataagccaaaacggcttattatgaaatgaaaattaatttataggtaaaacttttatatttttgttcgtagcgacttaaaaaccaacggtaaaaagaaattacactgagaatatcttaaaatcaactccaaaatcaagttcaaaaattcaaattttggcttttgctttggcttattaggccaactgatggagctctcattccttgattatttgaatgttctcaataattttcttcatatgtccaggtatttaacactag

SEQ ID NO: 12687 - DNA, 550 bp, Oryza sativa
  Intron number 3 from transcript LOC_Os05g39140.2 (locus LO C_Os05g39140) derived from phytozome v7.0 (chr-ID Chr5; po s 22895201 to 22895750 reverse strand)
acacttctccaagtaaatgcttctacagtttattattaaaacaagttgcttttcttagcttcttcattattgaaggttccagtatcagtggatttgaaataactctagatttttcatgtactgtctgtcccatgcaccccaagggatctcaaatagtttagcaaacaatcatggagtagtgtcagtgttatatgtttatatcagttctaactcatttgatctaggattataaggatcaacgttttatatatttaagggtgttattataatatctatatgtgattatgtcataaacattggagtctgaagtaaaatgtactcttgcctgacacgagtacaagctgcttctaatatcgatttcaaatcttttacagtcaaccatagcaggactctgcaacttatgtcctttcttagatctgcaatagttcaggggcactgtcgtattatctttgttgttttttgatttcttgttttcccagagtcgtaacgtttcattttgatctattgcttatgccactcacagccacttgggggtgtaagcgctttgcac

SEQ ID NO: 12688 - DNA, 1004 bp, Oryza sativa
  Intron number 1 from transcript LOC_Os04g34340.1 (locus LO C_Os04g34340) derived from phytozome v7.0 (chr-ID Chr4; po s 20625850 to 20626853 reverse strand)
gagcccgagtagcggcggcggcggtggcggtagatggtggcggcggcggcggcggtaggtggcggcggcggcggtagatggcggcagcggatgggggcagaccagcagaggaggcttggggaaagggggagaaagatgaaaagaaggaaatgttgagagactgacgcgtgggtcccactgtaatagacttagaatagagagggtgaatggggaggctgttggagtaaacaacgagtttgacttgctaaattagatggagagttagccaaatagacatttggagagactgttggaggtgctcttaggctgctgtagttgctgctggctagttgatgtaagcgtagcagcaatgttgcagcagctagctctttcgaacatgtcacaagttatttttctttccttccacatgtacgttgattttaaatcattttgatttgaaatatgaaaatttaatgtatcagccatgcctagagtatttccatcttcaccagttccttgcacaaatgttctaattggtagtagattaaatagagtgaaaatggacagcagtacagcacttccgcaggcaggatttggatccagtgcagttaataatatgactacaacttgtatagtccacttctagctgttaaatctgaaattgagtgttaaggatctgtttggtacagctccaattcttaaatataacttcaggagttgagtcttgagtggcgttgtggagctgcctaaatccagctccacaactctagtacattttgtgagagagctccatccaactccactcccagttttggtggagctgaaactgtttggctgagctccagctccaggaggagtggagttagagttggagttgaaggatgcatctggttactgtagatcactacggaaagaatcgatgagtactaaatacatcgatattgtagctaacgatctgatccgttcattaaaaaaaaacggatggctgccattatgcaggtgatcccaaccccagcaaacaggtg

SEQ ID NO: 12689 - DNA, 658 bp, Oryza sativa
  Intron number 2 from transcript LOC_Os04g54080.1 (locus LO C_Os04g54080) derived from phytozome v7.0 (chr-ID Chr4; po s 32047256 to 32047913 reverse strand)
tgttctggccaggttcttttgccgtcccgggaaaggtaaaaaaggaaaaaggaaaaaaaaataacagtataacggtttcgctctcgttgattttctcgtcgtatccgaacttcgttttcgctttgcgcgtgcatcctgatctggaaggacagaaatgtcttggccgtatgtttgctttcttcggtccaaccatgctctaagactatgggaaatcatctagtatgcatctgataattggatacatatgctctatttcttcacatttacatttttgaaggcaactaggaaacagaagaacaagacctaatgagatttagagccaaagtatggaaggaaaaggaagatgaatgcaagaaccttggtggttggtgtggcaggaacggaacagaagaatttccaacaccaaagccagagggagaagcaaaagtagctgcccaattgtgcaggagttaaatcagatagagcttagcagagcttagcctggtaatttcaagagctacgagagcagttctcctttttatcagatgtacatcttcttttccagttgcctcgcctctcctcgggctcttcttttgtaagactctgtgtctttttaatcgcataatctaattttgattttgcagagctcctgccttgcttgtccaaaaaagaagaacaa

SEQ ID NO: 12690 - DNA, 517 bp, Oryza sativa
  Intron number 1 from transcript LOC_Os04g54080.1 (locus LO C_Os04g54080) derived from phytozome v7.0 (chr-ID Chr4; po s 32047927 to 32048443 reverse strand)
ccaatctgaatccaatacgcctctggagtctggaggttagaagatcaagaaggaattttgcgtctcgcctgactgctgatttctatttttttttgagcggaacatatattccatttacttattactgatacggccaaatcgccctgattgctgatttctttgtttcataccggtttgataatacttttcgttttggataagggcacggtctctaaaaaacaactttgaccattatttttcattataatatgtataaaattgttaacaaatatacgattatattaaagtactttttaagactaatctatacatatagtcaccatatttaaaagacaaatattttaaaaatgatttataatcaaagattataaagtttgactacacccttatccaaaacgacaagtattatcagcctggagggagtagtaaactttcagaaattaactagagatttctccttttgctgtaaccgtttttaacaggatctattgtacttgttggcagccttgttttatta

SEQ ID NO: 12691 - DNA, 862 bp, Oryza sativa
  Intron number 1 from transcript LOC_Os03g59640.1 (locus LO C_Os03g59640) derived from phytozome v7.0 (chr-ID Chr3; po s 33948413 to 33949274)
gggagtatttccccttggccgctgtcgtcgggcaggtgagtgagcgagcaactctctgcatagcttctcctgcattggtgttgctgaagacacaagtaccaactaccaagtagtgtggagtggtacaagtaatttgattccccagttgagttgatctgatgcatttcgttgcgcggtatcgcgaatgctgttacaatagagattcgaaatccaacagatgcatttcggtttttgtcgtgttttatgctaatgctattgtaagcgaatcaatcagtggacaaatagtgatcaccgatcagtacacaatgtgccaatgtacatctctgaaaaaatgcctttgctatgagttattttgctgtcatactctctctgaagatgaaacaaacgagctggaatgactttcaagctttagttttcctcccattgttccctgcatcgagttatttttagataatggaagctttattaatatactcagtcaattacacaaagacaatacaaccgcatcgggcccaccccggcctctgcatatgatgcacacagccaaaagaaccaaaaacatccttcccaagcacaaaagaataaccaaaacatagggattagtggctatcaatccgtagactagatcgccacccatgctcctggataaaaaaactccgtgtcacctggtccaactatcgtgatactaccgcaatagtatcccgaagtcccggtttgtggaggacagcctaggtacgtagccaccgggtgactaatgtaataacctgcaaaggagaagacaccatcttgttatcaaaccattgatttatggtctcaactttgtatatgttacaattttaacttaccttattgtgcgtccagg

SEQ ID NO: 12692 - DNA, 839 bp, Oryza sativa
  Intron number 1 from transcript LOC_Os05g44130.1 (locus LO C_Os05g44130) derived from phytozome v7.0 (chr-ID Chr5; po s 25593921 to 25594759 reverse strand)
tcatctacaacgagcccgaggagcgcctcctcgaggtccgtgagactccctcccttcccccctttctcccgttcttcgttccgcttccaaatgtgtgcgcgtggagtcgtgctatgttcgtcaattcgtcattgtctagaaaattcttcgtgatgtgttcgccactacattgcattcccctgcgttttgaagaattggtgctaatccattcaaatgggaaacaaacaggtgtagtgatcctctctaagcaactgccaaagtatattttaagtttatcagtgttaattattttataccattccatagattattccaaattgtcgaggaggcaaaactcttaaggcttgtgtctcgtaaaatgctatctgactgctcactatcattagtctcgctccttgtgttgagctggatgctgaaccagccggattgttttttagtttcttgtggtttttcttcagcctatcaggtcgtagttggttggaaacctcattgagcatggattgatatgtggatgcctgaactgtcaatatcaaatgtgaatttagctgaattgtttaaatacttggttatgccaattatttaggacgaacctttggaatcatttgggtacttcagatctgtctggaatagttggcctgtcatgttttaggttaccatacatctttgcttatcttttgcaaacacatcatctcctgaaataggccaattgtgaagtacttggtggccctgcttacatgctacttatgttttcttttttcatgaaataacttcctcatggttttgcttgtgcattttctacaacagaaactgagtttggttaacggtgttctgtttactgg

SEQ ID NO: 12693 - DNA, 1028 bp, Oryza sativa
  Intron number 1 from transcript LOC_Os06g39600.2 (locus LO C_Os06g39600) derived from phytozome v7.0 (chr-ID Chr6; po s 23506129 to 23507156)
ttgatactggagggagtaaggggttggcaaaagtggtaattgacttgatatcattgccttgctgattttggtttcaatctcgtcattctttccggtattgtttagattataacagtggatcctttagatctacactgcacattgttttttcaatagaagctagatatggtgatacacatagtatgcttccataacaaaatatatgcacttgcctgtccatttgtagttatgtacttgtctgacactgcatgttgcttggtaatttctagtagatcacattatttgagcaaggagggaaccattataatgtcacacttaattcacatgggaggggacaagaatagttgtttcatagttacaactaattgcaccgcttttgggcatgtggtagggcaaacttaactatagttagtatttgctataaaaattttctcttcaatccttgcaattaaatcattttaattgggcatccacggacgagcctaggcagccattgggccatggatcagccagtgagtatgagtgatattcactttcggaagaaccgaatgtattccctctgtcccaaattataatagatatattttttacacaatctttaataacatactttgatcattaatttatttcatattatgtcatcaacaactataaaattattatcacatgaaaatgttttaaaatatgaatctaatgatataacatacataatacttggtgtagatattgttagtgtaattattagtcaaaagttaccgagtttgatttttctaaaaataagagtgctctacaatttgggacagagggagtatatgacagtgcaatttttgtttttgccttttgttggatcaacattgttaatatatgtatgagataatctggaaaccctttttgggtcatggtagtgcaacttcaaaatgaaagagcatacaacatagattctgtgcagtatggttaattatttttttgtcatgcttggcattggttttgcaggtgaggagtcctgcaaacagtacaaaatctggaac

SEQ ID NO: 12694 - DNA, 897 bp, Oryza sativa; identical to SEQ ID NO: 10120
  Intron number 1 from transcript LOC_Os05g40270.3 (locus LO C_Os05g40270) derived from phytozome v7.0 (chr-ID Chr5; po s 23591066 to 23591962)

SEQ ID NO: 12695 - DNA, 816 bp, Oryza sativa
  Intron number 1 from transcript LOC_Os05g43030.1 (locus LO C_Os05g43030) derived from phytozome v7.0 (chr-ID Chr5; po s 24925491 to 24926306 reverse strand)
aggatccccaaggggcctgaccctattcacaacaggttcgttgatgcatcatgcatgcattgctgttcagtcatacgactcataccctgcattttcttttttcttcagaaattttatggcatttcgagtactaaattcgagtagaaacatggaccaaaatggcttggaatggacgactgtgccatgcatgaacattccttgatactctgctcatgctgtctgacgactactctgctctgctcgttgtcagttcaggcatgcaatgtacattgcatatgtttgttcagaaacaaactaacaaaatgcataagaaatcaaagtaaaacacaaaatgatttacacctataataaataacaaatattagttttagcaagtagggtgatgatttatttatttacacataatcaatagcagcccatttatgttattagtatttgaggcatctaagcttccactactggaacaatatgtcctcatcatctctgctccctgcttttgtttagtttatctgaaaccaactaagataagcatctcagacaaatgattggcaacacagtactattgtcaccacatatataacaaaacaaaagaacagcatatcagcatttgtcagtgggtctcacaggtcagtaagtaagagggccatggttctgaacatcaacaattaaaattttcaaatattaagcacattaggttcaaacttacatgaaaagctttcaactcaccttctgctaggttggttaccaaagctccatggctgacagaaatgtggcttttcaggcgtgccgggaagacgacggttgcgccgcggcgga

SEQ ID NO: 12696 - DNA, 938 bp, Oryza sativa
  Intron number 1 from transcript LOC_Os06g12129.1 (locus LO C_Os06g12129) derived from phytozome v7.0 (chr-ID Chr6; po s 6489497 to 6490434 reverse strand)
gcggcctcctggtagtcaccgtcgctgcgtccgcggtacggccccccttgctcccaaccctcacacatctcatatcgccttctcaatccagcgacatgacactggggtagcctccggtagcgatggcagcatgacggcgttgctgctttgaaggcgcaagattgatatgcgtaacgtggttttgaaagcgggttcttggccagcttttgcatctgtggatggatggatactctctcccccctgtgaagagtaaacagcgggtggaactgaaaacttatctgaatcgaaactcatgatatgcttttaagctgtcggttttgaatatgaattagaaactgaaatgccaatgaaacagcataatgtgataagggtttaaggttggtttttccactctatttgaatctattatttagtactagtatcacatgtctaccaaaaacaaaaaagttctccatttacattcttgaaaaaaaaaaaagatacccagactgaaatagagtcatagacacccccccccccctttttgttgtttaatttttgtaattcttgtaaccgtcaactccttgccaaattgattctgacttgattcctgcatgcgaagctttctgctatatgatattctaggaacatatcagatcaagagtagagcagtacttaaaatttaactggttatgtggttgtgtgttaaatttgaatatatacaagctttttgtttcaccatgatctacatgttaaattcagttttgtgttgaatcaaatatatttgctttattaaagaatattcttatacagaaaaatggttgacaagtgtactcattaacaattttgattccattttcacttgtgcatgccaatgtatactcttaatttgatagtgcgtaactttggaaccttactcttgctgacagttgctgtcttatataggttgttctttctgc

SEQ ID NO: 12697 - DNA, 766 bp, Oryza sativa
  Intron number 1 from transcript LOC_Os07g04709.1 (locus LO C_Os07g04709) derived from phytozome v7.0 (chr-ID Chr7; po s 2091844 to 2092609 reverse strand)
agggccaaggtgagtgactcctcctcctcaactctcacgttggatggatcttgttttgattttgtgggtgttctcttatttgtgtatgtatgtatggttctcgctggttagcaaacaagtttactactagtaaaatcttatccgttccgttgtggacatggggtcaatcgaagcatttatctgagaggattaccgtgttaaaatgttgtttgattgagtgattgtataccttttttttttccggattggtttggcatgatgaggaaatcaatcgtttctaactgatccactggatgagaaattcctcctactcattctgaatgctaaaattttctttcataattccgtgatttgtgtccagttttgcggtcattttgattaagcacgccttgccttatgtgagatgctgcgaaaaaaaaactgtctctgttatgccctgatggcctgatctaagatatgagcagccagagttttctgtgtaccgactgcattttgggggatttcgtgtttccttgcaagtttttgcttctgtttagctaaaattctttgctctggtacgcagtggaagaagaagaggatgaggcggctcaagaggaagcgccgaaagatgaggcagagatccaagtaatcccataggcgatcgactgatggaggaggagaaagcgtctttggctctcactgctgtcatctcatctatttaagttgtttagtttcctttagtaagagagaaaaaaaactaatcaatgtacttctcttgatctttgtc

SEQ ID NO: 12698 - DNA, 578 bp, Oryza sativa
  Intron number 1 from transcript LOC_Os05g43980.1 (locus LO C_Os05g43980) derived from phytozome v7.0 (chr-ID Chr5; po s 25527135 to 25527712)
cagccggcgaagtaggacgactgcgtcatcggcgtcgacggctcggtctccatggctcgctcgctgcctcgtccaagcgatcgagagatgtgtgtgtgtgtgagagagagagagattgtgagcgagagagagaagcttggaggtggttagtttatatatggagttttatagcgagggagatgaaatggattaggaatggagagagtggaagagttgatgcgggtggccgtgcaagcccgtacccgctaatatattcggatccaacttgcgactagggaaagtggttttatctctcgagtggatattattgtttcttacgtgtcatctcaataattatataattataaaaaaattcatagattaatatggaatatatcactctatagtacatgtttaaattcaacttctataaattacaataaaaataataaatataaacgaaagtatattaactatttttagttttccttttttgcaaccttaccgtttgaatttagcattatatgtttgtgtagtgatatatttcatattgatctatgcttttatttttaagaaaatatatatgtctatttaggtga

SEQ ID NO: 12699 - DNA, 367 bp, Oryza sativa
  Intron number 1 from transcript LOC_Os05g31760.1 (locus LO C_Os05g31760) derived from phytozome v7.0 (chr-ID Chr5; po s 18440491 to 18440857)
cagagagcataagaaaggcagtgcaaggtacaaatggactcttcaatctctttgtacatcatgaacatttaggatttgaatttgtttcacaatgtaaacttaaagagcactgaattctgaacactgttctttgccaaaccctgttgcttttcatgtcattgttattgttttcatctgaagtgtttgcgagtaattagttgctactactccagttcatgtggaagagacgagaaattttgtttgttcaagttggtcatggattagctaaacatgttctacatagctctgaaagactgaaacaactgatgatttcgaaatcaaatatttgaattttcttttcttttttttggttgaactgaatcaaagg

SEQ ID NO: 12700 - DNA, 969 bp, Oryza sativa
  Intron number 1 from transcript LOC_Os07g07530.1 (locus LO C_Os07g07530) derived from phytozome v7.0 (chr-ID Chr7; po s 3754046 to 3755014)
ggtttattgaaagtttgttttcgtctgggtagattttgagatggattcattgaaagtttgttttgggtcgatttaagatggatttattgaaaaaacctagcttttaggttgtgtttagttcacacaaaaattggaaattttgttgaaattagaacgatgtgaccgaaaagttgaaagtttatgtttttggaaacttccaacttttccatcacatcaaaacttttctacacacaaatttttaacttcttcgtcacatcgttccaattttatccaaacttttaattttagtgtgaactaagcacaacctaaactcggccttaaccgtgtgcttccaacttgaaacaggaaaaaaactgggatcgagatcaagtgggttatggtgtgcatttgttgggctccttcatctatcctgcagccgtggcaatctcaatgaaggatcacccaggagatttaactgcggtgctcttgatttttgggacgatgtggtgcattttggctatgggttttcttcttcatttgcatgctaaggaatccaaggctcttcagcgctttacatctattatccctagagtcttcctttcatgcttctcatatctagtcatgtaccacatttccttccttatacccaacaagaaggcagcccatattttctggtatgtgaaagtgacagtacttctgtcactcttccatgctggaattctgatttgggtaaggagaaacacaaaacattcattctgtgaaattttgccattagatatgttctctctctagttacactgttataataaagtttttttttcatttaggttgtaatccacaagattttgaagaaacattcgaatatctcaatgcatcaggacactcctatcaatgatttcaaatatgtacccaggtatatacttcattatttttagtatttctagtaaaataataacataaaagaccactaataactttatttgtgcagaa

SEQ ID NO: 12701 - DNA, 837 bp, Oryza sativa
  Intron number 4 from transcript LOC_Os06g07474.2 (locus LO C_Os06g07474) derived from phytozome v7.0 (chr-ID Chr6; po s 3592137 to 3592973 reverse strand)
tacaaggtattttttttattatattacacatttgtactagcagctatactttattatatgtagtgttcccccctgttttataaccattcatgagctacgctcatttttagtattgttttgatgctttaaattccattgccgaaggtcctttataatttcatatgctaaaaaaacatttctattaattaaaattatgatgcgtctttttagaattttaatagaataaaaactttgtaatatttttttggctatgcctttggcatgtttgccggatcaaatggaatacagttaacaaatgctgtcacacatgcattgggtcatttagccctgaaaaattaaaatgcgatgtggaattgcaaagaacgttatttgtactatattgtccaaggtgacttagactattctttcaaaagagctagagcacataatatctatttaagttgtgatacaaataggtactggtgacattgtgagtcagaagtacatttcaccatttttataaaagcagcaaatgagttgttttcatgtttaaataaaggaaaccttgtgaacagagcatggtaagtaaatggccattaaacttggtaaatttgttttttttttgttgccataagagaagtttaattttctttcccatttctatgaatcagatgcacaattgcaaatgttcaaggtttctggttcttaatacaatagatatattcacattcttatactgtctactccattttaatttatttattttattttgaccttcttcaggtttaaccttttgttttcattttttttgacaattatacagggtggtattctgtggtttcataacttgaccgagtt

SEQ ID NO: 12702 - DNA, 867 bp, Oryza sativa
  Intron number 1 from transcript LOC_Os06g09230.2 (locus LO C_Os06g09230) derived from phytozome v7.0 (chr-ID Chr6; po s 4642857 to 4643723 reverse strand)
tcaacaccaaaggcacctcaggcaagtcacttagatatatatatagcttacatatatatttgtagtacaattagttttaaggaagaattgagaaagtttttttctcctttggagatattcctcgtttcttattttatcacattaagatagtcacaaatttgtttcagaaagacctaacaagatgaatcgatacgtgatatatcgcttcacgaattccatcagaaaaatatataacgaacatatgagtttaaatttgacgcatacaaagttttaaaatactaatatgactatttagagcctaatttgcaatttttccaaaccataggtcgaatttaacttacatactgaaataactttttttcaaaaaaaaatcataactatttagtgtatgttggttcatggctcatgatatatgtttttctttaaaaaatattcataactcacttgatcaaatgttttaaatgttgaactttagctgttggtcggacgtccgtattaaagccagggttcaaaattctgactttagatcaaaatctgctcatgagcagtatcattggatttcacataatctgttgataaacctaccaaaaccgatgaagtccacataaaatttttatcaaaaatttaaaattcagtttgcttttttataactccaccaaaaaatcgagtggtttgcgttttcgacccgatccgaaaagttccgaaccggattctactggatttgtgaaccctgattggagtgttctcctttgtatttggaccttaataaattcccatttctttggaggaaatcaggaaactgatgtactatgatcctgtcgatatggtgcaggtggagtggaggacgcctccggcttcaagcagccg

SEQ ID NO: 12703 - DNA, 985 bp, Oryza sativa
  Intron number 1 from transcript LOC_Os07g08400.1 (locus LO C_Os07g08400) derived from phytozome v7.0 (chr-ID Chr7; po s 4312052 to 4313036)
gcgctggatcctgatcaggacgagctcgaacgcgcgtaagtgcgattcaccagaggcagcttctgattgtttgttttttttttcaatcgtatagcatcagactctgcttttggttgcattctgttgttgcctagcttaatggggttgagattacatggagattccggtgtgcatttttcgtgttcatctgtcgcacgcgatgctgtcatgctgcgaaattcaagttagtacggccgaattgcggctgttttttttcctatctcttaacgccacattggaaatgggcacttgagatgattgtgtgggaagtgggatattggaggggagcaggtagctgctgatgcatggttgaaatgagaaaccaagtggattattcatgtgagatgtggagtaggtagccggtgtgttgctacttgcatcaaccggactaattgagcgtggtgggtagatactttgttggttaatggatgtcaacttgctaagtttcacctacatatgtggataattaagaaagggaagacacatcttgaagatggaaaattttgaagtaattagagcaatagcaaacaaaatgatgacacattcccattattttcctaaaaaaaaaactgaagccgctttcgtgtcagcatagtgtgccccagttgaaccggctttggaactctcagatgatctaaccatatgaaaggcaccttcttaattgttttgatgaaagattgtagacttggttacttaacagaatcatcgtaggtctgcttcttcgacttaatgctgagtgaatgagagtacaacatgtatatggctggtactactagcatcatgcagtagttgtgtttcatttacttgttcatatggaaaacatcatttgctacaacgctcatatttatcaaatcagtggactgcaaagaaaaattattgtggttttggaagttcttttttttttaacaaagatagttgtgcaggtttccaatcgtcgaaccagatc

SEQ ID NO: 12704 - DNA, 394 bp, Oryza sativa
  Intron number 1 from transcript LOC_Os04g39590.1 (locus LO C_Os04g39590) derived from phytozome v7.0 (chr-ID Chr4; po s 23413440 to 23413833 reverse strand)
gccttcgccgccatcgagccatcggtaatactccctccgttttaggttacaagatgttttgattttatcaaagtcaagctgttttaaatttaattaaatttatagacaaatataataacatttataatactaaattagtttcatcaaatcaacaattgattatattttcataataaatgtatcttgagttgaaaatattattaattttttctacaaacagtcaaatttaaagcagtttgattttgaccaaaatcaaaacgacttgtaatctaaaacggaagaagtataacaccgagaacacgatcacttactgggatttgattggtaatgttgacattgtggtgatgaataattggcaggtgttggcggggctatcgaggaaccagctgaagca

SEQ ID NO: 12705 - DNA, 880 bp, Oryza sativa
  Intron number 1 from transcript LOC_Os06g43750.1 (locus LO C_Os06g43750) derived from phytozome v7.0 (chr-ID Chr6; po s 26327401 to 26328280 reverse strand)
ggttcgacggtacagccactgcctactatcttcaggtacatacgaataataatcgatccctttctttccgttccaggatgaactccctgtgtgccatgtcgtcgttggtagtggtactgattcgtggtagttttggggctgatcaaagtgttagtttgttttaaaaaaagatttggtgtttgatctgtcttaggagctgtttggttgggctgattttggcccgttgcatctctttctttccacaggcctagtagaaaaaaaaatacgaagcgcgtgttaaaaaaaaagttgcgaagaacaccctggccagctgcttggattcgccgcgtttttctgatggattacttatctttagcagaaaaaaaaattgttcacttgttcatatgaatggtagtagtagtttaatgtattgtgtgctgtgggacgtaggattctggtggattccgttacttatatttagtaccaaaaatttagcagtttaacaaaaaaataatcaacacactcacatattcaaccttctttgatctagctgttaagctaattaactggaaccatttctattttgcattctccaataaaacatcctccttataggttaacagttaattaggtggtaatatttgtttcatttgatctgcagttgacatgcgacgtctgccgtggggagactgccaaggagatctgtctgttcccagatcacccctgccctcaccatctaggtcagatggcattcgtgatgtgctatccgacctgtgacatactgtatggatgcattttcttctttcatttccatctgttagttgtggtttctaaatttttgcttccatctgtttgtttgaatgtagtgcaaggactgtggctccctgggctcagtctccct

SEQ ID NO: 12706 - DNA, 970 bp, Oryza sativa
  Intron number 1 from transcript LOC_Os04g29880.1 (locus LO C_Os04g29880) derived from phytozome v7.0 (chr-ID Chr4; po s 17644715 to 17645684 reverse strand)
gctgttcaccgaatagtaatctccaaacccaatgtttttttaatgcgtactagcatttgtttgaaaagacagcgatagactaaatccctttattagaaatgaagtacctcgtcaatcttgatccaatttgaagggattaaaatcaaatatgcacatatctctctcatagaaacagaagctgtagtcctatagcctgcacatcttttttttaagccaatctgcagcaaacaaaatatggagaactgtagaataaactatcattcagttcaaattttcttacttaccagtcatataagtttacacaacacactgtaggtaagcttaatatatatacaactctagtataactttattttaattttcattgattgtttttaatttatctgttgacgaagatgcattgtgatatattaattagaatatttttcattctccattggtagggattgtaaaagtgatagcattcatttaaagttagattatactctgtgttaccttctcaataactgaatatgagtgtatcgaatgatgatctagtggcagaaaaaaaagtgatacatagacaatttcgggcatttagataaatagttttgaagattcaaatatatatgctaataatcatgaatgatttatttttcttttctttggaatcagagtataacccattacaacggaaaatgaattgtatccgccagtgcgggaatatcagcgttccattcccgtttggcttggaagaaggttgttttgcaacaaaaggattttacctcaactgcacaaattcgacatcatcaaccctcctattggaagctagccagcatcaagtgacaaaacatatacgtggacaacgggactcttgaatacattgaccagggagcttattattatgaaccggggctacaaagtttctattttcaggttgggacaccaattgtttctgtcctatgggttgctgctcatctaacatgtcaag

SEQ ID NO: 12707 - DNA, 816 bp, Oryza sativa
  Intron number 1 from transcript LOC_Os04g02860.1 (locus LO C_Os04g02860) derived from phytozome v7.0 (chr-ID Chr4; po s 1109038 to 1109853)
gaaacgtggggattggaggcaaatgtattttagatgcatctaaaactatagaattatatcctatgttagatttaatgaaatattgctgatcaaacttaataaaatttcactaggaaaaaaaatctgttgtaatatacaaacgaatgttgtaatatgttacggtaacaaaatacaagttcaaaataagtacttcctctgtttttaaatattttacaccgttgacttttttaaatatgtttgaccgttcgttttattcaaaaaattttaagtaattattaattcttttcctattatttgattcattgttaaatatacttttatgtatatatatagttttacatatttcattaaagtttttgaatagaacgaacggtcaaacatgtattaaaaagttaacggtatcaaatatttagaaatagagggagtagcaaactaaattctagctagtgaacatatattgacaagtaaattttgttttttttatttattgcctgtagaagttgaagtcttacgtcacattcacatattaatctaatcttattattcttttcaaattttgtttaataaccatttaccccctccgtccaaaaagagtcaaacgagaggagagaatgtcgcatgctcttaacccaatttgtaactggtggtagtataataatttcctgcatcctccatggcctagttggatccggtttccagtgtcggcttcctcccgttccgtccagccaccgccaccgaccgggggatttacaattataacactacaaacattaacttttgctataataatattggacccacatttcatagacacag

SEQ ID NO: 12708 - DNA, 854 bp, Oryza sativa
  Intron number 2 from transcript LOC_Os06g11000.1 (locus LO C_Os06g11000) derived from phytozome v7.0 (chr-ID Chr6; po s 5756270 to 5757123 reverse strand)
aaacaacagctctgcttcctcccgtcagcggagaggtacacaatcgattgttgctttaattttgagcttaattgattaattagttcgcgcctgcctggcctgtttattaacacttgttagtaacttcataatcaattaataatgctgccaatctaatctaatctttggattggttatttgtcttgtgttcacttccagatgggttggaaatgtcgtctgggcgtctctcgtcagcccgattctccacgtcagcgctactctgatagtctgatgctactcttgctacctgacctacagtacctcgttcttgttgtatcgctccatctagcagcagcccatgatgcacggatttaccatctgtattctgtactagttgtagtatagcttatcatctgtattctgtactagtagcttctgcttgaattctaccaggctggtcacatgatgtactagtacgtatatgctccgcctctgctacatttacttgtacgccatccatcttctcctagtccttggtagtaaactagcaatatagttctcttcactccatcactatcgtttattaatactagtattagctagggggaatcatcgcggcccttgcgcttgtaccagttccaacctcagcatgcatgagcatcgttcttattgcgcttaatgatgtttctgttcgatcatgtcactcgttaattagatcattcctgctggtgatcgagatagcctcaatattaacaacgtcagtgacagtgggccacgcgtttgccaaggtttatctcgacgtcacaaagaatgaccaaaccaaacaacgtactgcatgacagtaatcgttgatttctttttctttaacagcttag

SEQ ID NO: 12709 - DNA, 884 bp, Oryza sativa
  Intron number 3 from transcript LOC_Os04g20424.1 (locus LO C_Os04g20424) derived from phytozome v7.0 (chr-ID Chr4; po s 11419436 to 11420319 reverse strand)
attagtggtaagtttctacttcgtatgtatggtgggttcgagattgttgtgagatggtacaagtttctgcttccttggagtaagtttttgcttctgattgtggtgagatcaccgggatgcttcagttcctatattccttgaagacgtttttttttttaaaaaaaaatccctaacccatagatgccggttgggggtaataaccggcatctataatctctgtagctgccgattctaaaaccagcataggtgcccaccaattggtgccggcggggaaaccgtcatctatagccggttcctaaccggcgcctatactgatttccgtagtagtggttccttgtcatggagtgcgaggcggccctcgagcgggcgaccgtctgctgtgggttgtgccatggcagtgtcacttctgaactttattcatttatttatcccatatttgctatttaaagaaaatataatgatctctctcttttgtgtcacaatgtgagatcccagcagtcaaggtaagatggtttagacaattgttaagatcaggagttaggacatgacgttgttgaaatgcagggccccactaggaagtgagaaccacggagccattatgatccttgtattgcatcagtggctactattcagcgaaaaagaaagcattttaagacagaaaatgcagatgcaacactttggtgtctagattagagtaaaatctacatgcatgcatgcaccttttgtagttatttgtgagttataagttgatgtaaaacctaaagtgttgtccttggtcttgacttttgctttatgtatgcattgctttgtggattcctgttttcctcatgaggtaaatgttaaaaataggtcagcgtcactgggatttaggctttgaagaaaga

SEQ ID NO: 12710 - DNA, 786 bp, Oryza sativa
  Intron number 3 from transcript LOC_Os05g49980.1 (locus LO C_Os05g49980) derived from phytozome v7.0 (chr-ID Chr5; po s 28601679 to 28602464)
ccttcctgaggtactgctgtatgaaattctgatgatgcaggcttagattccaagcatgatattaccatgagtgatctgatagggctaattcttgggactatacttgaatacctgaatattacagtattgtttatataaacagaagtcagatatagtattttagtactgcaatgtggccacagtcctacactcgtactgaactagcagattctcttcgttctagttaccacttttctctctgcaaaggctggcagtattactaacaaatctcttcagaattttacctaagtgcgatgctttacatatttagtaccatgttcataaattggcataactggggtgctttagtgctatgctgcacttattagcattaagaaaaattggaaaaatattttttctttccacctgcttcacatttcgtacaagagtattggttttgctatgttgctaccttaatccagaacaaatggctagatttgctacagcaagtaaaagtattcttttaatccaagtcaaaagtatttttcatggtagttaattcgtgctagccattagcaactttatttcttctccttggaaaacccactaatgacactggtagcaaaaattctctatatgccatgtttacatttcactgcaccatctttctacgtaacgctgcatgccatgatgttctaccgtttttcgttctctaatggaagtaaccatttggatttacgactgcaatgttgatcttccatcccatgcttgtgtacgcaggacatctggcatcatatacattcccta

SEQ ID NO: 12711 - DNA, 806 bp, Oryza sativa; identical to SEQ ID NO: 12000
  Intron number 3 from transcript LOC_Os05g26926.1 (locus LO C_Os05g26926) derived from phytozome v7.0 (chr-ID Chr5; po s 15579695 to 15580500 reverse strand)

SEQ ID NO: 12712 - DNA, 780 bp, Oryza sativa
  Intron number 2 from transcript LOC_Os04g47010.1 (locus LO C_Os04g47010) derived from phytozome v7.0 (chr-ID Chr4; po s 27679731 to 27680510 reverse strand)
ccgctcttgagatcctgaaaggtaaatcctaatttatattgtttttgaacagacatgcggaacgtcctgattacattttgagtttttgactattttttatcatcatgctcgcaagtacagaaatcagtatggtataggagattatgttgatcactcgaacaattttactttcaccttctttcataaaagcacacttctctcttgatattttgcacactaagattacctcaggtgatttgacagtcattgcctctctgtagatgtagtccatagtcacttcgtgctgttaagatatctaaaacccttgtgattggacacttgcaatttttcatcagttgttacatttctataacttgtaaacatgttgtttatagtcattatacacttttacaaattcctacttatattgtcacatgatgtattgtattaggcttcttaatgcaagcataactatcggttacatactccaataataagatgcctagtaccctacattagtaagtaagtgaaatatagtgcattagtcggtcattctgttagtgtaaaaaaggctactgatgtacttattcataatatcctgcattagcccaatcataattagcaatttgaaaatgtacatgttatctgtaaagttaaaaggtcaaccaaagtggatccctgttgtttggcctacaaaatctgttgagcacctggagcttaatgttatatctggatgtgtttattgatgataagtttaagcaatcttcccttggttcacactatgcagagataaaagttctc

SEQ ID NO: 12713 - DNA, 868 bp, Oryza sativa
  Intron number 1 from transcript LOC_Os07g06710.1 (locus LO C_Os07g06710) derived from phytozome v7.0 (chr-ID Chr7; po s 3273738 to 3274605 reverse strand)
cagcagcaggtcagatccgcgcccatcgagatcgatcgtttcgttggagatggcgatctggattaggttttggtgtcgttcgtttagatcgggaggtaatcgcgtttaattcggtccggtttcgcgtttgcgtcgaatcaggatcgtgtgccaagttcaagttcggccgggatcgcgtttagggccaaagcaaaatcgtgtcacaaacgcacgtacagatgtggagttcagtttggttgagtttgcgtcgaggcgaaatcaggatcgtgccatgatgagatcacagggttaaattgttcttagtagttgatagtattattactccttttaagtcaaaatagtgatgcaattatacatataataaagaaaatggtgtttactcttctagtcttcaagttttcaagtcaattagacagtgagttgtgggttccaggttgggtttgatttggtcagttaattgattggtgatgacaatctgcgaatgtttttctttctgttgctatcaacaactgcatgattgtataaactataagcaataggagcgttgttgctgggtcttttacacattagtttatgacttttgcttcaactgctggtgttttcgcatgtccttacatccgtttagactttgtcagcgttgtcccatacaagcacaaccatgccaaatggtgatcatggcatattttgtaccacaagcctgcttttggtgcttgtattgaactagaggcctttcgtattgatcttgttgttgcttgacattgctggttattttctgaggagccatgcatgacatgagattgacattttccttgttatgattcgtattgtttcagcttctgtcaaatcctaacctagtaaagttagcatc

SEQ ID NO: 12714 - DNA, 1017 bp, Oryza sativa
  Intron number 1 from transcript LOC_Os06g20570.1 (locus LO C_Os06g20570) derived from phytozome v7.0 (chr-ID Chr6; po s 11842032 to 11843048 reverse strand)
cctcaagaccgatttccttccccaggttgctcgccgtaagttaaattgtctcacgcccattgcaaaatagaaatccaatagtttcgatcagagactgttttgcgtcttgttctgcacgctcactcttggtcttaattttgcgttttagttaattaattactttcgtatttttaatttgtattctttttggctgtttactcgatctcgaattctcttgtaaaggttggtgttttaaatctgacgtctcgcattattgtccatccatttcgtgttggatgtatcacccagtgaattctttcatcttcagacccataatgtcccttgactggataaacccttcttacacttcagtttatgtagtggaattgaattttaaaacagatatgaacttttacaccttaaaaatatacgcactcatttcttgtataccatccaagtggccacatttcaatcagaaacatgtatatcaaaagttaaattcaatcttcatatatgaaaacacatagaagacaattcacagtagaataacaaactaaaaaccaaattaataaagatgtaataatcgtgtgcaatttcatatgtaataatcatgtgtaatttcatttatagtccaataatttagttgttttttatgtacattgaattttgaatgcatatttatgggacaaaacatgatagtacatatataatatataaatgttatcaacatttttcagaatatttgttcttattagttgagataacacatggcatgggcgcttaagatgtgaatttatttccattacaaagacagcgatatcctctgttaattagtgttcctccatgcatgaaacaatcatttttttaggatagaaataatcatatatattacactacattgaattggtgttgcaagattaatgttcaggtgtactatagtaaccggacggagatgagagagtctcttacgtactaacaaatcttgcacctttggtgtttgttgtgcagttggagacaccagcttcaccaaagttgcag

SEQ ID NO: 12715 - DNA, 598 bp, Oryza sativa
  Intron number 1 from transcript LOC_Os05g33590.1 (locus LO C_Os05g33590) derived from phytozome v7.0 (chr-ID Chr5; po s 19681186 to 19681783 reverse strand)
gagaggatcaaggtaaagaggcgttttcttgaaaatgaccttagaaacatgaaaatggatgattatcgtgcttgtagatcatgttgggtacttcccgctctcaaaacaaacgacttgaaattattgtaactctaaaacatatgtatgtaagccttgctaaaatgttcattatttcagttcttagatgtaagttgtgtcacatgtgaaatcagggagtcagggactcctaggctttgtgtctgttacttcttttctactgacgttgatttaaaattttatttacacatctacaatggaatgggattcagactttcttatataacaatacgatgtgtattggttgatttttgaaaaattaacctttttatgcatcttttgtaagacataaattgtaagactctcggagtaagttcatcaccttcctgtagactatattcatggtgaattaacctttctttctgttagtaataatatatatatgatgatgtgatcaaaagttgtgctctggatatttctactaatcaaatgaattgccaataagaccaaagttttgttcctttcagggttggatttcagaaataacagctatcacctcatc

SEQ ID NO: 12716 - DNA, 492 bp, Oryza sativa
  Intron number 1 from transcript LOC_Os06g13460.1 (locus LO C_Os06g13460) derived from phytozome v7.0 (chr-ID Chr6; po s 7406982 to 7407473 reverse strand)
ccaagtactccaggcgtcaggtgattatattgctcttcgttttattttattttttggctgtcaggttacatatatgtgtacaaataacaacatcatgacgtgtttggtttaccttggtaaattatgtttattgtgatttatcaaatatatataacaattagcttttcctcgtataataattattttctctgcatcttcttttctgctgaaaagcacgaatctctgtcgtctcttaattaattatcctcacagaaaatatatatgtgctgcaattaacaattagccataactattcgtagtactggagaaatttgtttagaagaatggatatatctgtcagttattgataatattaacctagcatctacatactatacaagatatacatgcattagacataggtcgacattgtataacaccatataacgtgtctatatcatgattaagagctcaaaattttcttttctgctcattgctagacaattgttatag

SEQ ID NO: 12717 - DNA, 678 bp, Oryza sativa
  Intron number 1 from transcript LOC_Os05g46820.1 (locus LO C_Os05g46820) derived from phytozome v7.0 (chr-ID Chr5; po s 27054890 to 27055567 reverse strand)
tgatagcgaggtatatttctaaccaaaaaaaattgaagaaagaaataatatattttcaaaattaattacatcgtattctacccgcaccaccatcgctccgctgccagtgcacgtaggacacaaacaccaagacatacggagttacggacgacgaggaatcgacggcaaccatgggatatatcgacgaccacacatgcatcgagacattgagatgaactggaagtttcataattcatatatcgttttagattttctgagaacatacttgctccttttctaaatatttgacgtcattaacttttttaaacatatttgaccgtttgttttattcaaaacttttgtgaaatatgtaaaactatatgtatacattaaggtatatttaacaataaatcaaatgataggaaaagaattaataattacttattttttttaataagatgaacggtcaaacatttaaaaaaaaatcagcggcatcaaatattttgagatggaggaagtatattgttttagattgaattcggaattttgtctatgtatgtccgccgcgtgtttcggtcatatcatcgtcaattattaacgcgtacatggccggactgtcaaaccaacgctttcacgctggtgtgaaagggtgttttattttttcttttaggaaattaaggagtgcaaaactgtaagtat

SEQ ID NO: 12718 - DNA, 673 bp, Oryza sativa
  Intron number 1 from transcript LOC_Os05g49200.1 (locus LO C_Os05g49200) derived from phytozome v7.0 (chr-ID Chr5; po s 28169276 to 28169948)
gttgctgttgctgctgctgctcctcccgttttccggtgagctctcgtggactccgcttgacttgatgtgggggtgaatctgtttgataggtgggggggattttgcggtgttcgtgtgagttttggtgtggatctgcttgttcctgacttcctgtgtgtttgagggtaatctgggttatttttacgggttgtttttggtgttttttgaggagttttttggtcggatgggtggtaggtctggatggattgttttggggcagctttgatcggattttaccctgggttggataactgatcggtgtttttctgttcgtggtttggtgttgatttttcggttagtgcatcggtgttttctgtaactgctgctctccgattttgagttttattttttttctgttttccccttcagttctagcctcggttccatggctgaaccttcgatttgattttgtttttttttcttatttcgtgagttactaatcttcgatattatcgactaatttcactgtgttttaatcgtatcgtcagttagagagttgagatctaacagtcgttgtgttccagtgttttccccatttggatttttcgatctcatcactcctgacgaaaaatttctcatcgccttctgtttggtttggtttggtttttctcgcgatttgccgcagatcgcagcc

SEQ ID NO: 12719 - DNA, 1024 bp, Oryza sativa
  Intron number 1 from transcript LOC_Os06g02550.1 (locus LO C_Os06g02550) derived from phytozome v7.0 (chr-ID Chr6; po s 884985 to 886008)
ccgagaggcacccaggtctgtctcgctcgctcgctcgctcgtcgtcccactttccgattcaattttgggctgatttggtggtggtgaatcgaatcgaatcgacgcgtggcttggctgtgccatggttggggtgtctgatgagtttgatttggggatcgcgcggtggttgctgcgggcgccgggggaggtgggggtgggggtggggatcgggtgattgattcggaatttcggatcggtgcgggggtttgttgggggtggatgaattgttttggttcgaatttcgagggagtttagcagggttgatttgggggattggcgcatcatgatttctacgggatttggtggaggagttgttggttccgatgtgtgtgagctagggttcatcagtcacggatattcctcacgtctattcatgaatcgcagttcctgagcatccatcatgccgatttatgctaggttgcacatgttatgcgtctgatgtttaatttactggcaactgattataaacttactctagttctcaatacttttttcatgtctagtctcatcacttggcatcatgttggtaccagtaatatgtatgctgtagcaagatcactgtcttaattgtgcaggaagcgagaattcaatcaattcgttgcaatcaatagatatggtgtagtatcaatttatcactgttgaggtcctatgttaattttggtaacgttgtttcacggcacatgcatccatagactcaaatctcatagtgtttctgggacgaaagtaaattagtgcatctcgggtgctctgtgctttgatgcttgtaggtaacatgaattggcacatgcatgtgacgtctaatttcatgggtgctttggtgctccttggtagcatgaatcgataaatgccctcttctcactttgactatgtttttccctgttacttcactgacacatgttttcaaccattgctttgctgcttatttatattcattttgcatgcctttgcaggttccaacaccgtgcactgccagggctctagcatt

SEQ ID NO: 12720 - DNA, 672 bp, Oryza sativa; identical to SEQ ID NO: 12118
  Intron number 8 from transcript LOC_Os06g02550.1 (locus LO C_Os06g02550) derived from phytozome v7.0 (chr-ID Chr6; po s 887829 to 888500)

SEQ ID NO: 12721 - DNA, 407 bp, Oryza sativa
  Intron number 1 from transcript LOC_Os06g43600.1 (locus LO C_Os06g43600) derived from phytozome v7.0 (chr-ID Chr6; po s 26226935 to 26227341)
agaaccctccccccggctacacctgctccatctagttcagccgccattcccctgcctcgccatggatggcgcccaagctcaagctcttgtttgtaagtgtgttactctcttctcccatcgcaaataagcgtcagaaataattttgctatgtgtatctacttgtggatttagaggcaggatttctatccattatttaataaaaaacgtcagaaataattactctctctcgaaaaaaaacagataacttttatacgtgaatcttgaaatggcaaagggtatgtctagattcgtgtgtaaaagtttttttttttgagagaggaggtatatatgttgtctttgatttgatactgatatagtgtgtttttttgatggaatatgcaggttggctactcgatctcggcttattg

SEQ ID NO: 12722 - DNA, 909 bp, Oryza sativa
  Intron number 1 from transcript LOC_Os03g46780.1 (locus LO C_Os03g46780) derived from phytozome v7.0 (chr-ID Chr3; po s 26456390 to 26457298 reverse strand)
aggtctttgtcacctaactccttcccgctggtcatgccctcatccctgttggtcgccatcgcggcccttctccccaccggcgccggccgccgtccttctctctcttcgtctattggttagattgcatctggacgtgtgtaaggcaaaaaaaaaatgcagaaaaagcacgtccaaagagtatgttacttttatatcatacaaagaaaagacagattctcccaactaagctttttcaaccaaaacagagtaagccttccatgtaaacaatcagacaatggatgagctgagaaaaaaaatgcagggtgcagcatggaacaaattagcaggctgtcaattcactcgctatataatttactatgatgcaagactgatcggtagatgaaataaggtataaatatcatccataagccagaactatagagtaaatcaagagaaaaagatcatgagaaaatgtgcaccacttacactgaccatcatgtccaaatccctttcactctcctccaattccttcttcagatctgctctctttatcagagcttaagccatggtgtgagtttctgcggctgttctacccggtcatggtttgaagtgttgaagaggatggctcggccccgtggtgcgtcgtccctctcccccgttggcgatggagggcggctgcaagcggcgagaagctggaggcagggtttcacatttcggactgaaatttcctaaattattttggaaatttcggaatgatcaaaatttcggaaattcgggtcatttcggacccctccaatacgatattatttcagctgaaatttttaatttattttaatttttcatgaattttggtaacatttgttcaaatttgattagattttgttttaaattttagaaatttcggaccaaaattatttcgtcatatcggca

SEQ ID NO: 12723 - DNA, 777 bp, Oryza sativa
  Intron number 1 from transcript LOC_Os05g01900.1 (locus LO C_Os05g01900) derived from phytozome v7.0 (chr-ID Chr5; po s 514136 to 514912)
ttcggtggcacaatttcaccatcttgcccttgatagtcagtgttaggaccaccagctgccatgggccaatccacatgctcattgctaggggccttgtttctgcagtgattgtgaattagcggtgagttgtatttcttcttggagaccttgcactggagggcctagacgctggccatgagctctagatgcgggtgtagaggcataaaatgtttgactgcttaatccagggtggagggtgaggagggaaatcacggtgctgttgtctgcccacgcatgctacgtctaggaacgctatgtcagggatgaagtggaataccaggcggagatgttctagtttgcctcaggtcaaagtcaaacacagataagctgttatatatatgatgaattagacagctcatactggctttgctaagataagcagggattggcaatccaatcataccccttggtggtaaaataccagaatttaacttgcatgcagtatgctattgaagctcatagatctatttgagcaaacggacaggtgcatggtaggaactttctcaaccatggtagattaaaaatggctgaaatactgtcccaactgcaataatttgattcctgaaacagctaaaataattttaacaacagctcaaaacaaaggataaactctatttaccctatgcagacctatgtcctctagagacttttgtactccagagacattatctcgtgtatacttcagttaaattcttccctgttgcaaactaactacattttcatttttctcagcgcaat

SEQ ID NO: 12724 - DNA, 1011 bp, Oryza sativa
  Intron number 3 from transcript LOC_Os04g55210.1 (locus LO C_Os04g55210) derived from phytozome v7.0 (chr-ID Chr4; po s 32636391 to 32637401)
ccgacatattttctctaaagaccctggtggtgaaggtagactactgttatatctctttcattcaagttatttcatcacagagtactggtaattcttgacacttattagttgtccctgtgatttttttttccaagaagaagttgtctctgtgattgatttgtggcaaacatatatctagtcttttgttccattctgtttttgttcaacatcattggagacgatttaaataagttgaaaatgttggtctgttagacatgatcaggtttgtatgggctaagaaatcatgtatatataactacgaataatatgcatggaagagttaggaaatacacattgtttggtctctggcaggacatcagtgtctgtgtctgtggtacaacttgtttgttattcattttggagcagctctattgactgttggacatgtatatatagtttgcgatgtaactctatgttcacttcaaaagcagaatttagaacctggcaattagtattgagttctgtgtcatctggagattttccccgttccttctctcttgaccaattgtcatctcggtgaagcatgactctttgtttgctttctttagttttccatctcagacaaatgcagggcaatctttttcattttaatttctgatgtttttaagggaaacaaagaatgcatttagaagaattggggtatgaaaccttttagtttttggattagttctgatgtattgacataacctttgcataagaaagatcatgcctatcttattctgcttgaatgtcggggttcaatttggagatgctaaaacgattctgaatgattggttttactcaaagtgaacatgactgcccaaccactctagggcaatggtagctagaaaatatgttctctgacttatacataagtgataaattgttatgcaagaaaaacaccattgttcccttccgttgatatatctggatttcatatatactgttttttggacagattgtgggttgcattgctgcagtatcatcatcatt

SEQ ID NO: 12725 - DNA, 717 bp, Oryza sativa
  Intron number 2 from transcript LOC_Os06g48570.1 (locus LO C_Os06g48570) derived from phytozome v7.0 (chr-ID Chr6; po s 29383659 to 29384375 reverse strand)
cgaggccgagaggcccgacctcatcgccttcaccggtgcgtttttccccctcctatccccgctccgctcttggtggcgatctgcttcgcgcttgctcatctggtcgctgcccattagtggcggtccttgctaatcatgtgcaaaacttagtgctattgatatgtgattggttgattttttttttcactctcaaagtcatggaactagtactaaatgtgagtgttaatttacaagcaacataacagttactcacaacaaaaacaaattagttaatgctccatgtagtagtagcttagtagagttagctggcagaatgtctgaataattgtgtttacattcagaggggttgggtggaatatctcgccaaatcacttgttgtttgcctatgttcgcaattgtggagaagtatctccggcaatccactcgtgtattttcacgacccaaatgaaattacttagcaactagcaaagttctgtgaatccatgctttgggttttctgctgttactgaattagtggcagagtagaatcacatgcagtttccaaaaaagtttgactacatctcttcttctgggggtaaagaggttacctttttgaatctctacgttacgtgtttttttaaatttccttcaccaacaaaaagggggtcaatctggtttgcattgaatgcttgtgttgtttttaatcaggagacaatatatttgggggcagtgcatctg

SEQ ID NO: 12726 - DNA, 352 bp, Oryza sativa
  Intron number 1 from transcript LOC_Os03g56690.1 (locus LO C_Os03g56690) derived from phytozome v7.0 (chr-ID Chr3; po s 32284921 to 32285272)
gggttacgcggcgtgtgtagcatccaaggtctatgctatcccaatgttgcactgctgcccatacccttctggagagtttgcaattcgcaaggagtacttgaagtcttgaatcttggttcaatagtgattaaaaataatttgtaggtaaaacttttatatgtgtattacgaaaagtaaattaagaagaaaaacttcaaaattcacgtgtccaattgtgtttataagccgaaggctaaacagtagatctgaatttttcgtttctttgtgctcgcaaccaaccaaattgcaacttacaagcctccaatttcgctgttgtttgactgtatcaatgttgttgtattttgtgatatag

SEQ ID NO: 12727 - DNA, 511 bp, Oryza sativa
  Intron number 1 from transcript LOC_Os06g41810.1 (locus LO C_Os06g41810) derived from phytozome v7.0 (chr-ID Chr6; po s 25074827 to 25075337 reverse strand)
gaactacgcggtccgcggcaccgtgcgggatccaggtgaggccgctcacacatacaccttcacagcccctccaaacctcgccttgcttttttgattcgtcgccccggagttggtgaaatttggggcggaagtatgcgaggtggaagcgtggatgatggagttaggtttcagagggtattatctcaaaaagaaaaaaagaagcaaaaagggttcaggggtgcaatactcaaataaatgaataaataaataaataaataatgatccgtatgttgctggaagcaaagaggagagtttctagttcctaattttgagttttttttgttggcctgaaatgttagtttggtcttcgtacaactatttgtttatctttaggtcgaatcacaagaattttgaaggtcctaatctttgaagttattttaaaattacattgtatacttattatggcgggacaaaagttttgctatgtatgatggtggtgacgtggtgtgcctgcttctgtatgctgtaggtg

SEQ ID NO: 12728 - DNA, 955 bp, Oryza sativa; identical to SEQ ID NO: 9608
  Intron number 2 from transcript LOC_Os05g47545.1 (locus LO C_Os05g47545) derived from phytozome v7.0 (chr-ID Chr5; po s 27169537 to 27170491 reverse strand)

SEQ ID NO: 12729 - DNA, 390 bp, Oryza sativa
  Intron number 1 from transcript LOC_Os05g50340.1 (locus LO C_Os05g50340) derived from phytozome v7.0 (chr-ID Chr5; po s 28782800 to 28783189 reverse strand)
cgctgccccgccgccgccggctaccaggccgaaaggtatagtaattacatgattaatcatctgctccctccgtctcataatataagggattttgactttttttaactgtttgactattcgtcttattaaaaaaattaaaattattatttattttatttgtgacttactttattatttaaagtactttaaacataacttttcgttttttatatttgtacaaattttttaaatataacgagtggtcaaacagtacaagcaaaagtcaaatctcttatattatgaaacggatggactacttgattagatttcagatgatagattagttagtcatggtgaattgatattcttcgtgcttgcatatgctgcaggttgaagcatttgaagatctag

SEQ ID NO: 12730 - DNA, 973 bp, Oryza sativa
  Intron number 1 from transcript LOC_Os06g27530.1 (locus LO C_Os06g27530) derived from phytozome v7.0 (chr-ID Chr6; po s 15586492 to 15587464)
gcaacgatcacacagatacattaccacctaaccaggttcacactgaaccacccatcaccccggtcaaaaatgttttatccgcccgttgttttacacgttgcaacacatgctaccgaaaagatagcacacagccacacagttcatataaaagtgattataagtatatgattaatcaaaattatattttgcttgtaaaacaaccttgagcgggctaagcataactactctaccatgagttgagcccaatgttcaactcacaaatactagggagacaagatatcatgggcaatcaataattatcaaaggtaggataataataacaattaggtcacgctacccatcgatagtttataaacaaaacaatgcatgtattcaaaacaaaacatttcacaaataggttcaatatgttcaaagagtgcacttgccttgatcccaatactgtccttgcacagcgtcttctgaagcaaactgctcttccgctccaacgtctacacgattgcaaacgaaaaacaaataaacacaaagaaaaactaactaaataacatcatatgaaataaccaattaaaccaagaggttgagctcgattttagaagaatttaggaagaagaatgggtcgaatcggagttcaaacggaaaagttatagcctccggaagtttgaattcagggaaaatccgaggataaaagaaaagggaatattccgagaatattctctggatttttaatttcagaaattgaattaattttggataggaaaatatatgtgggcccactatcagtggcatagagtgtatgggtgaacttggtgtatgtgaactcgatgacgtggaacgacacgtggcgacataaggcgatgaggtggcactgacatggatggatctagggctgaggtggcataggttagggattatgtagatccaacggttgggatttgatctagggatttggacggctgtgattatttggagtttttgg

SEQ ID NO: 12731 - DNA, 956 bp, Oryza sativa
  Intron number 1 from transcript LOC_Os05g01780.2 (locus LO C_Os05g01780) derived from phytozome v7.0 (chr-ID Chr5; po s 471840 to 472795)
ctcgatttctgggctttgacgtgcgattccgtgttcccgggccgttgtgctgcgtctaagattcgattttggtgcagctcatggtgtttgtttcggttctggatgcatttttttcttggggaggataaataatcttcagagctttttgatgcgctgaattcacattccttcgactttttttacctctcctcttttgggatttgaatactagtattttgttttgttgatttcaatgtgtgtttggcattgcctgctatgattacttgaatcaacattgccaatttgtcatgtcaagctcccattacctctttctagactgaatggatctctttcatttctctcttcttatcgggtgcatttgattggttggctagtgttccaatcaatttacatcctcctatgatctatctcacatttgttctaattcaacaactgatttgagaaatgcacagggaagctgctgtgaatctttggttggttgttttgtcatagtgtgttttagtatgtcactcagaactgtccacgtccattaaggcattaactaccgtcaggattccaactgctcttatatgtaaaactaaactatgttgctactttacactatatatgcagaagggtaatcttcatgatgactaccagcttgatagaataatttcatattatcatcatgtatttgtagtgttatcaaggttatgtacttatgtcgttttcatgtgcacagttcatttacttatgaatgtcaaacctgatacgatagcaaaacaaacttcttcctaggtgtttgcagtattagttcttttttttttaaaagatgtttgcagtatgctcaaaacaaagcatgtatctttgtgaacttctcctgttattttctccaatttcgacatggacttgagatccttaattcaaattttactggcatagctataaggcttttgatcaactggaaggtctggaag

SEQ ID NO: 12732 - DNA, 900 bp, Oryza sativa
  Intron number 3 from transcript LOC_Os05g07790.1 (locus LO C_Os05g07790) derived from phytozome v7.0 (chr-ID Chr5; po s 4198642 to 4199541 reverse strand)
cccttaaacgagcgcttcgtgttcgtctccgacaggtatggattatggaattatgatgtgtgctagtgtgtatgcttggataaagtattactgactttagatactaagttgattggcacaaaattttggcaatgcccaaaaaatttagtcatgtgttctgtttatagccaaaaattaagcactactaaattatttgtcttggttgaatagcaaatgcaagtttagtagaagcaaatgaatgcctagccagtttttgccagaaaatttggcaatggccagttcttgccattgccaaaaaaattggtaaggctatgaaccaaaacaagccctaactgcaatctgtgttggcttaatctcttgttcagcacaatgtgttgtttctaggttctgatcataatgaattaagggaatgttcctgaacataatgatatgtccttacatttttataaatgtggactgttatctagtaaagattgtttgttttttttaatcatcgtttggctaactaatttttttttccaatatgcaatgctcagatgataagtagtttctgtccgcgattttaagctcatgctaaaaatgtggtgcgatagcagtcctcaatcttaaattccatggaaatgaatcttgtgttatactgttagtctgtttctattaagtttaacgggactccacatgaagctgtactgaatttaccagatgccttggtgcaattttaggtatcgtttacacggttgtttttctgacagctccaaatttgaacttagtactacacatctttttttataatcttacaaagctcgttgttgcaccattttggatcttaattggattcatgcttactaggatcttctctctctgccagctgtgtgccattgtacaacttcaactacacttacg

SEQ ID NO: 12733 - DNA, 987 bp, Oryza sativa
  Intron number 1 from transcript LOC_Os03g40800.1 (locus LO C_Os03g40800) derived from phytozome v7.0 (chr-ID Chr3; po s 22687824 to 22688810)
tggcgttgctggtggaagaggctggcacgggcgaggtggcgaccggccgacatgaatttttctctttttgagttcttgagttcttcctctcttttcttctcctccatgtccaatttgttgagttcttgagactttgtacatgtagtggtttgctgttcaattttggatagggttgatgtgatctgggatggtggtgatggagaaggtggaatacgtttggggtggtgatctgggatggggatgatgtgatagatgtgttcttggatttggggtgttgatggatgtgttcttgggtgattgggagctgaatcgagccgatttgttttgctcgtcgaaacatcttaggtgccggttgcaaaccccacaactggcacctatatttgttataggtgtcggtttacaaccgacaccgataacggaactcatatgtgctatcctcatggtagtagtgtgagtcgacatatcttgagattgacgaagtcaccacagacaccgggctgtcaatgggtatgtcgcctatcactgaaagaataattagccgtaaatgtgagcacccgtgtcaaatctaggatttgaatctgagtgggatagattcacacttccaccacaaggaacggttgagctacgctcacttcgcatgagacaaccttttaaatttcatcaaattattgacacagattgtatatttgattaacattataaactaatattttaaaaattaaattttgcaaatagcttagaatatgtggtctaatcaatcagtaaaaagaatgttcttctaagaatcctatctttggaactatggacgaaataatccgtgttaaaaatttacgattttgttatatatttgtcaacaatttttttctaaaaagttaacaaacgtaaatatagtacaatcacaatgtaattacattgtaacttgcatgtaactacaatgcaattttgagccgttcagtttgctttaaaatccatgcagggaggtagaaa

SEQ ID NO: 12734 - DNA, 881 bp, Oryza sativa; identical to SEQ ID NO: 10291
  Intron number 2 from transcript LOC_Os06g46450.1 (locus LO C_Os06g46450) derived from phytozome v7.0 (chr-ID Chr6; po s 28193662 to 28194542 reverse strand)

SEQ ID NO: 12735 - DNA, 998 bp, Oryza sativa
  Intron number 1 from transcript LOC_Os05g05740.1 (locus LO C_Os05g05740) derived from phytozome v7.0 (chr-ID Chr5; po s 2864472 to 2865469 reverse strand)
actacgtccaggagctcatcgacaaggcctcccaggtttccctcgccctacttagctttcctcgcggagctctcgcccttttatcttttctcgctggctgtgtgattgtgaatttatcgattgcgattgagagaaaattgttgatccaactcactcctgaggtctcatagatatacggtagtgagcaatttagcatcgtcatgcattttcccgtaataaaaatcagcaagtagttaatttcgtaatcaatccttcgcagcgcgttaattttgtgtgtaagctttactgcttcgtcgattagaatagaatcatcgatcatgttagcttgttagtaaatgaactggaaagcggctttgtagtagaatcttgatcctcgaacattatagctccatttggaacactgagtttcataggtttttcacagcaattccatagcaaacagttcgattctgggtaaagagcagagggatccccgtgttgtcaactgattggaagctgtaggcgctctgccgttgcactatgattagttccaaagagtttggcttacaatcagttgtactttgaagagaggatgtgttggttttgtgtggtgataattttgtttggattggcctcacatcatgtgaatcatgtacatcactaaaccttatctgtagattattttgagatattctcattcatggtttctcttctcatggtaatgtatacataagtattgtttgattttgaacctgtagtgaatcatgattcatgaaaataaagataaatgtcaaggaattcactgattattcctctcaccgtgttctgtgttcatatgtaacaagcactccacttagtgaagcattattccttttcttcctcttttatattcacttggagttcttcttggatgtttttcttgaattaaatgacctcaaacatattcaaactttggcaactgagcaagtattgtctgttttgcagcttccagaggatattgagtggcatttcatcgggaa

SEQ ID NO: 12736 - DNA, 889 bp, Oryza sativa
  Intron number 1 from transcript LOC_Os06g27770.1 (locus LO C_Os06g27770) derived from phytozome v7.0 (chr-ID Chr6; po s 15724009 to 15724897)
agggcttccgggactccggagccaccctcgtcaaggtcagctgccgccgctccttcctcgttctttcttttccccatttcgtttcctgttcatatgatgaattctgcattgtattatccatggtgaggaagtagtaatgggacaagtgatttggtttcttctatctgtcaacgaggattgattttttaatagatttgtgaaagggaaggaatgggagttccaaaagtcatccaacaaccttttcaacctgttcatttcagtaaataagataagaaaaccagtgtggtgatacgtggattagtagaatactatctccatttttaatagataacgccattaactaatgtccatttaaaaagattacgtaatacaaaaattttaaataagacgcatggtgaaacatgtccaaaagttaatgacgtcaactattaaaaaacagggggaatagtaaaatgttcagaaccaagtagaggttatggggtttaaatcattgctttgaaacatgactcaaagtaacacttttaaaaagaaactgcttggactttcaagatttcgtcagtgttcaagccacaaactaattgtctcagatgcagacagatgttcaagttaaagcttgaattctggttttaactgggttgtctcactgcgtagtgtgttatgatgtactaatgtgcaaaaaagatcttctgaaagctcgtggtctagtacaggtaaaatgtcatagagctgattgtttatatgcccttcttgatagtaagtgcagttgtcagattaaacagcaatgatatatctcaggttccacaatgattagtttatgcctcatggtatgatttgatttgatgctgacatataaaagttattcctttgctggataattagggagatcttt

SEQ ID NO: 12737 - DNA, 711 bp, Oryza sativa
  Intron number 1 from transcript LOC_Os05g24010.1 (locus LO C_Os05g24010) derived from phytozome v7.0 (chr-ID Chr5; po s 13776910 to 13777620)
aagaatcgcttccgctgacaccaatccgcaaggtaaagcttgtttttcctggttcttgcagttcttgcatgcagattagtttgatgagggtttttgcttgtattcgatgtcccattccgacgattcaccgtgaaaaataaaggttcaattccggaggtcaagttgtttttagggggaatttttagcgtcttataagcatatttggattgggaattcagttttagtagcttttggtgttcagaaatcttgggttgtattccctcaaaagaaaaaaaaaatcttgggttgtgatctactgttcaatttgtctggattctttggattgggtttggtggagatggccccaagaaaagatggtagaggggagaattgccttcctcttcttttttccaaagtttcttagtttcatatttttacaaaaacaaaaataaaaataaaggagtggccattgactcccttgcaatatgatattgttggatatacgcatagacatgatgcatcccaatttttgcagccccagaatcaatgctgattgattttcttttaccaaatagattttgtggagctttaattcagcaagtaataataactcacatttcactatgactctaatctagttctaattttagcatccgtggcttggcctaaaagttggttgacaagttgctatctccctctttcgcactcgcagcggctgcgctaagatctttg

SEQ ID NO: 12738 - DNA, 1022 bp, Oryza sativa
  Intron number 1 from transcript LOC_Os04g04790.1 (locus LO C_Os04g04790) derived from phytozome v7.0 (chr-ID Chr4; po s 2291868 to 2292889)
tggggcacatgtgagccccaccatttttttattaagttgggtgtgacactaacatgtgggtctcatgtggtttattatttttccggttcgaattgccacgtaagggccacacggatggacctcgtctgttttatgcatcttttgatttagctttttcgatacctcattcacttcaagggcaccccattgcaactaatgaataatgaatttgttgtcttctatctgggccgacgccgggattcaccagaaccctttgttgtattcttgaagtcaatccatagtcatgagttttgattaaagaaagcaagccatacatacatcagtgtgctgagaagcaaacagttccgccgccactccatgctatatttcctgcattgaccctatcaagcaagagaagagggttggggtgtgctgtgatggtcctactgatatagagcccttccctcattgaaaagaaagatgcccttacccgatagttcttcttgctttagcttggataccggataagttgatctgattcaagatatcttagaacacagcacattcagtgcataggccggccatcatctctctcctccatttactgcaaaaaagtcgtcagtcaaaaccgccatccaagccaccgagggacctcatttgcactggttttgacagttgaggaacccgttgtatctggttcaaggacgaaaatcggattcgttaacgagttaagggacctctgatgaacttattcatacgcatgggactggttgatctggccacccgggagctaggtcatggcgccattatgggataggggcccatgatctaggctacccaggaactgcttggtgcaacttaaccataacagaagcagagtaggtagttcatctcttcccagagcacgccatatggttatgctcggaaaggtgtcggatcccacaccccaagcatcatcttgcgagaaccccttgctgacccaggaaggattatgtggcgtcctcgcaggtcagagaagggtggacgaatatctggttggatac

SEQ ID NO: 12739 - DNA, 490 bp, Oryza sativa
  Intron number 3 from transcript LOC_Os04g47290.2 (locus LO C_Os04g47290) derived from phytozome v7.0 (chr-ID Chr4; po s 27891197 to 27891686)
ctaaagctgcatactactcttcacaagggcttgcagtacctctctctctatgttttacttgcgaaatcgttttttcttcagcttgaatgccctcaaaattgtgatgtgcatggatttacctagtttgattacgaaacaaactagtatttttctctgtatattttagtagctttctgataagattgtaaaatctgaattacagaaggaataattttcttctaccatgtgcatattgaatttagccttatatttttgtggtaggtttattttgttagttttcttttctttcaaaattcctcataactatttggataacatgcacaaaattagaggatagcatgccatgttgtaacaatccatccccatgtatcatgttgtttcacgccgaactttgctctgaatttaaatgatctgagggacattattcttcctttaactctgatagcattgcattgttctgaccacttgcaggtggaatttcccatttttc

SEQ ID NO: 12740 - DNA, 534 bp, Oryza sativa
  Intron number 2 from transcript LOC_Os04g44450.1 (locus LO C_Os04g44450) derived from phytozome v7.0 (chr-ID Chr4; po s 26133105 to 26133638)
ccgggtatttagggtatataatcatcttccttatctctactactatatactccctccatccctaaatttaaggaattgagcctgttcaaattcgttgtaataggatatatcacattcaactaaaatcttttatatttagggacggatggagtacaaatctttcatcccctcttttcatcgtgtgcagcacgtccgcatgtggaaccactatatccaatgtcttattatcaatcactcttttttgtttttcataacctcaagtattttaatttatcttttcttaactcattgaccgtatgcttgttggcagagaccggagatgtaaattatttctattgtctaaaacaattggcataataagagttatctaaaaatagcaatgacactcctacaacgagtggcctcgtggttcacgatttgattattataagatcataccacagccaacttgaagtcttgaacgttacggtttacgatttgattattgtttccgtcacagtgtttccgtcgcccttggtccgtctgtcacgcggt

SEQ ID NO: 12741 - DNA, 739 bp, Oryza sativa
  Intron number 2 from transcript LOC_Os04g55190.1 (locus LO C_Os04g55190) derived from phytozome v7.0 (chr-ID Chr4; po s 32625595 to 32626333 reverse strand)
actgtcaaggtgtctgtgatcgccttcttcaaaaggtgactttcgtgtctactaagaatgataattctatagtgtccatatttgtgctctatggtgcattttattacatcatcccatccctagtaagatcgtatttagttttattcttagcttcagacaaatagtaaggctaataaatataggatttctgatcctaccttggcaaaagccatgaacgtttttacaatctacatttgattattgcttgctactttatactaaaaaggtagaaaacttcaccaaattcctatttagctgtgacttatgtgcctctttgaggagttagtaagagtatccattttttacaaatctgaaataccatattcaacaagttttattggattctggaagcatataaattgtgtatctcattgtttttgtacaaaacttgataaccacgccagagctaagtttgtgccgcttggaagcacaactagtctgatgctatgcggttgataaatcatttttttgctagagaaattatagttgctacttttgttcaactacgttgctagttcttgtgctgagttgactgacttttatgaataatcattcttatatttctctatttagcttgagtcgaagttatctttgtgaatgatgaatattttcacagggtatacattgtttcatgttaaatacgtctttgcttgttttcttggtagcggagaaaaaaatcacgacattacttggccgaaaa

SEQ ID NO: 12742 - DNA, 639 bp, Oryza sativa
  Intron number 1 from transcript LOC_Os05g49420.1 (locus LO C_Os05g49420) derived from phytozome v7.0 (chr-ID Chr5; po s 28272332 to 28272970)
cttaaatctctctacaagaggcaattgaattgaaggtatttgttctcttcctagccgctgctttcatgagcgataggagatccatgctagcaagttggattgatttgttcactccgtccaaattattagtccgtgtcctcctctttgttccggatttcgatgatgcgttggtggtggagttctaattgcagtttgtatcgattgggtgtgtgactgaatatctagttactgaagcagtttcatgttgatgtatgcgtttgccctgtcctgttcctggaaccaggattaataataaacatatgaaaagttatttgacctcgaaaaaaaaattgtgctctccaatgtaggagaccgacgaaacttttgtttttaatagctgcttttagttctaaaaatcataattcgacttgtatgataggaatttgcatcttatgaaaagattgagaattgtttttacacaagttgatagctttatatcgatactgttgggcagtgtgccaaaacgtccttttggtgaaatcaaacatttctcacatttcaggctcacgcaaatttttatttatttttagttgcttaactgcacaccattataacctgaatttctacttgataagcagacagcaggctttcataaaaggc

SEQ ID NO: 12743 - DNA, 712 bp, Oryza sativa
  Intron number 1 from transcript LOC_Os06g15760.1 (locus LO C_Os06g15760) derived from phytozome v7.0 (chr-ID Chr6; po s 8955225 to 8955936)
tgttccccgacgggtgcgtgcagccggtgcaagaactcgattccatttcgtatgaaacagtagagttttgatcctttctctcttccgaagaacaaattactggagttctttttcgcgatcggatgctggttggtcatgattcctttttattgggcggggttattcatctattcttgctttaggtagaatttcggattcttttgagtttgatttgaggtggatttttttttggtttaacctgcttgggctttggaaaaggtagaactacggtgactcgagtttcttggaaaaagttgatggtttgatttattacctgttcttttacaacaatgatttcacatgaaacagttgaaatttttaaataaatttggaaacattcctgctttcctacatctctgtcctgtcactttgattgggatgttttgactgtcatatcaaattgcatataagtcttgactatacaaattgtctgtttatactagtatttatttgtgattagtttaagttgaagtaggaaggcttctaatgtgctggctcatgggtcaacgtttgatgttcatattcttctttctctttgtatgatatgtttaatctttggcagttcatgttcattgatgttacctaccagaatgcagtgaattgcaaatactaacatggaattggtgcccttctgggtattctgcttttaatctgcaggcaatattacacttct

SEQ ID NO: 12744 - DNA, 699 bp, Oryza sativa
  Intron number 3 from transcript LOC_Os04g11850.1 (locus LO C_Os04g11850) derived from phytozome v7.0 (chr-ID Chr4; po s 6497604 to 6498302)
acggcaggagctgtatacacctcattggtgatcatgtaaatgctatttttagttgctggccatgagggatatatttgaagtattgttggtgaagatctgagttttttttcctgataagatattgtaggctgtggggtttaattcaataccataaatacaaatatcttgctttgagcttttcaagtgtttatcaagctatgacaaattatatgtttggtattgttagttgctttgcatttttttattgtttaaaggagtatgttaagttacattatagtacatatagttcttaaactttttagtatgttgtatattttgcctgacatatattacaggaaaatgcaagaaatttgaagtgtttttatatgattactatagttaatataggaaacgtgcattgcacgtgcacgattactagtgttagtataggtccccacatgttcaatgtgaaaactctgcgaaattttatagacccaactgcaattaatcaatgaaccgaggtcaatacgagtcatatcgtgctgatatcagcggtgttaacgggatagaaaacacgatcgaagatgattatgttcgtctgcctgatgaaattgtcattggttatgtaaacattgaagattcagtgaacgcactgattgaatatgtgaatatgtgtttccctcacttaatgatgagagatatacgacctccgcggaatat

SEQ ID NO: 12745 - DNA, 1038 bp, Oryza sativa
  Intron number 4 from transcript LOC_Os06g27970.1 (locus LO C_Os06g27970) derived from phytozome v7.0 (chr-ID Chr6; po s 15869743 to 15870780 reverse strand)
tcaggtttgtcttgcctcaccatttgtgctgttctcatttttatagtgaatgcagacatgcaatcttgttgatcctaattctatcttgtttagttgttgtcttgtaacacactcctgtggccgagagtaaatatttggttcatttgtacaatatatttgcatgtatatgtcaattataaataaaagagttttcatcaatatacttattatactattatttatcataaaaatctggagaagatagaaacataaggcggatgtacaatatatattgcggccagtttattgtgctttatgttctgtagagaaatcacattatcttttcttttgtgctttatattgattaatattgttactttcgggtcatgaatggtagtcatgatattgtggccccaaatgaaaattttagtatctagtgaggaattctggggccaatgtgttactcctctgttgattcttataatacgtatttaaagcactattagtacgttaagtgtataaaaatgcagcaatataatcttgtttcaaagtcttttacacaatatttgttttactgtgaattgttttaggagaaatcactggtcaaaatttagtcttgaagacattcctgaaattaaaatacgttgtacagaaatcaactaaggtagtatgtatgcctgtctgatataatgatcatatatttttatcttctagtcaaatttggttttgtagtgcaaatatatcagtgcactggagctccttatataaagatcaactctttgaaatagaagaatgttcttttattagtacatcattttgcatgttcaattttgattatgctagtatctgcaatataaaatgcattaactgcaaagcctatcacgttcacacttgacctagtgaaaaagaaatccatttacctacaattaaaagtgtgtgcagaagttgagatgaagtatttaccaatattgctttcttgatcaagcaagtagtttctgaaatattgaattttcttgtgtcgcaggtggaacgggaggctgccaaatcagaagttcaaaa

SEQ ID NO: 12746 - DNA, 801 bp, Oryza sativa
  Intron number 2 from transcript LOC_Os03g42120.1 (locus LO C_Os03g42120) derived from phytozome v7.0 (chr-ID Chr3; po s 23443213 to 23444013)
ggtaagaagggtattttcatccaaaaaggtattctagcaatgatgaacattaaagagtggtaatttaacgaagtctatttgaaaaatgttattttagcaaaaccaacttttgacaatgacataatgtcaattttctccctcaaaagaaccccatcaccagcatgtttttttttctttcttcaccttataagcagaagacacgacctaaatgacgaaaaacaattttagagtaacagttttattatactttcaatcttggtggtacagaggccagttcttaaaaacaaaaaacaacggaagaggtctgaagcaattccaaatttaattaacttctgacattcaaatttgaatgcatcgtactctataagccaacgaactaacgagagtcaaattggaccctagccaattaagctgaaggcccaattaatttttccaaaccagcctatccgagatgaaaacgaataacctagccgaattagagatgaacacgaatcaaattaacctacctgaattcaaatatctactcctactcctcgattgtacgttgatcgatcgcttgatcgcttccaaccctagctagctctcgcgcgcgcgggggcgcgggaaactagagatcacccatggccggtggcctcaccttctctccgccggatcacgagctgatcaccaagttcctgcgccccaagatcgccgacgacaccatcaagctccccttcatccacgacgccgacgtctactccgccgcgccgcccgacctcgccgccaggcacgtccccgcccggggcaccgaccgcggcgacg

SEQ ID NO: 12747 - DNA, 1015 bp, Oryza sativa
  Intron number 1 from transcript LOC_Os06g08550.1 (locus LO C_Os06g08550) derived from phytozome v7.0 (chr-ID Chr6; po s 4230943 to 4231957 reverse strand)
gacgccttccagaccgacggcggcggcgactccaggtaaagcattgcaagctatccttgcttctttagttcttttaccagtgtgatcaaatggagaggttctcctggggatttgtttcttcttcttcctctcgctctgtttcttctctgttctggttactctgacgaaatggcttagcctgctcttgtgttcttgagcttgctccagacgtgttcttggttttttgtttccttggcgtctgctcttgcattgcaggttcttgtgttgtacaaacaggaaagaaataaagattcaagtgttgtttatctgatgatagtagaagaggtttgcttttcaagtgaaaaatattttctttgctgtgtgctttgctttgcattttcatgattagtgtacccaccaaaaatgaattttatttttcaagtcatcgaagcagttctactgtgatcttgagatgtggggctaactactgctcaaagtgctcgtgagctacgtgggtttctctgcacggcattttgaccaaggcgacctcacttttgctctgaaaaaagctggtgtttcccttttggctgtacaaacaaaacatggcaggcatagtagtagtagtagtagtagttgttgttgcgataagatcaaaataatctctttttttataactaacttgcaatccttgggccttgataaaaatgtttcttgctttctgctctcctctccctttgcatagaaccaaccaacctggccacgcccactggatcttgcagagagtgacataattaaaacagcaaaatgcatttgttaattttttaattttggttgaagtatatgtggctatgtgcatgtctggacctaagcaagaatattcaggcatgcagcttgcagccaagaaagatgtgttctttagagcatttgattagtgaagttaatctgaacatcttactgctgtacattgctaggagatgctattattatgtggtagtcagccactaagctctgaacacatcattcttatgatgcagat

SEQ ID NO: 12748 - DNA, 692 bp, Oryza sativa
  Intron number 1 from transcript LOC_Os06g18164.1 (locus LO C_Os06g18164) derived from phytozome v7.0 (chr-ID Chr6; po s 10574585 to 10575276)
tttaaaatattcaggatataagtatattcaccaaggtatgtacataataggaatcaaaggaatgacaagaaagaaattaggagctaaagtgttaataaccttattagataaaagatgggacacaataaaccaagcatctttaggctatctagaaggagatatgaatgaaaatatgttgataacctatatagcgcctgatttaatgatgcctgtaaatgaattcatagataaaatgagttttggttttcaaacaaaaggatacgaagagtttaagggaacaaatttattaataagtatagaatttataggaagattgactaatagaagtgcctccaaatacaaaatcaatgtaaatgatgtgatagaaaaaatgcattctaaaggaataaaatttatgagccctttaacaatagactctgaagaaagagcaggagaaaaatggccaattagtgaatttataaaaaataaaaccttgagtcagcctgaaaacttcataagttaccaagacagcaaagggaatgttagtattagatttacaaattgtaaaaccagagcttcggatgatttggatgcagaatcatctgacagaaatattatagataacagaagacatagtatatctgaattgatggaaaaattagaccatgaaagtgaaataaaatattatgaagataaattaagagatatagcag

SEQ ID NO: 12749 - DNA, 660 bp, Oryza sativa; identical to SEQ ID NO: 10155
  Intron number 1 from transcript LOC_Os03g60610.1 (locus LO C_Os03g60610) derived from phytozome v7.0 (chr-ID Chr3; po s 34436356 to 34437015 reverse strand)

SEQ ID NO: 12750 - DNA, 866 bp, Oryza sativa
  Intron number 1 from transcript LOC_Os06g33710.3 (locus LO C_Os06g33710) derived from phytozome v7.0 (chr-ID Chr6; po s 19613448 to 19614313)
ggtgcacggtgatgatgtgataagcttcgtttcttggatctttaatctacctaccaacttaccgagtttatctctccttggtcgtcggtgttcgtttgtttgtttgttttggggggattgtttttcttttttttttgttcaactttgttcttcaactttgtgctaatcgcgcccttttattgttttatacataattgtttgcagtattttgttgattggatttatgggtttgttttggtggcgaggtttttatgggggaagttggggataatctggggactctttgtaacagtgatttaatttatttaggttcggttccatgttctgggatagttatatgggttttacggatcgattacctcattgattcttctttaatcgaaacgttattattgaattttcatgtctctgatgatagactgataatatcttactttattactaatacatagaaactaaaattgcaataccatgaaaaacataatgatgaatttagcaaagatagttcttaaattatttttgtgtatgtatagggtagaaggatgatggcccctaaagcagagttgcagtgatgacattttctattcaccttaaaagccttgtgttgagatagtgaaattattaattcaacatatgaaaatcttttattgcgttgtacatcatagatgtttggctgagcatggcacttcttgtttgtttgaaagccatggttaacatgttgcagtagttaagcaatttggtacttttgagtctggggctctgggctgcttgcttataagagttgttcatggctgtagcctgaatattttgttcccttttcttcatgttgagccagaggctgggaacttcaaagctgaaaaggacta

SEQ ID NO: 12751 - DNA, 826 bp, Oryza sativa
  Intron number 1 from transcript LOC_Os05g49020.1 (locus LO C_Os05g49020) derived from phytozome v7.0 (chr-ID Chr5; po s 28050384 to 28051209)
gccctactacgcgcagggctaccagaccgggccaggtatggccggtctctctcacactgactcctgctttgcttgtgctgctttgattaggtttggtggggaaatatggggaattgcaaatcgcaattggaaatttggaggtcttcatgagcctcacagcatcgctatgctctcaatttctcatgtccaactacaaattttcgatgcttttgtgcttgtggatgattcagaagcctgaccaatatgcgtgatccgaattcctaaccctcttatttctcttcacggatgggaaaacctacttagatttttgacttgggaaggaagatgaactagtcatcagctcaactacgacctggtctgctaaaatgtaaataggaaagtataaaccaagtttatggtaggaaaagagacaggatagctgatttaaacaactagactttcacttcctgcacacacgacgcacctttgatgattgaagtgttgctcatgacattggagaaactttgaggcgtgcaaattcatctaatttggtgaatttgaagtcagctgaatcactgaccataaacagattcagctgaatcttattgtgattctctgcccccccccaacacacacacacacacaaaaaaaaaagataaaagaatatcgtctttaacctcttattgtcgcatacacaatgatcaccatatccttctctatttttccttttgagataatgtaacttcagatcagatttgcatttattacattgaaaaacaaacaagtgaacccctagcatggaagtagaaattgttatatgatcatatggttcgtggtttctcaggtt

SEQ ID NO: 12752 - DNA, 385 bp, Oryza sativa
  Intron number 2 from transcript LOC_Os06g10860.1 (locus LO C_Os06g10860) derived from phytozome v7.0 (chr-ID Chr6; po s 5663678 to 5664062)
cggcgcgcgagttcttcccacggtttgaaatttcggtaatttcgtcacccaccggcaatctcatatctcatccgaaattttaggttttttgtgaatttggtcaaattttaatcaaattcattcaaaattagtcaaaatttcaaataatttcggccaactaaatttcaaaatttccgacatttcagtcccccggcaaaaaaaaaacaatttcgaatttctttcagaaggaatcggtgagccaccaattacattgaatatagatggagaaaactatacagtgtaaaggaaaagaaaaaaaatactcagctaaggtacaaggttcttgcacgagctcgaggcacgcatcgccggccttggcatggtcatcagggggtggacaccgtaa

SEQ ID NO: 12753 - DNA, 635 bp, Oryza sativa
  Intron number 1 from transcript LOC_Os05g13620.1 (locus LO C_Os05g13620) derived from phytozome v7.0 (chr-ID Chr5; po s 7552660 to 7553294)
actccttctccaactacggcgccgtcagctccgaggtcagtatatatatagccccttcccttcttcttcgctcctcctgcttccgttccggttgggtcgtctcggttgttcgtcgctaagcttgacgttttttttttcggtatgtgtggatttgtctgcgcttgctccattattccgcccgttccggtcggtctgtcttttctgttcatctgcaggtttgacgattttctgtgatggatctatgatcagtgccatttcgcgtcgtttttgttgatttttgttcgtctttcccgagctttgattggccgatttgatacacgttatccgtcacatctgttctgaagtgcccccatttccatattcccaacatcgtctttttcttttcttagttcggaagattcgccactttcttgggatctcatctaatatttgcccaattcgccgggccaatttatacacacatttcttggttcatctttgtgcgttttcatatgcagatcagtaaatatctctttaatcttcatgaactatagctagtacgtactccaatacatagatagattggtttggtgacttgctgttgctggttttgggttgcagatcgctgtggaccgtgagacggggaggtcccgcgg

SEQ ID NO: 12754 - DNA, 803 bp, Oryza sativa
  Intron number 1 from transcript LOC_Os05g44410.1 (locus LO C_Os05g44410) derived from phytozome v7.0 (chr-ID Chr5; po s 25783784 to 25784586)
gctaggcagcaggctgagccccccacggtaagagaagttcaacagtatagctcactagtaactctaatttatctatagccaatctaatagtcaattcatataatagttgtttactatactattaatacatagtcccacctgtcatacacacaccatgttttgaagtccgtgctgcagctggctacagatttctagcccgctgctcttctctctcctctattatctcataaaatatgtttctagatggcttatagcctgctattgtgcctgctctaatgaccctcttcaaattcgagctatcattgatctgcacgtataatccatcattatactgtgttacttggtgttaattaaagctagtatgtgaaaactgcctttctatcatcaaagaattagtgctgataggtccatcaatcagaatggcaagtaaacaatcacctgtgatgggctcgctctgtgtacttgtaattagtgaggttggtgatgaatggtgactgctatacgtacgtgacaaggagggagctaggccggcgacggccgacccacctatagacgtgtacacgcagttgtgtctataaatacgatggaatttatgtcatggtgacggatgggtgctctacgtggtttatatatggagaaatatcaagaaatctttcggctagctttttagggcggtgggctaaatgatttggattcgaagcctccttttaattatttgatattagttcttctctaatatttacgtctttttgcgtggtttgcatgcagggcgcggcggcgctgcagaggtcgaactcggacgg

SEQ ID NO: 12755 - DNA, 597 bp, Oryza sativa
  Intron number 1 from transcript LOC_Os06g10960.1 (locus LO C_Os06g10960) derived from phytozome v7.0 (chr-ID Chr6; po s 5720845 to 5721441)
ttgcttacgcgtgaggaccatataagttgggcctaattggggattacggcgtacgagcagcccatgtacgttgggacagaacgggactgtttcgttccatatttgttggaccgcaacaggactgttgtatacgactgccggatgaaggaaagcgccgatccggcgagggttgtgccgcacgtccagagctgccacgacgtgccgtggggagtgaagctcgttcatcatcgtgccgagtagatgccaaacgacatgacaaattaagatgcccgatctttagcttttacgtgttattatcgagtgctaaccatttcacattcaacttttactactccctccattttaggttataaaatattttgactttcgtcaaagtcaaactgatttaaatttgattaagtttatagaagaaggtagtaatattttcaacctaagataaatttattacgaaaatatatttaattattgatttgatgaaactaatttagtattataaatattactgtatttatctataaacttagttaaacttagaatagtttgtctataacctgaaacgaaggaagtatatctttggagtgaataaaggaaactcct

SEQ ID NO: 12756 - DNA, 662 bp, Oryza sativa
  Intron number 2 from transcript LOC_Os06g10960.1 (locus LO C_Os06g10960) derived from phytozome v7.0 (chr-ID Chr6; po s 5721451 to 5722112)
cttctccttacggtacggccccgtgagatgatggattttctctgttccccagtggcttttggcttgtagacacgcatgggccgaaacctaactgcggcccacgagcggcccattgcaattaggctcttgtattcgtcctcccgtcccgactcccgagaggccgacaggccgaagcacacggagcatagcactgcacgtttgcaccgatcatctcggtgtatggactgcacacggcaccggaatccgggtcggtcaccgtaatctcccaagactccaacggcggggaggcggtgacggggcccatcgttacgtctgcgcctcctggtggtcgctcgccgtagggatcggaacatagcgtaagaaatcgctctgttcgttcggatacttctcttctttttttttttgacggacgctctgctcggatattaaccacacagtcgcgtcagtttggtagatctgctggattggctgccgaaatcaaccgagtaactgtttcttcctggttgtacttctgccctcgttcgtcacatctccttactcttcccagggttttctaaaccgccgggatcggggttaccacattctggcattaaaaaccatacaaaaccgtgcaaaatttatcaaaaatttaaattattttttaaatttatttgaatttaagg

SEQ ID NO: 12757 - DNA, 997 bp, Oryza sativa
  Intron number 3 from transcript LOC_Os06g16290.1 (locus LO C_Os06g16290) derived from phytozome v7.0 (chr-ID Chr6; po s 9282887 to 9283883)
ttccgtcgaaagaggtatttttgtaatgccctttaacttcagacttctcgacatcaatcccttgtaatctattggcagggaacagcacagatagccctagcagcagcatatttcccattggttactttgtatagactaaatgaaacaagtcatgttcaattataaaagatgacaatgctgcagcctttcacatgttgattattgaacgacaatggggaatatgcatttgctggtgctttacagtgagctaccctgagtacgattagcttgaatttaaacagtctttgtaaaattagagttatttccatgaacacctaggaatgagtgaagactcaccttgttgcccatttgcacataccatgtactgaaattcttcttttcttttaagaatagaaaacattattaccgtaatcactacatgtagcacaagacaccatgtagggattgatagataggagttgagaagtgttttggatacatgggatctccaaaaacaaaccaaccaccatgaaggtagttagaaaagacttccatgagtattggatttacattctgactagtttctaatatgattatctacagtatcgtgaagtcttcttttaatgcaataaatatttgctccctccgtgcactgacaccaagatccctgcctgagaaggtctggaacaaaattattctgatatcaaccccagattaaaagcgtgtgttgcttcaagtatccccttgaaaaatacaaatgttcattaatttgatcaatgcagctcctaataagacctgtattgtccaataaagccaacatcttgtgccacaaatcaccaaaaatgggaaaggaattaaataatgtagaaatttgtaatgctttctgtaatgtttgcactgctataagttagtgaccgccaactatgctcacgaagccaaggggtaacttgagatactgatgttttttcccctcattgtgttaggatctcgcaacagctgggactaccaagaggcctac

SEQ ID NO: 12758 - DNA, 1019 bp, Oryza sativa
  Intron number 1 from transcript LOC_Os06g22620.1 (locus LO C_Os06g22620) derived from phytozome v7.0 (chr-ID Chr6; po s 13152237 to 13153255 reverse strand)
gctcgtcggcaagtattttccacaccttgccaaaggtcggcaagctacttaaatccctctaggtaccttgtagatgctctaggagccctccccgagccttgtctaactctcactaccccgatcaccttcacggcttaaccatgtcactgccgccctagccgctagcccaaccacataccaaattaacccctccgccgccgctcgccgtcgccggagaaccctagctccctcccctcctcggccgtaaccccttttctcctctatcgctgccagctgcatttggggatcggctggaggttgaagaagagaagagagagagagagactgacaggtgggacccgcacacagtgccatttcacatttaattgattttcaaactttaaaagcccatatcttttaaaatatagatccaattctagtgaaacttggaccaatattctcctaaaatcattctctatcttttgagaccccttttgctatttttctagtttattctattttctctatttttcttatttttggattttatttgaattccttttgaatttgaattttatttgtctaaccctaggtcttgaggattcttctgacatactagaaaatatcagtcaatcttaggacattgagcaaggcaagttactatataccgttttgatcatttaagcctatattttacaaattatttatttatagccttctattcaatactctatttttttatgcacaatttaaccatagaaacccagataatttagtattgcttattttgcttatggtctggttaaaatattttatagttagattgggacagtacgttagaattggatgatttccgggtggctagtactgtctcgatcgatatagttattaccaggtacttatgtcaaacgaatggtacgaccgtagtttctagaatggggacagacctagtcattatgttaattagcaatatggcacctctgtatagtggttcttatttttaagtgctcgcgcaggaggcaactatagccgcgaaggga

SEQ ID NO: 12759 - DNA, 658 bp, Oryza sativa
  Intron number 1 from transcript LOC_Os05g50990.1 (locus LO C_Os05g50990) derived from phytozome v7.0 (chr-ID Chr5; po s 29197754 to 29198411 reverse strand)
cgcgcgcacagccgcctcgccgcgctctgcctccggtgagattctttcgcccttgcgcgttcgcagattcgtgtgctccacagccccaaacggattcacagatctcgccttgacatctccgatctttgatgctttcgtctttgcttatgcattagtgcctgacataacttgtgggtcaatagaacagggaattgttaccgatatatgctgctccgtatacctaccgtttctcttgtcttcttgtttgtttgatttgagatgatcagtagctttgcctttgctgatcatcaccagtaacaaatttacttgttttggaagtaaaagtttgatcttgaagttactgagaagtttttttttttttaaactgaagttggctagcaattgtgtggtgagactgggaggtctggaaatgtttgtatctttgcctctttggttggtatgctgaagttaatcaatgtgctcttaatatgattcgcatcaaaacaatgtagttgagagtgagtgcttacctgtattgtacattgtatttagaccgtagtacaggggagtcagtggtggtcctaatctattcagtgctaacgttcaatcaatttatgggcagtagctgtttgattttgtcactgaaaattgcaccatgacggctgcatgcaggtttgga

SEQ ID NO: 12760 - DNA, 926 bp, Oryza sativa
  Intron number 1 from transcript LOC_Os06g43680.1 (locus LO C_Os06g43680) derived from phytozome v7.0 (chr-ID Chr6; po s 26296130 to 26297055)
acaaccgcgtcgccgccgcgcagtacatcctcgaggttttcccccctcctgcttcccgcccgagcgtctcgcgatttggctggccttcgtgtagtcgttgtttgctagctagcgagggatttgggtgggggtttggtaggatgcgtcatcaaccaatgcactttatgagccgcaattttatatgtttttgaaccgtggactgtttgttgttatactgtgttggctaggtgtattcacttttagctcattggctggtgttttggataccaaattaccagtgcctgtggttgaattactccaggtttgtgaacaattttgttggtggccaactgcattaggtgaatatggagggtttgggactgctgcaagctgttatagctggaaattgatgtgcttttagtaggtttcggatgtttatatgacctggagatgatgccagtttttcagtatctcattttgtatgttgtaggcttgaatagaaatggaactagtgagactgtgctttggtttatccctgaattttcatatggatgtatgtttattttttccattggatcattgagaatgtggacatgcttactgctggataaagcagatgagaattcagctggcctgtgcagcgcccttgaggtgtttccgtttaagtcttcttttccttttaatcttaagatcatgagtgtatggtaggctcagtatagtctgaataagaaaggttactaattgtgtgcctactaagtgcatgaataaactcgcacataacatgcatactttgatggtaccaggaatttatcttgattgtggtatgtagtcagagtatgttattctctgcatgtagacgaagtatcactatgctattcagtgagcgcattctgcacatataattttgtttgaccggactatgattttgtgcttggtctttgaacagc

SEQ ID NO: 12761 - DNA, 444 bp, Oryza sativa
  Intron number 2 from transcript LOC_Os06g45450.1 (locus LO C_Os06g45450) derived from phytozome v7.0 (chr-ID Chr6; po s 27472247 to 27472690 reverse strand)
ctcatcaccaaggatcccagtaagtacgcagccatgtcgatcgtttgcattattgggccaaggccttcttctgctcattaggcccaaggacggcccattcccattttacttgtttatttacttccccctccatttcatgttataaaacatttttcctattcaaacatatttaggttcgaccatgtttataacaacaaataatttcataaatataatattgaatatattttgataataaatttgtttggggttggaaatgccgctatatttttctataaagttggtcaaatttttaaaaaaaaagttgataaaaaaaattcaaatatgaaaaggaaggaatggtagttctgaaaattttctccttttctgcatgaattttattgatgaattttaatgggttttgattattgtcacattgttttgtttcattaatttgtgtaggtt

SEQ ID NO: 12762 - DNA, 1021 bp, Oryza sativa
  Intron number 1 from transcript LOC_Os04g34380.1 (locus LO C_Os04g34380) derived from phytozome v7.0 (chr-ID Chr4; po s 20650616 to 20651636)
ctgcgcttggagagttggagaggtaaaattaatacgtaactctagaattgactcgtgggttacctattaatttgatttatactttctccgttctaaaatataagagcaagtataatagtaggctataagtcggctaaatgctgagttggaggaaagaagagaggagagagaggagaagcgggctataaacttacagccggcttggacacaagaaccaaaaactctgtgagagagacaagtgggtcctgtattaattgtgacaagctaactattatataggtaggctgagagaaggctacaaatgtccttatagctagcaggtcggttgtattattagccttgctctaaggcacaactactttttaaagttgtttcataatataaggcgtgcatgcatgcatgtaattaattagcacattctctcccataaattattattattttaaatcctacactcacaagattttaattctattggttgcatgtattgtactagttggggtgatttatgacaatgatgtgatattaattatttcttggacttcgggttaaggttggttgtgccttatattttggaattgagggtgtaaataattttatggatcgacccacttgcatctctacgtggtaagtcggaccataataggcccacgggttgacatataagttcgcaggtcagtcctcttttcatccctagctgcgctccatgttattagttagtttgtgctttaaatcgtcaatagtagttgtgtatatgatgtaaatttataatgcaaacttgatagaaacttccttgttattgtgatacggtgtttccgatgccctattctaatacttccccatcctagtttgatcattagttttctcaaaatgatcatcatctaataaaatctctttatttatttgtgaaaaaagtaaatgtgcatcgcgtaatgccctgcatgcatgtatgcttgaatgataattaatttataaatgatgaatgttttgatattcttggtctaggtgtccttttgtttag

SEQ ID NO: 12763 - DNA, 796 bp, Oryza sativa
  Intron number 2 from transcript LOC_Os04g42090.5 (locus LO C_Os04g42090) derived from phytozome v7.0 (chr-ID Chr4; po s 24730298 to 24731093)
taaaacaaaaggtcagtaggttacctctttgatcttgcttgtgcagttaggctatcctgtttgagttgttcgtgatttgcagattactgcaaaagctatcctgtaaaatttcttgtcgtggtaaagattgtactaagaatttttgtgtgttcagatcctaagacatagaaaaatagttttttttcgtctccccataggaatataacaaatgttctttttctgtgacaccatgatcgaattttgttttttaatgcaaatgtatggtattatcattaacataggatgggatcagggacgaaacatatgtgaatataggaacatttgcatatgtccaacggaaaagtctcaactctaaatcttaatccaaatgacatcacgattgtaaatccgaccagatcttaaatctgaatccaagtgagactcaattgtaaatctaaatataagaaagaatactgatatatgattcattgtaaaggacgctgtggcttgtaggaattgagtattactggaaaattaggaattgaatcagattgtgagatattaattgacctgtcctgttgtggcatatttactcctagttagaacttggaatctatcatattgttatgtaactgtttactctttggtatcgttttgatagcttcttatctcagttttacttttttgcattaaagactcagatgcttcggtctggcacatatatcttctacaaacatatgcccttattttctctttgggccatatatatttgtctgaacctgatatttaccttgttatatacttgtgcagtaagtgg

SEQ ID NO: 12764 - DNA, 558 bp, Oryza sativa
  Intron number 1 from transcript LOC_Os03g48710.4 (locus LO C_Os03g48710) derived from phytozome v7.0 (chr-ID Chr3; po s 27758050 to 27758607 reverse strand)
cgtccgcgctcgccacggtcgccgcgtggttccaggtctgacgggctcctccccctttgtgatttcgagctgtttgtgttcgataggttcttgatttaggcttgccaaattagtctctggttagaaattaatctgctgccaagtagcaatcgagttcaatttcccggattgtgttattgtgccgtcaatttcaaagttgatagcggaactatgctaagaatcttcgctgtttcctggtgattgtttcgtgtccgacttgtgttcttcctggctgctcactcctgtggtggttaattttgacttctatataattaccttgaggttgcgtaatgctgaaggaaacgcaagctgagagttgcttcctgtggtaatatttgacatggaaaatgaaatatatggcatattaggttgttgtaataaaatagggctattgtgtattattgcatcatgcagttggaatagtttaaacagacacgagacgtgttgcacattggcttatgaaaagaaaaatgcaattgtacagaaccaggaaggcaggaagcaaggtcgtattaagtc

SEQ ID NO: 12765 - DNA, 284 bp, Oryza sativa
  Intron number 2 from transcript LOC_Os06g06350.1 (locus LO C_Os06g06350) derived from phytozome v7.0 (chr-ID Chr6; po s 2949177 to 2949460)
tgctcggtcgccggagagtcgtcgacgacggcaaggtgattaattcaatatttcttttcccttcgtttgaacaagaataatctttcattatttcacattggtttctgctctagcttgtagctataattctctcttctgccttctacttctacaaaatgtattgctactttgatcattccaagcaccactttattatttcggatacacatgtggagtaaaacttattttttttttcggtttaattagttctctaatctgtatagttcatttgcaggcaggtgaat

SEQ ID NO: 12766 - DNA, 606 bp, Oryza sativa
  Intron number 1 from transcript LOC_Os06g05120.2 (locus LO C_Os06g05120) derived from phytozome v7.0 (chr-ID Chr6; po s 2260957 to 2261562 reverse strand)
cgtgagagcaatttgtttttttttcttatgatgttcttcttgttctcctgttttggagacacaattcaagaagaggatggctggatgagtattggtcaggatgattagttagaaggatcttaaacttgttttcttgcagctgacatatctttctctctttcccctctttgatggagtattttataagattcttttttttcttggacttttgtaagcaattttttttcttttcatgcaaatttcttcagcttcttttgtctcactggttagctttgaacaaccttacaaatagcttcagatcatgaacacacttattagtgttcctttttttacttaagaaaatcaccctgcttctcatgcttggcttagttgctgaaagtttgaattagagccgaactccagcagtacacatcttcagaagtcaatacacctgctgaaactacttcaactctgctacactctgtttctgatatcgtcagtttttaagtttacaaatcatgaaacttttgtgaatcttttttagcaaaatcctgatcgatctcgctaactatttctctcattctgattgcagcatcttcactgcactgtgctgcttctgctgctacg

SEQ ID NO: 12767 - DNA, 990 bp, Oryza sativa
  Intron number 1 from transcript LOC_Os03g57960.1 (locus LO C_Os03g57960) derived from phytozome v7.0 (chr-ID Chr3; po s 33013447 to 33014436)
tgctcaaccccgtctccactcccggccacttcgaggttgattgatttcccctctttttttcattccaagttccatggatgcaagcagggcagaacggaaatggattcctctcatttcttgtacagtataacactaaaataataattaaaaaattaacaacatggactaatataaatattactttctctgtttcatgttccaggttataagtcgtttctatttcaagtttaactaagtttataaactgtttctatttcaagtttaacttactttataagtttatagacctatttcaagttagactaagtttatagaaaaaagtagtaattttttcgacctaaaataattttattataaaaatatatttaattattgatttaataaaactaatttgataatataaatattactatatttgtctataaaattggttaaatttgagataatttgattttgacccaagtcaaaaaggcttataatataacagagagagagagagagtatgtcactaaattttgatctctaaagttagggtgtgtttaaagttagggtgtgtttagtttcacactaaaattggaagtttgaagaaaaaagtttatatgagtttatgtgtgtagtaaagttttagaagtttaaagaaaaaagttgaaagtttacgtgtgtagaaaagttttgatgtgatggaaaagttagaaatttaaagaaaaattgaaaactaaacccggccttactaagaaaacaagagccaattaaactaaaaatagttaactacttatatttgttattttttcataagttgtaaaagttgaatttgaattaaactatcttgtaaaaaaacaactttttatgattatttaggtgatgacaggtaaaaaaaatgaggacatattccttcgaaggatgaaaaaatattcccatgcagaagtgtgtaattctgatgtggtttcggtcgcaggaatacttccccgtcggcggcgaccggccggagtc

SEQ ID NO: 12768 - DNA, 658 bp, Oryza sativa
  Intron number 1 from transcript LOC_Os06g10810.1 (locus LO C_Os06g10810) derived from phytozome v7.0 (chr-ID Chr6; po s 5637653 to 5638310)
caggtcggttgctagattttagatccggaaattggttcatgccacgcctcatgcacttgtttggatcggggttgccttttgctagatccgtcggcgtgctatttagttcgaagcgattagcattgttgaatctatttgtatagattccttgttactctgccgattagttgtttgctcgttatttagttggcgagttgtagatttgctgatgttcgttattttgaattcattatcaacatgaagcgtatcaatagtaggataattgatttgggaattagatgatgtgcgataatttttattacgggtgcctgattagatctaatttgttaaacagagttagtgaattttatagcttgccaatccggttgtgtgagaactgagaaccatctatcctgtggacattttcactcctcctaaggaagtgttagcatctcttatgattaacatggttatgttgtgccgcacctcaaattataatgcctgctttagtacattactgggtgcattgttagaaggtatatatatttacatagagaacatatacaaaaggtatacatcgttttgttggtttgtccgaagatcattgatcgttctaacatgattatgtttgtaaccattaccagattgatccagcaaagtacaagagcatcacatctgg

SEQ ID NO: 12769 - DNA, 858 bp, Oryza sativa
  Intron number 1 from transcript LOC_Os04g07808.1 (locus LO C_Os04g07808) derived from phytozome v7.0 (chr-ID Chr4; po s 4161026 to 4161883 reverse strand)
gtggccattatccttcggtggcaaggtgacgtatgatgtgctatgggtgatggcgttgggctagggttgccagtctacgcgatagaggtgacgatggagcggcattgcgccgtgtcacccggatagaaaccggaacgagagagcgcagattttgtcgtggtgtggcatggcgtgatgcagcacatggaagcggcgcacgtggcatggacgcaatgcgggcacgcgtgggatcagggatgggttgggtgcatagagaggggcatggttggctagggtcgcgatgcacctaagaggagcgcacgggctgggcatgttctgctggtactgcggcttcggcctggaaggttgtaggcccaggtcgaataggtactgggcaatgaacagtaccagctagaaaagaaaagaaaaggaaggaaaggaaaagagaagatggaggggctaatctgcaaaatggttgggattggaatttgaatggaattgtagtgctgtagctttggacttttgaattttaggaattcaaatatttcacctgaatttgaattattgatttcaccacaaatgaattgttttagattaatttggatttttgactctagatgaacttacatattttggagacttgagtgttgtagcaaggggtaaacaccatcctccccattcggtcaaaacaccgagggaaatgaggtcttgagaatcctaattgtccaacttggaaaagacttgtaattgggaaaaatactatccgactggtaaagttccattcgaatgattttgtgacacttgagcagcttatcccgcttgagtggacttttacttgtgacaggtaaattccaagagcctagcaggtgaaaaggagtg

SEQ ID NO: 12770 - DNA, 707 bp, Oryza sativa
  Intron number 1 from transcript LOC_Os04g46430.1 (locus LO C_Os04g46430) derived from phytozome v7.0 (chr-ID Chr4; po s 27344336 to 27345042 reverse strand)
tcgagggtgggctttggcggcgccggtgtggccccccgaggtggaggttgccggatgttgtatcaataatccctaatcctatacagcaaaataagaaaatcaggaggaagattacggtggtgcaatgtttcatgaagcttattgcactttgcttaaaaatgaaccatcttggtacataattagccaaaagcttactgaagtcataagttcatcttgaccaaatctgtcaagaatccagaaacagttggattgtcctaacatatgcatggtgatggtgatttcattaatcaaggaatgaatctctactatactgataattgacatagatggtgcatcatcttaaatattctgtcactgccagtgaaaatcgaattttaaggtttgatttctgaaatgtgtaaaatcttaaataaccagatactatatattgttctttggagatgtttagacatgtgcagacagttatgcgttgttcatagacatggatactttagttatcattatctaaaaacatgaattctttagataccaaaacgatgctttcggttttctttcttttgattgattctggattatattaagaaccgtatgatcaaatcagcggcgactgatggggagagaggaaatatatataatactggattgtggattaaaaaaaggagagaaggatgatttctgtaccttaatttcggcgaatcagatcgagg

SEQ ID NO: 12771 - DNA, 1052 bp, Oryza sativa
  Intron number 1 from transcript LOC_Os07g05570.2 (locus LO C_Os07g05570) derived from phytozome v7.0 (chr-ID Chr7; po s 2603756 to 2604807 reverse strand)
cgacgccgccgtctacctcgtcttcctctcctccggtataataataatagcaacaacatccctctcccctgcgctctcttagttcagttcagttcagtttatttcaggagttgagttggttgtgattttgctccaacggaaaaaaaaaatggtttcgtgcgatttcttcgagtattttcgggtcggggagttctaaattttaatttctaggtgcccctgtagtactgaatcccaggaaatttggtccagagatttcttctcacttttgtttttttgttatccttttgtttgcagaagtagtagtaccgtgtattatatataaaaaaactgataaaaaatatttttatgtttcaccgtttcatgtaccaacataaagataacaattactactaattcatgctttcttagactaaacaatttatttggagaaaattgcgtggctctgtaaggccttgtttagtttccaatttttttttcccaaaaacgtcacatcgaatctttggacacatgcatagagtatcaaatatagataaaaacaaaaactaattgcacagtttgcatggaaatcacgagatggatcttttgagcctaattagtccatgattagccataagtgctatagtaaaccacatgtgctaatgtcggcttaattaggctcaaaagattgtctcgtggtttccaggcgagttatgaaatttgttttttcattcgtgtccgaaaaccccttccaacatctggtcaaacatccgatgtgacacccaaaaattttcttttcgctaacaaaacggggccaatttataggggcaagtcgtgctgaatgaaaggttggctatagaaaactatgatgcatggaggattgccaagtatgaaattcagcatgttaattgatttatgctgcactttactgattaaatttggctaaggtgccattttggctaaaaatagctaagttgatataacatattgacttgccacctattatgacaatttgtttaataattttctcttatgttacagtgttgtccatcttggtgttctctgggattgtgctg

SEQ ID NO: 12772 - DNA, 1025 bp, Oryza sativa
  Intron number 1 from transcript LOC_Os04g43840.1 (locus LO C_Os04g43840) derived from phytozome v7.0 (chr-ID Chr4; po s 25774523 to 25775547)
accaggacgcagccgttgagcttggcaaggagctggtacgttctactatatttctcaattctcatatatgtaatcgtcttgacaaagcagctgcttcatttttcaaccttgatcatgacatcctttctgagatcttgcttctttaattttctctcgttaatcaaaaacaccatggccatggagctttttactgatattcagcacaacgcgcctggtgatatgtaggtatatagagagtacctgacaaggttttgggtttcttttcaacgtcgtaatcttggagtaatataattatcaagctgtgtagacgtacacttgctgaacaagggctaaaatttatctctctatatatttaagtgacaatatatgcgacattactgctagctgtagacgtactcttgcagtgcatgcagcttgttcttagtagaagatgagagcatatgcatgagctgagcacagcatgtgtaggtctgaattgaatttctgtatcatgcagtaaaacccacttgtattacaaaggagaatgtcatgagggcttgcacatgagcttattaattacttcacatgaaagacaatatgtctgtcggtgaacatggaattttatatttatgcagcttgcatagttccatagaaaatgacttactccccaggaacctagtactggattaggttatgatcttgtataaggctgctatattttgaaacggagggagtactagccagcaagttactacgcgcatttgcatttgtatggtgacttttcgccgggattttcggtgctcagcgcatttttctctatccatttcgaggcacggtataaatgcaaaaatgaaatagacaagtcgcatggatcagtcttaaaggaaactatatatagtgtgtactgtatgtagtagctagactacatattctagatcacttgatgatatatattatagaagactagattctagaatgtggaaatgcatccccactctccattattatggtttcaccacaggtagcaaggaacattgatctagtgt

SEQ ID NO: 12773 - DNA, 663 bp, Oryza sativa
  Intron number 1 from transcript LOC_Os06g20120.1 (locus LO C_Os06g20120) derived from phytozome v7.0 (chr-ID Chr6; po s 11534470 to 11535132)
ggcgccgccggtgtcctgctcgcctatcccttccggtaaagcattacttgtctcctccatgctcagttcattaatactcactccgtttctaaatatttgacaccgttgattttttagcacatatttgaccgtttgtcttattcaaaaattgttgtgaaatatgtaaaactatatgtatatatataagtatatttaacaatgaatcaaatgataggaaaagaatttataataacttatattttttttgaataagatgaacggtcaaacatatttaaaaaaatcaacggcgtcaaatatttagaaatagagggagtaaatatttagaaattgagggagtacttacttccgtggtcatatactcatatgtatttattgtttaggataagattcgatccaacgtttaaaatttattgtttaaaattttaaacacacaaaattcctcgaatgcctagtttaaaagaaaagaaatgacatgtatatttgcctatatacaagatgctatcgtaataccataaatttatgggattttacaaacttattataacataaatggatggtcgaaatctaaaaactttggctgagtcatcctaaccgtcaaatattttgaccaaagggagcagtagtacaattcatagttgcaaaacgtatatgcaggtgcgagta

SEQ ID NO: 12774 - DNA, 891 bp, Oryza sativa
  Intron number 1 from transcript LOC_Os05g40800.1 (locus LO C_Os05g40800) derived from phytozome v7.0 (chr-ID Chr5; po s 23863710 to 23864600)
agattcgtaagtgcctccattgcaagcagcaccaaagtataaatttcttgttcataatatgcaagtcaaatattgggacaggattctaaaccctcgaaggatatctcctcgtgtaactttttcttttttttcaaattcaatgtgaatgtttgtattttttttaaaaaaaaaacttgacccaccaaagacaaaatagaccctgtacatcctgtgtagaataaaaccttctcacgcaggtcaagaaagcccttgaacccatgccagcccttacacaatggcattggagaacgaccaacaaccgaggcctctagctgtaaaaattgttagcaatgtacattatagtaacttttatcaccaccaaaaaaatataattcaaattcgatttacatattgagaattaaaaaaagataaatccagagcactttgatttgattcttttattcctagatgggtgatttaagttttaacttgattttatatagagtattttatatatacattattaatgttgtcgtttttttataaaaagatttaccaactatttatatgatgtttaaacaaacaagattatattccctcaaatttaaaacacttgccacatactccctccgtttccaacatataagcatttttaactttgaccattaatagtaaaataataaaaaaagatcaatcatgtaaaattgatgttactagatttattattaaacatactatcataatgtgcaactcttttaatttaaaataacttttatagatattgttagtcaaagtagcatctcggagactgtaccagagtccaaaaatacttatattttaggacaaatggagtatatgaacatttcttgtcttgcaggaggagccacgataaaacgatacccttacacagat

SEQ ID NO: 12775 - DNA, 506 bp, Oryza sativa
  Intron number 1 from transcript LOC_Os05g35230.1 (locus LO C_Os05g35230) derived from phytozome v7.0 (chr-ID Chr5; po s 20869400 to 20869905)
ttgctgcttcagggaaggaagtaccagtgctaaaggtgagcttcttttgcctgcaatttaggtactcctgactaaccactgcgtttcagacaattcctcctgcttctctgttctttccattctcctcctttttttcagaatgcttttcagctttactcttcatgaacaacgcattattgatttttcttccccccccaaactgattctttgattattgacgtctcatagacctacgtggtgatgacattagcgctgtggttcagatagccacagggcaatgcttgattaattagttgcttatccaaccacgcatcatatgctgcatttcattttgtttttgttttttttttcatttctgttggctcttcacatgtacaatgtgacatctcctttcacaagcggcacatgcgcatgacggtcagtttttggcaaaagctcaaccgtatctgacgcctgcatttcctctaccagccaaggcgtgcaggtgcagcgcagcgcgacgacga

SEQ ID NO: 12776 - DNA, 990 bp, Oryza sativa
  Intron number 2 from transcript LOC_Os05g35230.1 (locus LO C_Os05g35230) derived from phytozome v7.0 (chr-ID Chr5; po s 20870358 to 20871347)
tctcgccggacaagctcttctgtacaccgggcaaggtgagtagtaagaatgcagctgtaaatttcacggggtgtcacgctcacgtgcagcggtgtcagtgtgggaagacgacacgtactgacgtacgttgcctcgctcgtgccatagcagtaacaacaccagcagcgtacgccggtagctgcacgctacagtgccagcatgtattacgtacgtacgtaagtcgctggctacagtgcagccgtgcgcgttgcaaccggccgtttggttcacctggaactgaaatgccttcagattcttatccataataagctggtagtaaaaaacggggaaactgttttaaattatcgagtagacgtttcttgtttgttcaaacaccatttaaatagtagttgttagaaaattcaaaaaaaacattcgtacaatatagataaagtcaaaactcaacgtgcacattggcaaaagtaaaaagacaaatccgacatataaatagtattggtactatttagacctgaatttgctttctttttcttaatatatagatcgaatttgattatctttttttagcgatagatgttattatgttctactacattgtcaaaacttttaaatactttttttcacaaccaattacatccaatttgagagtaaaaaaaagtacataaggggatatcctttcgggagataagaatcatttaatcatggcatttttttagattatgtatgcttctcaaaatgagacgtaggatctgtttagaggagcttgtagtagttgcagtttccgacagaatctccaactctataaatagtacagattgtcactcaaattaattatgagaatatgtaccagtagaatacagaaaataaactaacagtcagaaactaaaaaacgcggattctcggaaattttaagcttcccaaataagaccctaattcgcttgttggtttggtggtgcagttggaggtcgtgccggcggaggatctgacggtgct

SEQ ID NO: 12777 - DNA, 955 bp, Oryza sativa
  Intron number 2 from transcript LOC_Os05g39560.1 (locus LO C_Os05g39560) derived from phytozome v7.0 (chr-ID Chr5; po s 23154909 to 23155863)
catcgttcaggtgatttacccacacatttactccgcactcacaattgtcaatttcaacctgttttttttttttttcgagagagagagagagagagaaagatttcaacgtttttggtgttcatatcctatcaatccatcgtgcttactaactcgtccgaagataccgatttcaaacaagaggacaactgatgtcttgtactaccaaaaagttagaaaaagacgttccgattttgcagatttacagatgggccttagtactttgaggggcccagttgttaaatcacgactcaaatcgcatcccatcctacttccctgggcggctgggcctccactaattaatctcaatcaaaagtaatccttctattttatattattattaatcgttttaactttctttttaaaatttgactaagtttatagaaaaatataacaacattttaacccaaaacaaatatattatcaaaatatattttatgttaattttaatgaaattaatttcgtattgtagatgttaataatttttcggaattgctagaaaacttccgcaagtttttttttgcccccaaaaaactttcagatttgtggccatcagatcgcattgagatttgtgcatgaaggaaaataattggtagaaagaaattttcacccatctcacgcgtaagaacttgatgctaaccaaaacatagtagaatataagttttatataagttatattacagttacagcgcagttgcagtgtggttacgatgtaatttcacttcaattatattatagttatatctgaaaatttttcactcaaaaaacttactgcggttttcttaatactccttaatctttctataaatttaggtaaacttaaataagtttgattaagaaaaaagttaaaataacttataatataacctgttctttcttgtttctgcaggcaaagttccgtgtcaggtcagtggtgacg

SEQ ID NO: 12778 - DNA, 801 bp, Oryza sativa
  Intron number 1 from transcript LOC_Os05g32880.1 (locus LO C_Os05g32880) derived from phytozome v7.0 (chr-ID Chr5; po s 19196449 to 19197249 reverse strand)
ctgctcctcgccggctacgcaggtccgaacatatatgtctatatcttgtgtgttccccatttcctttcttgtttttactattcaaaaattttttcccttcttgttttgtgttttggtttgttcgatttgctgtttttctactgcttgtttcatataaaggactgaatccggatatcacttgtagcatgttagggctcctttggattcaatgaaattcctacggttttttggggggattacaatcgttgagagaatttttctatcagaagtcagaacttactcttagaacaaagaaatatgattgcaaaaatcgtataggttttttttttcatttgccttattcataggatatatattccctctttgtcgatctattctctccccttaatccgtcaaagtcctatgattaatttcgtatgaatttcagattcctgtgttttgagtttcttcaggttttgcacacacaaacgttccgatcttgtggttttaatacttgtctttctaaaatcatgtgcagccctaatgctacaattcttctgtttcaaaaaaaaagctacaattcttcttttccccttttgtttactccaacgccgcctctctctgatgctcctctctcacacacacaaacacacacacacaagcacaatcacacacacacacacacacacacacacacacaaaacacaatatcttttaaatctttgtgttttgaattcctatatgatttggctatatttttatgtccgtgtgtgtcggatatctgcagtgacgggcaagacgacggcggaggaagcgctgaaa

SEQ ID NO: 12779 - DNA, 684 bp, Oryza sativa
  Intron number 1 from transcript LOC_Os05g15300.1 (locus LO C_Os05g15300) derived from phytozome v7.0 (chr-ID Chr5; po s 8678129 to 8678812 reverse strand)
cgcgaccagatcgaaaccctgcgtgagtagattaattcgttaccaatttgatctatcgactttcttaattaattttagattgattaccaatttaatctatcgacttgctaattaatttagattgattatcaatttaatctatcgactttctaactaattttctcgtattaagtagttagatccaaattaatataccatattcttgaacactagcatatttaccacacgtattattatggttgcatgtaccttgggcattgcttgaaatagattactcaaatacttattgctatggatgattctgtagataaaataaatatttttaaaaataagcttaagaaataactttaaataatacaatgttgtagaattttttttaaaaaacatcaatttttagaggcatggagtaaataattcgcggatattatatttatatggtgaagtagccgaaaataattgattgggttttgtgttcttcttaattttgaatttgtagagcttaattacttgttctgaattatttaaatagaggatgagatgaatggtttgcatgtactaaatttattgggctttgtgtgctccttaattatggatttgttatacttaattaattgttttcacttttaacagaggatgatttgaaggttgttatacttaattaattgttttcacttttaacagagg

SEQ ID NO: 12780 - DNA, 874 bp, Oryza sativa
  Intron number 2 from transcript LOC_Os03g58280.1 (locus LO C_Os03g58280) derived from phytozome v7.0 (chr-ID Chr3; po s 33197825 to 33198698)
tccccacccgccccggcttgcccgagaggagagaagtgagagagagaagggagagaagagaggaaagagagtggctgaccaggttgacacgtggggcccacgtgggtcccacgctgactcagctaccacatagaccaaaaccgggatcaaaaccgccgaaggacctcgggtgaccggttttgtatagttaagggaccccgcatatctggttttgcggtttgaggatgcttttttaatctcgctgacaagttgagggacctccagtgcactttttccgttttaatatgggtcagaatggtatcccaacgaacatgtggcctgttctatacgggctggtccaattttgaggccgggaaagccgtgcggcccggcccgttcgatctatctctttccctcatgtttccttccttgagtttgttctagtctactggtgtcaccaactcaccattgattggtttatctttgaaaaaagaaattgtgcatgcttagatatattcaaggctgactattctcctgtaccatgtcaattatgaaaaaaaatattgatataaaaaaattattgaaagtgtccttctgaattttctcttccatgcattcagcaggccatggagaccctataagacagtgctccatggatgtccacatattgggattattcatttatttgaaattttggatatgccgtcaaacatattttgatgtgccttttcagaaatgtttcaaacgagcataagaaagacttgtcgagttgtcgcatgaatacagcgtgttagcaccaaagtcactgtccatcagaaaaagcaactgcgagacctcatgaattgaccatctatgagcagggaaacacacttgcattatcggaacaagcagaaga

SEQ ID NO: 12781 - DNA, 680 bp, Oryza sativa; identical to SEQ ID NO: 10115
  Intron number 1 from transcript LOC_Os06g08014.1 (locus LO C_Os06g08014) derived from phytozome v7.0 (chr-ID Chr6; po s 3884040 to 3884719)

SEQ ID NO: 12782 - DNA, 692 bp, Oryza sativa
  Intron number 1 from transcript LOC_Os06g38950.1 (locus LO C_Os06g38950) derived from phytozome v7.0 (chr-ID Chr6; po s 23111245 to 23111936 reverse strand)
ccctcctccgcaagaatctcatcttccaggttcggatccccctttttccatccagccatttctttcctcttcgccttaactgctatgatctgtttggtactcggatgagtcttctttgttgttctgatgatatgccttagggaaaagaggaaactgcaagatggtcagtacaaaatttcacttgttgtttttttttcaaaaaaaaggaacagcaaaatttcggcataatttgctagttttcgttgttcttgaagtgtaggcgtcaacttgttctggtgaagtcgtgggcttgagttatgtttattcagaatattctcttgtcgtcgttgttgactttttggcatggccgtcgtcccttgatttatattgatgtcaaaatggaaagaatttgggaccaatacgcatccatcagcataggtgaatttccttgatcgtttgaattatagatgtttggaacgcgaagaggcgcactgaaatcccttttgtttttgtgcttcatatttcacttcgatggctgtttctgtagattattagtgtcaactgtcaagcgtcttttacatttcacacgattgcaattcgttttttattaattgcacaaactggtcgttgagtcaagctaattaagaagtggcatccatgtttgatcgtttcttgcagaaacgaaacaggaaaggaaccattcggctaatcat

SEQ ID NO: 12783 - DNA, 686 bp, Oryza sativa
  Intron number 1 from transcript LOC_Os04g55290.1 (locus LO C_Os04g55290) derived from phytozome v7.0 (chr-ID Chr4; po s 32685594 to 32686279 reverse strand)
gcgtcctccttcttccaccgcatcgtcgctcgccggtgagcatccctccctacccacacctcatcaggtattctgcgttatccctcaaaaagtttgggggttcaaccgaaacagggttagatctgcctctgcccagctccacctactttcaagttgttaattttgatttccgtttttagcatatgtaatttggttactgaatctcatccaaacacccttagaacgaaaaatgtaagctcacataatttgtactcatccaaactcacataaatttcttaagaagaatctagaccacaaactacccatagtcacacaaaatatctttttatcaagatatattcttataagtaatttttattccacaaaattttctaaaggacatactgtgacacttggcattaatctaaacatatagactattgtttaacattgcataaatattgacttaggccgagtttagttccaaattttttcttcaaacttttaacttttctatcacatcaaaactttcctgcacacataactttccaacttttccatcacatcgttctaattttaaccaaacttttaattttagcgtgaactaaacacacccttagcaaagttgagctacaaaccaaaccaaccctcgtttgcccaattggatttcagcacagttggtgtcccgttttgattcttgaggccca

SEQ ID NO: 12784 - DNA, 948 bp, Oryza sativa
  Intron number 1 from transcript LOC_Os04g47990.1 (locus LO C_Os04g47990) derived from phytozome v7.0 (chr-ID Chr4; po s 28351199 to 28352146 reverse strand)
cagcccactggcaccaggtaaaaatcgctttgcaaagatcgatcgatcgattgattctgcatctgtcagaatttcgctcttgtgcttcttcttcttcttcctgatcttgttgctgttcatcttcctttctgcgccttgttctcggtgcatatgcttttctttttttttcttctgattgtctgcctctcggaagatgttcttcgctttatatgccaacccttattctttgtgtagatctatgcttcagtattcatcatcatcagtagcacacacacgcttctctctccctcctccataggctttgaggggggggggggggtgaggccctttgtggctttaatccctctcccttttgatccttgaaagcagcacacacacacacaccatcgcctttcttctttctaatccccccctttcctcatcttcttttctcatagcttttctccttcttttcttctgtctccttgccgcttgcatcaaaagagtagccatgtccccggtgatgtgtagtagcagcagcagcaggagcagctgtggtactactactgcgcgcaaccctacaacagcacaaacaaagttgtgttttgtgtggtggtgtgtttctctttcatcttttctttccttcctttcgcttatcaccttttcctttcctctcccccctttaccagtttcacctttcctcccccctctaatctgcctttgtatccttttgcttggttcttagttgcaccataaagattctaaacaccctgcttgctgccatggctagctctctctctgtcactgcataaccacatgccatttgtgctcgcttgttcttgcgagcttgttgctgtagtagtagttggtgtgaagttagcaaggtgtttgtttgatctttgatcgtttgtgttctaatggagtgctgcaccatgtgtgtaccatcaggggctagggctggtgaagccc

SEQ ID NO: 12785 - DNA, 1053 bp, Oryza sativa
  Intron number 2 from transcript LOC_Os05g06330.1 (locus LO C_Os05g06330) derived from phytozome v7.0 (chr-ID Chr5; po s 3242075 to 3243127)
atctcctttggccaaggcgctgtttgcaatcgacggtatttctttcctgttccgctagttacctgttggtgttaatcaattcaccatctcagcttccttgaatatctcggttatatgtttccttgtaaaatcctctggttgtcctcttaatatatatgattagttaccactcttactggccaactctttcaatgtatcgagtcttcctaggacactctttatacaaataagctatatcatcttccatttttggtacaaactataagtaactttattctgtgagttggtatttaactatattgtattccttctgtttaacttgtgttctatttgcctttttcagttcttgttgatattttgttattaaaacaaagttagctgttgtagataacttttgtgagatgcaactgaaatgtgccttacaaagcaatgtgcactgacatgggttaccaaaatgcttgcttaagtaaccaacgtagttgcttagagactccttaaaaatgtagttgcttagagcccagagccaagcaaacttggtcgtttaatgctagcattgagctgtgtaaatgataaagatgtggcaaaccatactgtgagaagatgacattggtggaattgtctgaaggcaaaagaaactcaaaccaaaagcaataatcttaatatctttaattctggatgaaatgatatatctgaagctgctggttgttaattcccataatgtttcacatttgctatgaacgtgcaacatttcgttgtttaatcatccaaaataacacaccaccacaagtgtttaaggcttagtggtatcatgatggcctgtaacacataattttatcctgccatgttttccattaactatataaagtacctttttgaagccataacagcaaaatcatgctaagagtcagaagatattctcgtagcagtaaatatttctagaacaacttcttcaaatttgtcatgagtgttcatttgttttatttactttgacattatgttgactggtgactacatgcaggagttaccagagtattctttggatccgattttgta

SEQ ID NO: 12786 - DNA, 642 bp, Oryza sativa
  Intron number 2 from transcript LOC_Os06g33930.1 (locus LO C_Os06g33930) derived from phytozome v7.0 (chr-ID Chr6; po s 19736015 to 19736656)
ccctccacccactccgcggtgagacgaccatgatacttgccttgcctgcactttaccctgccttaatgtttttttcctttttttttaatgctatactgtaatggcgattgtgcctaggctgattttaggctgtttttgtgtctgggatagcttgcttgtgtagtggattggggttgccatgtgatgtgatgcgggtaaagtatttcatcttgcttgttagatggacaactctgaaatttggtacaattcgatgttgggtgattaatgttcgtatagccactcaaagtattatgctaggatggttgctgttcttggttgaattcagtatggtgtaattcttctatccaatcgtgtctagacttttgtaagcttgcttgctatccagagatttctgaaattcggtacaataccacgcgttgtagtatggcgccgagatattcgcaagagactcaaaatagttacgtcaaaatatttcttgtgctttgctttgtaatatattacaatatagtactgttcaagcatatctagccatagggatgtaaagtaacttatctcttatcgaaattggcggttctgatggtctctaatttattttcaatgtttttaggctgttgtggcagtggctacctcgcttgggctaga

SEQ ID NO: 12787 - DNA, 820 bp, Oryza sativa
  Intron number 1 from transcript LOC_Os04g59430.1 (locus LO C_Os04g59430) derived from phytozome v7.0 (chr-ID Chr4; po s 35146108 to 35146927 reverse strand)
acctccgccaccaacaaatctggcgcactctcgaggtacctacctcttcatcgtcccgtcccgtccctcgttaatattaatataatcaccatccccgatcgaggattgcatgcgtctcatgattgcccaatgtcactctctatgttactccctccatcccatagtataaacacttttaaattttgacacagtctccgatatgctattttgatcaataatatctataaaagtaaaatattttaaataaaatgagttgcatattatgataatttggttaatgataaatctagtaatatcgattttatatgattgatcttttttatttttatgctattaatggtcaaagaaaaacattttgacttatcactatgctaaaaatgcttatattttaagacgcaagaagtatgtatgtactccttccgttctaaaaaacaaaagcaaattagtactgtatgtaacacattttagtacactgaatctgaatagagatatatccagatttatagtattagaacgtatcacatccggtactagatttgttttttacatgacggggcagtagttatgtttgatgatagtgatgcttatgcctcgtcacctttgtccccgtccttacaccatgtttttgtagatgagtgttcatttcagcaagcttaattgttatcttcttataatggatattgctttgctcttgttcgtggctatcgcagctgatcatcttcaatttctgcttgtatctctacagttacatattgcattgcgcatcgcatatatagccgatctgacattactgctcgatcggtgcttgtgtgcaggttga

SEQ ID NO: 12788 - DNA, 624 bp, Oryza sativa
  Intron number 4 from transcript LOC_Os03g55389.1 (locus LO C_Os03g55389) derived from phytozome v7.0 (chr-ID Chr3; po s 31503766 to 31504389 reverse strand)
ttcgtgttgcttcaaggttggtgtagttacaagcaaactacttgtttggttatgattttcttgcttttttattgaattggattgcaccctgataatcacttgaatcatgagaggaagctaacttaagaaggtagcatccctgttttgcagtttgtttgctaacttggctctagaagcaatacgtgaaccgataaattacttggtttgaattcactgctactgttgaagtctgaattgcctagtggtccttttgcaacattaatgttacgaaatgctgaaagttaagcaatgaagctgtttacccttaaacaactaagtttacgtctgaaaaaaaggcaataaaacagataccattactagccctttattatttttgtaagcatgttatcactggagtatatcatgcaattattgggtgtacgtctgaaaaaaggcaataaaacagataccattactaggactttattatttttgtaagcatgttatcactggaatagatcatgcaattattgcttactaatgcgtcaattctttgctcatttttgctttggtacctgagttgagcatatggtttctcgtttttattcaggtatttcaaggggcctgagcttcttgttgatttgc

SEQ ID NO: 12789 - DNA, 707 bp, Oryza sativa
  Intron number 3 from transcript LOC_Os03g55389.1 (locus LO C_Os03g55389) derived from phytozome v7.0 (chr-ID Chr3; po s 31504502 to 31505208 reverse strand)
agctactcaaggtcttcattgagccttcattgtcatccctatttatttactctattcagtaaaacatcctgttctgtggatctgtagaatgatgtatctcttatagaaattgtttcacaattactttcctattatgtgaagatccaactaaacacacttgtaatatatcctagacaaatatcaccattctcactgcttgcaagttgcaacatatctttaattatttatgtatatatgaacttgattattttctaagttacatggcttaaaacttgtcacaatctcaagcagtttatggatcagttttgttttgagttttaattatagtagcatcttgcacttcataatgtacagatgacaaaagaattcctgaattgcatatgtgctataatggtttatgatctgggattttgaagagaagtgtcgttttatacatttctaagttcagcactatgttggtgttaagaattcagccatcaatgggcatcttaacgtatgtgctaggtcatgccttctatccatgggtaataaactgttaacacacagtgtgtgtttttcatatcgatattcttagccaagaacagtagcatcatttgcccttaatcctgtgtgttaagtttgtttaaagaatctagttgattttctttacaatattttccttctgtttatggccccaggcattagactactgccattcacaaggcatt

SEQ ID NO: 12790 - DNA, 571 bp, Oryza sativa
  Intron number 1 from transcript LOC_Os04g54400.1 (locus LO C_Os04g54400) derived from phytozome v7.0 (chr-ID Chr4; po s 32180921 to 32181491)
gccgactgcttccaatttcaagatcctaattcctggtacttcttcacctgtcgctcgtcctatcccctatcgtatctatccccaatcatctccttgttcatgtttgagacgctttgcgtgtgttcatctcctaaacgattcgttaacttctatatatatgtatatatatatttgccttcgttagggttcaatgtgatcctaacatatgacttgttgattgtgtccctgtagcgcacagactgcatggattttcttccatgaaaattcttcatttcaggttttttttttccaaaaaaaatatcgctatctttgatcaggttaagatgacagtaactcgatcataatacacctgtaagatgaacttaactttcagttttgaccgaatgtagcacataacagagaaaataaactgagatgtaaactttgacacattaacagaatagatgagcatatttgagatgaacagtgcagaatcttttgggtctctttcctgcactctgctagtggaattgcatgttatcctggttttttttttgacaaaatcaaaatttctcaatcttgcaggacttgc

SEQ ID NO: 12791 - DNA, 806 bp, Oryza sativa
  Intron number 1 from transcript LOC_Os03g61840.1 (locus LO C_Os03g61840) derived from phytozome v7.0 (chr-ID Chr3; po s 35050500 to 35051305 reverse strand)
aagccacggctaggccctctccagtacaagaaagggtaatctcatcccatctcatctcctccttttccttcgcaatttcatttcctcgcatacaaatgtgaaatactacaaatttgtatcagggggttgctataggattaagttgatgataggaatctggatcggggtccccttcctccaaacatgccctaatgttttttcttttactttgttcggccgatatagcattatccattttacaatcaaatatacactaaatgtttcactatgttcagtttaacatgatgttttttttttgaattagattggtgtaatgcaatcaagacttgattacctataaacatgtgaatggtcagcaaattgattaagctctctgcagtccacatcgatatgcatgcaatgcgcaaaatccagtttaggcattagttccattgaacatgatgtactcttcattattggaacacctgtaaacaagatgttgcatatttagagcattttgaaagatatttcgttgttcctgattataaatggcaacccaggagcatttttgttgtacaagtgttgttttagagctgttgcagttatcaacagcgtttgacaatctggttggtaatccaattgtctgtgcacttgttgactaacgtttgaactgtttttcatttcttaatatagttggtttgtagctcaaaaagaaaagaaaaactgaatcgctctgaatatagttttccttatggcagctatttatcaacaattaactgatgactatgctgtctttgctctacttccttgcaggaaggaacctgtgt

SEQ ID NO: 12792 - DNA, 847 bp, Oryza sativa
  Intron number 2 from transcript LOC_Os06g07760.1 (locus LO C_Os06g07760) derived from phytozome v7.0 (chr-ID Chr6; po s 3759814 to 3760660)
tggacagtatccgtgtcattggcctccaagtacctgtgggtatctctagtacctttatgctttatcactttcctgtccacacaagtaccacttgtttggttaattcatgatctagcaatgaaggattctgctgaattgaacattttggtttgtaatcagtacagggtaatttacttatttctgaattccagaatcatgcttgtacctgatccaccttagtgaataaactgcagtttgctattagatgaaattaagccaaaaaagaaaaaataatatttttcctaagtcaaatgaacttcatgtgatatttcctcataaatttggtttgtgccaaattagatcccaatttgcttacatatgggaaacagtagttgatttgagaattcttgtctttacctgatatatcatttgggaccagttttagttatacgaacttgcattcatctcatttttacatgagtatgttctcacacttccatatatttcacattgtatctagattaatctgaaaagaggggagattgcaactgtggcattgtagtcagttgatacttgatgcagtggcacctcacgctttcattaagctcgagaaaaaaatacaagatttggtgggacaggcaaccctccaattcccttaaaaatgaacttttcttggcttagttgacaggcttgttatcctccagatcaatcatactggagtgtcttgttgagaactggggatccgaataacctgtagtgtacagaacttggtgatcaataacctaaactgctaatattgcggcgttactttttagttatacttatgggttcaattttttaatattgcagattgacgtactggaggttg

SEQ ID NO: 12793 - DNA, 993 bp, Oryza sativa
  Intron number 1 from transcript LOC_Os04g20670.1 (locus LO C_Os04g20670) derived from phytozome v7.0 (chr-ID Chr4; po s 11556656 to 11557648 reverse strand)
gagttttcacggatacattacaaaatttgatcaaggtaacagttgatgaattaattaatcagaaaagccagctcagggggcagactgaagaacaagaacagtatcggcttgggggggcaagcacatcagtgtcagcatgacgagctacatcaacaatatcggccagaagaatataaaacacatcagaatatagaagattgggccgatagaattgcgaagttagtagaggagcagtttggacttagacctaaggaacagatccatgtgtatcggctgccatatcttgagtggtttgatagggttccattgtgttgatgcgaaaaacacacaccggcctgggagatctgcttagctccagtgcaggtccaaaggttattgagatgcgggcgtgccagtcagtttgatcctgcaactgacaagatatgtaaacatcagatcaataagccgatcggctgtcaagccgatggaatgattccagcagatgccgataccagccgatagagatagggttttaagctatcggctatgtgtttgatgtagaatctgatacttgatataaataacaaaggcaatcggctgatgataatgcaagaaagcaataatataatccagtagaaaccaatcggctaacaatgatatgatagaataagcactgatccgaaggttaaataatatatcgactggagatccgatgtcataaaatccacaagattagattaaacagtaaaatcattgttgcaatcggctaaatccaacttatatgcaatccttataagccaatgcaatgtccaaataactcatcggctgaaacctcgatgaaacccttattggcagtcaaaaagcaggctaggggttatggttctaaacacgacttagtagatcaaacttaactgatgcaacactaagtatgaaaagaaacataatatctagacaatcaaggcgttgactgattttttaggctgctgaagaaagtcgcgagcaagtaagcggaat

SEQ ID NO: 12794 - DNA, 741 bp, Oryza sativa
  Intron number 1 from transcript LOC_Os06g40460.1 (locus LO C_Os06g40460) derived from phytozome v7.0 (chr-ID Chr6; po s 24102262 to 24103002)
ccaagaccacgccgccgccgccgccgccgcctccggtaatcccccaacccacatctccttctgctccgtggttgtttcgcggatgcgattgggccagccgtgccattcctaggactagagaggaatcaagggtgggggggtgagggggaggggaggcggatgcgattgccactggctcgcgtttttgagttggggcttgttagggtttaagatcggtgcggttgggtagtgaatgggaacttgctcgagattgcctcttgccgatgcattaatctagggtttagtgccgtgtgtgccacaggcacagcagaagtctatgatgcaacttattgagaggacgtgcagcttcggtaactaatttgttggtgtgtgaatcatcttatgtggtttgggatgtttttgctctatggaatgggcataatggttggtgtctcggggatccagatcctctgttacaaggttggcattgcgtagttgggcatgaatcaagtggagtagcttttgagaatcatcgccaatgggtattattgttagctcatatgtacttctgtttctcctgtacaccagccaagttgtttgtttttctactttggtatagatatagaagaagctatttctgtttgtttcatccacattgtgatccagttcgttattttttgtctgtgcaaagtgcaaaccatgtccatgttttgacgtggattacccttttgtgtgtttctaatgtctgcagacgataatcaa

SEQ ID NO: 12795 - DNA, 609 bp, Oryza sativa
  Intron number 1 from transcript LOC_Os03g50490.1 (locus LO C_Os03g50490) derived from phytozome v7.0 (chr-ID Chr3; po s 28818599 to 28819207 reverse strand)
gagagcacggacaaggtcatcgccgagtacatgtgagtgaagctcctgcttgtttctgtcttctttcttcttcttcatggctgctgcactgcatagcatatctgatggttcttggaggtgagagagatcttttgttgttaagtgttaagcttaatttgggttttcttcggttcttccttcctctgggttaggtggcaggttggttcttgttgcatgttagttactgctgtttttatgtgccgatgtttattggttgaaaaaaactgcccttattttttttttttttttgtgattgcctttcaggtatttcactgacgccctttgatttttttttattaggcgtgtttatttgtgagtaagttgtttaaagagatcatgaactgcatgtttctacaggttcttgatttgattataggattcatctaattctgaatcatcatcaattccttttcatggttgttctcctagtctccttatcccagaatgccggatctttacttagtattttacatttaaaagaggttaatcacgtaagcatgttgtttatacttaccaatctgctcctaatcacaccatgtgttcccataattcagggttggtggtactggg

SEQ ID NO: 12796 - DNA, 826 bp, Oryza sativa
  Intron number 1 from transcript LOC_Os05g05600.1 (locus LO C_Os05g05600) derived from phytozome v7.0 (chr-ID Chr5; po s 2786184 to 2787009)
aaaggttcgagttctttcccctcggattccacaaagtaggtgtcttttttgtttaagaaaaatagaatcaccaagttgttgttctcgttgagttttggttgtattttgtcactcgagagcctctgcatgttccaaaagatggtgttttattggtggtgttttgatcatgctagatgtggaggatggacggatcagatattctgttgtttactcgctttgaaatttatgcttgttttagtattatgcatctttgggcaattatcgcatggatggatcatacatgccatttctttcggttcgaatgtcttcctgtttactactttggaattatcgtttttagagtttcgaattagctgattactgcaagtacagttccccgctgtgtttttgtttgtgattctgaactgcaaactgatctaggatcgagaaatgttggtgtatttagagatttaaggggggcgactgatgtgtcaccatttagaaaatcaattatgcatttcctaattgtcatggctgcatgctgtcaagttaaatttgagataactgctgaagattacagaaggcctagaattctattaccccattcatagagtagctgtgattctgacaatacaatgcacagcaggtatttagaaaggaaactgttactacatggttgttaacagcaagcagctattattgatctgataaggaatgaagttctacagtatttttgacgcgacgtattagcatcagttttgctcaagattcacttactgttgcgtgcaactaatgtccaaatttcacatcaggtactaaagatcatatctcttcaaactggttagga

SEQ ID NO: 12797 - DNA, 752 bp, Oryza sativa
  Intron number 1 from transcript LOC_Os03g50310.1 (locus LO C_Os03g50310) derived from phytozome v7.0 (chr-ID Chr3; po s 28681031 to 28681782)
gccggacttcccggtaagctctcacgcagagatctgtagctttctgccggaattggattttcatctctcgatggacatctccatcttagctcctttattccgtattacctactccctccggctaaaaaatataagcatttttaaaatagtgttaagtcaacatttttaaaatttaactatttatagtaaaaaaataataataaaaaaagattaatcctgtaaatttgatgttactggatgtattattgaacaaactgtcataatatgtaactctttttatttataatatcttagctttgtagatattgttggtcgaagtagtatctcgacgaccgtgtcgaagtataaaaatacttatattttaaaatggatggagtaaatagttattatttttttaagaaaaatgataacatagattaatatgaaatgtatcacctccgcaagcatacaaggcttaacttttacaattgcaacgaaaggaaccaatcaaactgaaaatagttcgtacatctgcaattatattttttcatgtttgttaaaatttatagaagctgaatttaaaactgtatgtttataaagtgaaatatttaaattaatctattttatttatattttttataactatttattagatgatgaaagcactttcctctttctgccattttcttcacgacctagcttgtgtactgttctgagctatcctatgcgtgcgtgcaggcgggaagccggggagggctcggcgcggcggtgac

SEQ ID NO: 12798 - DNA, 998 bp, Oryza sativa
  Intron number 2 from transcript LOC_Os05g46260.1 (locus LO C_Os05g46260) derived from phytozome v7.0 (chr-ID Chr5; po s 26762754 to 26763751)
gcaacttcgtcgctgacccgttcctctacgtgcaggtgagccgctgctctggctctcgtggtcaactgtggaattttgttgattttgtgtgtttcaagcgaaattttgagctcaaataggcagaattcaagctgatggattgcgaatccagttcatatggagggtggtaagggttgtgtgttttagatgcttcgacgagagagtgatagagtaccgtatgcaggggtggacttgttctagcttactagctggatattgttgaagtgttattagtagtgaaacacaatgtcctaatgctgggattctgcataataggcttcaagtttggaacctaagccttgtgcatactgaattgccattctactagggaacagtagttggggaaggattgcaagcttttctccttagatttatacaaagttctaaccgctattatctccttgataaagttaatgaatgttcatgcttatcgaaattagtacgcaaagatgcttcgcctttaagtttatcatgattctgaaatgtttgttgaaacactgaagagaaaacagttctttgaccgaatatgaaaccagaaaaaatgttgcctgagacttgtacattgcattacaattgaagtgaatttgggccatgatgtggtttctatgagtgtcaaaacacattttaaggataaatgatgaaataatttaaaattaaattggcactacactggatttcatatagatatgtaaacgatgggttttatttttttggagatatttcctcaactgggacaggggaattttatacatgcttttgtaacatcaatattgtttgttacaatacacaaacagaaaccttcttttattgaaggtaaatttctgtcaaatccaggcttttgaatttttttaagcccatcgtaatatttttttttctagttattattgtaatgctcaacctgatatgatagtatgcatctctcagggggacacactctttctgttctttgaaacaaaaac

SEQ ID NO: 12799 - DNA, 444 bp, Oryza sativa
  Intron number 1 from transcript LOC_Os06g28940.1 (locus LO C_Os06g28940) derived from phytozome v7.0 (chr-ID Chr6; po s 16501256 to 16501699)
gacgctgagagcctgagaaggtcagtggttccacgctaagcatagctccctgactttttaacttccatctggactttctttaccaaatgatgatttaataaatgtttgtcacatgccaggcttcttctgccgagaagggcctccatcagcgaccgcataaagtcatctcttctgttcaagagagagaatcgaacaggctgtgtttagtttctgaaattaaggagaagtttgaagaaagttggtagtttaaaaaaaagttaggagtttatgtgtgtaggaaagttttggatatgatgtgatgtgatggaaagttgggagttggggggaaatttggtgtgaactaaacagggcccaagtatgcaaacttcttaatcatttttttccattcttgctcttatataggatccagttcaccaagcttaattgatttgtttttcttgaagg

SEQ ID NO: 12800 - DNA, 1028 bp, Oryza sativa
  Intron number 1 from transcript LOC_Os04g43220.3 (locus LO C_Os04g43220) derived from phytozome v7.0 (chr-ID Chr4; po s 25393118 to 25394145 reverse strand)
atccatctagggtgatttgtttttactggtagttttgatctgttgttccaagaacgattttgttctttgctgtgtgcaatcaaatacgtatctcagtatttaataagacacccaaatccatcatatcacttgtgtggatttaatcgatttagttctaatagcagcttatttccccaaatttttggttcacgccccactttaagacttctcctaagagatggggtgcagtacaagattgttaattcgatgttagaacagccatttacatttcttctattgattttcagatgggtgaaatattgatgatgtatttgtattttagaggggggtatcattaccctgccattttgtagctggagttatgatttttctctctgtcgagttgaaccaattttagttctttaacagtagtagtaggtcataggtactgatttccttataatttacaaagacaaaatatctcatctttagacccccatttgttgcaagttcatatattctgttttgaatcaactctagcaagcggtggatttcacgataagtagaaagtactgattattatttgcacttgaataattatatctggaagctagaattgagtattcaaggaagcatgctctttgaagaaagtattcacttgatccagtccagtttgttgtttacttctacatttctttctttggcaatatatttgggagcagcttgtgaatccagtgaaaatggtccagaccatcattgttacttacacttcatgacctcgttccttcaccaaccagattaaggattccagcatccacctccatgttggccatcatcttgtgggttctggtgccaagcacctgctgcatgttactacagaaacagttccccttttcttttcttttttactgcagaccaaattttcctgctaagtttatttgttctttctaaaacaaatcttacttactggttcttgttgtaaggcagctcttttcataacatctctgtatcttgtaggaagtgttggagaattttaatcataaattgac

SEQ ID NO: 12801 - DNA, 929 bp, Oryza sativa
  Intron number 1 from transcript LOC_Os06g02110.1 (locus LO C_Os06g02110) derived from phytozome v7.0 (chr-ID Chr6; po s 625314 to 626242)
cgtcgtcgccggagactcgtccgtccatccgcaaggcctgcaaactctctaccttctcccccaaccttgtcgcaaccaacacctcatctcgttttttttttttaatttttatttgatacatttctcagtttctcctcgtgtgtgtgtctgtgtcactcgtgtctccgaatccgatcctaaccgagaagcgcgtcccgtcctgtggtggtgagatctaccccgcgttggtaggggtggatcttgcactggattttgttgttggatgtgctagcgaagaaccctagattgacatggttgatcacgtaggtttatgagaacggcctgatcgtttgcaatgtttaaccaaactctactatcttcttctaatatattgacgcgcaatccttttgcgcattcgtgaaaaaaaaaacgtaggtttatgagagcgtataggtgcgcgtgcctctactagtgtgaaaacaaaatgcgcgaaattggatgcaatgtggtgattcctgaacagaaattttgatgccatgcatgaatggatccccaaattgaggaaggcctcaaaacagaaaatatttgtttttgtcataatttgaccctcaaatagagataggcatcaaaacagaaaatatttcaggcctttttttttacattatttgaatacaatgatgggcttcacatagaaagttttaaactttaagcaggcatgcatgcattttcaagaaaaacgagctactgtttttcctgtatgctattgtttctccctgaacataaaaaatgtacctgctggaatcaagatctttgccttttattttcagtgtataatgacgattgaggtatcttccgcatatatttggtagctgaaattctagcaggctttcaccattctaatttgtttttgaattcattatgtgttgcagggagtccagcaatactccatc

SEQ ID NO: 12802 - DNA, 927 bp, Oryza sativa
  Intron number 2 from transcript LOC_Os03g58650.2 (locus LO C_Os03g58650) derived from phytozome v7.0 (chr-ID Chr3; po s 33395898 to 33396824)
tgttccaccgcttccttcttcctggatccacgagggtgagaacctaatatgaaatcatttgattgtttggtcacattgtcacaatatcgccgaaaacctcatccatgtttgttgtctgttgtttggagtctgctcatctcatgtgaatcaggtcccaacttatttattgtgcatgatctgtaaaccttctccccaaaatctattgaaagtgatcgtttattgtgcatgatctgtaaaccttctccccaaaatctgttgaaagtgatcgtcaatagctttttgacttgtcttgctgtgtcttgccatgtgtatactaatactgtctcccattgtgctttatgtggttcttcctaggcctggctgtagctcttgtgtggaaaatctatgtgtttgcgtcccctgtttgagccatgaaattcttgttgattgctttttcattgccctgggcactgctactagtactagggtcctggcttttaaatatttcctgtatatataccttttcttcaggactcagcaatcttgtttgttgtgcaaggcctagctagcctctatatgaaccgaagcttgtagttggccaaattgtgttgtgcttcaaattctcagggcctttgcagtgctgttgagcatcttgtttactggatgatcagtttgtacagccttgttccatgcttcctgtattacttgcttgaaaccatttaccttgatccagaaatgaaatttggcttcctttttggctcctctctcatagattaggttgaaatcccccaaaatcgtcaatgtgttggtggtggtggttttagggatttcaactcatccagtaaatctggtttttcactgtcttgtgaggtttgaaagaatagttgtctgtattcatgacattgcactgttatgttttttttttttttgcagtactatcactctctc

SEQ ID NO: 12803 - DNA, 521 bp, Oryza sativa
  Intron number 2 from transcript LOC_Os05g49260.1 (locus LO C_Os05g49260) derived from phytozome v7.0 (chr-ID Chr5; po s 28196325 to 28196845)
gcggagtacattggccggaaaggggtgagaatttgtgcttcatttggtccttatctgttcttccactagaaggccatcctgtatctcgacgacgaacaattgatactttgatagttgacaaggtcaatacgtcactgttgtatgatttccggtaacaccaataatttgccattaaagaaagtgagtgggattagaaatgctggtcatttcctgtgaactgtagcttgtgaaaatatgaaacccaaaatttcaggttcagttagctatactattggggtttgaccttaatttcaaagttgacgagttctttagttgtgattgccattgatctggcaaaagaggagttagtatgacagaaaatgtgtagatgaagtttttgtgacattttctttggttcatacttcataatcacttaatcagatcagtagttaactacagtgaagctctattattttactctaatggtcttgctgattgaatctccagtcgttgataattgcggcggttcctaacatcattgg

SEQ ID NO: 12804 - DNA, 853 bp, Oryza sativa; identical to SEQ ID NO: 10606
  Intron number 1 from transcript LOC_Os05g02220.3 (locus LO C_Os05g02220) derived from phytozome v7.0 (chr-ID Chr5; po s 701836 to 702688)

SEQ ID NO: 12805 - DNA, 477 bp, Oryza sativa
  Intron number 1 from transcript LOC_Os06g38110.1 (locus LO C_Os06g38110) derived from phytozome v7.0 (chr-ID Chr6; po s 22550046 to 22550522)
gtttctcatgtaagtgataatctctctgttctcaaatataaatatttatgatatttttttttcacggagattaagaagacatgtgaaatcaaacatgggataattgcatgcttcaggtagggaagtaggtggggattaaacaggagatggttatttgtgattggttaatatagtagatcgtaggtggagaagaagttataataaaatttgaatactatatatgcatctatattttaggatagaagaagtattatctaagtatatacaaattacccgtcttctctcgtgctttagaatttggtgtattgccaggggtctagactttaaatccaaggtgacgcaattagaataggaaaacaaaatcataaagtcatttctacgcaacagcttttcttgttagcttaagattttggtcatcttgtattccttccatcctaaagggtttctgttttttttttccctgcagggagagcagct

SEQ ID NO: 12806 - DNA, 984 bp, Oryza sativa
  Intron number 1 from transcript LOC_Os03g58870.1 (locus LO C_Os03g58870) derived from phytozome v7.0 (chr-ID Chr3; po s 33510384 to 33511367 reverse strand)
gccctgatcctattcacaacaggtactgcaaagcatgtttcattctttctttgcttattttgatttgtgtctccaacttctgttcaaaatactagtccaagttttctgtgtcactatgtcatttgcgtttgaaagcaccagaaaagaagtttgttttttttttgaaaaagaaaacaaagaacagaagtttccatattcatgtccatgcataggtttcttgaagtttggagctgctgccttgttggagacggagtaacaaaatgctgcagctcctcatcaattttaaaataaatgaaacttctattgtgttgttcttgaccagaaatatgaagcttttctgttaaggctaaactacctgcatgtttttcttcttttttggtttctttcttaccaacttgtgattaaggtgtatgtttctgagttctgactcagctgtgatgtgagcgatgtgctggtacctaacaaaacatctgtctttttcaaatttgttatcaaactacaacttcataacactccaaacaaaaatttaacaaaacaaaaaaaaaacaacttgtagagtaggctggggaaaaggaggataaggtgatttggtgcccaaattatgtctgggcataaaaggttgagaagaataaagagaatagaatatataaatatatatgccatgcatctcttttctcattgcactcacattcccctatgatgatatgcaaatattttagcaaaagcaagtagattagtcctagtctcgtaatgggcaacatatatagatacacagatcatacttgaagtgattgcattgcatgcaaatgtagtaatgcaggtaatcaaacaaagtacacctgaaagtctaacgtttttcagtgtagggtcacctgaaatgcaaacttgcatgcagtttcaaatccttcctcaaaaaaattgatcatgtttcacttcttgcattctgcaggggaaccggcaagtcaggaagatctccgggccgag

SEQ ID NO: 12807 - DNA, 901 bp, Oryza sativa
  Intron number 1 from transcript LOC_Os03g49860.1 (locus LO C_Os03g49860) derived from phytozome v7.0 (chr-ID Chr3; po s 28403409 to 28404309)
cgtggattgactcaaaggtatcttccactcggtctccctgcaaacaatgtgttccccttatgcaatgtgaaatgctttcaatgacgtttgtagagcagatgcattgggtgcggttgcatccctaatttttttaaagaactgttaggtatagaatatcttaggttaaactattgttgtttggtgttttgtatctttataatcgtccagctgttgtatatcggtcagtgttaccaatgttgaagtaatgcagcttagcagggctttacattttgttgtgtgcaaaatttggcatggagtgagaagggggtcatatgtttcaaataaattagtgttagcaaaaatccgagcagttttaaacctaaccaaggtattcctttctgttttgttgccccctaggcacataggagtataggaaacaattagaaattgtaataaattgatactgaacatcagcaaattttatctcccaaggttttttgaccggtgaattgctcaatcaggaggctcatgaaaaatccaaaattgtggtgacactttgatgcatgaatattactacctctgtttttaaatataaaactatgtatatatggttaattattttgttgtgacttgtttcaatatcattttaactcaagaggggtacatgtccttttaactcaagaggggtacatgcccttggtgtttagttcgttttatacattgattattcacatgtgtgagcattatcttttttaaaaattgtatcaaatatataatggaataatagtacattttagtttgattcagtgatagattcaactgtatagcacaaatcgaaatacttgaatatgtgttgctgttatgagtctctaaaagctgatcccatcttatattggcactatgttctatcctttgcagcaca

SEQ ID NO: 12808 - DNA, 1067 bp, Oryza sativa
  Intron number 1 from transcript LOC_Os04g37630.1 (locus LO C_Os04g37630) derived from phytozome v7.0 (chr-ID Chr4; po s 22192375 to 22193441)
cgcttgctgggggtgtctccggcgttgtcgcacaggtaacacgtctccttaaagatcagactcgtctcgctcgtttgttagcacactagatcgaactgtgctctattctgaatttctgatgggtagtactactaggcattgtactgtctgtacacattactccccaagttactcagggaagatcattttgatgtttgattattgaagttaggatatgttttttctcggtgtaaaagtaagaactgctttggtagtattacatttagaagatggaattgaactggacttggggacttgacaggattggaactgttttttgctggacttgttgaagactgtaacatgctagcatttcttagttccaacctattggttccaaacaatgatgcacattatcattaagtaaaaaattcaacaaaatagacatatacatcttaaggcaggggaagggatcttctaatttgtgtcattaccgttaccaaaattatagtatcacaatgcagatgataaagcagcagacatcagtctggatgtgtttttgtatgacaggctcatttgtctccaagtctccaccacctccttatgatccaacctacagtacactcgagagccacaatgagaccatgccatccctgctgacaatgcattgacacattgatggactgtaggacttgtgtagcgcaagatgtgtgcgataggacacctctacctcaaggtcacttgcgtgactagtataggaaagaggcgatacctgggtactcaatgatgctgctcctcgagggttgtgaataaggttgattagaaaaggatgacctgactagcaccctcatttaggttttgaatagtttgtcattcctagagtaaagtagcaagcaattgagataatcaaaacattttagtttgttagagagagattttgtaatcaacatgctgctggtattaaccatctgttagaagtagaattgatatagcttaatagctgctattgtttcgttgatcatttattgacattatagttactctgcagtgcaggtggtggcaagccctgctgatctcatcaaggtaag

SEQ ID NO: 12809 - DNA, 633 bp, Oryza sativa
  Intron number 1 from transcript LOC_Os05g41370.1 (locus LO C_Os05g41370) derived from phytozome v7.0 (chr-ID Chr5; po s 24169038 to 24169670)
gccggcgccggtgacgacgcccaccggggtcagtaagtcaagtcaaaggtctctcccgtgcgcgtttgcacttgcgtcgctttctccacgcgtttgcttgtataggtcgcgaaaagaaaaaagtttagttgtcatattggatatttgatcagatattggaaggagttttcggacacgaatgaaaaaactaatttcacctggaaaccgcgagagcacacgtgggttactatattacttatgactaattatggactaattaggattaaaagatttgtctcgtgatttccccccaactgtgcaattaatttttttaatctatatttaatgcttcatgtatatatctaaagattcgatgtaatgtttttggaaaaaatttatgggaactaaaccaggccttaaccaggccttagtagctggttgcaacttgcaactttctgactctaaattccgaacacttgttctcttcttcaaccgtgttttctccttcaaccttgtcgagtggacagaacaaagtggtttgcacccatagattctgatagtacaatgacttttgtgctctgaatttgtgttttgaccatggtaaaacatgtttatgcaggaagtaatcacacagtcagtaagtctgtgattgtc

SEQ ID NO: 12810 - DNA, 705 bp, Oryza sativa
  Intron number 1 from transcript LOC_Os05g07150.1 (locus LO C_Os05g07150) derived from phytozome v7.0 (chr-ID Chr5; po s 3776152 to 3776856)
ggcacaagaggacaagacagttcaaagtttggtaggccagtctcatcaagtccaactaaggagtgatgcatcagccacaataccttttgagactatatgtatatatctgcactccttattagtagcagtactcttttttttttcacagttatttactattcatgggtattttgagttacaactttacactggtgaggctagttttgtttttgcaccgtccggagaaaaatgataatgtggttgctgtagtgactcaatcgcatatctatgttactgtatgactgtctgaaacatcaagatttgctgtcctactgagcctagatgtatattcagtccatgagcttgttattcagttaaggtcatgtagtagctactctatttttgttattgaattagaatgtactagctcctccatcccaaaataatatcatctttgcctcctcttgtttgtcccaaaataagttaatctttcaagcaatcattgtattggagtttgtcatagtgaggaacaaatgcattgtgactaaacaaagtggaagacaattgcattgggatttgatgaagtggagggcattgcagttttttgcttttgtattgatatgtgtgggatgggtgaaaaacgaagttattttaggacgaagggaatagtagctttctttatttttgttattagtgtataacaacgttttgtgttgtcttattcag

SEQ ID NO: 12811 - DNA, 623 bp, Oryza sativa
  Intron number 2 from transcript LOC_Os06g46000.1 (locus LO C_Os06g46000) derived from phytozome v7.0 (chr-ID Chr6; po s 27877538 to 27878160 reverse strand)
ctgcttccgcacgctcaagctcgcgacacctacttgtaagtacaaagaagtctctgcaagtctgcagtgatgtttgtgtgtttcatttgtggatgatcattcagtgattcggtagaatttagcatagttttgtgtatactgtttccctggtgtggcacatgctaaacatcatgctgttatttgattatggctagcaattctgtaatcctccatgagtgttactagctgtttatatgttatcactctatatactcttcagtcttcatttctgtgatatgctctccacattctgatgtgagtttacctaattctactgttacccgtcacagtttagaagggtaaatgcaccaatggtttcatacatattgctaactttggatcatcagaagttcattttgatacttgttatcctactaaacatctgtgtgtaccatgtattttgtataattagtatagcatgatagaagaaaaaaatgacttttcaatttatggtaatcttctgggagcatatatttgttaaagctaggtcttgtctagtttatatgagattgtgccttgtggttcttaatgatttttactttgttttttcagtcggtgatctcaaccatcttatctctgcaaca

SEQ ID NO: 12812 - DNA, 783 bp, Oryza sativa
  Intron number 2 from transcript LOC_Os03g56710.1 (locus LO C_Os03g56710) derived from phytozome v7.0 (chr-ID Chr3; po s 32307380 to 32308162 reverse strand)
tttttgcgcgtgataaatattttgaggtatccaaggtagaggatggagaaactgacgagtatgatctcatcgaagctccaaattcagaaagagggatgtggattttgcccattactgggtagtctagtttcacaattgggaattggactttgttttatcatatatttcacctgtaaagaaacatgttcttaatcagtgtaaccgtagttaaattcgtgtttccaacttaatgagctatatatatatgaaacaatactatcgttcgtgtatcaatcagcatgacaagaatttttgttggaaagaaagggagggtcagtatttctaatgtgtgacacacagaaaatgcaggaatttgataacttaactttgtatactggtttagctagcatcgtttactttgtaagttctgtcaaaagagccaacacttgattatgtggaaacaaatgactacctagcagtgcatgttgccaaagccggccacctgtagatggaattatattttcatgcaaattattagtttttggttccctgaatagttgggtgttcctacgtgatgaacaaagcacaaattactttgtcgatcagcttctgaagaggagcaaaccctgcagatccagcacatgtacttccttcagaattcagataggcctgattaggcccaaattgggaaaacgtctgtttatgcaagcccaaagcccaaattggcaaaacgtaagcatctggtctctgatttttcatgtcgtgtcaggctgcaattcgtggagcttcaggcagggattgctg

SEQ ID NO: 12813 - DNA, 704 bp, Oryza sativa
  Intron number 4 from transcript LOC_Os04g08270.1 (locus LO C_Os04g08270) derived from phytozome v7.0 (chr-ID Chr4; po s 4405026 to 4405729)
gtggcccctttggtgtctcctcagtgcttgacaaggttatcactttctaatacttacatttttgtttataattgttctgatctacagatcattcttttttagtatatttgatgtaatgtctttgttgttgcagtagtaaaacacttgaactacagtttaattaaatttggtccaatcaagaatacatacgtatgcacaagaagtttctggcatttagcacttagcagcacactagcacgtccctacaacaccacatctttagagaggaacaaaacagccattgtgcagaagccattactgcctgtccagtatccatttagtagattagagccagaataaaggtgagtacagcataacagggttcatgatttttagaaattaatttaacttgattgtacatgattttcataaatatgtgaatttttgtggcgtagctataagccaccaaaatgcttcttgtataccaagtgaatgtaatttgtgaacttttattttaagccaagaaatgataagggtcttaaaatgcttacatgtatgtgttcgttaactcaacgatatgtgtatcatagattgttctaaaaaatggtcaatagcattctaagtctttttttccgtttttgccccctaatgtgtcttctaatatcttgtttttgtatgggatatttacagattgttcctggatattaccttaggcggaacgttaa

SEQ ID NO: 12814 - DNA, 588 bp, Oryza sativa
  Intron number 1 from transcript LOC_Os04g03050.1 (locus LO C_Os04g03050) derived from phytozome v7.0 (chr-ID Chr4; po s 1244119 to 1244706)
ctcttaagcagggcgaaccacccacgaaggtatagcaagtcgccatctcctttttcatgcgatcaccacgcatatatcatgtttctaactggagttttcttattggtcgttaagaagttaccggaggctctacagtagaattagaatagtactaaaaactttgtactaaaaatcatgcatcttggtatctcctcaaacactgtaaaaatgctctcatatactccctccgtttcaaaatgtttgacaccattgactttttaatacgtgtttgaccatttgtcttattcaaaaaatttaattatttatttattcttttcatatcatttgattcattgttaaatatactttcatgtacacatatagtttgacatatttcataaattttttgaataaaacgaacggtcaaacatgtgctaaaaagtcaacggtgtcaaacattttgaaacggagggagtatcattgagttaatatatagctacgactacgtgctggtaataactatttatagagaggtgcttgcttggctgattgatgaattatactatatttgaagctatacattgtctaccttggggagagaagacacga

SEQ ID NO: 12815 - DNA, 1021 bp, Oryza sativa
  Intron number 2 from transcript LOC_Os04g03050.1 (locus LO C_Os04g03050) derived from phytozome v7.0 (chr-ID Chr4; po s 1244744 to 1245764)
cttgcctctgttttgggaaggtaagaatgcacattctctgtctgtccttttgcaaattcttttcatttttaactgatgatactacctactagcaagtaagttaatattatccatgtccaagtaacaggtcaacagttggatcactatctctgctcactgcaagcgggatgcatggatctaatcatctaattacaaatttgtgtattgcaaaatgtgatatggaatgattttttcaatgataatatatatagttgtgaaaagttacaacgtttctttatgattaaatggattgcctcttatatgcaaaagcttactaatagccaataacagaaacatagcaaccgatcgacacaaacattatgaattcgaaagagacaaatatggatgtatatcattaagaaaagatgcaaaaataatatctttgatgataatataaaaccttaattgaaaacgtacacaaatgtagcaactaacaaatgtagcaactaatagacaaataagggaaaacaacattgctttaatggaaacttggaatgtgaagcaggagtaaattagactgaaaagggcaattgagtgcataatttctctgatagttggttgcatatacacatcagtaaaattagcgaccgtaaggggtattccagtttctagtagtgtatatgcgtgtgcctcttcatgtgatgaaaaaaaatcaccacacaaaatgtttagcaggtaatatgtgcaggagaactacatgctcatgtgtatatatgcgttgattgacaaaaatatagagagtaggatttgatctatcactaaatacattactacgtacatatatctagggataaaaatggtcggaaaaaagcctgggtaaaattagtaaaaatcaggaacatagttggtcgatcgataattaccacacaaacaccattttcacccctactactgtgaattaattaattggagtaatattaaaataatacatggttacttgtttgaagcaaggaggcggctcttgagtccatcgtatacagct

SEQ ID NO: 12816 - DNA, 916 bp, Oryza sativa
  Intron number 3 from transcript LOC_Os05g14580.1 (locus LO C_Os05g14580) derived from phytozome v7.0 (chr-ID Chr5; po s 8304834 to 8305749 reverse strand)
gttactccattgattattgttgatttgtaagttgtaactttgtaggttcattaagattcagatttgaagaaaatctaaattatcttgtgatacgattgcttgattcttgacaattgcacacattatgttatgaaggaagaacatattttatcttcaatgttttgattgattctcgtagttcatgttcatacctgtttcagtgtttatcccgtgcaattaatttgttttatgtgactatatcaggctcgttttaccatgagtgtcagtgtaagttttgattcagggatgagcttgtcttggaaattgttctgttgaacatgtgtttcagtgatgtacttctacttacagcaattgggatcaatgtttctctaacagctatatatatatatatatatatatattcttggttccaagcatgcaggaaactttcagagaaagtgtttagttacattgccatagtaaataaattggtaatataattgattcctgtctacgggtgcgcattcagtcaaaatttggctagtcaaaactcaaggaatgaattgttattaggaaaaggcaagaccgaattcggttaatcctgtctattgctcaaagcctttcatagtgaatgtagccacgccgctcctctctccatgaggtgaggcttttgcttctccctcttgtggtataatacttgaaaataagtaacaagatttaactcgagatatcatttaggctcaaatctcacagctgcttaagcacaattttactgaagagattacattgtcttggttggattagtaacattttaattagaaaaaagaataggcatcaaattcttgaggcatcaatggatattggggcaatcttgggaggttgctcttatgagcagattgaacggttgcgcatgtatgcgaggttgataggattgttg

SEQ ID NO: 12817 - DNA, 798 bp, Oryza sativa
  Intron number 4 from transcript LOC_Os06g10440.1 (locus LO C_Os06g10440) derived from phytozome v7.0 (chr-ID Chr6; po s 5369265 to 5370062)
tgaaggggcccaagtggctgcaacttcttgttggggtatggcttgaatctaagctcatgttcgagtacgcacgtacttatattaatccactttgggctgtttgatcgctagtgttagcttccgctacgctatgtgaaaagcttatgctagctgtagatcctccaacatggttgaacatatgttcaagttcaatgcaggtagatgtagtctataaggttaactgtcataatacaatcaggtatttagaatggactgtggtgacagtttaccccaatttgtttttagaaataaaccatataagtgtttcttttctattgtagttttttttttttttttgaagtgtgaaacatgctataggatgataagttaatggagaaacatactcagtgtttaccttcttgtacaagagtcactatatccttcaatttagtctgattcagtttacaatgcttgtgtgtgtgatttaagaatatggtatggggcatttgtttgaattcaaaatggttcttgaaaaactatgttattcaaacgtaatagctagatatttgttcaatggacaaaaaaaatgttgaaggagtgcatttggtcaaagggtttctagaacttgggcattatgaagatgaaactgaaatttcagataagctcaaatgtgttataaaatacttatgcaaatctggtctactacttgcaatctgtgtactttacaactaaacattgctgctttgttgttcaactgatgagatatgtacttttgtttgtccaggtgcctccattgctcttgttctctggtaccagcgc

SEQ ID NO: 12818 - DNA, 730 bp, Oryza sativa
  Intron number 2 from transcript LOC_Os05g02880.1 (locus LO C_Os05g02880) derived from phytozome v7.0 (chr-ID Chr5; po s 1047408 to 1048137 reverse strand)
gaaggtacggacagaaccatggtccttaagattttatttctctgaagcgcagattttttgcagaagtttatggattttttttctgttaaatttgtaataagctgcattttctgtgtataaatgtaaaacactattactatgataacacttgctaaacagttgatattacaacaacttggtacgttcaaatttcactgtagaaatttaattatttcccattaaaattgtaacctttccaaattgtgtgcgagtcttctgtgctgagcatagactagtaagcactggatccttcctaccctttccaatgggccagctcatagcagttgttgggttcagtggtaccactcttttttcagctactttgtggacgagttccttgaagccttttggtgtggcattttctattaattcttaaagtatgctgtagaagtacccccccgggtcttgtgtgtttgacttgaatgatcttgttgaaggtttttcggttttttacacaaaccgggaggtctgtgatggtctggtggaaggggtgcccttggtggaattggtggccattcttccaaagtttgtcgaggactttgttgaagggcgcccttggtgtaatgttattgactgttttagtggacgttgcaagtcggtgatgcatttgagtacttgaatcatgatggcttactgtttggcaaccattggtgcagaatacgtgaagtggagttgaagcgcgactacgcat

SEQ ID NO: 12819 - DNA, 846 bp, Oryza sativa
  Intron number 1 from transcript LOC_Os04g56790.1 (locus LO C_Os04g56790) derived from phytozome v7.0 (chr-ID Chr4; po s 33686017 to 33686862 reverse strand)
aaaggttccggtcgtgcgcagctgatccagtagaggtaagcaagctgcattgcagagtcagtaatttactgtgaaaggttagctgcattgcctttgttttgcatagaacatggattttgagaaccagacatattgcatacttcagataagtgcaaaatggtgggggatcttcaattgatgtgattttgccatgttttcattagttatgctgtactccctctatttactttttcaatttaacgtcctcattaaaaaatgatggaagggatattaatcttaggtgttctttagtagattcatatttgatgacacattgtcagttgtgggagaactaaattatgtagtcagattctgtttattcccagtatgcaaattataagaaaaattctgggatgcttagattcaaaatgagtaaatgactggtaagaagacaaggatgcttagagtcaaaatgaataaatgactgctaagaaaacatgccatttcttctttatatctgatagttcagggtgactaaagaatcctactgaggatgtccaggcataatggtgtttggttagtaaattgctctggtgtttctgatgtggctgggtctttactgtaacaaaaagataaataagtcacaaaaacttttggtttgcacttggttttagtagtttggagctcctttctgtgatgatcattgttttgctacaatgatgaagctttatttattttacccattttattggaggaaccaattagatggcatattaatgatcattaagcttcaaccaaatgtttgatcttagacgttgattcttacacgcaggaacgttctgtttcaactggtaacacgtcatcttg

SEQ ID NO: 12820 - DNA, 601 bp, Oryza sativa
  Intron number 1 from transcript LOC_Os06g36940.1 (locus LO C_Os06g36940) derived from phytozome v7.0 (chr-ID Chr6; po s 21762875 to 21763475 reverse strand)
gaatttcgatctatcaagcatcgacccggttcgaggtgagctttgacctttgttctgttcatcttcatcttcagagaaaaaagaaaaaaaaaacccaaacaagagttaaattttgtttctgacaatgctgtagaaatgagttgattagatactagtagtcatcttcaagctacattgcagtgactagtttcctttccattgcatcatcttcgaggcttttctaatgtgtagtttaactcgtgtttgttgatgcgaagtacaaaagggtaaattcaaaaggaaaaaggatacaaaatggttgttggtttttgtggggatatctaggtatgttcatgtagatgtacaaaaccaagaatgtcacattgctaaattgctagtatatgtcaagacctgtttggtttcatagaaaataccaaagagtgctactgatttcggttatactctactcctttttttatctgaagaattaagttgtgatgattcctgcaaaatcgaaggacatataaataatttcgtttggcgtttttcgtaatatcgaaaatacttccaccctgttgaatgatacagtaattgtttggctgcagaattcgggttcttatca

SEQ ID NO: 12821 - DNA, 627 bp, Oryza sativa
  Intron number 2 from transcript LOC_Os10g02814.1 (locus LO C_Os10g02814) derived from phytozome v7.0 (chr-ID Chr10; p os 1126530 to 1127156)
agtaatcacaagggaggtaacgatttggctcagttttgctgtgaattcattttgccatatgttcatttctttagttatgcaacagatatcacatgcataaaattcttcttcacttaataaaattcgaaagacatcagaaatgctgaaccgacttttcagggaatatactatgaagtgccattttctttgacttttctgtttttaccggttaccacaaagggtactctttgatttctatagaaaaaacacgatattcaaattgttattagcttttcaaggcatatttacctgaaaaactgcagcaaacttttcattacttattgactagtatgtaatgccctgttagatatattggaccaccaaattgtctagacacatcaatttctgtaaactgatgctggactgggttagagattttgaggccatgaaaacttgctcttgttttatgaaacagtgggccatgttagttgtactggctatttattacttaataaaataaacagtgacaacattattgttcttctattcctgtgcatgttgccaaatgttttttgaaattcagaaaatgttacagaatgtgaacttccaacaggggaaccgaaggcagtgcagagcacgtcatctttg

SEQ ID NO: 12822 - DNA, 865 bp, Oryza sativa
  Intron number 3 from transcript LOC_Os10g02814.1 (locus LO C_Os10g02814) derived from phytozome v7.0 (chr-ID Chr10; p os 1127344 to 1128208)
tcgccagttattttcttgatagggtaagattgattttatgatatgctactgttgtccactttttcggtgctcaacattttataactgacattgttcatatcaacagtttgttactatcttctttgtgtgaatttacatttctgtctctttaacacatgccattcttcattgcgtaagcactcgactacttgtaactatcacaaatagatgtgctcctaacacaagagccagattagttttagttttccaactaaactatagccctgattttctttttcttcattgaccacctaaccattcatgttgtttaaactgttttgttgacctgagtaacaataacgtattttctgctgaattattcataattcctgataaaacattatctttttttacttaactacaatctagctgctctctaaaatatataaattacatgttggcttaatgtattgaaggaaaaagagaagatatctagcgtccctccaatttatgatgtgcatacagattatgattatatggatgtttcttgattgtaaatggtgtctaactattacagatcatctgactttggtcttgctagataagcttgaatggagttctctctgcttttgagcttatcgttagtgattagggagcaattgcttaagttgcatccagccttgtaataagaaatgctttggtcctataataaacatgcacaattttctttgttgcttctgtaatcggctctaaccaacgctcttctgtcgcaactcacaattcaatattatttctttagttgcaaatttatcaaggcaggagattgtagtcaactgccctgactggattttttgcatatgtttgcaggtggttgaaatatccagca

SEQ ID NO: 12823 - DNA, 809 bp, Oryza sativa
  Intron number 2 from transcript LOC_Os12g12850.2 (locus LO C_Os12g12850) derived from phytozome v7.0 (chr-ID Chr12; p os 7098349 to 7099157 reverse strand)
tttggagctttcattggaagaagctcgtcagctaggtatgtcttgcattttgattgatttgattttatcactaatttttgtttttattgtacctaatcacacttcaaaaattgaaatccaatagacggacagtgacatctatgtatcaaaaagtctcaatgtgtattgcttagctatccaatcattctcactcactaattaccaacaatccatggatcactctggtttggtgatgaaactgaacctaatcagaagggtagtgactttcataaatagtagttggttattgttgctgtcacacttttggccctaaccaacatgttgctttctaaatgggctgaattggaagtcaccaacatatacttcaagacatcatattcttgttaaatatgtactactaaaagtgctaacttctcctcttacggtaaagtaaaagtaaaaagacgagttacaatggactagttgcatgattatgtaccttgttaatttggtttgccacatctgttgttcttgtattgtttggaattctcttattcattatgggaactattcccttcgcattggtgtattcattggcttatcggtgttactcatattgaatacatggttgctaagctgctgactgttcacatgttaacaaaagaaacttttatatcactatggattttgtatgccgtgatgtgatgcatctgattttcttattatatttcaacatatgagtgtatgacatagaagatcattggttttccagacttgatgcccttatgtttccaggacacaactatattggatctgagcacttgcttctt

SEQ ID NO: 12824 - DNA, 754 bp, Oryza sativa
  Intron number 1 from transcript LOC_Os12g12850.2 (locus LO C_Os12g12850) derived from phytozome v7.0 (chr-ID Chr12; p os 7099679 to 7100432 reverse strand)
agaacgcaccttttgtctctctcctctcctccgaggtaaggtaaagcttctccccccctatccccatggcgtccatcctagctcgttttctctctgtaaattatatcgttcttggttggttcctgttgttggctgccgggtgggggggattgtggtgcggaaaatttgagttcttggatggattagcgatcttttttttttagttcttggtattggcgatccctagagatgttatctctttcctgtatgggaataaagattacttttcttttgtttgtttgggtgttggtgttgtgaggatgtttgtggatagggatgctgtgttgtatcggtgatctttatccaattctctatcttgggtgtgtggttcagtgattgaacagatgggagtggtagttctttttgctgggagttttgtagcagtgcaatttccttctgaactaatcatagagtagaaagaagaggaaacaaatatatactggagaaatagctatttatgatttgcaatttaatgaatatctttttagatgatgtgcaaatttagtgaagaagatgaagcacagtatctttggtttagaaacgaaagaataataagcagagcatgttttgtagtgttattgtagattccatactctccattgtgcttatctctgagcatttagcttacttccattggggatcaagtatctagattagtttctaactatatcagaattgttggtcccgaacaggtttggggaagctacttctgacc

SEQ ID NO: 12825 - DNA, 1052 bp, Oryza sativa
  Intron number 3 from transcript LOC_Os12g20410.2 (locus LO C_Os12g20410) derived from phytozome v7.0 (chr-ID Chr12; p os 11913578 to 11914629)
gggcaaactttggcgtggactatagggtatccaaagttagtcatttcttcttattgttattccttttttttttgcgttgttggttgccagtttgaattgggtattgaccaccacatttactttacattttcctttttatttgcattgagagaagaaatgcaagcacaagctcagtattcatttttttgtttgctgatcaactgattgaaaatgcattttttccataatgctctgttgaaagttgttcgttatagtttaaagaatggattgttgcaggctaaaacctttgctatacaaccaattttattttctaactgtgggatagggatgattgagctctaacatgctccgaaagccagggttaccgggataatgaacaccacagcctaaccgaaagaacatcactttgtttgtttttaaaatgcgttgtatattaccttagcacaacaacttattctcaatcacattgcaagaacttaaggaattgaaaaaggctagatctttcgattgtgattaaatattccagctgttcttggcagcacatcttgagaagtaccgcttttcaaaattcaaaattagtaactgggctaactagtaactgggcccagctgcccctctttcatagcacctaggattgcatctagttgttttcctgcctagtgttgtttcgggtctgcacagagaagtggggcaaattagagatgaagattttacatcattgatgtcatggatgtatgatatgccagtttctatgatttaatatgccaggtttgctctatgtaatatgatagtacatactctatgtagtaaaatttacatgtgcctaatcatgcctaggtttgcttggtggaactagctgcttagcgtccactgtttttgaaccactgattgcggtgtacctactgaattgcatgcgtcatgattgggagacattgcatgattatttactggatttatttattttttgccccttaacattcttctctttcgtttatctatcagttcatttggctgaaggaatttcgagaaatcaaggacaagtccagtgccat

SEQ ID NO: 12826 - DNA, 744 bp, Oryza sativa
  Intron number 3 from transcript LOC_Os09g35670.2 (locus LO C_Os09g35670) derived from phytozome v7.0 (chr-ID Chr9; po s 20519299 to 20520042)
cgaggttcagggagatcattcaggttccgaagaaggtgagttgctactctgttgaactgtacagtgtgtgttgcaaggagcagcaaccagtagggttcagttcaatagattactactcgtatttggtagtggaaaattggagtaatgtctatgtgagttgagccttgaagactcaccatgctgttgtcctgtgcaaacttgtagatagatactccaacaagcaatcttatgcctgttcaagttcgacctataaaacctgttgaaatcgggcattttttcgccgcttcaacatggctgtatataaatgctgctgcacgtggaatattcatgcgaaagtagcaattgttattgtgcgccacaaaagataattctgttgtatatcatgtggatttgagtttcattttttatgctctggtgcataggtgtaggtggcattcataataggttcctctattgggatttagcccaaggacaaaatctgcatagatagattgcttctaatttctctttagtttccctaaactacttaaaccattttctatttttattgatgtttcaatataggtgccgtacatgctaagggacagtttacaaaccattgctgcagttattaatatataaattctcaatgtgctcttgtttggtcaccaatagcggcaaacatataccattttgtgatccttgttccatccgctaaatttgcttttctttaggttgtcagggacccaagatttgaacctgtat

SEQ ID NO: 12827 - DNA, 826 bp, Oryza sativa
  Intron number 2 from transcript LOC_Os12g08810.1 (locus LO C_Os12g08810) derived from phytozome v7.0 (chr-ID Chr12; p os 4534210 to 4535035 reverse strand)
agttctttgtcaatctcctgctcggcctggtaaatactaaatagaagcttacactttaaatttcgcacaggagaagttcaagtatttgttctgtattgcgcacaactacgaaatcttgttagctctctggagagctactgaggcaattagataagatatttgccctatgtattatagtagcgttcggttgtgcagttttgggtcatcaccagtttggtccaagcctgttacatgtgtttgtttcaaatttcaaatgggcaagtatcggatactctgtaattggatccaaaagatcgttatgctccctatatatccactggaaatgcttaccgattctgactcgtttcctcctacatgcgagctaagatgtgagacgttatattttgtgattatcaacctactagttaagttgtggaaaaatattgtcaagaagtaacaattgcgtatatttatgacgtataacctgcatggaagttatgatgagcacccatgcacgcattaaagaaatgttcttcaattttgagcatccagcattcatgtttgagtgtatattctctttttgttgcttttgcatgctcttactatgttttccatgcaatagaaataatatatgcatgaagttattactagccaaatatacaccagacagcattatttgcgagatggtattgctgattatgcaagtaacaaataactaatccctccgtttgttttatgatataatctgtcctgtgtttataataggcatctgtgtaaccatgttacgatgcttatgtaagaatactgaagttcaaattttgtttgtttattgcagtgggaagacagg

SEQ ID NO: 12828 - DNA, 586 bp, Oryza sativa
  Intron number 1 from transcript LOC_Os12g08810.1 (locus LO C_Os12g08810) derived from phytozome v7.0 (chr-ID Chr12; p os 4535093 to 4535678 reverse strand)
cgggagggattgcctcggggattgctgcttgcccggtgagtctcttcctcccaaatcaggattaaaaaaactcttagattattttattgtcttattattacaccttggattccgaaatcctggttacagttttcttctgtgatgattttcttgattcgtttgattagaaaaatggttgtgcttatttttgttgggtataacttgaatattaaattcatctttcgtcgcaaattaaaaaaaaaagaagaataagaacatctttgcaacttccaagaaagttggaggatcctgtcaccactagtaggaaggatgctttacctttgctatttttaacccctgcggttaaaatattgttactggcctactgggaatgtttttgggttcaccacttgtagtttggtttcctccaacttggtaggataaaaataggagccacatattattttacttagatgcttcaaaatcttatagggaatataggcaccacaaaaaaaaaatgtgtggataggcttactaccacttgtttttaagtgaattaacattttttttcttgcatttccttgagcagattccaagcttccgctgt

SEQ ID NO: 12829 - DNA, 685 bp, Oryza sativa
  Intron number 1 from transcript LOC_Os09g19350.1 (locus LO C_Os09g19350) derived from phytozome v7.0 (chr-ID Chr9; po s 11580774 to 11581458 reverse strand)
cgcacatagcactcccacgactttttcgaaagattgtaagaaacccttccccccaccacatacaaagtatgcatcctacttctcatactatatcaaagaattaagttgcatcgaccataattatacttagttatgtgttatatttattttttttaagactggtacttacgaatctaaaaaaatgcaccaatttgctgcacagagttgcgtttatatatatagatatatattttaaagataacataaatataccttttgcctctgccagactaaatatatgtatataggatgtactcatgactccaacaccagcacaccactccatcaatgattattcttacaactagtgtgcgcgcacatatagtacatactatttattttactagatatcctataacaacaaacaatccactgaaaatttatgaattaaatatgtatgtgcagtggcggagccaaaattttctcaagccttgggctgaattagtgtgattttcataggtttattcttttcttctaatttttcaaattttagagtgttatttcaatgggtatttaagatcaggactcaagagtagaattttgaaattttgcacatgcatatgatcttgtgaatttcaaattttgcgttatgtgcaatttctatttttttttgctgaaacttctctttatgtaactatgctagttg

SEQ ID NO: 12830 - DNA, 203 bp, Oryza sativa
  Intron number 1 from transcript LOC_Os08g38530.1 (locus LO C_Os08g38530) derived from phytozome v7.0 (chr-ID Chr8; po s 24366050 to 24366252 reverse strand)
gaggctgatcgtcctagaatagtcctagctggcgagtaagttttaaataaatttcattttgacttcttcaagtgtatgcttaacaaaaagctttattacaaaacagagccaatatatatggatgaacgaatttgtggatatactaataatttacttttctgtttgtagcgcttttgaagtgtatcctcatatctcatctcgta

SEQ ID NO: 12831 - DNA, 836 bp, Oryza sativa
  Intron number 1 from transcript LOC_Os08g01300.1 (locus LO C_Os08g01300) derived from phytozome v7.0 (chr-ID Chr8; po s 192654 to 193489 reverse strand)
agcagcgggtttaccaagtctggaaaggcaacaacgtgagtgagattggattactcctcctcctcctccacgatccctctcttctttctttcttgcgcccccgtcccccttcttgtccccataatccgcgcttttcttgggttcggatcgactgttgattttgcccgcttccatttctgtctgtcccgttggcgcctaacatttcgcgatgtgatttgttctaacctgctctgacgaatacttttggggattagataaaggaaactgcttccggcccatatctttgtgtgtggttagctaggctagtttattagttaattggtttgtgcgcctggtttgtactatattttactacactgttgatgagttagatgaataaactatcgttaatcagtttggagctttggggccattctggatgataaccctcttttgtttccaataacataatccaattgggacaggagtcccaaggtcctgtctttctgcagctaattcaacctggcttcaggctgcataaaaaataatgtgctacacttgcaaacattacgttgcttaaatcttctttttactcttctctttagaattattgctttcagcaacttgtcttattcagagttcaggctagtgtaaaaacaatggccttgataggagttctgatggagttggacaactgcagattttacacaatatcatatcaaaccttttaggatttcggaattttcacctttgcttgcagtttataccagcagttaatataaacatttttaatgtgtcatcaacgtgtttctctttgttcagataatcttgtgcggtggaaggtttatctttggacc

SEQ ID NO: 12832 - DNA, 453 bp, Oryza sativa
  Intron number 1 from transcript LOC_Os11g43850.1 (locus LO C_Os11g43850) derived from phytozome v7.0 (chr-ID Chr11; p os 26010354 to 26010806 reverse strand)
ccgacaacttcgtcgcctccggtgtcgtcatcaaggtcgtcttcttgctttgacattttttctaaacaaacttttttaaagtttatagataaattaatattaaaaaaataaacatattataaaaaatatatattcaatgctatgggcctattcggctgccttgtatagcgctgtttcactgccatattacagcttattactgcagcaagtaaactgggtgcaggctgcagggcaatattgtacgcgacagccgaacgcgctctctatataattgttgatgtggatgttgctaaattttctgtaaatttaataaagtttgactaatcgacttataatatgaatcagaaagatgagagagattatttcttaatcatatatattcccccctctctctctctatatatatatggaattaaggttgtagtactcttagatatatatttgcatggtaga

SEQ ID NO: 12833 - DNA, 757 bp, Oryza sativa
  Intron number 1 from transcript LOC_Os07g31290.1 (locus LO C_Os07g31290) derived from phytozome v7.0 (chr-ID Chr7; po s 18527899 to 18528655)
caggtattgattgtcttcgatagaccttatgaatgttagatgctataatcatgtttctatgtacactgcaattgttaaatggagttgaagcataccttttattatgaaacaaagggatgcagggagcctgggatcaaattgcataagtaaatatactgattctgcacatattggttactttcgaatcgtgccgagtatattatttaatgtaggattccaggctgtgtaacaatttttatacaaatcgcatttagtactctaaaaagttgggcaggatggtttggtcaaaattattatcacttatggaatggaatgtgaatgttagcctcaggatgactgatgacaaggattttagcaaaattattctcaaatgtagactactggtaaaatacatttttagttcatattttgcatttcccatgcataatactcagcaaatatataactgtcaaattatagctgcatgttatagaaaattatgcctcacgaatttcttgtgtcttatatgcaaaaaaggaaaatgaaccccccatggcttgtaagttttaacatctagaatgcagtaattacaacattttgaggaatcatgcacttggagtagcaatctgaaaaaacaaattcttccattaaatttgtttaaatgttatttatacttctacaattcttccagtatgaccatcaattcaaaaagttgatttattcctcaattacatcactttcagggtcataagcagtggctggctgaagttcagttcct

SEQ ID NO: 12834 - DNA, 604 bp, Oryza sativa
  Intron number 2 from transcript LOC_Os09g07590.1 (locus LO C_Os09g07590) derived from phytozome v7.0 (chr-ID Chr9; po s 3803463 to 3804066 reverse strand)
aactccaggaattcatccagaagaagaggtatgtctttcgtcttggcagctgtaccacatatattttttgaagtgctttaatttacggtggactctattagtagtatcaccagtacaaattaaacgatgttagccgttaatttttatattctactaccagtatttgagatgcaagtataaatagatacaaaccgctagattagaaagaaaaatactttacataccaccaatagagaccccataaatagcatatactttttatataccactttatgcagctatgcgcacttcgaccggcgattgtaccacatatattgctcttagtgttaaagctaatattaaccattaatatgatatcaaatccaaaattccggtggcaaaaccattagcaaaaatatcatgtaaaccattttatagtgcttcaggtataagatgccctagggcgtctttgtaaaaggaaaaaaaaactaaagctgttgatcaaagtattctcaaccattatacatataaaactcaactccttgttcttctctgattcagtagctcacctttgcatgtgttaaattcagaaatatacgcaaaccttgtgagagtgtagtcggca

SEQ ID NO: 12835 - DNA, 732 bp, Oryza sativa
  Intron number 2 from transcript LOC_Os11g07200.1 (locus LO C_Os11g07200) derived from phytozome v7.0 (chr-ID Chr11; p os 3612340 to 3613071)
agggaaaaggtggagctggataattcttccaccaggtactcactacaaattaaataccattccctccagaataaatatattacgccttggataacacatctggtcaaaattttgaaactttgtctcatcgaatttaaaaatacttgatttgaaaacatagaattggtatgtatagatttgtattgaaaaatactttcatgatatcataaactgattttataacttattctaattaaaaattgcgctcaagattacaactcaaagtccaaaaaagattcaatgctatattttttttatcgaatggagttaatatttacccatactacactttttgagcaccttatttattactctgcagatccaaaatataggtcattttaattttctcaagtcaatattttactctgtatgatccaagatgagttgagaaatatccaattaagctcgtcttttttcttttgattcctcattagtcttgcaaattaaattaatagtgaagtgaaatgaggaatcaaaagaattaaggtcatgactaatttaatttgattcctgatgagttgagaaaatatccaattaaggtcatattgaattcgggaagtagttattatgataaacagcattcttggctgctttttcacaaaaggatatatagattcacagttgttagtttagatgtcatgtctttacccgtgcatataatcaagaccttaaattgtacagaggtagctggtc

SEQ ID NO: 12836 - DNA, 835 bp, Oryza sativa
  Intron number 1 from transcript LOC_Os09g21100.1 (locus LO C_Os09g21100) derived from phytozome v7.0 (chr-ID Chr9; po s 12720665 to 12721499)
ctctcacctcacccaggtatgtcatcgtcgtcgaaccatgtctctaaccacctcgaaaccctatgtttacttcttgtacgtttgatattagaagttgttttgaactttttaagtttgtttacgtttatggaaaaatatatcaatgtttttcacacaaaataaacatatattataaaaatatattaaatattggtttaatgatactaatttgatgttatatatcttactaaatttttctataaactttggtcgaacttaaagaagtttgactaaaaaaaatcaaaacgacttataatatgaaacaaatataatgagaaagtttttttttaattaagtggacatatatttattttatgcatgtcatcaattaaaaagttataaaaatattttaaaaagtttgataaggtaaatcaatatgtgatatatcatttaacaaataaatttgacctgaacaatagaaaaaataataagttgaattgtatacagagtgaaatatcacatactgatctatcttatcattttttaaaaaaaaacaaattgatgattgtttagttaacatgaatgaaatgagtgtatgtccaagataaaaaaaacactttattatcaactacatgaaaagaaaaatcatacatgactgattttctaatgttttactgtgcatatatattggtgaattgggcatataatcctttcactaataagcagtcgttgatttgattatcatggattatagtatacaatctagtgactgattgtgttaaatcgccttattaattacctctctggtgtgattttcgtaggctagggtataccgggagaaggagaaccacgtcaa

SEQ ID NO: 12837 - DNA, 849 bp, Oryza sativa
  Intron number 1 from transcript LOC_Os08g27250.1 (locus LO C_Os08g27250) derived from phytozome v7.0 (chr-ID Chr8; po s 16638261 to 16639109 reverse strand)
aggttagtacaaaactcagtcaatcttttgctacctttttttccagtgactattttgggcatatgttaattgatacaaatttactcatgttggggatccataccgcaacaggggagagcagggtgtgcgtagtttgcgtgcacaaatccatcatacgcgattataagttatttctttttactcttctttgtgtcacaatttcggataccctaggtgtatctatctacagcgctctgcaattgacttacctttaatttgatcagtcaagcgcatgggtatgtgttgttatttttcagtcaaattagcgatatcctttatgcatcaatagcttctttttttttttactataatgtgttatgcagtatatttcggttttcgtttgattcccacgacccacccacgggctcgtgccgactagaatgaggattggtccatctttttggttgcaaatatacgattcttttgttttcagttctgtctcgcatgtatgcgagtaatatactatattcacaatttttccttttcagtatacataacaataggcaaattgatttatgtgtttgtcatatgccgtttaatttttattttcatacatgtcagtgttatgcacaccatcttgtgtgtattcttttttttcttttttttgcaaacacttcataacactgccatttatagcctcgtctttccagtgaacatatcagataaaaaatcacatccttttatttttatttctagtgtcggcattgatatactagcaccattttttttggatttttattattcatgcttaatttcaataggtctatatttttgtttgcagccacccgaatcaaaggggcccaacctgac

SEQ ID NO: 12838 - DNA, 702 bp, Oryza sativa
  Intron number 1 from transcript LOC_Os09g12710.1 (locus LO C_Os09g12710) derived from phytozome v7.0 (chr-ID Chr9; po s 7270526 to 7271227)
tggtgtcgagggagtatttcggccacaagaagaaggtaaccttttcgattcccccctcaccaatcctacgcggggataagtttttttctcatgaggtcctaaaccctcaaaagtcctgcgagggggaagccctaaaatccggatgttacaagcaaaaattaggacgaaaatgcatccatctttggttcacacgtacggttttgtttctaattctagagcaggatatagtgattgattcctcgcgttcatgccgtatatatgctgattcttttgctctagggctaagccatgttgagattgaatgaagctttggttggttgctttccttctgggagctggtgaatgagcgcattgtcaaatatgattcctggtcataattactcctaatttttgaaggaatttggtttcacgaaaagggacttcttgtctgactttgtaaagttgctactcctctgaggggaagaattcaaagggaaaaaaaaatcttacttgcagaaagaatcatagtacaacgatatttctctgtttctttcttgaattctgtttcttgtttttctaaataatccttccacacatggaggtgcagcatttaactggttctgtcgctttttgccttcttttttatctatcttacatacataatcagccttaaattttgtataattctgatcttttgttttactgttaggtgcactctgtagc

SEQ ID NO: 12839 - DNA, 560 bp, Oryza sativa
  Intron number 2 from transcript LOC_Os09g12710.1 (locus LO C_Os09g12710) derived from phytozome v7.0 (chr-ID Chr9; po s 7271305 to 7271864)
gccatgtaaacattctctcctttcctgattgcaaacaaaataaccttcattgttattatggaattattagataaacgcatttattgtcattcactatgaataactgtcaccctttttttatgaacatttctataaatttgaaagataagcatgatgattaattggaaatatctcccgctgtataatttaaaattatagaaactcagacagtaatcacacttaagcataccatagcctgtgtctctgagacatatgtttgagctatttaatgtgaaattgtgaatgatttcttagctaggggttcttttggatccctcagttgtacttatttcttcttcttaatgaaaggaagcgcagccctcctgcggttttgaggaaaataaattctaagctaaattatattgttttgagaacactaagacatttttggttggaacgtaggaggggaaaaaaccccagatggtttctatttccctggaagtaccaagtcagtactgtgctgattagggtttttatattgcacagtccaaggttaaagacattgaattgaaaggccacac

SEQ ID NO: 12840 - DNA, 899 bp, Oryza sativa
  Intron number 1 from transcript LOC_Os10g21196.1 (locus LO C_Os10g21196) derived from phytozome v7.0 (chr-ID Chr10; p os 10740644 to 10741542 reverse strand)
tggtagaaagcaacgtgcgacttgaaggacacgatcgattgtggattttgctatccaccattttccatagtaatgaaaatgctcttggctcgacatagtctgttctattcgtcccgaaccgaattttcgctgggttgtttgtaagtaagctaagtaaatagtacacgatggagctcgagaggacagaatttattttttatcaagggaaagaatctagggttagtgaaaactaataaattaggccaactttgtcattctacccttaatatagaaatcgaaataatatagaaatcaaaaggttaaaataagaagaaagtccaattttggaagatatgggaaaactcttttgattaaaagtctatcagaatcaatcgctcatattcgatttctatagaagagggaaatgctttatcgaaggaaataagaaaaaagggtatgttgctactcttttgaaagaaaaaagaataagaattcccgaagtaatgtttaaacccaaggatttcacaaatcaaagataaaggattcccgaacaagtaaacacgattttcaactgtctcaacaatagaattggaccggaataaggaataaaagtgaatttgttcgagatgaggcaaagaaaagagtttagagacgactcaaaaaatttcaaaggatttttttctttcaagtctgtcaatcaaaattagtcaacttgagtcatgagtataaatgaaatttgttttttctgtacggaaattaatgcaagtcatattctcgagccgtatgaggagaaaacctcctatacgtttctagggggggctttgtttatctacatctatcccaataagctgtctatcgaatcgttgcaattgatgttcgatctcgaagagaaggaagagatcttcgaaaagtaggttttt

SEQ ID NO: 12841 - DNA, 644 bp, Oryza sativa
  Intron number 1 from transcript LOC_Os07g35750.2 (locus LO C_Os07g35750) derived from phytozome v7.0 (chr-ID Chr7; po s 21416797 to 21417440 reverse strand)
ggcgcaagggccggcgccggcggctacgacgggaggtgagcatacaacatactccctccgtttcgaaatgtttgacgccattaactttttagtacatgtttgaccgttcgtcttattaaaaaattttaagtaactattaattctttttctattatttaattcattgttaaatatattttcatgtaggcatataattttacatatttcataaaagtttttgaataagacgaacggtcaaacatatgctaaaaagtcaacggtgtcaaacatttcaaaacggagagagtatttagttggagatgtattttcaatcctcgcggagaactggagatatccgctcatttcttacatatgccatccaaataatctatttaaattaatatgaaaaatatcagtccacaaaaatacatggttaaattcaacttctacaaaatccaataaaaaaaacaaattaaattgaaaatagttaacgtgcattcacaattatattttgtttgttgagaagcagctagcagcctagcactgtgttgttgtaatgaggtgctacatagaagaaaaggtacagtactttggatacttgaactgatcattttctatgcaaaagtgcaggtaagaataattcagcaagcaaagttctggtaatc

SEQ ID NO: 12842 - DNA, 393 bp, Oryza sativa
  Intron number 2 from transcript LOC_Os08g16120.1 (locus LO C_Os08g16120) derived from phytozome v7.0 (chr-ID Chr8; po s 9824341 to 9824733)
gtttgcaggatttccagtttgatcaagcaacggaggtagaggtattttcttttcttattcgcacttgcgtttgatgtatgatagcagcataattttaccttttggagtcgatggatggactatgtgttggtgaaagacttagattatgtagaatatttttttttaaaaaaagaaatgattcagtggaaagaaattgctttgcttactgatttttgaatatcatcaacagattcagtggaggtttagtcacccatttattcaatctataacttctttttttgtttatgtacatgtgaccatttgcattataactttcttcgtttatgtatataattgacccttacaagggaactgattttgaactacctactgctgaaaaacagtgacaagaga

SEQ ID NO: 12843 - DNA, 430 bp, Oryza sativa
  Intron number 1 from transcript LOC_Os10g26400.1 (locus LO C_Os10g26400) derived from phytozome v7.0 (chr-ID Chr10; p os 13640078 to 13640507)
ggtatcaggtagaaataaattcgtcagtttagttctatttctaattcaaggtgaaattgttatgagcatgacctccatgtagattccatgtagttatttgaattctaattctcttcttcaaagtattttatatcatcatcaattaccatatcaaaatagatgtatataggcatattccctccatatatgtatgttcttgttgtccatattgttcattaaactcttctatattgatttgttttattcatctcgagattctatgttttttttcttgtcacatgatccgttctgaatgatgctacctatgtggtaatgcctcttttgtactcatatctgtgcgtatcctttgcttattttctcaattgagccctaaactttgtcctttttaatatcaggctagaaaggtagaaacagtcaacttacaaaattg

SEQ ID NO: 12844 - DNA, 760 bp, Oryza sativa
  Intron number 1 from transcript LOC_Os09g19440.1 (locus LO C_Os09g19440) derived from phytozome v7.0 (chr-ID Chr9; po s 11637047 to 11637806)
catcggtgataaggtttggctgcggcccgttaaaggtaaacggtgacgggccgcaccaaaaccccttcacgggtcaaagtcatcggtgacggacccagtgttatggcctgacaaagatgattgtgaagcccatcaccgatatgagttaatctttgatgagatttggttgtggcccgttatggataacccacactataaataccctaagaccttcgaggaatagttatcccacgcattatactattcacacctcgggagagaggctagaggggcgaatttttgctatttatttgaataaaaatacaagaggctccccaggtaataataaataaattacaactataatttccgtgtattatagctatagatattatatctaatttttttcataatttgcagatggatagaaattgtatgtttggaagtgatcgagcgagccaagagtttagaaaggggcgttgccaatttcataaatgttgtagagcaagacaagaataaaacgaacaatcaattcactacttactacttttcaatgctttgattgtaagaacagaagatctttgtcagtattgcacaaatacatacgcatctaatctgtcgaggattcatgaagggttatatatgttggaccaagcattgaaagcaagagctagagaatattggtgacgaagtgggcggtggtgatggtctgaacgaggaaggccacgaagattatatgtttgtccaagccttgttgggcgcccatcaggtggagttgata

SEQ ID NO: 12845 - DNA, 1002 bp, Oryza sativa
  Intron number 1 from transcript LOC_Os10g41550.1 (locus LO C_Os10g41550) derived from phytozome v7.0 (chr-ID Chr10; p os 22254476 to 22255477 reverse strand)
caccagtgcggcggcaacgtcggcgactcctgcaagtaagcctacccaacctcacctcctaaactaatttcctccattttttttgttcttaatttcttggactcggagtgttataaaaatagatgtacaacggagacatgaattttacgtggaaaactctttcggtaaaaaaaccataggtgccgaccggcaatgtttaccgtagagtcgttgattataaacgtagaggaagaacaatgagaacttcacaccttctcgtacaacttacaaaagtatatatagaaaataaaagaaagacactgagtcctactagaaaactaatcagaatatactgtgggcttaaaatttggatcacgtatttaacctagagtgctctgcaactgcaactgttgttctctgttctagccaatccatgatccatctggttagcttaaaaaaaatgtttcagattgtattgtatttgcttagcttaagggaaagcttatttgattaggaaaaactttttagtttggttctattctatgttctatatatagccaaatgatctgcttatcttgaggaaatggttcagattttatttgattagaaaaaaaatgttttattttaggggtttttcattctttgttggtctcttgcacgcaaagaatatacgtgtatttttctgaagcaataagcaatcaaaattatccaagtaggaagggggaaaaagcgtaaaagcgatagctaaagaacacaacagatacgaagctgtcacaggagttggaagaaggaaaaggatcaaaagattcctcccaactgcaaccgggctactgctaaccaacaaacacctgcttttgccaccactaattaattccaaaatcaactcaacaaagagatcaaaatcgagttctaacagttcatatgatttctgtgacagtttcattggattaattatgattagtgttttatggtttatgctcatatgtgattttgctgatgttgatgcagtatcccgttgccggg

SEQ ID NO: 12846 - DNA, 940 bp, Oryza sativa
  Intron number 2 from transcript LOC_Os08g03640.1 (locus LO C_Os08g03640) derived from phytozome v7.0 (chr-ID Chr8; po s 1720690 to 1721629 reverse strand)
tcaaggaggtccgcgaggaggttgccaagtacaaggtataactggcattcaatctgtgttctagactgcatggatagtagattgtattgtggtgattctgtagtttttgttgaatgtgattcattgggttgcacgctcgcagttgattatatgtggaagatattagtagcgtgttatgtaaaaaaattgcaaatctgatgcttgatccgtttgctagtttgtaactgtattagtgttattatgaaactttctgtggagcagtttatccatatgctatgtcgatatttttgttgtatgatgctagatcttctgttagattttaaaggacatattcatcatcatgtaacttttccaatgcgatttgtctctgaaatattgcattggttttataatagtaacttgttctttaagtgaaattggttgatgttttagtgtgttatcttacagtgatcatgggaagaatctcaattgttagtaggttgtgacagtttgatgcctgatgagtattgctagtttttgcaagcatgtacaactttaggacattatagtcaatgtcatgctcaatttatcgctaggcttatgcatgttaagtttatccatatgcaaagtagatgatctgtttgtatggaattaagtgttatgttagatgtgatatcacaatatttgacctcgtcaccttttagtgtatgtctcaagttctttggttatattgcaatgtcatgttgtagatcccactacatattggagtttaatttagagatttctttaaatagccagtaatttatgtttttacagtgtgacttgttgcttgacttgtgcttctcttttcattgcgaaatctcagtgcatacttgtgatgttatctgatgaatgaataaccctgatttgtttttgttataaaacaggttggagctcctgctcgtgttggtcttgttgctcc

SEQ ID NO: 12847 - DNA, 930 bp, Oryza sativa
  Intron number 2 from transcript LOC_Os08g32700.1 (locus LO C_Os08g32700) derived from phytozome v7.0 (chr-ID Chr8; po s 20254182 to 20255111)
agagcgtgcggcccataccagaggaggtatatcctaacaaacttttccttgttttttccctattcatcttaggtgtttcttttacctgtatgtcagttcaaatagaatctggagcgatgctaacttatggtgccagcttcgaaatttgattgctcatggagacaggggacagattattattttctctaaacatttctgaaaatataattctgaaactatggtgaaatgaaacactctcatttctgaaaaattcagctgctgtatgggttgctactagcctacggaatacatggttcagttttaacctggcaatgttttcttcgggttctggtcattatggtgtcataagaaatagtcaggccactccattcaaaaaatgggaaagacaataaagctttttcattcaacaagggacaataaaggactatttttgcatgtgctcttttgcttggagtattgtgtgattatatagctgattgagctatgtttagaaaactgaacttcccagaactagaattgaatagtctatggcatgacctaatcattaatcagttctctatttgtgagactgatagttgcaattttatagaggatggtctatcataacaaactaaattacttctatgatttttttcttaaatcaaagttgatacatttgtgactgttcattgtttcaggctgaagggggactcattatttaaaaaatgaaatgaaaactgctatccatgttgactccatcgattcattgatcagatcagggggtttgaatgaataaggatatctatgctgttcatgaagtgcataatggatggtgtgatcctctttaatcatactgcttccttcagagttcagatacaaggtagaatcttttacgctactttcagcttaattgattgattcattttcgtatttgacttgcagggcctaacc

SEQ ID NO: 12848 - DNA, 966 bp, Oryza sativa
  Intron number 2 from transcript LOC_Os11g42000.1 (locus LO C_Os11g42000) derived from phytozome v7.0 (chr-ID Chr11; p os 24792299 to 24793264)
aaggattgtatgattctttgctggcttcttttccacctcttaagcatttcttgattgttttaaaattttattgggagatctagggctactttcagttcagatttcattggaacaaaatataatgatagtggaatggtaatgtcatgataatatattacagttaatagcactgttttaggaaaatggcacattttaaagttttgcttctgcctttcttcacaatagtcagacaaatggtggttagcttgcactccgatattctggcacaactcccgttatcccagttcaatttgatttttgattcctgatgccaatgcatggaacggatggatcagaaagttgtcctttcacagtgtaaaggaaattgagacgctggcatataacgagttaattatttgctctgtctcagtttccaaaagcaactggatgacgaacagtcccctctactgtagaaagaattgggggctaccttcatccatacatgggctatgcttattgatatataacttcccacctagctttggatgaaacttattctgggtatgcatcttttccatatgggagttgatggtctgatatgccataccagtgacccaatctgttgaacaatgctgtcattgactagcagttcatcttccaactatactatgaatattatagatcagtttaaaatcattataaaagtcaagtgacttggattctattgcttgtgttagtaaagtacaaggaagcttttgttttagatatgtaagtggaaactactatgataaatgaagaaccagaatgtagcctcaccacagcatcctttatcgtggatgtataaataattgtggattggagatcatgttcatgtttacaaaattattgtttcattgattggctctggcattttattggtatctccctcttttcttgatattataagttcccactgaaaaaacaatgtgctgtgaacagttcagtttt

SEQ ID NO: 12849 - DNA, 584 bp, Oryza sativa
  Intron number 3 from transcript LOC_Os07g39740.1 (locus LO C_Os07g39740) derived from phytozome v7.0 (chr-ID Chr7; po s 23813989 to 23814572 reverse strand)
gagaggttcagtgcagccatccaggtgcagctcaatgcagtgatcacagcctagttacagtacacttaggttcattgactgattgacaaactaagaaattttgaatcttcttagaacttaattttcgagatgattttaggatcttttcatcgtagttttttttctagcatttgcttttaaaacactaataacagagatataaatgttttgtattgaaataatctttgcttgttttgtttatttttccacggcttatcagatgatcagcggccttattgtttcgcttatgtttatacttatcagtcaaattctgaattttcaaccttatatttaaagctaattttaagattttttttatcaaagtttaattttcgacctatacttttctatcgcaaagtttaattttcgacctatacttttatattgccaagaagatgtatataaaaaatttatttataaattatttttcttttgtaaatatgccgttcgaataaaacgataggactgctcatgtgtactgtacgtgctctgcttgcttggtgagtgcagaaagtgtacagcctcggagggaggtacttctgggt

SEQ ID NO: 12850 - DNA, 455 bp, Oryza sativa
  Intron number 1 from transcript LOC_Os12g05350.1 (locus LO C_Os12g05350) derived from phytozome v7.0 (chr-ID Chr12; p os 2410535 to 2410989)
atatcgaacgagtacgcagcaaggtaattggtagattggtttcttaaattgatctactaatttcgtagatatatccggcatatttctacataggtacgcgatattttatatgcaatttatcatacatattcagatcatacagcattgtcagatcaataatttattatgttttcctagagcatgtcttttatacaatatctgttgcgcgagtgtccccgatgttcaatcgactacggtctaacgctgggggctcgctttgttttcttctgtataaatcatgcttgtttacggtctacataatgtctgatatttacatctgctcgttatatcctgataatactagaagatccatgtagtttttttgagtacatactcgatattctctgctatatatcctgccttctagaaaatatttttcaggaacaattgagcactcgagtaggtcgtggtcgagt

SEQ ID NO: 12851 - DNA, 618 bp, Oryza sativa
  Intron number 2 from transcript LOC_Os08g16914.2 (locus LO C_Os08g16914) derived from phytozome v7.0 (chr-ID Chr8; po s 10361534 to 10362151 reverse strand)
cttgattcacttgtgagaatcacttctttcaacttccaacctgattttagagcaacagtgcctcaccaattgaaatcaaccgatcaacatatatgtcactggttctcccatctattagatatagttctgaatttttaaacaaaatgactatttgtgtgctgtgagtacaacaaaaatgagctcaagaaaagctatctctatcaacattagcgaaaaaaaagcacacttaaagcctttacaaaaaaaaaatatatgaagtctttacaagtgtaaacatttctgaaattgcctggtgagcgattaaaatgtttttcttgtggtgccttcagagagtttgatatgtttctatatatttttacatgtgtgccattttctgctgccccgaacattgatctgagagtaatcaaattccttgaatagtttaacttctaaatgttcaaaaataaagggagcgccatggaagtcaaattagtgaaaatcttaggtatcctgcagtgtgtatgggggcactgtgcaatatgatgttgcatgcagtatactatcattcttttaaaagtatcttctcggaataatttcttatttccaaatattctcagatacactttcaataatgtagat

SEQ ID NO: 12852 - DNA, 568 bp, Oryza sativa
  Intron number 2 from transcript LOC_Os11g39370.1 (locus LO C_Os11g39370) derived from phytozome v7.0 (chr-ID Chr11; p os 22968821 to 22969388 reverse strand)
gtatatacaatattttgctacacctgattccgaaggtaaggcctttacactttgatgtatatattttctacatcagttattcatatgtggctggcattagaagaggcaatggaatcaatctgagaattttgactgtgaactgcaagagactctggaattattgcattattgagtttttgactaacacaatatttactgagaacgctagggtgtgttatggatatgacatcttgtccttgtcatcagtcaaatgtttgactatcaactgcataacagattctagagcacttgtacttactactagcctactagaaagcacaactactactccagttatttagcacatctgcatttttctccagtgtagcaaatatgcttgctcacaattgttcataattgaacaagattgctcaaaattcttggttagataatgtactcgctctaaatccatattgcatatggggcattgaataagaagaatattaccatttccaattctttttcactgaatgtgtctcataatttgcaaatatgacgattttattttcctcatcagtcatagcattgt

SEQ ID NO: 12853 - DNA, 1027 bp, Oryza sativa
  Intron number 1 from transcript LOC_Os11g39370.1 (locus LO C_Os11g39370) derived from phytozome v7.0 (chr-ID Chr11; p os 22969512 to 22970538 reverse strand)
aggagcagcacacagtccttctccctctcttcttggtaagttcttgccactctctaatatatgtggtagtacagcaacagcaagcatggttgacttctgaatctgttctcttctaccctcttctctgcctgtttgcttcaatcacctgcctgtgtcatctggtgaatttattctatttcttctcaatttaatggttctttgagttggggaggtttatgttgggacttggggagaagaggcatcaccattggagggatggatgaagctttgctgttagctcaaacaccctgcagaacagcagaggtttctgtctgcaatctccagagctaaaatttctcggaaatcaagagagaattcagagaagagtttactttgcgcgtcttgaggttctttgcaagtagtattcagaacagggtgtgaactttgagaagctgctacgtaactgcaaagagaagaggacagcttgtctgtctctgtttttccttttgctcagtttattcccctaaatcattttgggctttttttttgagcttctaacttctccagtaatggtttagaatttacatttatttctttaagacaacctttatttcaatagtaacatacttttcatatttaaggacaaccttttagacagtttaaggtcttttggaccaccccatatttgtacaggcaatcgattacagtgtaactatagaaatccggttaggtttagtgaccgctgcaagactcatacagtcaggtgactgatcacatgttttttatatgcaagaaatcaaaaatggtttgcaacaaaaataaaatctttatctctagaaagaatcccaaacagtctgaatgttcttttaaggagattcttgccttgtttgggttaaagcacttcctttcaattttggcaggaatttatgaagattcctcaatatctgtattctcagtttactctttaagccttgtgagtctcacacaatttattttattcttcggtgatgcagctatttagtgcagacctcaaatccaaagtgcttct

SEQ ID NO: 12854 - DNA, 815 bp, Oryza sativa
  Intron number 1 from transcript LOC_Os08g42600.2 (locus LO C_Os08g42600) derived from phytozome v7.0 (chr-ID Chr8; po s 26924503 to 26925317 reverse strand)
gaggagcggttcgccgatctgtgcaaggtacggcccctcatctggtgcggccttcgtgtggttgtctcttctgtacagtgtctgctgcttttttttttctttaccctggtgattacaatttagatgaatgcttctgagtgaagaatgatgggtggtacacctttttccagtagatttgttgtttaatttggagttttctccaaatttatgttggattgggttctcgcttagttgttatcgcctttattttggaggaaaatctatgaactttctgagatttgttgtctgtttttgggattctattttctcgtgccattgatttggattgttgcaacaaatttttggatgcgctaacctttcctcttcttgtttggtgttttttgcgagtagattttggaaattttgttttactgtactctcccttttgctccaatccctttaaaatccttgatggaaaggtgcctgttgatagtatcttcgcgatgattacttccgagtccagtatttgaatgatcttctggtgataaattttgtatatgtggctaatttaccaaatttcataaaaagaatgatctttttaatggcgtgttttcttttttctgctctaataatttgggttttactgtctaactttacctttgatttaatatgaatggtgttttggtgcctgtaagaaacaatatggatgcattcagtgttcaatttcatctctgctgtctggcttgtgatgtttttctgaatattttgctcaatttctgaattctgattgctggttagcagagcaagcttgggctggacgagagcataacgaggca

SEQ ID NO: 12855 - DNA, 856 bp, Oryza sativa
  Intron number 1 from transcript LOC_Os07g48840.1 (locus LO C_Os07g48840) derived from phytozome v7.0 (chr-ID Chr7; po s 29224533 to 29225388)
gtcatccgcctcttcctcttcttcttgctccacaagtaatctcatctccctcgatctcctcttctctccatttctctccgtgtagagaaaggaggtggagacaggggttggggaacaccgccgcgtagataaggcccttcttccattcggtatgcctatcatttttcgattttgcgcaacacgtgatcaattgttctgattatatttcaaataattaatcaaattatccagctccgtaataattagggttccccactttcttcatttttttgtacactgataattgcttcaggtcaaaattgatacaacaaggcaaacacgcactatctttgcaatacattaattttaatactacacaaggcaaacggcaaacttctttattttagtaatcgtactacatttcagtgttgttctttcgatgttcttgaaaatcaccacaaatttagttttcttgaatgccagtttttagtaccgcaatccaaattcagactttcaatatcaatcatttggcaattaaaaaaaaatcacatatagatacaaagagattcattttactttgaacgctcccatatcatgatatggagctaatctgctagtcaaacacttctaaaagggattatgactgattaaggggaaatcaagattcagagccttaccaaattgtttggtgaatttgttagtgtagactatgacttcagtaatgtgcaagagtagcattaaagtagaaaagtacaacgtagagttctaacacctgtttagaccgtgctcaaatcctttcctcgttattgtggcatggtgcttatattataactgattcaatattctgaataaacctattccaggttctatcacagag

SEQ ID NO: 12856 - DNA, 691 bp, Oryza sativa
  Intron number 2 from transcript LOC_Os07g48840.1 (locus LO C_Os07g48840) derived from phytozome v7.0 (chr-ID Chr7; po s 29226340 to 29227030)
tgttttgagccctagagtgaactgtgtagcggagggaaattcatccaacttcattgttttgattaatattcagaaacatgtgacttcattatactcattttctggcagcataattacatgtatgtaatagcatggaaactggaggtggcagcagctgctatgcttgccgcttaatctcccctcctctctcccaagaggaaagaggcagcaagatgaaaagcaaccgaaaggtaaataaagtaggataactttttccatgataatatcacaaattagaacatgcttgtttcttgaatattggacaaatatcagaaaatagagtgtggtaattttagaaatgaatcaatccaacgattgcttcttgcctgttccctttgtttcacaaccacctatgggtattcaatatgctaatatttatctggcattgtttatgtgccatatatctcactgtaactgcaagatgcagagaatactatcttcctggggtggtaccttagcttttgcccagtaattttcaccgttaaccatattttcctgaccctgtttggatttgtaatgttttcaattttcctttaagagaattgaaatggttcctgtagatagtcttttctgtctctctacttgtgtgaactctgaaccaacattggtcaaacttatgcagccaatttgacgatcaagtgaaaagcttatc

SEQ ID NO: 12857 - DNA, 792 bp, Oryza sativa
  Intron number 1 from transcript LOC_Os12g20150.1 (locus LO C_Os12g20150) derived from phytozome v7.0 (chr-ID Chr12; p os 11740725 to 11741516 reverse strand)
tgccgcgggagatccgcggcctcggcggcagagaggtgatatcttgttctttttttcctcctctctcttatgctttcatgaggctgcgtgcaataaacctggtagagcgaagctctgtgtgttgggggcagttgtattgtatagtttgttccgagatgtctttcgtgttggatattatccattgcaactctagttctgtcaacatcgtacgattggaaattgctactaataaacttgtgatacagcccaatagaacaagtttatatggaaactagtaagcaacaacacaacaagtctacctaatgtaaccaagggatcaatcaaagaaatgccaaatattggaccaacgtagcggtatatgagaaaataaaagcataataaactgagatagactgcattcgttatttgtttacttaagttattatagttccttcaggatcaatgaaacatggttacacttgattgctatttaaattttgaatgagagataatgtaacgtaatttcattatctagacttctgtatactaactgactatctccatattccttgacaatctgtctgtcattattattatttttccacaatggtggtttgccttttcttttctggcttcaagtgattaactaaaattgtgaacctgaaaaggttcattttaaagagttttattgcacacatttactttccagtttacaaacttaaattttctggacaattaattggttacagttgctataatttgactgtacattgtacagaacaaaggagaaaaagagaagagattcttcaaagc

SEQ ID NO: 12858 - DNA, 377 bp, Oryza sativa
  Intron number 4 from transcript LOC_Os10g06610.1 (locus LO C_Os10g06610) derived from phytozome v7.0 (chr-ID Chr10; p os 3427292 to 3427668)
cactggaacagtaagtttgtacatattaagatccttgcttttgttgttgacactagttctgtgtactgttttctactttcacctttcattactgaactatatgtttctgaatatgctgaaatcatctttgcaattccatcaacttccattagtgtgtcatggaattttgttttgacattatttctgcgcactgttctctattttctcctttgataattgaacaatttctccttgaatatgtccaagtgacctgccagagtaaactagaaagctagatggtttcttggatctttcatgcataccagtgattctagttgccttcttatcttgaaacttttacagagttcatataagaagtttggcttacctggtggagg

SEQ ID NO: 12859 - DNA, 489 bp, Oryza sativa
  Intron number 2 from transcript LOC_Os10g35540.1 (locus LO C_Os10g35540) derived from phytozome v7.0 (chr-ID Chr10; p os 18934918 to 18935406)
tcctcgccatcctcgacgccctcgccgtgcccaaggtaagcgcctggatcagtttggctttttcacaaattttatcctctttgagttactgagtaaatgagaggcaaaattcataattggttggacaaagtttagaagtttcgatggatttttgtagtgtattgtttgagtcatggataggttgtgaccaaacaaacaaactttcaatatcgtaagggagagatttggagaggataattgataacactatcagttctaccgaattgatctgaagctggtagatgtagcaccaacaatcaagagtatattagaggcctgaaaaatgattacaagatattaaggggcacttttttttctgtataaaggatggaaggatatcaattattccctactaaaccaattcctctttttttttttattttcttgtgataacttatacggttcttcgtgtcaggcattccttgttgcaaaggattttggggccttggt

SEQ ID NO: 12860 - DNA, 802 bp, Oryza sativa
  Intron number 1 from transcript LOC_Os10g31030.1 (locus LO C_Os10g31030) derived from phytozome v7.0 (chr-ID Chr10; p os 16130249 to 16131050)
gccgcgcgtcggtcgcagtcgcggttgctccgcaggtataggttcacatgctcttacctccaatcacatgtcgcggtggatcgctggttccatgctctgaatcacttaagctcagtgtgctaattttcccacggttgtagttggagtaagttgagtaaagaacaagtactggtcggtgtgatatttaactgaagtaaatcaagcaatgaaaaggttcacctaactgtttagtctacctagctttatttagtatgaatccgggtattctatccctctaaatatggaaacggattcacataactcctaggtgtggttctgtaggtgattcgccgccatggcgtccgacgtggctagcgggcgttgatgatttacgtgatataactgcaaaaccggtagcttggttgtcattataaatttggtatcaatataattagaagtttcatgtggctatagagatggatttgattttgattcgtatttattacctcttgagatgcactcatagtgtagtggcagggttggctggcatgcaccccatccgcctgggttcgattctcctcgagcatgctcaccggaaatattttgcttctttcttcttaaaatcattgacaccaagcccttccttggtgtccaacttttttatttattagctcttctcttttttggtgatgatagcatatgtcttcaaagttgcggttagcgtttccggtcaatagggtgtccagttgtgctgcgtatgaatcccatatatggcgttgtttctgcaggaaattataaactttcctgttggcttaactctgtt

SEQ ID NO: 12861 - DNA, 857 bp, Oryza sativa
  Intron number 2 from transcript LOC_Os07g31599.3 (locus LO C_Os07g31599) derived from phytozome v7.0 (chr-ID Chr7; po s 18761402 to 18762258)
taggaagacatcattcggtgaaccgaccaaactatgtgagtagttagatgattttttaagcatgcatatgtattctagacaagttgttaggtctaatggtgctgagcatctgttaggttaggtctaatgatgtatttgataactgtgggcaagtaagttgctttaatttgaaatatcgagggagtatgtgctatagtctatcggataatttattgatgtctaaattatcgtttcttaggccaactgatactgtgataagaaaaaaaaaaagcaaaaaacacattgttcatgagtaattttgtaagttggagttttgttttggtggtgcgctttcgatatatcatattaggttactattggggctttgaatttcatgttgtgattgttccttccttactctttacttctcctatcataaaaagaaccaaatctatgtccagattcaaactcatgattgggattttttttggacaaagagtatgtgtcaacgggtgatgggatggttagcccatttgtaaaagaaggtgaactatctaagaattacatgcatgaaaattcaaggactcacagctaaagacctaaagattggagataaattacaaggattgttagatgtgaaattttggttgtaattcctagaggggaaaaatatctattgttatgtatattacgattgttaaaacctgttcttttttaattgtttgggctgcattaacaaatgtcactgtagcattagcatgggcaaattactagtttttttaagttcaatactgtacacatttgctggacataatgcatatacactgtacaaccactgtgcagagcttgctggcggcgttggatcgaccttgcctcca

SEQ ID NO: 12862 - DNA, 659 bp, Oryza sativa
  Intron number 5 from transcript LOC_Os09g29404.1 (locus LO C_Os09g29404) derived from phytozome v7.0 (chr-ID Chr9; po s 17865289 to 17865947 reverse strand)
tgatagtggaggtactgtcatagaatttttgtgggtacattttaaagtaagagtatcattctatatacatcgacaaatcactgtggataactttcttgcaacaagttgaattgagtattcatctgatacatattttgattatagttacaatgtttcatattcttcaaagtgaaacttcattttacaatgtgttcatggtatggagcccttccaccgatttgagtcctaaaggactgatttgggtgctcatctcatttatttattgttagaactcatgaccattcttttaaaaatgctcaaatttgagaggaacagtactgaaataatattcctgatttggccaaaacgttggctttgtgatgctaacttgtttatctccactaaaaggaagaagtgctgaatggtaatcttggctagttcattgcctcacttctaggatgctttcacctctgtttgtttgagtgcctgactcaatatttttgtccatctattatatagtagtcatggaaggaataatcttcacctgtttttcttgtatgtaatttgctatgcatatatgctgcatttttttttgttatttctatgcttcattaaaactgtacaaccttaaagaaatcttctctatgacttccagggcttgcctgcttctggtgttcttt

SEQ ID NO: 12863 - DNA, 610 bp, Oryza sativa
  Intron number 1 from transcript LOC_Os10g21450.1 (locus LO C_Os10g21450) derived from phytozome v7.0 (chr-ID Chr10; p os 10912748 to 10913357 reverse strand)
tttaaaatattcaggatataagtatattcaccaaggtatgtacataataggaatcaaaggaatgacaagaaagaaattaggagctaaagtgctaataaccttattagataaaagatgggacacaataaacaaagcatctttaggctatctagaaggagatatgaatgaaaatatgttgataacctatatagcgcctgatttaatgatgcctgtaaatgaattcatagataaaatgagttttggtttccaaacaaaaggatacgaagagtttaagggaacaaatttattaataagtatagaatttatagaaagattgactaatagaagtgcctccaaatacaaaatcaatgtaaatgatgtgatagaaaaaatgcattctaaaggaataaaattcatgagccctttaataatagactctgaagaaagagcaggagaaaaatggccaattagtgaatttataaaaaataaaaccttgagtcagcctgaaaacttcataagttaccaagacagcaaagggaatgttagtattagatttacaaattataaaaccagagcttcggatgatttggatgcagaatcatctgacagagatattatagataacagaaga

SEQ ID NO: 12864 - DNA, 714 bp, Oryza sativa
  Intron number 1 from transcript LOC_Os09g33970.1 (locus LO C_Os09g33970) derived from phytozome v7.0 (chr-ID Chr9; po s 20053649 to 20054362)
tcctcgacgaagaggaggaggaagaggaggagaaggttcgtgctcgtgcctcctcccgtgtcttctcgtaagggttctagtttggttttggatcgcctctcgaatataatcgctgtcgcgcgagcatattgcctccgtgtaccatgtcagtgatgaaaatcgttgaatttaagtagatacggtttacgctgtggaagagaaggcgagaagcgatttttcattgcttctatgtcgttttgatgatattttgtataatcagttttgatgatatctagattgtagaatcattagcgatttagcggtggatcgttgttgccctgtggtgaatactttctcaatctcatttaagctaccagctgaaccttcttaaggatggaccaggttttacagcatagaatctgtggtttgttttgttggtcaagaattagttgcggccttgtgtgctcgccttgtgaggggttattaaagttttatgtctagcaggcgatggcatatgcttgcatggagccatcagccatgatctcatggtaaaagaaataaaagaatatgcttccaaaaaataaaactctagctatgttctatgttttagttgtagccttattgagttataaccatataatgtgtcggcagtattgctggctaattttatgtttcatggcctcgtgtggtgatagatgactgtttaatttaatgttcttactctgctgcaggaag

SEQ ID NO: 12865 - DNA, 1003 bp, Oryza sativa
  Intron number 1 from transcript LOC_Os09g19710.1 (locus LO C_Os09g19710) derived from phytozome v7.0 (chr-ID Chr9; po s 11795114 to 11796116)
attcttcgtcggattctcctctgcctcgatcgaaggtaagaaggttttcgaggatttcttgaaggttttcatctcctctccgagtattagatggattttggtaatgcgggcacgggcctggggttctttggggggattttgtgagatggttatgcttgtgaaaaattaaagtggaagaaatattttcttcttttttgtggggtatattcagcgtgtttaaaccctactaaaaagctttggttcgagagtcgtttttgcgggtttgtgtgatggatctgtttgtttatgtagtttgggtgtgctagtttagtttgcctttaggtggccaagaaatttgcatcttggtggcgatcgtttcctttgatcccagtgttcttttagtgcgccatgccaacactcgtttgtcttgcggtgcttactgatctgatcagttggttttagtgattcgagtttttctaacggataccgctgaatgtttttttgtgacttatttttcgaggtgttgtggtgtttcatatgtatatatatattttaagtttccatgatgtattattattttgattgcatatgatccactttttttactgtctcaagcatgcgcttatttgaaataattagatgggatgagttctttgggggatgaatttgatattgtgccacgagttgatatgattgagctgttttgtggtgtctcagatttactaattttcaaagcattgagctgcattacgaactactttatatttgtcatcatgtaatgtcattctgattgggcatgattcacacttttctaactgttacttgggagttgggactgttaacttcaatctgtacaaattattgtgaagcatatcctaaaatttgtagcctcgcttttcagtgataccttcactgattttgcattgcaagcttcacttgtgagatgataaataaataaaattatactttctgcagtatctgaaccatctttcaagtttaagtcgttttcctttgcaggtaagac

SEQ ID NO: 12866 - DNA, 593 bp, Oryza sativa
  Intron number 1 from transcript LOC_Os11g39290.1 (locus LO C_Os11g39290) derived from phytozome v7.0 (chr-ID Chr11; p os 22928634 to 22929226)
gctccggtaggtgctgcatcacacgatggaggctggctccgctacccggagccatccccccaacatggactaaattatattgtgaatgcattatatgacttatttttaaggtaatgagaaatcgcaagtaccaaaatagtgctctttgaatcaaaagaattttttttttaagaatttcgtaggattcaaattctataggaattaatgttttctatgtggtcatttgattcaaaggattgaggctttccaaatcttaaaattccgatggaacggctcattgcatatagagtttgaggaaaacttagcaagagctcaaacctcttaaaaaatttacttttgagtctatcactctcattcaatttctgtgtttttcataaggttcagtcaaacgactattcctgtgttttgcatccatctgttttacacttacattcctattaaaatcctatgtttttttttctatttcttcattttttcaatcctactatctaaagcagccctcagtgtttttggaggctataaaccagtttgttcgttttaagctggcgatgtgatacatacacacaattgctgcaggtacctcatcgtaatcg

SEQ ID NO: 12867 - DNA, 990 bp, Oryza sativa
  Intron number 1 from transcript LOC_Os07g33650.2 (locus LO C_Os07g33650) derived from phytozome v7.0 (chr-ID Chr7; po s 20106986 to 20107975)
ggcagaaaggaagggacaggaaaaggggctgaaaggtttgcttgagcatagtgcatctccacaccttaaaattgctggtcaaattgtccttaaaatcgtttatatcacgcagacggcatatcgttttcgacattgccttccttaactcctgtgttaattcgaccacaactttagaacagcttgttgagatttcttaatcccagtgttgtatgtcaacattgcattgattgtagtattattatgagaagattagatactgtaacccctccagagagtgacatccattgccttctgttactggatttctgccaattcttagttagatttatggataaaaagtttttaaccaagtagacttaacaggaccaaaggttgaatttgttcacctaagaaaaatgtacaatttgttgaacaaacagcacaattcttgaatgaggagatttttagtagtcaggtttgttgtttggatatcatagtttttgaatgaggagaacatattggttggatttactgcgtggacatcacaattattgaatttggagaacaaattggttagatttgttgtgtggatatcatacttcttgaattagaagaccaaactagttgtttctttgaacaaattggttagaattattttttttttaaaaaaatcatttttcccttcatgaattaggaacagacagattgatgcccatgttaccatggtggtgtctgactcattgcagtcttatctttttacactctctagttttcccaagctgcaatcatggtggccaagtgcatgccatgatgcacctctcatataccaccatctctgcatgctcaagaacatcatgattttttgttcttcttgtcaccaactttttttttgtttttccccctaacttcttttcacccttgcaacgcacttctcactcgtagctttagttttcctcttgtcagtagcatatgtttgtttagttgtgataaattatcttttttttccagatc

SEQ ID NO: 12868 - DNA, 822 bp, Oryza sativa
  Intron number 1 from transcript LOC_Os11g16770.1 (locus LO C_Os11g16770) derived from phytozome v7.0 (chr-ID Chr11; p os 9295800 to 9296621 reverse strand)
tgaggtcgccgtcccaaccctggctgaggctgcaggtgcgtgccacacacacataatatatacataggctcactgtgaaaccggttttttcttcacaattatgataatttcattaaaaaaataattatgacaatagtcaccgcctgctcataaccaaatttccaactccaacccataagaaaataatgaccgactgcccacccagactatcctataactggcagtgaaactgtttccaaccaaaaaaaacaaaagaatcgttataggattgttcttatactgtgtccatgccaagaatctttacatttctctaatggaaatggagggctttgccctttgctctaaaaaacaatactgtgtccatgccttattttgaaacagtaaacaatttaaggagatgtttgcagtgtaggatgacttgattagtttagttttgctggactgttattcttctccattggaaagttaagtggccttttcaaaaggacaagaaaacacaagaacattaactaaaaactggaatcagctgatgattccaatagattggtgaaaactgattgttttaagatatgtctgaccatgcataatattattgtcttcaaattgtttatgtgatgaaggcaactaaatttactcttgtcgacttttgttgtaccatacatagattgtttcagttcgaactttagttactaattgttacaaatttgaactaacaaattcttttaagaggaaacatctaacacctgtttttttgttctcttgatgcaatttattgtcatccatacagccttgggagccataggtgcaattctggcagggccc

SEQ ID NO: 12869 - DNA, 778 bp, Oryza sativa
  Intron number 1 from transcript LOC_Os11g07120.1 (locus LO C_Os11g07120) derived from phytozome v7.0 (chr-ID Chr11; p os 3537046 to 3537823)
actagactgcaggctgaaggctactcttctcgctggtaaataaccttcttgaatgaatgtcgattgatcttttaatttaatttgtttatgttcatctattaattgactgctttgggggcttttgtgggatgggtctccatgtatctacaggcttgtttctgttcatgaattttatgcatatttaataccccccccctctcatgttgctttgattttttttaaagtcaaacttcttgaaagtttgatcaagtttatagaaaaatatagctaacatttatagcaccaaattagttttattaaatctaacattgaatatattttgatagtttctttgttttatgttgaaaatattgctatatttttctgcaaatttggtcaaagctaaagtagtttgatttagaaagaaagttaaaacgacttataatatgaaattgagatagtacacatatgattagaaagatactgttagatgataagaaattattgtttctttgttacctagaacttgttttgctagcttctggcttgcatcccctctttcaagtctttgacactagagcccttcttttcaatgactggtgatcatatttcttttctttttgtttttacgaaactgcgggagtcagattcatcattcattaactagtataaaaaatatatgcgtagtaaaaaaaccaaaagaaagaaaaatcataactgtatgtttctgaataagtatatctgctaactgtatgtttctgaagctacttctcaactctgattctgaagtctgaaggac

SEQ ID NO: 12870 - DNA, 680 bp, Oryza sativa
  Intron number 1 from transcript LOC_Os08g07950.1 (locus LO C_Os08g07950) derived from phytozome v7.0 (chr-ID Chr8; po s 4487216 to 4487895)
attgataggataagagactacctaaaagataaaaggtaaaccttgtaatttgtaacactgctatgtactctttactactacctctgtatttaatatgacagtatgaaactattgactttattcggtctttggtgtacaactttaaccactagttttctattagaataaaatgataatatttaacaaaattataacattgtaaaagtaattataagaagaaactattcatatgtttttaatgtttctaaatgaaatattttgagttattgatggtcaaaattttaaaagtttgaccaaataaagttgatagtgtcatatatttaaatatggtgggagtacttttctacatttcgttaaacagatcatgacatggactgcacacatttattgagcaattataattagttatctgaatatatatttacaatctactgccttttttctgttcacaaagagtgtaaatatgtgctagagactagtggcaatcctgtgcttaacttatgcttctttagtttcaaatcaagtggacttgagctagctgcaagcaaatacttttcatagaaatgatcaattgatcatctatattcaattaatttaatgctgatggcggctttatatgcttaaaagatattgatatctagctttgctaaaattctataataggtacttcattgtgattg

SEQ ID NO: 12871 - DNA, 1055 bp, Oryza sativa
  Intron number 2 from transcript LOC_Os07g40580.1 (locus LO C_Os07g40580) derived from phytozome v7.0 (chr-ID Chr7; po s 24318577 to 24319631 reverse strand)
ggtatattgttatcaagaaccgcccctgcaaggtatctgcttagatctcgattcgattcggtggttagatgcaattcttgtaattacttctggttacttttagttgttatctgtgtaatatatggtgtaatatatggttgactggtgattgttgttgtgtatctagatgataaattattgctggtttggagtgcagggtagtgggaattatgtcgtttatatacgtaacgcaaatgtgaagcttgctcgtttgccgtaggttgaactaattatttgccttgtagaagggttgtccgtagaagagccagtgttttttttcccctcagtcaaacgtttttttagtttttggggatgatttcagcgttcgatccaagccaacaccgttgtgttgtactatgtttctagccttttttctgtaaacaaccttgctactccaaaatagttcagaatgcattcattatttctgtaactaagctggttgaaaaggtggaaattctttgctaattttagacaatgtttttctagggatttggcaaggtaagaaagattatcttgctgctctaaaatagttctctgcttagtttgtgtagcatgttttggacatgagatgatctcattttcggttgactgtaatagtgtaatgagagtgtgattggtacgttaagattcatatttgtaggtaacaatgctttgtacaaaaacaaagctgttctctggcaatacaataaaaaacacacacataacatttactttgtgttaagattcatattctgttgtgcaccatgtgagagttatcagttatcacataagttcacagttgtgctcagtttacttttatatctatctccttcgtttctttacatctttttggaaaaaaaaagtgtggcttttttcaatggtgtcagtaaaacagttcttatcttgaagtctgaagctatgtggtgtttatttgtgctcattaagtataactttcttttcctgatctggttgaaaatttgaaatgaataaaacatattacaggtggtggaggtttctacctcgaagactggtaagca

SEQ ID NO: 12872 - DNA, 898 bp, Oryza sativa
  Intron number 2 from transcript LOC_Os12g04595.1 (locus LO C_Os12g04595) derived from phytozome v7.0 (chr-ID Chr12; p os 1945684 to 1946581 reverse strand)
gtgctcgacgcactcacaaggtgatacctcttttttccttttccgtgttcaatccaaatagttgaattatcacattacgtgcatatgaaagtggtggtgctttgagacatctgtggactgcaagttccctgattcatttagctaatggcaatatgtcttgattaatgtgttaattgtgagtgttttgattggtttagcaaacaacaatatatgttgattagtgtgtgagctgcgagtatgctgattcgtttagcaatgagtgatcattgatcaatgcatgttgttgcgctttgcctgatctgaatttctgctgtgtggatatgatttataatctatgtgatgatttatgcatgttcaattttatgggatttgtctgtatctgcgttttatgattccctgtaacatgagtatagctattatgtacatgaatctgggaattttgttcgaaatgcttaggtgctaagctatgattcagatttttttttatcatagttttgtaaagtatgaggaaaagttgaatcattatctatttcttgagtaaaatctcaatattcttggttaagcacctaaataccaattagaattatcatatattactatatgaattagccagtagcccagtactgctatgatgattccattagataaggtggaatctccacatgtaattctgtgatatgctttggatgatgtgtcatatatatcactggaagaaaataatcatcatacaaaatacttctgtaatgttgtacttttgactggatagactacttttggagaaaaaaaatgctgggaaactgctgcctgataatagtgtcttttttaccttcaaaccatgttgatttcttttatttgtttctcagataccagtgggtaccagacactcaccttgcaaaat

SEQ ID NO: 12873 - DNA, 684 bp, Oryza sativa
  Intron number 1 from transcript LOC_Os08g31330.1 (locus LO C_Os08g31330) derived from phytozome v7.0 (chr-ID Chr8; po s 19372251 to 19372934 reverse strand)
gcggtggtcagcgcggcgtggagacggccatggccgagctaacggatggcgccgtcgccgttccctgttgctgtcgcctgagagagaggaagagcagacctgacatgtggacccaagggcacttttgacatttcacacgatttctctctcctcctcacctgaaaattattattttaatggttgcggtgtccaccagccaatatccaacttttcagagtgtcttcccccaaaagtcacttcgcgcggtgtcctatggctaaaaccgcgaagtcacgatatcctgtagcaaaatttgccttatttttatagctaacactagcaaacaatttagtttgtctgtgtcaaaaatttttctttacccaccactagatatatagttgcgtatatagagcttacaatagaaaaaaaaatgcatattcattatgaaccttcccctttcgagattgacaataatatattttttttttagataatggaatgtaacaacccgggctttactcaaaaagttacagccaattattacataagactggcagcaagttcaatgattttatcctaagagggtagattaactttaataaactcagttctttcatcaataccgacatactacatgtgtgctctacaactgcctgtcacagtcatcaaggccactgatactgcaagaaagaattgcctttggag

SEQ ID NO: 12874 - DNA, 681 bp, Oryza sativa
  Intron number 1 from transcript LOC_Os08g09620.1 (locus LO C_Os08g09620) derived from phytozome v7.0 (chr-ID Chr8; po s 5566385 to 5567065 reverse strand)
gtggacgacggcttcctcctcttccttggcgagacgtgagattttttgaatttgattcccccacgcactctgattttttggattcttctttatactgaatattcgtgtttgctttaatttggttgaaattggccgtatagccggtacggatttgaattattttgatagggaccgcccctcgatatgcaatcgcgtgtgaggcgttcgattgtgctcttgatttaatgtttagtgcctcagttctgttgaattaattgcattagaaattttattatttatttacatggttctatatttctattcgtacagtggctacatattcccaatctccttattttgcctctacagcaaagttcacaagaggaaacgctgtcctaaaaacgtagcaaccatttgtgactggaggttttgggtccttttttttgtcacatttaaaaaagggaaactcttttaatccctcgagaggaagtcccttatttcttgtgcgccatccaaaattatttaaaaaattcaaaaaacatgagatgataaattaatatgtaatatatcactgcaaattaaatgcaaattttataagatgcaacaaaaaagacaaaagtaaaatgtatgaaggtcattcaacttgtttaggtgtatcatataggtcactttatttttaaaatgcatatctgcaggtcacta

SEQ ID NO: 12875 - DNA, 910 bp, Oryza sativa
  Intron number 1 from transcript LOC_Os09g11660.1 (locus LO C_Os09g11660) derived from phytozome v7.0 (chr-ID Chr9; po s 6505170 to 6506079 reverse strand)
gaagcaagagtagcagtgagagagagaactgtcaccgatgattatttcggaatatttgtgcatcctgttcatggtgatcaggaggtggattctcgtaaggctaatcgccatgaagcagatcattcagaaaccgatagcgagagaactggaagtgctggctttgggaagatcgcaaatagtgcaggcaattctcgccatttctcatatgtagattctgggttgagcccagaagaaaaaaagacagaaaagtgaaaggtttcaacctgaggttcgtgaattcctatcatatcctgattttttttgtgtgtccatgatctttttatagttcatcaaacaaaaggaattgcaatgcattagtaatgatgagcatatcaaacaaatggtgctttatctcagttattctcgcaatccagttcaatgtgatctcctgggaaaatttttttttactagaaatgatcatatcagttctggttcagccatagcggcaagcaaaacagaagtaagaaaagcagaaaggctagctacactggctttaaacttggacatcaccagctattgcagcccattagctacacaaaagtactagacagagaagcaaatctcctgggaaataagctactctaatctattaattttgatttcactttttctctaaaactaacacgacatgattatgctctgtggctttttttttacttccctgattatttctgttaaactgtcctgcaatctgacatctatttcaacatctttattacatatgtaaatatagaaaagatacaattgatgaaatttcaagaaaatcatatgcactcaggtgtagagcagcacagtgatgtttgagccatatatttcctatgacattaattaatttaaaacattcacgaaaccttgtattgaaggacggttg

SEQ ID NO: 12876 - DNA, 405 bp, Oryza sativa
  Intron number 4 from transcript LOC_Os10g20380.1 (locus LO C_Os10g20380) derived from phytozome v7.0 (chr-ID Chr10; p os 10171545 to 10171949 reverse strand)
taggtgtagtattctgcaatgaagatgtactcaacgcggttctttaataagagtcagtgtgttgcaagcggttatctagcataaaaaagaattattagctctctcgctcgcgaacaaatttcctgcctcaaaatagctgaattgaggttcttcatcttaaaaatttcgaaatcaattctctattaatcgactattatagttgaattgtaaagtcatagatgtcactatactctatactatcaaacataatttcagtcatttgaattgaatttgaaaaaaagaaaatgtatacaaaaggacatccactcaatggatcttaattagggaatcccacttcggtttgtatcatgtattcagtggaacttcggtttaattttgtttcatttgtccaattttcaggttatc

SEQ ID NO: 12877 - DNA, 452 bp, Oryza sativa
  Intron number 2 from transcript LOC_Os07g36240.1 (locus LO C_Os07g36240) derived from phytozome v7.0 (chr-ID Chr7; po s 21657072 to 21657523 reverse strand)
acctgtgtaagatttgtatgggaaaaggtggtttgtcatggctaggtgatgagcatctttggcccctctcctctcctctgccaccctgccaaatcctactgcatctttgattcatccatctgtgactgtgtgtgactctctctctctctgtgtacagcaccaggagatgtttcttcttagataatgataaaaactggggacaatccactcataaattaaccaacagggacagtactgctatacagttcgggcaaggacatgctttgtgttttatttccatggaaggacacgtaaaaccatgtgcaattaactcgtgttaattactaacccatatgggttaaggacgcttctttggtgtgaagatcataaatggccaggtcatgtcatgtgccgttgtgtttcttttttttttttcagaagttggatttggattttaaacctgtggtgagcaa

SEQ ID NO: 12878 - DNA, 834 bp, Oryza sativa
  Intron number 1 from transcript LOC_Os11g05090.1 (locus LO C_Os11g05090) derived from phytozome v7.0 (chr-ID Chr11; p os 2225936 to 2226769)
ggcacccgccgccgccgccgatcccgcctcctctggtgagcctcccttttctctcgcctgccccactctaccccgtaccagccccgcgtggctattgctctgtggatgtgctttgtttctgaatttcggtgtagaatgttctttttctttttgttgggatccaaaaggaaggcgtatagattatgtgcttggattagtttgagctcccgagcacgcaggcagaattcaaatcgttttgcagtttccaccttgatacaagtaccccaaatgatgctcaaatcaaatgctaaattgtactggtagacctaatagtgaaattaattatgacatggcatccctttctccctttgttttgatgaatccggagaaacaagttcaagtataaatcgatttctgaatttgcttcaactgtatagaacgatacagttgatttctgtataggtctacaggaacaatcagtaaccatatggattatgtctattgtcctttttttctctggcctgctttaaaacaattcacttccaacagaaatctggaaaagaaaacccctgcatgcctggaggctggagtcctaagaggagcttaaatggttcggcgtgctacatgatagtggatactagacagcgaaaaatgtagctcacgttgtccctttccttctaatcaacaaacacgcactattggaaactgaacattggatatagtacttcgaccctacattacaacatgaccagtatagaaccagaatttgtattaaaatagggagtactttattaaacatgcttcaatttccctttgttcttaacccgtatcctggtttttcaggttcaagtgata

SEQ ID NO: 12879 - DNA, 800 bp, Oryza sativa
  Intron number 1 from transcript LOC_Os10g07210.1 (locus LO C_Os10g07210) derived from phytozome v7.0 (chr-ID Chr10; p os 3785289 to 3786088 reverse strand)
tgtcgccattcagcatttcacccgttggtgagttatttgtcacattgtcattgcaccatgaatggcacacttttatttatttatgcctttcgaaagaattacgtttacacactatataccattacttcctatgtctgcaaatataatatatgtttagtttttgtgttatgaggtttataaagttattggaatgcatggtattttctcaccctgaaaaaacttaatgccgttatgacatggaatgatcttcaaggacaatattcaaatagttatttctgataaatcggcagaaaacatttagtaagaattatcactagtttatttatttgaagtgatatctgtagtcttattacaacaaaaaaaatgtgttataagtttccctcaatagtttaccttgttgggttgaatatgattttttaaattaaagaaaatatgtattttagactatgttttaagatacttaaaacaaaaaaagctaagatatggaggcataaaaatacaaatatctaataagaactgcaactaagaacccataaaaattggaactgctgttttaggctaggatgcatggcactattgtgtaagtttggattcatggccaactcatagatgtattaattagaaagtccattaaccagttcacaaatcaattaatgacaaaactatatatatttgctgtaaacaacacatacgcaacacatgaagggaaaaaagggaatgaattatccattaatttggttatttgatttccaaatgcatgtgaagttctggtgaacccggtgccggtggacggcgagcgg

SEQ ID NO: 12880 - DNA, 572 bp, Oryza sativa
  Intron number 2 from transcript LOC_Os08g05470.1 (locus LO C_Os08g05470) derived from phytozome v7.0 (chr-ID Chr8; po s 2909530 to 2910101 reverse strand)
tccgtgagcttcacatctgtgagcattattctgagtattttgatctagaccattcttccttcatattgtcccatctgaaaatactgcgtcttcgtaatgttaccatcagtgacctctttatttagaagcttttttctggctgtccagcattgcaagatcttgtgatgatagattgttgcgtgtatgcaaccagattttcttccacctctttgaagaatttaacctttatctcacatagccctgacaatggtgattctgttcacgatgattataaagatcttgtgatagataccccgagccttgtttcactccacctggagtgccttccctttttagctccttgccttgtgaatgtatcatccgtggcaaaagcctacattcgccttgatgatatgtccttcccatgttttgatacgaaatacaacatcctcagtggtttgtcaaatgtaacaaaattgaagttgctaaatgaagaatacgatgtatgatctgtgctctagctttgccatgattttcttttgtttttcatgatctatagctgatgtctctagttctctatatgccattgcagg

SEQ ID NO: 12881 - DNA, 814 bp, Oryza sativa
  Intron number 1 from transcript LOC_Os07g23169.1 (locus LO C_Os07g23169) derived from phytozome v7.0 (chr-ID Chr7; po s 13066016 to 13066829 reverse strand)
cggcaagtttttcaaggtttcaatctccgctctcctccctgttaccctgcgcagatctgtcgtctactttttttttccggactgcgcaaatcgttaggaattaggatttctattgtgcgagatagatgttcttcgtcgtggagacctccagtcctccacacttgttgaagctgcgttgttgttgttgtgatgtgagctaggtaggcaggagatcgagggaatgacagtgccaccgtgttccactgtttctcgaggcatgaaattagaacggaactccccatggtaatgcaatcccttgcatagatcgacacgatggcctgtaataaattccatacatttgttaccagatcgtccaatcggagatgatggtttggaataatatgctgctctgtttattctcccatgttattcatggcttgaggggcatatatcatgatggatattacgggccttgtggacctcttcgcagcgcagcatcttgttcgtatgagttttgactctttgagtcctacactagtaactcataccacagggttgctatttacatcaatcgtgtttcctttgtgttaggtgatctagtgtttttctccacattttccacagtttgctgctattgtgcttgggtacaatgatatcaagaaaatgtgacctagactttttctgtgaataggtaaggataatatgaattgatgtagtaagacactataactaaattttaaggaaacaaataagtacttttaaggaaacaagtaactaacctgatcatctcattttgttaggaaagaaggtatttgctaaaggaatttccagaact

SEQ ID NO: 12882 - DNA, 721 bp, Oryza sativa
  Intron number 3 from transcript LOC_Os07g44760.1 (locus LO C_Os07g44760) derived from phytozome v7.0 (chr-ID Chr7; po s 26714654 to 26715374 reverse strand)
gtctaccatctcccaatatttcactacagctgcaggtgattaattaattcttggcctgttctttctgcttattgcttttcttttcggtaactttgtgttgcatatgacagtaaacctgattcaaagttgtgattgctcatatattttaaacctgtgtggctgctgctatagtgctagttggacttgttagtttaggctgtaattattttgaacctcgctagactctttacccctctaattatggaagccgcctttggtgagattctagacaagttatagagtacagttccagataagatgtactccagagtacatgaaatgcaagctatgtggaacacaaacccagccaaatgcaactgcattttggattctagattgccttcatatcaaaattttcttgtcagtgcacgctatatcaagaacatgcacataattaaacaaagtgagcctttattaaaagaaattgtcagaaatgaaaacagaaacaagatttctgcccccatcaaagtggggagagagaagaccactttaggtgctcttgcattttttaaacattcttgaactaaattggtttatgctcttgtaggttttctttttgtcactctcatacaaatgtacctacatttgtgtgtaggctatatgcactaactcatgggccctttgttttgctgttttactgggtgcaggtgtaaagggaaacctgaagagacctttgaaattt

SEQ ID NO: 12883 - DNA, 623 bp, Oryza sativa
  Intron number 1 from transcript LOC_Os11g14910.1 (locus LO C_Os11g14910) derived from phytozome v7.0 (chr-ID Chr11; p os 8383448 to 8384070 reverse strand)
ccgcggagatagccgaagacttcgtgttaggagaggtacatagataagtaattgttcttgtcaaaaattaataaattctcctatatatataacacctttataaaacttttgaaatctttttttggtacataaaagataaaaaattgtaagcatagatttgtatcgtaaaatatttttataatcctataagcttatctgaataaaacttatgatccaaaccacacatgaaaaatacaaagaagtcaaaaagttatatacaatgatagtagtgaacctagggttcacggttttggaaaccaccaaaatttcataattttcgtgaatttcagacttttgttacatgaaattatttgaaattttaacaaactcctacttaattcaaatatattttcagaaaatatcacataaatttggaaaaccctaaaatttcggtcgagatggttattgcttgctaggaggtcagaaattactgaaatttcaatccctgggtgaaactcgcctttttaaaaaagaggggggggggtacagtggcttctacatgaagactttgcactgactttgttatattattttgagagaaaaattgggctgacttgtgctggtgatggtgggattgacaggcc

SEQ ID NO: 12884 - DNA, 743 bp, Oryza sativa
  Intron number 1 from transcript LOC_Os08g06760.1 (locus LO C_Os08g06760) derived from phytozome v7.0 (chr-ID Chr8; po s 3777860 to 3778602)
tcgaggcctctgtgttggggttagaaataagaaattttggaatccaacactgagtcacacgaccaatagaaccagtaggtacatatgcactgacaaaatcagaatcagacttagctgaaaacttaccttttggtttcacaaaagtccgatttgaagtatgcgaaaaactgtcccgaggccggtctgaccgcccgttcaactgcggtctaaccgtgctcctcgaacaaaaacccgatttttgccaccgtcgtttcgcaaaagcaatttctctttcctttttctgtttgcgggcaagtcgaaaataaaaaccaaccaaatgtccatcttttccgcaaaaagaacaagggtacttctcacgacaagtttgtgaagtagatggttttgaaatcaatgattttgcatcaacagaaggttttgcattcacaacatttgacttcgaagaagatgcattcaaagaagacatgatgccagcagatttaaacacagtgttctcaggctcagtttttgtgtttttggtgttctctaccattcaccccccctctagtactgctacacctttttttttgtgtgttattttcatttcaagaaatttagtaatttttgtcttgtgaaaaaaatacattccagttttgtgccttaagcaacgctccgttattataacaatccacaactctctctctctatataaatattaatgtgtatacacaggcggacgacgagatttggaacaaaaggcaaatcgg

SEQ ID NO: 12885 - DNA, 901 bp, Oryza sativa
  Intron number 1 from transcript LOC_Os09g21660.1 (locus LO C_Os09g21660) derived from phytozome v7.0 (chr-ID Chr9; po s 13116768 to 13117668 reverse strand)
ctaggccactggctagctgctgtcgacgcgtaaaggtatggcatcaaacatccgactacttcatactaagtaatatcgttacttgggccgagtttagtttcgaattttttctttaaacttttctattacatcaaaatttttctatacacaaacttttaacttttccatcgtatcgttccaatttcaatcaaactttcaattttaacgtgaactaaacacacccttactctatccctttccaaaataaaccatacaagacatccctactatgctgtcatatctcatattaaaattatagatttatttattttaaaacgaagagaatatgcagttagttagccaataaattaaatatttattagagatttcttttactacattattttatcattggtattaagctacagagtacttattaatttatttcttaaaatatttaatttattttttctaatcaaatagataatccattttttttctaatcaaatagataatccacggtagtaatcaggcgaataatctttttctaaggggcccgtagtttggtttggtcttttatgtgtttaattggatgttatttttactcagtaaattcattctatgtttattgcgtttgtacctacgtgttgtttttaataaaatctggccagtgtgtctttgctgtcctgacggaaaaagaaaaaataaaaacaataagaatccttaaattgtttattttccttttaaaatacaattcaaccttttttttgttagtaagagcatgttgtctaaccctcttatttattcaatgatattagcacacttggctcatggtagctcgttctttttttttttaaaaaaagaaaaacaaagcagtctaacctttcaataaatttctgcagcactgtcacagggaaaaaaa

SEQ ID NO: 12886 - DNA, 933 bp, Oryza sativa
  Intron number 2 from transcript LOC_Os09g15320.1 (locus LO C_Os09g15320) derived from phytozome v7.0 (chr-ID Chr9; po s 9358786 to 9359718)
gaagcaaagtccaggagaattacgtctccataaaggtttgtttttgcagaagtttttttttattgtattacttgtgttatttggtttctagctttctgatattatactattcaatgtgtgctgattagtgctagattgaacttctctttcttgctaatttatgtatttacatctctagaactgtgtcatacaaatgaacatgcattaaacaaggatctaaatgctaactattatctatatatgaaatgtccgtgaatgtacaaactatgttgtacttttgtcaccatattggttgagcgtgtacttagctttattggccgctcttctatagaaatatggaccttgtggggagttggagggggcgaatgaggcggttagggataggacatgcagcgtggtgtgacttgggagtagtgggcactagccagtactaaacaggatgttggtgggcttgagacaaagggtgggctgtgggtgagtgggctgatagtatcttgctggcccacacaagaacatgctgctacatgtgacaaccatgacaacatcatgacttctacttagtatgtgttaataaagagaaagatccaaatgtccaattttaatttttactaaatctgcattttcaactaaaatctaattaacgttatttcaactcaaattgaacatgtggcacacatataattcgcttctgaaataattccataatgatgtttagatatgttgattacactattgctagaaacctatctttttgtccaggctcctatttaaatattaacataataggcatgactctcactgtctttggatctttttatgtgatggaaatagttcctttttcgttagtatagtttttccaaatatggatctcgctgactattgatattgtatcttacagacattgctgagcttaatcttccaaagaaaaccaac

SEQ ID NO: 12887 - DNA, 929 bp, Oryza sativa
  Intron number 1 from transcript LOC_Os09g39880.1 (locus LO C_Os09g39880) derived from phytozome v7.0 (chr-ID Chr9; po s 22865503 to 22866431 reverse strand)
aaagtggaggtagttgtgggccgtctcatcagaaggtgactcggacggcaactatacaaatctccgtccatttatgaaaagggggggtaagtccccacaaaaaaagagagaaatggtgcatgtggtatccccttaagatataaaaggaggaccttgcccactgagaggggggactggacttttccagattagaaacccagaacaagggagaggctggctgatactttgtagctccttcatacacagatctcccaaaacacaggagtagggtattacgcttctcagcggcccgaacctgtatacatcgcccgtgtcttgtgtgtttcctgtctcgcgagccttccacatacagagagcttagaatctctccctgagtccccggccgaaccggcaaaggggggcctgcgcggtctcccggtgaggagccccacgctccgtcaacaccgcaaatcgttaggtgatcgtgtgttggccatgaaaaagcatcaacatattttggcgactctgctagggacgagaatttcggtcatattaatttgaccgaaatcaatcctgtaccatcgatctattcggctgtagttcggccgaatattttgatctactatttggtttttgtcgtagaatctttcggccataatctatctgctattcttctcatgcgcgcgctgacggttatctgatcaatctgacgcgattgatcgttgccgtgctggagccacgccgatctggaattctgctagccgcccagtcaccgcttgagataaagtgtacgctaatctagaaacacaacagcagcacacttgcattaacagaagggaagaaagaagccatcaggtcagtgcttgtctgctttttattttgataaaatttagttgatgtacagatcaattgcacaaaaaataaataaataaagacttattggaaaatac

SEQ ID NO: 12888 - DNA, 782 bp, Oryza sativa
  Intron number 1 from transcript LOC_Os10g02220.1 (locus LO C_Os10g02220) derived from phytozome v7.0 (chr-ID Chr10; p os 774464 to 775245 reverse strand)
cttctgccctgccctccattgccccctctcctcaggtttctctctttctctctctaccgttgggctcagagtttatttagttcttctgcacttttttggtaggattctatctgtttcagagcattttttaggtatttatatatatctctatgcaagttgcaagcaaatctttcttcttttgtggtattagttctacacctgaacttttttatggatgcaaaaaaagatatcagcatcgaaggaagcagtcttgttctttatgagtagggagctcatttcccccaggttaaattgtgggatggatcaaataattcagggctaatttttgttctgaacttgatttcgtagttttttgtgtattcgcattcaagattgaataggataagaaataggggtatctttgattctaaatatcgtagtcaaagattctagctgctggcaaatatatatggatggaagaaaaactataatatatgatttcttccttccctgcaaagtagttaatttgaccccccaaaaaagttgaacttatctttgttatcattaaatttttaagttccaagctgacagaatatggtgtttgcttgcaagaaattagtcgttcacaatatatgcagtcaatagtgttacatatcttctaatatcgaaattgcgtgatggcgttattctaagacgaaaatcggatatgagaaatctatcagaaaagaagtgtgagtcatgatacaatttgctccatataatcttcttgactttcttacattttcctatattatcttgcccag

SEQ ID NO: 12889 - DNA, 695 bp, Oryza sativa
  Intron number 1 from transcript LOC_Os08g35870.2 (locus LO C_Os08g35870) derived from phytozome v7.0 (chr-ID Chr8; po s 22629612 to 22630306 reverse strand)
cgggtaagtattctactacttttttcatggctgacgtccattgtagattaatctctctaacagattgtgtttaattaagtgaccgggatttataccatagaatgatagaatatggctatgtagttgtttactgccaaattgctaattgcagcagggggaaaggaaaaagaaagaggatggtttttattcatagaagagacaattgtgggatcacacttcattcttgacagagcaattgccattctagaatatttccaacttcttgttcccaccatgatttccatcagtaaagttcatagtaaaattagcaaatgcagaaggaaaatgtgcaacattattgtaggaactgaacaatatcactgcaatattactttttgtgcaaaccttttgttcattttgatttcacatgtattgtctaataccattcttttttcctgtttaagtcaactgaagttgatgtggttgagcaactgccattcttgtttgagaaacttaggagcttagtcatcagtgttaatttttgtagaatgtcccacattttgtttatgttctgtctacttagaagtgctcctgttcttgaagaacttgatgttttggtaatgttaaatgatcacttccaaattcattgtgccaaactgcctatacttgtttcaaggtgatgatactgtttgtatttcctttatagggacaaggcg

SEQ ID NO: 12890 - DNA, 1041 bp, Oryza sativa
  Intron number 2 from transcript LOC_Os08g33120.1 (locus LO C_Os08g33120) derived from phytozome v7.0 (chr-ID Chr8; po s 20579208 to 20580248 reverse strand)
ttaactcgcggccatcagcgcgcactattgctaaggcaaggccaccgaaactgacgctgtgtttttgttcatggtcagatttctcctgaatacgctaaaaaaaaataaattactgaatgaatgaagagagagcatctctaagattttgtacaatgtggaggggcagaagttatcactaatggagcgagcctttgtcgagttggatttggctagagcatctctctatcatgtggaggtggaggagaggaagaagtagctttgctattagtctttccttttttagaggagaaggcagtggttttgccgatcggttaacgaggaaatgagattacagggagctggcccaactagggtgacagcccaaagtttttacaatttgatgttcctagagaactcaaggggaaccaatgccacgctagtgaatgctctcctcctttgctgttaatctcttgtgaaaaactttgattgggtagatcatttctaaggtttcatttatggagtggcagaaataactggtggatacatctagtgggaactttgaaggacagcaactgctcttcgatcaaatggatcgaaataaatggaaaaggaggtttgtcacacatatggatcgaaccaaatgaaaagaaaaaaaaagaagtttgtggtattcttgcaattcaatatataatctgcatgtggtgccgaaggaaggatcttcattgatccttgtgcaatacctggaacttcaatgcagctctcatctgacagctttgggatctgctatggtgaagtgcttctaggatgtctccagagaaaatgctctagccatttatctactccacttgtgatatttgtggaactctcttcctctccattttaagttaatgcagcattttcatagtcaagctgcttatttctgctctaccataaagattgatattactaatgatagttgccatgatcatacagaacagtttgaggtgatatgcttctgtgatgacacattttctcacatgctggatgtttggccattttcagtcttttagcagaaccaaagac

SEQ ID NO: 12891 - DNA, 517 bp, Oryza sativa
  Intron number 3 from transcript LOC_Os11g04980.1 (locus LO C_Os11g04980) derived from phytozome v7.0 (chr-ID Chr11; p os 2135594 to 2136110 reverse strand)
ataatttcgtgtaagaatcctcgaaatctcatttgagcatccggcttttatttcttaatattattctcaacttggcgaagtctcagttatttacaaaatgttatgctatgatttatcaaattcttgttttgaattgtcagcaaacatgtgagtgcacaaacatagagttaagcaaaatgaacgctagttctgttttccctaggatgaattgtatcaggaggattcttaggaaaatctgattacataaaaagaattattggcaagggaagctgttctttaagctattttattgaaaccttggagccggaaaatgtttgtatctataagggaaaagtgagttaacctttatctattgttagatccacagcctgaatgcagatggtttttatctgatggttttatgaaagctgataaatttagatctgttgcaggctacatgctttacaagaaaattattattcttcaaatttaagttctgtgctaagttctgaggcaatataccccaaattgcgcaggt

SEQ ID NO: 12892 - DNA, 591 bp, Oryza sativa
  Intron number 1 from transcript LOC_Os11g04980.1 (locus LO C_Os11g04980) derived from phytozome v7.0 (chr-ID Chr11; p os 2136275 to 2136865 reverse strand)
cgccgccaaccccaccgccggcgagtacgcgcacggtatgtcgtatcttcagtcccgtgtggtgatgcccgcgattcggatctctttggggttggattcccagctggtcgagcagactagcacttttgcttttagataataatctaaaattgtttctgattcccaaacggtggtggtaatacgcgtcgcaacactgtgttcatcggatttagttatggtcgtgtggagaggtttcgcttttctgaatttgtgctgccgagtccgcgcatcagttccatacttccgttgcttagctcggtagtatccttctcgctattggattagagtaatcgcttctaaagctccctttatatatctaaaaaattaaaaatatttagagtattcgcttgtgtgctgaataaaggtaaaagggatgaggccttttcttcctttttttagtatgccggcacacgaaagttgtggacttgtggattccccaactactgcatgtttgatttatctttcttgacaaaacagcctttttttagtttgtaactcaatgtcatagcttctccagtgcagggctacagtgctgtgctccctgagaagttg

SEQ ID NO: 12893 - DNA, 187 bp, Oryza sativa
  Intron number 1 from transcript LOC_Os12g15980.1 (locus LO C_Os12g15980) derived from phytozome v7.0 (chr-ID Chr12; p os 9104217 to 9104403 reverse strand)
attgaggtgcttcttctatcttggctgtggggggggggctaggatatctgcaataatttttccgcatttaatttgtgcagcatttgattatttttttaatgattgttgccaatttattcacatgcttacaacttttgtgtttattattgtagtaccctcgacaaactagacgaaagaagtgtgcgac

SEQ ID NO: 12894 - DNA, 502 bp, Oryza sativa
  Intron number 2 from transcript LOC_Os10g30910.2 (locus LO C_Os10g30910) derived from phytozome v7.0 (chr-ID Chr10; p os 16051895 to 16052396)
tcctgatatatctgattcttttctggacactttatgtgagtaccaaatacattgtcttatgtgatgattaacacctttgaggtcttaaataactttttgtataattgtattcagataatcctgcatgcatggttaattgcaagataaatttgttaaatgagtaatagatatacgatttaagaatattgtctttcaaattgggaatggagtatactatgtagttctcaacccaataataattagtgttatattttatatgtgaaaatccattacaattccttgcaaataaaagagaactgagaaaataaataaaccacatgacagataggcatgattaggagttcattagctccataaaaaaagttcattttgagggcatttttctagtgagttgttcttttggttcttcttattggatccttattatcaatgtttagataactttctgattaaaccaattttgacaggaaggttctttgttgcagtatcaaactttctcgtt

SEQ ID NO: 12895 - DNA, 1032 bp, Oryza sativa
  Intron number 1 from transcript LOC_Os07g47090.2 (locus LO C_Os07g47090) derived from phytozome v7.0 (chr-ID Chr7; po s 28147575 to 28148606 reverse strand)
agagagagagagagggccgcggccacacgacacaggtgcggtggtttccgtctccgtttctctccgaatcgattactcctctcttcgattcgatccttcgtgttcttggttgctgctgggtatgcttgttcttcatcgtggggtgcgacatggcgatgcgttttcttcttcttcttttttttgttgcgtttgaggaatttcagctttctctgtctccgtttcgatctcgtgtttgcgagagattttcgtcttttttttcctttcccccgcggcttccctttttgcgagatacttacttactacaactctgttcttgataatacggagtaactctgtttctttcttttattactcaagtttttttagttcatgtttgtctcagtgtttaatttgattgacggcaaaggtgttaaaattaaattaaaaacacgctccttctcgtcagtaaatgatgtgctcatgatgttttcattttttttttgactgatttggcgatttcaatctatgctcctaagaaattgaaaagttccgtttttcatattagagatctctggttcagatgcctttttttaataaaaaaaacaagattttctactgtgcacaacatgaatccccgtgcttccgatttccttgcgctgtaatggttaagttttgtgcttgtagttccatgttattcaagaatcaagagaaagtctcagtcagctatcagtccacttcaagtcatcctgtttctcctatatggttgcatttcataaaaattgtctaaactttttttttccttttctaaatcacatatccagagagaattattataaatcagtgtatggtttgtctccgtggtgaaatatctatgtaaaagtaacgcttgatattaagataacctttgtactctccttaggtcttattagctcctaacttgtttatctttgtcatggtcttataaagctagtttttcttttcatatgttgtattatcactaatttttattttgtttcagtgattgctgcaggtattataattaggtaagtgagg

SEQ ID NO: 12896 - DNA, 765 bp, Oryza sativa
  Intron number 1 from transcript LOC_Os08g01290.6 (locus LO C_Os08g01290) derived from phytozome v7.0 (chr-ID Chr8; po s 186426 to 187190)
tttctgaataagttggggagcttgatttggagagggtaagatacggatgttccttttccttcttccgcctgattaattgattccatccctaccatctcctcctccgtctttcaggagaaattctgttttggttcctcttctcttcttgtgtccaatttggttttgcacttcgcatagaaaaatacagaaacatttatatttatccaattcatttctctagctactcaaacagcgcttcgcttctctaccctaccccttgtgcaaagttcttgcagatcttagaatttctcctcaccaacataggacatatgcaatctattgcacatcacaaagttgggataacaagagccaaccttttatcctctctagtctcagcagataaggggtcaaaattttacaacgctggtgtatgatgtaattagattatttgtaattaacgcggccttttgttggcctttcaccatcacggagttggtcgcctacgttgagatcttgtattaagtttgtgacaataacttgtactcactaaccgcggtagcccaccactttagactattcaaatgggaatggtatgctctagagtaggcttgacttaatctacatgattggattatttgtcctggattccttgttgaatgctactaatcatcttccatggtggatgctttagttttattccatggcactaactgctttgtggtcttcattgctctgacatcaccgagtaatcacttttgtccttctcaggttacttttttgggggtg

SEQ ID NO: 12897 - DNA, 1070 bp, Oryza sativa
  Intron number 1 from transcript LOC_Os07g14500.1 (locus LO C_Os07g14500) derived from phytozome v7.0 (chr-ID Chr7; po s 8258150 to 8259219)
tgggcgccgattctctggtgaccaaacagcggcaagtaagttggccagacgtgtcccacaatatgactcatctatagatggtggcggttggcaatgaagaaaacctgaatagcaggaacaacaatgacgtggtcccgacacagagagaaatgacaacgacgagctctggtggtgaacgcacaatgaagaaaaccagaatagcaagaacaacaacgacatggtccgacggagagagaaacgacaatgacgaactctggtggtgaacccgggcgggtgagtgcatcaaaacgcgttctcagacgaggggattccattttctttgaacacgcaagagggagggaatgcaggggagaagaggggcactgggaagagcaatgaagaaaaccaaaatagtaggaacaacaacgacatggtcccgacggagagagaaacaacaatgacgagctctggtggtgaacgtgcgcaagtgagtgcgtcaaaacgcattcccagacgaggcggttccgttttcgtcgaacgcgcaggagggaaggaacgcaggggagaggaggtgcgacggggaggagggggccaaagaggaaaagggttgtgagggggagaaggtctgcgggtgaagggggagggcacacaacgggggtagatcggacgattttttggatcacgagggagagagatggaggccaccaggaggagggagcggggagcggggatcgggaggaggaggcggaagcgcagcaagagagggagtcgcgggagggggacggacgaaaggggcacacagaaaccttgcatattttttaattaggtatagatttgaagcaacatgtattgttgtgctgttgaaaacatatcttgttctttattgttgtgcactagtatattgcaccatatgaacaatgatctatatctactaaagtttactttttatatattacggtaaacctgcatactaatatttaccaataccaatggaaatggttagtaataaacccctaccactaagtttgataatatattttgtattcttttatgcaggagttcggttaaagtttgcacttaacgactgtcaa

SEQ ID NO: 12898 - DNA, 787 bp, Oryza sativa
  Intron number 2 from transcript LOC_Os09g27420.1 (locus LO C_Os09g27420) derived from phytozome v7.0 (chr-ID Chr9; po s 16654417 to 16655203)
tgtgccaggcgctgggtgcgtttcttgataaaaaggtgagaggctttccatgccactttcgcttgttctataatcgacagggtatcttggttacttattggttatagataaagtttgtgattggtgttgaggtaaacaatcagtttgcttggcacaatagtatcagcctgtgagctttgttgattagatttaagtctttttatgctgtcgtagtagcacactagcacctgtatattggatgcaggcactgtcctttttaaattctgcagtggtctagtggaatcaagaattctgtcagtttggtttgatttatttgtcaaacttattaatatcaaatcttcattggtgcattgtcagaactccatggtagaactgaactctctgtgtttatttatatttgcctgcaagagtcatgttgataaattctctctcaccaagcaattttcaggaaaaacaaaatcctaatgtttaaatacttgatacaatgctctgttctgggggtctgggatgactttatttgtttcttgtaacagtcatgatagactgcatggttctttatatgtctctaaccatcatgaacgtagtataagtggcgaatgttgatactgatacatagagtatattatgcattccagagcatattgaaacgattgacatatcgatgtacatattatgtttatttttttatagagtatatattatgttattgatatgctttactactttactcaatattaatgttgctattataggttgtcacttgcctccgtcaaccatcacaagggcc

SEQ ID NO: 12899 - DNA, 1007 bp, Oryza sativa
  Intron number 1 from transcript LOC_Os07g26940.1 (locus LO C_Os07g26940) derived from phytozome v7.0 (chr-ID Chr7; po s 15602277 to 15603283 reverse strand)
tcgcgtggaccgtcgtcaacctcgcccacttcgccgtacgtcccgcctcgccccccgattcattcatccatccatccattcattgacggcgagtttgctccttctttcattagtccgatccgttcttgattagcgccgctagctagtcctatcctgtcgcgtgttggtctcacgcacccgatctgagagtcgcttctgctgctgttcttctttggtactatctttgatgagatacagtggcggaaggaatcgaggaacacaccaacttgcggagataatttttctcttcttcacaaatatctttttctcaaagaagcgtcgatttcgcaagctgaaatatcagggaataatcttccttacctttttctctgctagtttgtctcaagtatattccaaccttgcaaaagtcaaaagagatttcttggtgtatgtacaatctgttcaggttgaactcaagtccaactacgccttcagtctaaaacaactagcagtgagttgatgcaagaatctgttcactgttcacatcattgcgctaaaaaaaatgttaaatgttaaatccagattatgttatgcgtcgtgctttatttgtggacttgcatacgtttcttgattgtcctaattgacaaacgttgcattgatagaattatgggttgacaattgtcatatgttctttgtcatactgggtggttgtgtgtggcaaatggtttgttgggctggatatgtgcttgaacaaatttctctatgtaacgaagcaaagtaattttaaggccatcagcagcaagctgccaagcacacattatgttggagttgatttaatctaccattttctttctccctttaacacaataaaacattgcttctatatctgtaagagggcttgagttagatgtctacaatttgtagtcctcaacattcagctactagtactacatactgtatttaagtaaattttattttaattttttttggcagatcacttatcacttcttccattggaagaagggaac

SEQ ID NO: 12900 - DNA, 789 bp, Oryza sativa
  Intron number 2 from transcript LOC_Os09g28150.1 (locus LO C_Os09g28150) derived from phytozome v7.0 (chr-ID Chr9; po s 17077322 to 17078110 reverse strand)
ccaccaccattcagaaccgaggccacgactacgttagacacagcgaaagcttgcatattactactccgtcccaaaataagttcagctgtggaaatccgtgtccaacgtttgattgtccgtcttatttgaaaaatttataagaaaattaaaataagttagtcacaaataaagtactatttatattttatcatctaataacaataaaaatattaatcgtaaaaaaaattcaaataagacgaacggtcaaaagtgagacataaacagtgcaaaactgcacttattttgggacagaaggaatactgtattattatttttagggaaacggtataggtacggtcagaaatttttcatatttgtgaaattaactactagctagtactccctccgtcccataatagatgacgtttttgactttttatttgcaacgtttgaccattcgtttttttgaaaaattagtgcaaatataaaaaaggataagtcatatgtaaagtatttttgataataaagaaaatgacaaataaaataaataataattttaaatttttttgaataagacgaatgatcaaacattgacaacaaaaactcaaaaagacaagtaatatgggacggaggtagtactatttagcagcaattctaatacgatgcatacagtaaaagataatcggaaacgatattatttttatggaaacggtattgggtaaacctgcaaatatgcaatgctgattgcaaaacctgcgtgatcttgtgtcttcatgtatccaacgttttggatttttggtctcagctgaa

SEQ ID NO: 12901 - DNA, 952 bp, Oryza sativa
  Intron number 2 from transcript LOC_Os09g32860.1 (locus LO C_Os09g32860) derived from phytozome v7.0 (chr-ID Chr9; po s 19589725 to 19590676)
aaagaacaagatattcagtgcctagccttccagaggtatggtacctaatgctgataagaaatacttatattagaagcaaagtgggtcactatgattctatgactgctctaagtagtctctaactacacactggtggtcatatggtggctagatcaaaaggattgagatcctctaccttcaaactcaaaggtaccatgtctttgtcactgacagatgggtccatggttcattgggcctacatgttagtgacaaaggcacgtgcctttgaagttagaggagcctgatccagatttatgaacagatatttatagctgcaatcttctacaattctgcatgagggcaccttttctctgttctagctgttgcacctttatcactcaagcagaaaattgtttgtgatggcgtcaccttaataatcttgttaaggcagttcactttctaaaggttcttcctcacttatcagcgggttcctgtacttcttttatgtgattactctggtctcgaccagtttcctgatgatcaatgtttatgtttaccagaacccccaatgtgcgatttgtccttaagatacatgtttatttttttcttcattacctttgactaatttataggatgatattgtagggagaaaagcatcatttcatacataacattgttgactaccgctgcatacttcaagcaagaataggtttcatactatgtgatcataattagtcactggctacaatctgctttatctttttcccgatagccactaagaaaactttgaaagggaaaaggagaaaaatgaaaatgtgccgttcagtttgcgtaccacaaatcccaaagagctattccttataagctactaatagtactgctttcccttccaattgaaccttcacaattcttttaaaaaaacttttatccttgctagtgcttgtaggaaatctggtgccatatacactcccta

SEQ ID NO: 12902 - DNA, 736 bp, Oryza sativa
  Intron number 1 from transcript LOC_Os08g19830.3 (locus LO C_Os08g19830) derived from phytozome v7.0 (chr-ID Chr8; po s 11877672 to 11878407 reverse strand)
cgacgagcagagcaggggaggggagggggatcctggtgagcatccacatcctctttctgattcatctctgtcccccaccggtagtacttttgtctggaatttgcttgcgttaaccctagcttctcttctagatctggaagaagggattaagagaagcatttcttaattccagagccttaatcttaatacaagtaacagtttgtttgttcccctaaaagtttgggggttcagtactgaacccccatgtcccaagttggatccgcccctgtggggagattgaatggtgcccttagggatctgtggtcgttcgtggacgaaaagcggttggtggtcgcaaagattagtttttaggtttctttttttctcctgaagtgattgcgattaccgtgcctgtgatgaagtggcgaagagaggtaatgatggcatagattttgcattggccgttcggggtgacgttcctgtattggggctcaatttgttgtttctcccagtaactaggtgcttcctggttgctgagcacgccgaggtgtagattttgagatatactcttttgactctttaactttgagtaattttggaaattatgatggttctcttgcctaaatgatgtttattattcaaatatctttatgtacttctcttttgaacttttattttttttccacattttgtttcgctctcaatacaacaaataagcagttctggtaattcttttattttcccatttcaggagatc

SEQ ID NO: 12903 - DNA, 500 bp, Oryza sativa
  Intron number 2 from transcript LOC_Os11g31430.1 (locus LO C_Os11g31430) derived from phytozome v7.0 (chr-ID Chr11; p os 17884968 to 17885467)
ttgttttcgtttcggaaattggaactgcagtggtaagtttaaatccaaatacatttgcttgatcgccaagatcataatctatgtaactttatttgttttacatagaagccacatcagcaaagaagggttaaagtaacagggtattgtgattgtaatactagtgatacatatgctaatggatcatttgctttgtgcctgctaatttgattggagacataattccggacaatatgtgcttacatttggaattggattgttttgtgtctgtgtgtgtgtgttgggggggggggggggggcatgtgcttagatgagaaaaaacggtggtaaaaattatggatggggtcatattgtgtgattttagtgaattgctggcttgtgataatgtttttttttcttttccttaatgacaaagttctctacttcttttggtggtatatcatcaaatttagtataatgaaataatgaatattaaataacataaatgctttcaattgccacag

SEQ ID NO: 12904 - DNA, 809 bp, Oryza sativa
  Intron number 1 from transcript LOC_Os10g30370.2 (locus LO C_Os10g30370) derived from phytozome v7.0 (chr-ID Chr10; p os 15709888 to 15710696)
ttaggtgagaatttctcaactccccaacctctctattgcaacacctctattgcaacatctggaatatctattgcaacacctggaatatgatagaatcgttgatgtgatttgctttagtagaaacccctaggcccttgtgtaatttaatggtttttatcgaattcctgtgaaatttatgtgtttcaataggggttttatcttgtgttagctatggattgcattatcaaatagttaatttttcttggggatacttaaagtgattaaagttgtgtgagatgggtataggatgttacttattgaatgcacgcaatttttttatcgaaaagttagtgattatgtgttgaatttggttttgcctgttctttgtgtacacatggaacatagcgatggttctatctctggtgatctgcatagcttctaaatgtctgatgtagcttactgtcattatatcatctaggtttgtcaaacttgaatattgaacatgaatgtgggactcgcagatacaattcgctagggcagtcttcagatggtcttggcaattggtcctgactaaggatatcaggtcatgaatcttcaatttttctttcttgtgatgcatttataagctagcaactgggcctggctgctagcctactacgttgagagatttttagataactgatttttttttgtgcttatcaagggtttctgataggcaatgattatgccatctgtaattttgatattttttattcatcatcctttgatgtgttgattatgctgcttttctcttttctcaagttccttttttatatgcagacgtaggaaag

SEQ ID NO: 12905 - DNA, 769 bp, Oryza sativa
  Intron number 4 from transcript LOC_Os10g30370.2 (locus LO C_Os10g30370) derived from phytozome v7.0 (chr-ID Chr10; p os 15712701 to 15713469)
tacattccaatatcactgaggatcaattgagacaggtgaaccactgaatcttttagcacaaacagtgatacattgctttcccagtttgtagatgagaaaacatagtaaaataatgacaaaattgaattaatgtgcgtggtttcttttgtgtcattgctatctcatttaggtgtacgtggtttctttggttattcattttaatataggcacagcttaagtacttaatgtctaacttgcttataacactagtttgaaataacattgctgtgccactgaaaagtgatcctagagccattttgtcttcctcaaactggttgctgttccccaaattattcaccaaaattgtcctgaaataaataacttgtgataaagtacctcatgttgagaaaacaatcttctaaaattttcattcaattgctagttgcaacaagtttgcaatgtatgcaaattttgtttcttcttttcacctcgaataaaacaattctatgtaaataattgttggctctgagataaaaggtggtatttttgtcaaccaattgtacatgaagtattgaagtgggacttatttgaagttccttagtgaacaacagtagttggacgtcctgaatattaatattatcctttgagaaagatgctgctagattttgactttttgtctgaagtaccatagctgatgcttgtacacttttttaatgtgcatcttgttatatgtggtaatgaatactccatttcaggtattcgaaccatttgggcaagtggagcttgtcca

SEQ ID NO: 12906 - DNA, 764 bp, Oryza sativa
  Intron number 2 from transcript LOC_Os08g05030.1 (locus LO C_Os08g05030) derived from phytozome v7.0 (chr-ID Chr8; po s 2579553 to 2580316 reverse strand)
tggcatcagtttaggtttgttttcctttttttttttctgttgtcatctaaataaaaatttcatgggcagttattattgttaacaacacattttcaccttttgccgctctgtcaacatcccatcagttaagttgcactatttcgagcactagaaaatgtttgatgatgtttctggtctctctagtaaagctcatcatggcaatcatttgagcgtgatcctgcttgctcattggtcattgcaatgtcttgcgggcatgaattatgaaatacaggaatggttgtggcagagtatgtctagcatggtggaatgctcacggcacaagagtgtatcaattatgtgattttgatgttgtttgaatgctagcaatctttgactgctaggagcatgtctctcttaattactttgtgttctagccatcatgggtgattgattcattttttaacctgttagttcatagtgaatggtattatggataaagggaggattgggtggtatatatatttacaagatgcaacaaatttgatggtatggaggcaattaccccattcctacactgaaaaaaaaaagaattgctggtaggagtatggaacagacaaaatacatccttatagcaatgtgtcttttaatccaggatggtgtggtactgttttcttatggagcagttgtacatggattagtcaaacaaatattgtgtagtttatcttctggtactgatgcactaaatccaactcatttttagccgtgttgctcgccccatacttggc

SEQ ID NO: 12907 - DNA, 571 bp, Oryza sativa
  Intron number 1 from transcript LOC_Os08g43280.1 (locus LO C_Os08g43280) derived from phytozome v7.0 (chr-ID Chr8; po s 27357470 to 27358040)
gagctgccacaacaacagtccaattcttcagacaggtaaatcctgaatcctgtatgccaatctgccaatcagaagagaaaaagaaaggcagtagggtaaactgaataataattggcctttttactgttgttacatctccacgtgttacgttaacgacggtgatccggagaagcctcgagatgaaaatgtacttgcccgtactcaagcacacgtcacctgccacgtcggatcagatcggtggttgtctatacttaaaatgttagcaatggtgatatacattctgccacatcattctataactgatattttgttctcgcaatccatacagttacacaaaataaacatattattaaaataaaactaatttaatattttagatgttgctaaatttttttataaacttaattagacttatcaaagtttgattaaaaaaaatcaaacgatttttttatatgaaaatatgaaacggattgagtacgtaaaaagccgttgcgggtgatccgtaccgtcggatgctgcacgcgtgcctatgacaggtgggggccatctgtcagcgagagctgcactatct

SEQ ID NO: 12908 - DNA, 771 bp, Oryza sativa
  Intron number 2 from transcript LOC_Os09g31180.2 (locus LO C_Os09g31180) derived from phytozome v7.0 (chr-ID Chr9; po s 18751783 to 18752553 reverse strand)
agctcgtctctcgctcagcagccctcatcaaccaggtgaatgatacgatcccgtttcttctccctatagattggagatttcctggtcttctaatactgatatgatgcaatataacctaattagtcctgatctttgcatgtgttatgtactcatgttgccatggttgtaggaattagttctctttgctccaatgatatatctaggtttgtaattgtttaacaagtcatgcctgcctgcttgtttctgttgtttgctgcttaaggttatatgttgaaactgctaaggcggcatgatgttctatgtccttagtttgatcattggcagttgtgaatgtcattatttacagtgctctacttaggttttaataaccatttcaccatctgtctgttatgtcagtactgaagttacgttaacacatttgtgacgaacaaatccatttcttgaacaaccaagatcccttttgtagttgggctaattggcattgctaagttcttggtttggaaaccatgagtggtgtcggtgctcagggtacagtttgttatccactgtctgatccctatttgaatttggcgtctgcacaacaccatgattatacatcaaacctttttgccaatgtgatttatcttctatttttcggttcgtcgagcactcttttttccatgctttcagtgaaacaagatattttatcaattatcgtgtgttttgctcttgttgatttgtttgtgcccttgttgtgttgttgatcaaaattccctttgcttgtaaacagaa

SEQ ID NO: 12909 - DNA, 966 bp, Oryza sativa
  Intron number 1 from transcript LOC_Os10g11012.1 (locus LO C_Os10g11012) derived from phytozome v7.0 (chr-ID Chr10; p os 6112133 to 6113098 reverse strand)
gaagtgcccggagtgcggggagcagtacgtccgtgtgcgtcggccagtggtgcctccggtgcaaggcgtgcaccaagaaagccatggttgatgtgcaagggcccgaccaggccactaccaccatcaagaagtcccgaacgtgaggaaccgcacgttacttccatgctagcagtattattccttccgtttcagattacaagacgatgttttgactttggtcaaagtttaactgctttaaatttgactaaatttatagaatgaaagggagtagctatatttatgacgccatatttttcatccaaaaaatagtcagcatgtatttacattgtaggtacctaaatttagtgtatttataatttaagttttaaaattacatacgtaagttctaaaattacatagtaattacatgtgtaagtggtgtgtaagcagggtgtaactacagtgtaaatatgtataaagaatagcatgcatgcatgtaaaaccatcaaaagcttgaactaatgaagatgttaagttttaattaatcacagccgcaatgtcagttgccacggcaataacacacggcaataacacagatcttaaagcaacatcaacagtcaaaaaatctgactgcaaaacaaacaaacttgtggcgacacaaatatagcgtttccgaaaaaattagtaacattttcaagacaatttttatatgaaaatatattcaattattaatttaataaaactaatttagtattataaatattattatatttgtctataaacttagttaaacttggaacagtttgattttgaccaaagtcaaaatgtattataacctaaaacggatggagtagttgatatatgctaccacttccaaaatactcttatatattgtatatatgaatttctaactaatgatatctatactatgtatatgttattgttggtacaggactagaggagaacttggttattaacaggtgattc

SEQ ID NO: 12910 - DNA, 887 bp, Oryza sativa
  Intron number 2 from transcript LOC_Os12g14110.1 (locus LO C_Os12g14110) derived from phytozome v7.0 (chr-ID Chr12; p os 8000608 to 8001494 reverse strand)
acagaagcttgagaagaagctcagcttctacacaagtaggtgtgcctttccattattttttggctgtactcccttattccaggaaaaatcaacatttgcaatctttggctagtaattgaactaacaatgtatatgtttaatgtcatgcatgtggtatttcgtatacaacggtacctttgtaattgctgataatatgttgtaagataatttaatttccaaaatacaatgttggagaacatgtaaaaaaactgataggccttatattttggatggagggagtgtataaggcaaatgttgattaatgtatagagattgattcaaaagaccagaggatggtggtattggcttgttatgttttacttcactgctattctgaaatgcttgttattcatttttgtaaagaaggacaactaattattagtttattccaagaaaattaatatgtctgtaaaaggggcaatgcttttttttttcttgaatagtgaaagcttggaaatatcttatccatgaataaaaatacttcttcgttcatgttccatgcttgttgtttttagtgttttgtgataataaaacctcttttgttttctataaatagttgtagcctttttagtataccttttattttgtagattacttgtgtttacagaacatgtatattgtaaagtagatagtagcttagtttgtggtactgcactcgaaagtcgaaacattgatagattacgatttatgattgggcttactgctagctggactctgtttcattttcctacctttttcttgtctaccttgagtcgttgactatattttgcggaatagcatgtttttttgtttactgtggtttatagtataattgatttatttttgtttttgtttctcagaagtgaaag

SEQ ID NO: 12911 - DNA, 919 bp, Oryza sativa
  Intron number 1 from transcript LOC_Os10g28030.1 (locus LO C_Os10g28030) derived from phytozome v7.0 (chr-ID Chr10; p os 14472383 to 14473301)
catttgcacttcactgcaaaagcagaaaaatatatgtaagtattctcctttccttcgtctcctgaaaggctaatacgatttataatctgattttattgttttgaggcttctaacttgctgaattttgttggtcctaagttgtttcctcctgcactcagtctggtcctcttgattattgctgtagttccagaagaatctgattttgttagtagaactagtcccagacttaacatccaggatttaatattttttagtgttcatcgtattttttagttatgtttatacttttgtactacatgaaaatcaaagcatttagtgtcagagttctccagaaaaggattttggtgggaaggaagaatgaaagatacttcattttattaatcttaggtagccattatagaagtttccatgttttgtttgtctaagtgattcaatattttttcttgaattggtgcattgacaacgtcaaatctgtccatggattgcaagatgaacaattgggactgttgttcttgagttgttaatggaatttatgaagtataaattaaaaaatagtttgtgtctgaactacattaaagtgtatgaaatctgagtcttagtacggtagtacctgaaatttttcacgggtaactgcaatttgaattatgaaagagttaaggtgatataggttgagtggtgtgctctaacctctaggctcttttggcattgaaatgtatacccatacatcatgaagttgaagtcaggaattcaggtttctcagttttcatcttatcagtggaattgacaacaaaatatacttgagcttccctgcagcttgtttaacatactatattcttgagtttcccttcagcttcctcagcatattaacctttgtgacaatgcagatttagcttaacccagtagattgtgtctttccaac

SEQ ID NO: 12912 - DNA, 697 bp, Oryza sativa
  Intron number 1 from transcript LOC_Os08g40180.1 (locus LO C_Os08g40180) derived from phytozome v7.0 (chr-ID Chr8; po s 25424964 to 25425660)
gtcttcaataggtacaacattcacccataaaccatactccctccgtcccaaataaaaaccatcaattgttcatattcatagccagatgtttttttttgtttttttgagatgaatggtgtagatggcaatgtgctttttgattaatagctgactgctgcataagtctcattcgtcctattcaactgacttttgtgaattagtacggcaaatggtacaggattaatgctcctctccttttccgaattagtacggcaaatggcacaggattaatgctcttctcgtggtaccatacttcgctatgtcactagttagcatcagttaattactggagtactagccaaagaaaatgatcgtccaactcatatttactcttaggttgtgtttggataatgggaaatgaggggtgggattaggattgggaaatgaatgaagggttaggattaaacggatgagggagaatgaatggttaagatttaaagaggggtgggaaatcatttcccttagacatttgccaaacactgccttagttgttgtatactagccaaccgaattcttatgtactatgtcgcaagttacaggtatggcgcaattattttgcaaaagaactcttatgaactatgacatgatgagtgaattgtactcaaaatttcaaatttgagcaggtccagtagattcgcgaggctgcaaggggtacaat

SEQ ID NO: 12913 - DNA, 508 bp, Oryza sativa
  Intron number 2 from transcript LOC_Os08g27170.1 (locus LO C_Os08g27170) derived from phytozome v7.0 (chr-ID Chr8; po s 16590996 to 16591503)
ttgttcttaacctggaaccggtcattcgtagggtggtaagttaatattaattcatctatacactacaactatgctatacagtacaagtatactatagtcacatttgaattcgcgataattttttagcaattccctttcccatgtattaggcctcgatttattagtcattttcaatggagaaataattaatgattatttttcatgtgtgagacgttggattcaaattaagttattcactttctgtggattgtagagaaagcgaattttaataaatttgtctagaatcaataaaacttacattacctgttatgcatccacacatatgaatgactatttgttcttcttgtagttgtataccatttccttctcttgtatgtgtgaatttcattatgcttttcagtttttagtgcacatatatgaacattcatttaaccctttttcttttggatgatttttcttttttaccttcttaggtgcgtgaggaaattcggaacatatttccccagta

SEQ ID NO: 12914 - DNA, 307 bp, Oryza sativa
  Intron number 3 from transcript LOC_Os11g31980.1 (locus LO C_Os11g31980) derived from phytozome v7.0 (chr-ID Chr11; p os 18366779 to 18367085)
acaggtactgattttattttacttttacctaagtttatggtctctcttctctgtttttgtgttctttgtctctgtttttgattctgttatttttcagtactgcatccctgtgcagaagttattgtaggaagagaatattcttactgcttcattagcagttgtattcttatttatttgcatttatatcggtctttaagaattaatgttctttgcacgacattatgcaatacagcttttgctatggttgatgttgttggttgcaagtgattaatggctctgactttgctttttctgaatgaatgaagca

SEQ ID NO: 12915 - DNA, 983 bp, Oryza sativa
  Intron number 2 from transcript LOC_Os09g32500.2 (locus LO C_Os09g32500) derived from phytozome v7.0 (chr-ID Chr9; po s 19398723 to 19399705)
agaggccgcacagcgaccgctacattggcctcaaggtactctctctctctctctctctctctctctctctctctctctcgccgttcttctcgcgcggtggcccaggattcgttagcagcagagactttggaatcgggatctacttcttagcgatgaatgtggctctagtttttgtttttttcagtcaagaatgtcctaatggcggttattagcttacggttaggtttagagtcttttacttgcacagcctggaatgcgcgcgcacacgattaatgatcatcctcctatagttcatcatttagtgatttaggaattaggaatacgatatgcatgctgtagtagttatagttgtcagtttgtcacccgcggttaagagcagactagtgatgtagtggttggaaatgggtataaattgtggtgatgaagtgatactgattttggatctgagcatgccttgctcttgaaattgagaagaatcgacctggtttgcatttgtgtaaactaaaatttactgtattaatgcttaactctgcagatgctctcttgctgttactataacctagtcattggcaatagttataggcttatagccttataggagaatgccctcttaattttgaatgtagatcaaattatattgactattgatactgatttggaaccgagtataatgaaccatactttgggggttgaaaatgtctgtagtctgtaccagatcaatcatctaggtaaaatcaaattgtgctatgctgaaatgtgctctgctcatgtttacatccacttatgttttatatggaattttcatcttgaggtgtggatcaccttttggttagcccgtaagatgaagtttttatatcgttttcagtctgcatcctagtcacgccatgtattgtcagtttttgtttgtgtggacacaagggctcattttcatttgcactgtttctgtagacaagctggcgcaggccaaagggtattgactctcg

SEQ ID NO: 12916 - DNA, 934 bp, Oryza sativa
  Intron number 1 from transcript LOC_Os07g18720.1 (locus LO C_Os07g18720) derived from phytozome v7.0 (chr-ID Chr7; po s 11063896 to 11064829)
ggcgccgccggcctcccggcaccggtactactcaaaatcccccgctcctcccattcctcctgccttcctccccgctgcctctttcattgttacggtttgttctctttaggctaggggaagaaaaaacgttcgcggcggaaccaagtttccgctggggatcatttgagtgcggaacgcacgatccccttcctgcgttgtgggaacgggattggatggaggcgggaagagcgatcccggagctgggctcgtagcgtgcgttcgctgccatccctggcgccgccgaaaccacacatcgagactagttgaatagcacttgggggtagctcttggacctcggtgtaccgttcttgtgtgtcgcctcgccgtcttctgttatggataactgatcctggccctatctagaagcccttaacaatttagagcggtggttttcgatgtcccttgctgggggttggggggcttggatcagtagtatacttgccccctggttgttttgggttatttggctccattgaaactgtaatgacaataccacaatgggaaacaactaaacgagtaataggcttgcttatctttgatttatttttgtgagctgaatgctaatattcttgcctaatggagctagtcatatataatttcaaggttaaagtccacttttcacccttaaactacaaaccggttatttttcaccccactttcaaaactgggcaaaaaaaatacctttggacatatctgttagtcgtttggttcaaaatggaggtcattttcctagttcacacttagtttgttgatgcaaatgccacttaattaggttcataatcatgaaacctaaataggttgaaattttgtgctctctttggaagcaagttcatcttttgagttgcgtacatgtctatattgtagggatgcctgcagaaatttggacatatcgttg

SEQ ID NO: 12917 - DNA, 756 bp, Oryza sativa
  Intron number 2 from transcript LOC_Os10g29274.2 (locus LO C_Os10g29274) derived from phytozome v7.0 (chr-ID Chr10; p os 15161929 to 15162684 reverse strand)
tctccatccagatcgacggcgtcctctgcgtcaaggttataactcgctcctcgccttaagccgtttttgctttgctgcatttccaattgctggtggtggtggatttaatgagttgtgttgtgcgcgatcgagcttgcaattttgggcggctcaaactggtgtgctcggtttagtgtcagtagcgtcgcggaggcttgtggattgggttgtggctgtaccctacttttgcttggtggcgtcggggccggcagttgcggcggctttagctctggtcctccggatgactagatgcgtccttgcattttggtggttgcgagctggaattagtaactgctttgttgtttcttcggctaactaggctggtcccttttttctttttcagaggtaactgaaagattggggtgactaaattgtttttcaaaacagtaattggggtgactaaattgtttttcaaaattaaacgctgtccaaattgtttttgttagaatttttggggaaatttcaaattgcatgttctaggtaattcaattaccctgaaacaattttgtggaagcacattgaaattcttttattaataaattgtcattcctggttcttatggtcatccattttgctaaggtagagctataagtgtgtcacagtgtactgcatttgattattgctgctctgtttatttgataactttgcatgattgctgatatgttcctgtttttacttacagtgccagcaatttgcctccctcatcagggccacatc

SEQ ID NO: 12918 - DNA, 888 bp, Oryza sativa
  Intron number 2 from transcript LOC_Os08g06020.1 (locus LO C_Os08g06020) derived from phytozome v7.0 (chr-ID Chr8; po s 3287612 to 3288499 reverse strand)
tatcgaatctcagcgacgactacatcgccttcaaggtcccgcatcgctcttttctcagaaatctttgggggattcttttttttttcccctaatgataattatcttggaaccctagagctgcagtaatactagattaatcgaacgccctgttggtatggttggtgtgttatgttgttgatttggaggaggcgttcctttaagtttgtatttttggatgaatggcttcattggatttgacccccataatgattgaaaagtgttggtcttttaggttgttgtgtgataggggcctacagtttttaatgttctatatgtattttggagattgaaatttgttgctgctggctgcttgcattgaataaacacttgaaagttgatttaagtttttatttgttttgcatctcatttggtctgttcttcaagcttcgtgccataaaatatacaattgaaggcttacctgctgtacaagttccccttttctaatattttgcttgtgtaaactctagaattgaagttttgaaccttggagggattatattattattattcgcaaatggtatcaactgttacctcctattcgtatgttggttttatagattattaaatcagcgtatacataaaacctttcttgtgtcttgtggggctaatatatgtctcttgattgcattttataatgggatttcttcgttttccttgccttgataagtctgtgatgaaaccttctagtgtttatctactaaggtcattggaattgtttaaactattttaatgaagtgacaatcttgtagcaaacattgattcaatgaggctttgttttgtttgttcatatttcctgttttcttctctgtttcaggtgaaaactacaagcccaaagaagtattcggtgcg

SEQ ID NO: 12919 - DNA, 938 bp, Oryza sativa
  Intron number 1 from transcript LOC_Os09g33530.1 (locus LO C_Os09g33530) derived from phytozome v7.0 (chr-ID Chr9; po s 19778831 to 19779768 reverse strand)
ctctacttgcccggtatgagcctctctctgaaaaaaaaaagaaaaataatttcctttttttaatcatgtgtgtctgcatattccttttttttttgtcaaataaataagtaaaacatgtgtttgaatactgtttatcttgtgaaactctgacaaagcatgatattgaatagtaccaagtgggtgtgttgaaaatgaaaatttgtttgaacagtacccccttttttttccctgaatttttatttcaattttgacaccatttaatcatgcaagattttctagtctgaaaccagagggttgtagggtaggcctgaaagcaggaccaaccacctttggcaattggcaatatttaagctcatcaagatcagtgcagcagcactaatttagacaacatgtcggcgattcggtgactcacccagatcatgccaaacaaaattttctaattgctcgcatgaagatctgcaatgctgaaaccataaacaataaaagcagtttgacaagccactacgaaaactcccagtaggccaatattagtagaatggggaaagggactggctttcttgaccagctcagttgtttactggtggttgatggccattggaagtggctggattagatggatggacagataatcagagactcactgttaatctgactgtttgatgcagcagacatgcttgcaaagtctggattcaggcttaggatcattgggttagagatttggtttttaaagtattcaagtatagtactgaaaatttgtgttttaaaaaaggtatagtactgaaagtcttatcccagtggaaatgcaacctactgcattatgggttggattgtcagaatatatgttcatacctttcattactttggttccaaccatttgagaaacacaagaaaaattaaaaatgggtaaccgttttcggtctttggtcttgcaggaattg

SEQ ID NO: 12920 - DNA, 1021 bp, Oryza sativa
  Intron number 2 from transcript LOC_Os11g37790.1 (locus LO C_Os11g37790) derived from phytozome v7.0 (chr-ID Chr11; p os 21917029 to 21918049)
agctccgagaatatcttggaaatagaaggtatgaatgcaatccttttagacaaggaagatgaattatatccttgcctatgcatgcatctaaggtacagacaaacaaagtcattataactaaaaaaataaaagagtgggacaaaccctataggaattaaattaagcatagcaagaaagagaacacaacttataaataatccggcatccaaagttggtgaagaagcccatgatgatctactccgggtgtgtggctctagtagccataatatcttggtctgcctgttgctgcatcacatactaggtatggagccagtagatacacatgaataagactcaatggaattagatgtttctttgtgtaaaaaaaccatgtaaggattttaacttttaggggaattctaatgctccatttgttcttccgaccaatacttacacttgaattcaacaacacatcgcacattgatttaattgtaaattctccgttcttatgtgacaccatttaaaagaaagtatatgtatgcaatacccataaaactaatagttattcatgatctctatatgctgatgggatatttattagctactatagagtgtttaattagctgctggatgcagtagttgacatcaagtaaatctacattcctttatctaaggcctcttagaaattcttaatgctagtacgaggggctaatttgagcatttgatgggaaaaacagaaaatgataggatttctaatattgttagtcgtcgaagaagaaaatattgttgaccatctgtgatcactagattacatactccactcattgctagtgccaggggataatttgagtcaaaagtattgattatcaagcaattacaataaaatgaggatatcatttatatgcaattgttttagaaacccatatttattcaattcaagaattgttgatgttttcttaaggcacttcggatccatgatgcttaagagtttgtttttttttatacagatatactctagatcattttactaatccataccatt

SEQ ID NO: 12921 - DNA, 849 bp, Oryza sativa
  Intron number 1 from transcript LOC_Os12g18130.1 (locus LO C_Os12g18130) derived from phytozome v7.0 (chr-ID Chr12; p os 10454967 to 10455815 reverse strand)
attatcccccgattgctttgaccctgaagctccaggtaacctaatcgatctcgcgctaaattgcaactttttttctccaattaaggacattgtcatcatgatgatcatactccttcaattcttttgtactccctccgtccccaaaaaactcaaccagtattggttttgatgttttctgtgtccatattcgttgtactataaaacgtcccatctaatattaggttgagtttttttaggacggatagaaaacgtcccatccaatattagtttgagttttttttttgggacggagggagtaattgtcacgattatcaggtaatatcgtcaataatatgacatctcttttaaggacctaattttttcttttaacacaagacgaatgatcaatatttaaatatcagtaacgtttggtgacaagtaatggagggagcatctgttaaactgagttcgtgagagatcagagcacaccaactgacccaaactcaattttgtttgtgagatataaaactaacaaaatttcgaccaattttgtttcctgatttgaaatttgcttctttttttaatatatctcacaaagtaagttgagtttggataatattttttacatgattttgtaccattatctcatctacgcaggtgtgatttttttctttttgaatttagacaaatttttgtatcaatgtttacataaattttcatctggttggcttctggctacgtatttatcatgaaacctcattatatggcactgacaggtggatccgtggccattgtatctgacggttgaagatatatttatccatttaaccccacacgcgctatgtactttgcgctctctctctcctctac

SEQ ID NO: 12922 - DNA, 549 bp, Oryza sativa
  Intron number 3 from transcript LOC_Os12g05410.1 (locus LO C_Os12g05410) derived from phytozome v7.0 (chr-ID Chr12; p os 2449614 to 2450162)
gaagaaggtatgcactttgttcttcttgggaggtgctcatgtgctacctgcacctccataaatacagtttaaccgatgactaaacttaacactggtacacctaaaaaaaaagattgaccatttctccagggaaaattgattattcctctatgaatagaaatgaaacaatctgcaactgatttgggatttcagtccacattttgctaatggttgaattggttaagtccatgaaaatctgcacctccataaatacagtttaaccgatgactaaacttaacactggtacacctaaaaaaagattgaccatttctccagggaaaaatgattattcctctatgaatagaaatgaaacaatctgcaactgatttgggattgcagtccacattttgctaatggttgaattggttaagtccatgaaaatctttgatctctctgaagtgacaaatctcacatgcacattggacctcatatatttagtcttaatgttgtggtccaatttgcatggccaactgactgagtttttttgcattggataattgcagcaaggct

SEQ ID NO: 12923 - DNA, 833 bp, Oryza sativa
  Intron number 1 from transcript LOC_Os12g07220.1 (locus LO C_Os12g07220) derived from phytozome v7.0 (chr-ID Chr12; p os 3548421 to 3549253)
caccatccagggcggcctccgcgtcgaggagcagcgtaagcaccagcatcttcccccccgctctcccttcccccctcgttaactaccgcgcaccacctgctcgtcttcgttttcctcctcctccggagaggagaggaggaggatcgggcctgcgaggtcgaaatcgtttcgatttcgttgtcaaagtctttggcccaatattgggagagttcgtcgctctagttgttgattaattggtactagcagccgtacacattcttcacaacccctttgtggtttggttgttattgggaaggggaaacgggttccttccttcgtgtgtattcaagtatcgtcgtcggtgattcgtcaagtgctgcatttgaagttttcgattagtgattctcgtctgtgtatcgaaacagcagcaagtaaatcaaagatttcacttgcacataattgttattattgtggttatactgaccaattggaatgtcgcattggcatgccgatttcgagtgtttattttctgttccctagcatcatgaagaatgccattttcccctctagctctagttggggtgtgttgctgtagttggttctgattaatcatcaccattctgcaacaggcaaatggccagaaattagcgtagatatgaatataggcacattatgacgagggggggcatcttttgttattttttcgggtgttgtgcatttagcttgatagatcagtttacaacttcgctaagtgtatgacttcttcacttagatacatgaattttatgcctgatcctgagtaacatgttagcgttttttgtatgccattgtcagtttcaaggcatcgcacgatc

SEQ ID NO: 12924 - DNA, 926 bp, Oryza sativa
  Intron number 1 from transcript LOC_Os07g11770.1 (locus LO C_Os07g11770) derived from phytozome v7.0 (chr-ID Chr7; po s 6501816 to 6502741)
gcaccccgggcttactgacggcagaaccagaagtggtaagttccatttcatctgcttggtgctgccggctactatatcttgatgctttgttgattagtaccatggattggctggatctgtgtgagccaagccaaaacaacagattcgagtgggagtcagttcagtcaaaaaaccaaaaggggaaaccgagagggaaacatggggtaaggtgaggaacgtgggagaaatactcctgagcagatggatatacagatgtctccagatccctatcctctttatctgaaaaaagctattatccagcatggtcagttggtcaaggagtatggattatatatctgaccgtgacttacagagtagcaacagggcccaatacttagtagtacatgctagtttctactaatcagtcaaatagggctcaatatggattagttacatttcataatctgcaagaaattaatttacttagtatattgtattaaacatataggcaattaatgtcctcaatatcaaagaattgtatttcaggccaacatatttttgctgtgtttgtgtgtaaatttgcagtaacatgaatatagtttataaattaactgtcatctacatcttcttcactttggatgtcactttcatcatctgtatctgtatactcagcgccatcactttcagaatcttcctcttcttcttcctcttcaaacatatcatcttcagaatgtgttactggttctgcttcaatgggttcacattcgactccatctttactgagaaccgtagggaagtcaccatcatcaattgtagtgtaattcaatgcagccgtgatatgctcattctcttggcatgcttcagaactagacttatttgataaagttggatcattttcttcttcttctgtaggaggaaagtcatacaaatcacgtggcttcgtcttg

SEQ ID NO: 12925 - DNA, 1044 bp, Oryza sativa
  Intron number 1 from transcript LOC_Os10g19820.1 (locus LO C_Os10g19820) derived from phytozome v7.0 (chr-ID Chr10; p os 9812617 to 9813660)
tgcccctgccaccgtggcacacgcgaactaacgtggtaggaggagggtgccagcatggctggcgtcgccccccatcccacctcgcctccaatcctatttctcttttatttttattcttttggatattttttcacacataggatatgtggcccgtagaattttcaaatagatccatgattgatattttatgtgaacacctttttattttagtttttggatatttttatcacacttaggagcatgcagtaaccaaccacagaaaatttaaactcgaacggatgaaatatgttgcagaatttttcaaaaaaaaagtagattaggatttgtgttttttggttacattaagtgtcatttcttgaaacaggcgtaactttctaatacgaactcggaatcaggcaaataatatatcaatagacatctacagaaaaagtttggcgtaattagaatctccaaattccgcttgcaagattgtgttttcgagacgagaagcttttcggtggagctttgaaaaattcaacaggtcacaaatttcgaatatttgagtttaatttttctgtggttggttcttgtgtgcttataagcgtgaaaaaatatcaaataaataaaataaaaataaaaaagttacacttctctccttttgttgacgagaaattcgcgctcggccaatggtgccgggtctgtgttggcgcggactaagtcgacaaacacaacggccgggggatctgcttagctccagtgtaggaccaaaggttggtgagatgcgggcgtgccagtcagtttgaccttgcaactgacaaaatacacaaatagcagattaatgggccgatcggctgacaagccgatggagtaattccggccgatgcctccaatgtagaatgtggcacttgatataccctccgtttcgttttatttgacgctacaattcatttcaaaaaggagtctaaatgtttgacgtcgtatacactggtcgaaaccgttcctcgccttcgccttcttcccgctggtgcaggagatcgccgggcttcgccggaagaagcccgtcaa

SEQ ID NO: 12926 - DNA, 571 bp, Oryza sativa
  Intron number 2 from transcript LOC_Os10g08530.1 (locus LO C_Os10g08530) derived from phytozome v7.0 (chr-ID Chr10; p os 4642724 to 4643294)
agctagtgtatcctgggactggtactatattaaaggtaatgcataacactccggtgtaagttagctgtgtttatggctaacgaatgtcaggcgttataattttttgtcaaaatttttgggatctaaacacacccataatttagatgttatagctgctgaattgtttaacagaaaaaattcttttctaactaataaagtatgataataggagaaaaaaatatgtgcaaaaatatgaagacattgagagaagaagaggtgaaagtaacgtgagtatgtactatccttaaaacaaacatacatacatatagtaatacgtacggctcaaggtgaaaaaaaaaacgttcgtacatacatatagtaatatacgtacacgcccaaggtggacctcgtatggggttaggcagtttgttttcttttgataaatctaatggtggtaaataatggatccaccaaatttaatgaaaagcaatagctagagaatttttagaaaattctctaatttattataatactacgtggcggtttggaaacgtttgtagtgtatcctgggactggtactatatcacaggta

SEQ ID NO: 12927 - DNA, 522 bp, Oryza sativa
  Intron number 2 from transcript LOC_Os12g09280.2 (locus LO C_Os12g09280) derived from phytozome v7.0 (chr-ID Chr12; p os 4859602 to 4860123 reverse strand)
tgacaacaaagtcaacataagagttcagactacaggtactatcatatagtgggtgatcaaaattgtcccatttcttttgattgtcaatgcatattgaatgggccttatatgattatatcaatattcactttctttgtataatggaatatatattcatcgcatgaagctgcaagaattccaaacagttttttttttctttttttgactactcagtcatgtgtatcagctggtgtgtacatatttattatattattgtggagagcaattataactaaatagtacagcttctgttcttatggttgaatgtgtagcacatctaatcttattaatgaataatgttgttgtattagtagtttccctccaaattattagcagatattccaaatatcgaagggatggctattgttcttccctgtcattttacaatttaaaactcttctgcaccattgccttcgacaaatgtttgatctttgatgccttcctgatgtatgatgtatatgttggcaggagacccagcaaagg

SEQ ID NO: 12928 - DNA, 185 bp, Oryza sativa
  Intron number 1 from transcript LOC_Os09g11900.1 (locus LO C_Os09g11900) derived from phytozome v7.0 (chr-ID Chr9; po s 6689915 to 6690099 reverse strand)
attgaggtgcttcttctatcttggctgtggggggggctaggatatctgcaataatttttccgcatttaatttgtgcagcatttgattatttttttaatgattgttgctaatttattcacatgcttacaacttttgtgtttattattgtagtaccctcgacaaactagacgaaagaagtgtgcgac

SEQ ID NO: 12929 - DNA, 557 bp, Oryza sativa
  Intron number 1 from transcript LOC_Os08g16630.1 (locus LO C_Os08g16630) derived from phytozome v7.0 (chr-ID Chr8; po s 10178172 to 10178728)
tgaaggtgctcaagttctctgtcagagacagggaggtacgtacgcatgatcatcctcttcaccaataatttacacgaaatgtttcataagttatttattagctttgcttgaattattccatgaatctgtttgatcgattttaatcgtgcaattaacgaggttttaaatctccggtttgaggagtgtgttaaccataaaaaaacacatagtttgatttgggagaatttttaggtgcaacacttaattttaaattggtgaatcaattggaatcattttactccgattaataagtttctactccctccgatttcattttaattgacatttcagacaatgacacggtctacaaaatatacttttgaccttattttctattataatatatacaataaataaatacattttaacttttattatagtgctttgaaagacaaatctacatatgctgttctagtttctttaaactaaatatttttaatgttattgatgatcaaagttataaaagtttgacctcaaccttgttctaaaacgttaattattatagaaccggaaggagt

SEQ ID NO: 12930 - DNA, 971 bp, Oryza sativa
  Intron number 1 from transcript LOC_Os11g03550.1 (locus LO C_Os11g03550) derived from phytozome v7.0 (chr-ID Chr11; p os 1373253 to 1374223 reverse strand)
tggcggtggacctgcaaccttatcggggtgacgaggttggtttctgatttctcagcggactgggggactgggaagtctcaagaaaaagaaaactcaaacttttttcttaccactacttttgcaaaactctatttttttttttgcaataggaactggaaagaaatatattggagtactttgtaattctgatatcataccatatacatgtggaatgaaaacaatctctctagattctactatatgataatgaacaaaatctactgttttttttttcgttatagtaagtagaaagattcatagtaatctagttcacttggagttgtcactgtagaagcgcagagaaattgagactcggtctttgcattccatctccaccaatcctttgctcgcaagttctgttcttgctaaattcgaacagagtgatgcagaaatcagagatatgtcaatagaatttcagttttgggagagtatgcattcagtttcgagctcagtagaggtcagaagtgatcattcacttgtactagtggaccataggctggcttttttggttcagtgaccaaagtggtacatgaataggttgttgagttgtattaattgatgcaagatattaactttactagcaaacaagtttgtaagctactatgcttttttattaccaccagacatgccaacacatggctggaaatatccattcagaatctagaagtgccttcttaaaaaaaaaaaatctagcagtacccttgtgagatttatgattatcttgagcatgtaaggattacctatgttaagctaagaatgtctttgaccatttatgttctgtgcatgcttataatttatccattttattgtctccgcaccataccccgttctgttttagaacaccaatattgttttacactcatgttctcaacttatcgtgatgctactattattctttcatcgacaggtcatttggcaaagcaatcattcaa

SEQ ID NO: 12931 - DNA, 397 bp, Oryza sativa
  Intron number 2 from transcript LOC_Os08g23150.1 (locus LO C_Os08g23150) derived from phytozome v7.0 (chr-ID Chr8; po s 13952424 to 13952820)
agatcatttgggacaaggaggttgaggtagccgaggtatgtatataaccataaacccaaatcaattacctcaataatttagtttggtacaaatcacactcattcattagctatgctgttgatacttgatgttcaagatcaaggtgcaggagaatttttgatgcttaatcttttcttttttttcatcttaatatttgatatccctcggaagatgtgctcagtttgtggttcttctaattaatggcaagggaatattacctaaaaataaaattgtgtacctggacgccaaatgacatgcttgtgtctgtttctaatattgtttggagaaacgatttctgtagttcattcttgatacttcgtacaatggctgattgctgttactggtcttgtgcaggggc

SEQ ID NO: 12932 - DNA, 953 bp, Oryza sativa
  Intron number 3 from transcript LOC_Os09g29970.1 (locus LO C_Os09g29970) derived from phytozome v7.0 (chr-ID Chr9; po s 18237646 to 18238598)
gtgcaaaggtgaattaagatctgattttataccattggtattgcactgcagatatataccattataaactactaatgcatctatcagttgaaaagaccttttgttgaagaaaacaccacaataccacattagctatgaaattatctttagagccctgatgccagcaaaaaacgtgatcactgaatggcataagcttttgtctgcattacatatgaccatattatgcgtaatatctagaagtaaaattttcaaacattttctcacaccatacagttttcataaaagaatgtgatgtagcccaagtgcccaactgtctagtatcatctttaaaacagtctaatctgaaaataggttgttacgtgtacatcatcttttctaagcccattccagtttagttagtctgtccttttgtcatccatagtggattcatttgttggactgcactgaacaaatgaatttttgatatgctgatttgaggttctaactacactactgcatggcattcaatgtggatgctcctttggattcaacaaatacaggtgcaagcatggaattggtctctatttgtgtatttttacttgattagaaagatatgttcccaccactgtgtattagtgctgttcagaagattcttgtgtgtttgtccttgtctttaacttcaattggcagactataaaaaagaagaaaaaagaacattgctctttgcattttaatttatctttgttgtagtgctatatgggaatatcaagcctgattattctgaagtgcatattattcctgttcttgccgtaatataaattgctaagtatgcagtgtaacatcatgtggaaccaacattgtgtgcgtgtgttctcacttgataacattttttattataacagtgtttaacacttgctgattgaatgttgtttgctgtagattcaattggcagagaaacaagctgcactggagaa

SEQ ID NO: 12933 - DNA, 791 bp, Oryza sativa
  Intron number 2 from transcript LOC_Os09g19180.1 (locus LO C_Os09g19180) derived from phytozome v7.0 (chr-ID Chr9; po s 11465393 to 11466183)
ttggggccaacaaccgtttccagatctgttgctcggtatgtatatttgtgtcgtcgtcctttctccttggaaagcatatttttaaggggatgtctcctatatgttttttcatctcacttaaacaacatagatcattgcattatatatcattttataaacaatcattttaaaatttgatctatacaaattagaacaaaagaacaaatctaaatctacacagcagttttactacatcgactttaatttgttatttttgtgagatgatagatgaccactaatatcaattcatacatcaattttatttagattttttaaaattattttgttgagtggtttaaacaaactagtaggatatatgccttttaaggatcgattaaaaaaaccagctttattgctaacttctggtcggtaactcatgcattcggtataagtgggctattgtgacgttatacagtttttgtttttgttctgatttgtttttttttttggcaaaagctagcatgtctttaattcatgcatttatctctgtttgaaattatacatatatgtaaacaactatatacagattatttttaaacacatattcatttactaaacaaataagagcactacctagttgcatcctaacattatattaccgcagctaactactatatatttgcgaaaaagtaaaaattataactatataggaaagtattttgaagaaattaaatatactactatcattttctcatattaaatcttaatatttcagtgtatattttttattcaaaatttcaaggtttgactga

SEQ ID NO: 12934 - DNA, 457 bp, Oryza sativa
  Intron number 3 from transcript LOC_Os12g02950.1 (locus LO C_Os12g02950) derived from phytozome v7.0 (chr-ID Chr12; p os 1094313 to 1094769 reverse strand)
atcaatcaagggagttgaaaccaagccttgtgaaggtacgtacacaaagcttaaactgtatacttatctttgtgtgtctttcatttttcaagccacaaggtttgaaccttaaagttgttcccttagtatcttagactagtgtgccaaattagtgtagttacctattccagtcatacttataggaggattatctatttcttcacagttaatctatatccctgttaccatggcactgtcccttgtttatgtttccggttactccccgaaggcttaagattcaacccatttcatttttctaatccaaccagtttcactaaattttctgttgtaggatggttttgtttttgcctgtgttgtgactcttatcttttgagactgctggatgtttaccttcacagtcctagagttatagaagattggtgattgattattaaagaaattggctttgcattgcagg

SEQ ID NO: 12935 - DNA, 504 bp, Oryza sativa
  Intron number 1 from transcript LOC_Os12g02260.2 (locus LO C_Os12g02260) derived from phytozome v7.0 (chr-ID Chr12; p os 711151 to 711654 reverse strand)
cagaggtttttctcttgatgctctttgttttttagtttatatattagttagtgtctaattcatatgcgtttatgtttctggtagtggtgtctacttatgtgtgcttatctattgtgtttattatataagatcacatgaaaccatccatgtgattcattaatacatgaattcttttcttttttcttttactccccttcttatagttgcaatcaaacatttcgcagtattcttatcctactataaaacgggaaacaacaatagagaaatccatcgtattcacatgacatcaatgaagcctgtgcatatctcaatatttcactgctagcaataaaaataaatagtcaatagtgatcaagtaaactttccaccactgtgctctattgtcatttaacaactaatgcatgcttcaacatagatttacatgttctcgcacattgttaatgtttctgatggcatcatgtttgtctaaaataagtctttctgatggcaggtcaagttggtgaa

SEQ ID NO: 12936 - DNA, 505 bp, Oryza sativa
  Intron number 1 from transcript LOC_Os08g10260.1 (locus LO C_Os08g10260) derived from phytozome v7.0 (chr-ID Chr8; po s 5965584 to 5966088 reverse strand)
attgacaacatcagagcatatctacaacatagaaggtcagtatccatttacttataatagtggtaggcattaattctttttccgttctatgttttcaagggttcatatggtttcaagaagttttctatctaaagtgcctgttttgctctacataattacttgtttggagctgacaggcatcctttgccagctttttggcttctagaaaagtaaagctcttctcttaaatgggtcatgtgccagagttgaggggcaaaaatatctaggtctatattagcatagcgcacagatgttggtgcgatttaggtttgagttctaaatgaatatcctaatttagcaatataattcatggttagtacaaggaaaaaaaaactcatgaatttccttgaaccaaatgtgcttattaattgttgaatttgttgatatatttcaattattcatcgcacataccaaagaattgtatggcacttgataatttaatttaacaggtacctttttgttgttg

SEQ ID NO: 12937 - DNA, 760 bp, Oryza sativa
  Intron number 1 from transcript LOC_Os08g17080.1 (locus LO C_Os08g17080) derived from phytozome v7.0 (chr-ID Chr8; po s 10453373 to 10454132)
gagaggtgggttctctcctcttcgtaatctgtctccatttttctgtacagaggagtatatagctttccatgttgagataagaaacagctttgtgatagtgctactgctatggcataagtatttgattgcttgggcagtattcaactgttgttgattggcttgtcagaattatgtgtttgctacttgtttatggtgatgtatgcctgcattttgaatgatttggtccgccttactgattggtactgccactgaatgtgcgcctccctcaagggacttgtacatcatattgatttggtgaacaagcagttatcagcttgcacaatcatattaggaagtaaaactgttgcaaacaagcagcttctatggatccaggatccacttgaatattatgttataactgtgctattgtctatgatggtcaacaaatattcatggttggatcgatttattgaatggattagtgtttgggaatataaagctgttgcaagtccgtaagttaccatttcctgtgttgttagtgttttaactagtggtaattctgggatttggctcctttaatcttgttgaacttatgcattggatgaaaaatatatacgggtccatttgtcgtcttgctgtgagggggacatcataatgcctgctttgcagcagtccatattgtagtagcacttctttttttgtttttttttagttgagttgtttttatttgttgcataatggtcgacggtcatctcactgtaaggacatggctatttcaggt

SEQ ID NO: 12938 - DNA, 919 bp, Oryza sativa
  Intron number 2 from transcript LOC_Os09g20340.1 (locus LO C_Os09g20340) derived from phytozome v7.0 (chr-ID Chr9; po s 12201716 to 12202634)
ttggctgatcatcttggacttgttcaggatttcaggtgagtgtttcagtcagttcatcactgccgctcggtcttgtagattgatagtttcgtcttcgtcctgtgttgtgaagttttttttttcttttctctgttgtttgacgtgtacttttgatttcgttatgcttgattgatggactaatcattaggtggtctccgagcgcataggcaccctgaatcaatggattgcaatgatcatattgctctttatctaaaaaaatgattatattgctgtggcaaaatagggtgttgtttcttttcttttttttcttcagaaagttcaggtgtggtcttaaacaaagtgttcttttcagttttcaccgggttgaagttttcgtgttggttagatcccaagttgtttaataatcattggtttcatttgctggtgtggtccctatggataccctgaaactgagagttcaatggacagtttctctgttgtatcttgattattatttttctgcggggaatcttgaattttctttataattagcctcaatacttgtgctaaatcctttggtttcaacatgcgtagattagaatttataatcatgtctcgtcgataatcaagtgaaatggactttgtcaacgataaatgcactctaaattctgacatgaaacatcgttttgtatttgctcttttctgttttcttagctaaccaattcagtttactgataaaattgataaacacatctttatggccatgttctggtgcatatcatagattttataatgcttgagactaaccctgaaatctagggcatgaatgtaaatggtgatgtccttgtaaaaaccatgaatttcctggacatgataagcatgttttatctgtatttatggtataagtttttttttttttgctgttatcaggaagtgaacc

SEQ ID NO: 12939 - DNA, 401 bp, Oryza sativa
  Intron number 5 from transcript LOC_Os08g33640.2 (locus LO C_Os08g33640) derived from phytozome v7.0 (chr-ID Chr8; po s 21009623 to 21010023)
attgccactacaacacttgtaagtgagatattctcgtaatatgattgttaaacttagatcagaatttatgctccgcgtaaagatgcccattctgagaagaaacatggcatacatgtaataagtaacttggtttgtttcaagttttcaactgcttgataaccatatctatattgcagcttgacacatacaagccggttcctgtatgcatatttggcatatcatcattcctcaacactataagctgcgcattacacctttcttcttagattatagctgcttttgtgttacactacgactgcaacctggatggttcatgcaaagttttctctttttttttttttaatcttctggagattttgacttgccatgtttcatgtagtgtttaagcagagcactccgaa

SEQ ID NO: 12940 - DNA, 957 bp, Oryza sativa
  Intron number 1 from transcript LOC_Os10g43050.1 (locus LO C_Os10g43050) derived from phytozome v7.0 (chr-ID Chr10; p os 23119009 to 23119965)
cgcctcttcgtcaactcccctgggggatcactcaggtcgcgcatcctaaatttatttctccttttgctttgaattgctttaaccttggagcacgaaattaattaagcgcattaggaatcatacaagtatgctacttatagggtagttattttctgataacgcaaattgtgggtaaaagacaagtcttgagctacttactatatgatgaataacatcaatcagactatatccttttcttttttccctttgtaaataaacagtccttccaggttccagttataatgaatatcagagctcctgctatgaatcttatggatcaaccaaccatttgttttgaattgatagtgtatttgctcccctcgtcctaaaatataagggatttttggtggacgtgactgtccagattcatagtcttaggatgtgtcacatgcacacaaaatctcttatattttgggacggagggagtagattctaaatcaacaacactatttgatccgatagaggctatcccacacaccacaagaaagaaagagatgggctgatgaggcaatattatgtgaatgtaaaccttgcttccttcctttctgtaaaaagatcttgccgcagttcggagttggtaatgatgtttttggcattttataaatgatgcacgtcctgttcagagtgatgcttaattttatgtttcccttgcaggatattgcctttttttttgtttattaagttagtgtaggaatgccttctctttgttttgtttgcaatgtaccttaatagcactggtacaagattgattatgtattgcaatacaagtaggagatactagttcatcaaccaagagcaagtagctgtaggcaggtcattacgttaaatagctcttgggttcttggcagtctggtaaatctgttgatgcaaatatctttgtgttttctgactgattcctgcttctctctcagcgcaaca

SEQ ID NO: 12941 - DNA, 931 bp, Oryza sativa
  Intron number 1 from transcript LOC_Os07g17280.1 (locus LO C_Os07g17280) derived from phytozome v7.0 (chr-ID Chr7; po s 10206578 to 10207508 reverse strand)
cccctccctcgtcctcatcaccggggatctcaccggtatgctccagctgctgccttgctcatctcttgatgtgcttgcagaattggtatgaactatgaactagggagattcaggcattcaggccccggtctgaattttgaatttttgacagaggaagtttaggtccattgtggttgtgggtggcctagattttgtgataattgtatgtttggtatcacatcttttttcctgttttgcatattattggtcaagtttgtttgtgctaggccaagaacccatttagatatattccataagggagtacctatgcatctttcgaaagatttttataatcatatcacacagatttttaatctttagattaaaatccaatggacacattaaaatgcaaaaagcaactaagaaacaccataatggacactaaattaccatatcttcaagaaaaagaccaaatccaatataaatttcaaaacttacatgcgaagattcaaaaattacaccgtaacttacaaaagttatggtgtaagtttcataaattacactgtaatttacaagaaaacacactgtaaatttgagtgagaaaatcgagtgagagataagaagaaatctttcgagtgagatatagcaaaatcgattccataattttgaaagtggtactaaaatctgactcatggtggcaaagaagagtgaagttttgtgaattgagaagccagcaagaggaaaacctggtgcatttgagggcactcttaattggcataattattctctggtagataattttgatggaatagaaatttggtcataagtcccacatctgtactccaattttcataagccccacatcattcaaaatgacaaatttacagaagatggatttggtttattttaggcattgatttaaaaaattgtctgtttaccatgttgtgctcag

SEQ ID NO: 12942 - DNA, 659 bp, Oryza sativa
  Intron number 1 from transcript LOC_Os11g43860.2 (locus LO C_Os11g43860) derived from phytozome v7.0 (chr-ID Chr11; p os 26019856 to 26020514 reverse strand)
cccaagttcgtcgcattcaacctttccggatctctgtaggggtattgataaaaaaaaagataagagatttttagggagtggcaaaaaggagtgttttttttaaaaaaaattttggtcaacttattaggattagtgttgtttaacacatccatcgatgaggtggcatctagcaattttgtggttactcgatccagtgcttcagttgttcgaatcagttccttgtgatatcctcgtttttttttattgctctcatttgctgttgtaattcaggattttttatcacctgatatatatatctaaatttattcccctgttaccaatttttctctccatgaatcgttcggcaacgagatcattggaataatttagtttttcttcacgaggtcttttacctttgcactgtttgctagccttccagactactcctgtttggtttggtggtgaagtggtgaacaccttttcatcaaaaagccaaaaaagttcttttaagcttgacaatttattagttgctgaactaggtaggttgatattgtactgtagtagccattattttctcctgttcataagctaacattttcttgatgttagtatttctgatggaaactggcatttgtgttgtaacaggaactgggaatactgcagttctcgtcttatactag

SEQ ID NO: 12943 - DNA, 355 bp, Oryza sativa
  Intron number 1 from transcript LOC_Os11g34330.1 (locus LO C_Os11g34330) derived from phytozome v7.0 (chr-ID Chr11; p os 19659931 to 19660285 reverse strand)
ctgatcttggtgtgtccttcttcctcttcttctttgttcctttgattttttggttcaaaacaattaagcaagcatttccttttattaaaagtgtgtttctctctcttttattggctttctgggcacatctgttgctttttttcattggtttaccctgccaagtatacatgttcttccatctgttcagtccgtgttcttccctccccttctgattcggctcctgggaattttcttatccctgcaaatttttttaccgtttgcttgcacatcatcacaaggctctaaattaatctgtttttgtttaatcgtttgttcttaaggtggttggacggttagcatcttcctcctcaagctg

SEQ ID NO: 12944 - DNA, 913 bp, Oryza sativa
  Intron number 1 from transcript LOC_Os09g12600.1 (locus LO C_Os09g12600) derived from phytozome v7.0 (chr-ID Chr9; po s 7223284 to 7224196 reverse strand)
tcttcaacatctacttcaacatctacaacaagcaggtgaggcggctttaactttgatccattgccgtcgccaatttggcggagatttgggggagactaggatgtttcatttgggatttattacatgtgattctgttagtggtgaatggttcgctgatggcaatctgatcttggatcgggcattcgccttttagattcagcaaagatctactcgctccgttgagattgttgagcaaaagagggaactattttgaaattgattttatttgtcttgtgaatcacttctaattataaccttttttgcctccatatgctggtatatgtcgttttctgtaaatgtttctaacccacttactgaatgggtgcaagaatttgctcaagctcgtctagatcttggattagtacaaactcaaaatgtatattgtggaaagaagagcgatttagtttatttcgttgggcttttagagatgttcccccacgttacaccttttctatcaaacttttgtcacaactttctaaaaggtacatttgtggatagtttatgtttgtatctggtataagatgtcgaacgggtaatattgctaaaatcatgtcttctagtgagtgcagtagacaatttcccatgtcttctggtagaaatatagaatatagaaggaaaaagaacaaacatttcttcaaagttgtccagactcatatgtatccatgtcttatagtgagtatatccaatgttctaccaaaacaaattgtgctagggatggaagtttgttttcgttcattatatatggtgtcacttatggttaatctgttgaaatttcttgatctcctcattggcttcgtgtagataaaacaactttcctttattgttcctatgtgtgacaggttttgaaggtttttccataccccataaacatcac

SEQ ID NO: 12945 - DNA, 880 bp, Oryza sativa
  Intron number 1 from transcript LOC_Os11g27000.1 (locus LO C_Os11g27000) derived from phytozome v7.0 (chr-ID Chr11; p os 15089563 to 15090442)
cttccccagtcgtcgtgcccgccttccatctcacggtgagtggctcgcccacctccatgcctcccggtgccacccccgctcgccagcctccccacgcctccgctatcgctcgctggcatgccggtcgatgcatgtgcctgccacatctagggaagaggaagaagttgagaggggatgaggtggaggaagtggggcccattgacatatgtgccccactattttttaatcttattatttgactgacatgtgggcccacatattttgttttatttattaaattgttaaattttgctttatgtgccatgtcagataaataccgagttaaattagccatgtgagcaccacgtcaactgaaaccgctgtctaaactggcttgagacttattttccactggttttgtatctggttttccggttgaaggacggaaatcagattcattgacaagttaagggacctcggatgaacttatttctgcccaaaacaaccttactgtttgaagaaaaataagcagagaagcccatttgtatggctggccttagccctttagttggcaaaagcccaaatccgtgttggatcatatacaaccagcttttgccaaaacatgttgtttctcaaaacatagtacgtattttgttctgtgtgcacgcttttcaaacatgttatttctcaaaacatagtacacattttgttccgcgtgcacgcttttcaaactgctaaatggtacgtgttttgaaaaaaaattatatatgaaagttgctttaaaaatcatattaatttattttcaagttttttaagttaatatttaagtaatcatgcgttaatctattgctctgttttgcgtgcagaggagagaggtttccaaccctccaacagaacatca

SEQ ID NO: 12946 - DNA, 824 bp, Oryza sativa
  Intron number 1 from transcript LOC_Os07g31510.1 (locus LO C_Os07g31510) derived from phytozome v7.0 (chr-ID Chr7; po s 18694127 to 18694950)
acgagggtgggggcggagagagttctcacccgcgggtgagtggggacagggccccgcaaaattccagagatgggggcggggatcgaaattaacctgtgggtgaccctgaggagccccagatgtgagttacttctctaaaagttgcccattgcaataatatagatccaacaatcccattcaaaattggcatataaaagctcaacaccctagttcccctcaaccgtaatccttttcctttcttcaatcaacccacaccgcccgaggctattgaaattttagcatactattattcagtgtatttcaatatatttatggagtattaactccatcgggtgatgtggggccccggtcacccgtcgggtcccatgtgggggtagggacgggtgatgtttgtcacccaacttcctttctagggccggggacgggggcgggggcaggggcgttccaacccaacctggccccgcctcgccccgttgccaccctacactcgagcaatagaagtactactcccaccagtcatgaaaaatatatacttatagacttggttagtttcaagctaaactttaaaaaactgatttatttttcaatattttgattagttgtatgataatatacatagcttttcctccaaaaataatttcataattatcaggttttccctatatttctgcaataaaaattatagtcagaattacattttgtagaccaacataaaatgacacatttttataaactataagaatatggcacatgattttgttttctttttgattttttctatctctataggatctagcggatcttatatttgtggtggctcgcgt

SEQ ID NO: 12947 - DNA, 798 bp, Oryza sativa
  Intron number 1 from transcript LOC_Os12g12300.1 (locus LO C_Os12g12300) derived from phytozome v7.0 (chr-ID Chr12; p os 6760850 to 6761647 reverse strand)
gcagcaagctcaacaacaagccagggtctgataaggtataccctaccacctggaacgcgcccctccatgcttggtgtcgccgtcttgttcattggattttgggggtggggggttagtcccctttggtggttggggtttagttttaaaaaaaggattgctggaatcagaggtgctagatgctgaatcaaacctcgaattgcttcagtgaggatgaaatttggttcaagagaaattaatagtgtcggttcgtttacttgttctatggaaacaaaagtatatgttaatgtgcccatgtttcttccttcagtttttcttttcctttttcctctccaagtattataggtttaaggagtcaggcaaaggagctttcaattttatggcgcttcgtagttttgctcaccttagcaagggaagatactcctaagaataagaaaatagtgtgacccttgagagaattgctatcaacttttttctgtttctaaaatggcttgaagttttctaggataggggatagtttttgttttcttttacttttgtagattgtcatgccagggctgtttgtcacgagtttaagtattgtccatgtaattactctctatgagactatgaaatctttgttttcgttttttgtcctctgaccaattacaataacacatgccttcttaaactgatccatagaatttctttttgttatttattaaactcaacctttttatggttattttctgctggtctagtcaattccgctttgaacaattaagataatcagattaatctactattttgtgcagtgggagg

SEQ ID NO: 12948 - DNA, 976 bp, Oryza sativa
  Intron number 1 from transcript LOC_Os09g32610.1 (locus LO C_Os09g32610) derived from phytozome v7.0 (chr-ID Chr9; po s 19461082 to 19462057 reverse strand)
gcagcgccgtcgccgccggcgaaaccgacaccgctgtaagctaagctccctcggcctcctcctccggcttatataacttgttcagattgttcttttgcaacaaagcggccatgcccgtgatggtgtttctatccgggctagtatgtttctttgtaggatttctttaaaaaaaaacctgttttcttttcatcagggggttaaacctagtgcattggttggtaacaagattaagtgttcctcattgtttttgtttgagtaggctaggtatccaaactggcgtctttctgaacaaattttaatctacaatttattttctcatgattggggggggggggggattgtatgagatgtactccctcccgtcccataaaaaccgaatctagatgggatgtgatatattctatatgtccagattcatagtaataaaatgtgtcatatccaataggattggttttttatgagacggagatagtttttttttttataacaacatgagatagttgattcgttggtgaaagagtgatgcagcctatcatagcatggggcacttaactgaacatggcaaccagagctgaaacttgtgacttgggtttaccgaattgtgagggtgaggagaggagtggggaatttagggattgggaaagaaggatgtgatttttcactgattcgtctgctccaatgtattgctgttcagttggatactttggagtgcaggagatacacactttggggagactgcggtatttacaaaattttgcgcctgcgcactatgaattgttcttttctcttagattgctacaagttggaaactcaattggcattcaaaagctggataacagaagaaaattttgatttccctgtgcttgtttgtgtgcttcgatttgtccgcttccttctgttattgtttgaattaactataaccatgcatgatgtgcttgcagatagatcaattgctaaattgggtaaaaggaaattc

SEQ ID NO: 12949 - DNA, 442 bp, Oryza sativa
  Intron number 3 from transcript LOC_Os08g02070.1 (locus LO C_Os08g02070) derived from phytozome v7.0 (chr-ID Chr8; po s 679417 to 679858)
aaacaagaaatcaatctactgcagaagggcctgaggtaaaaactattcacagattgcattacagattggtataattcctttctagaagaaaaaatagataaaatcatacaatcttccagcaaaaatatccaagtttgatttcataaacaaacatagctttctatgtccaattagtaagttcacatcgcaacaagtatgcaatgctatccagacttggtccacactcagtatcattcactagatcactgcaagtaacataaccatacatggaagtgttacaaaaaaattgttgaactcacactaagtaaaagagcttcattcaccaaaccgaactgtttactcgagaaattgatgtaataagaatacatcatatattatttacattataatgagttcagacacttaactcttgacaaaattaaaacccatggcaggtacatct

SEQ ID NO: 12950 - DNA, 813 bp, Oryza sativa
  Intron number 1 from transcript LOC_Os11g10670.1 (locus LO C_Os11g10670) derived from phytozome v7.0 (chr-ID Chr11; p os 5849184 to 5849996 reverse strand)
cgacgcaccgccggtgttcttgatcgactatccaggtagtacgaatttcctctctacggttggggatatatgttatatgtatgcttggttcaatgttttgcctttttgctggatcctgattcaatccatctagagaagagatttttattttatttttttggaatttttttcttcttgacagagatatgatgtatttttgggtctataatttggagagtaccgtgtactttactcttttcctcccaagatataagttacaaccatcactaacataagaaacaaaaaataattactattatctttctcgtttgaatcatatcaagtacattgtatgcacttaacgggattagagatgttgagagtaaatgataaaaaaaatgaatttaggggagaggggaggcgttagttaattatatacatgcatacattgtattatgaaacattaaaaaaataaaaaaatagttgtgtcctactccctccgtcccactcactaagacatacacatattttaaaattcaactatgtaaatatttgaccaataaatattttaatataaatttaatttcatttgataaaaataatatcattcgattgttatttaaatttattttcatatgattatgattttgttgctacaaacattgttattataattttaaagtcaaatattatttttgaagactgtacgacgtttgatcgcgccttaacaagtgggacagatggagtatattttaggatggacagagtaatttggagagtacagtattactgagtaatttttttaatctctactcaagatcttttcgagagagg

SEQ ID NO: 12951 - DNA, 991 bp, Oryza sativa
  Intron number 1 from transcript LOC_Os07g22650.2 (locus LO C_Os07g22650) derived from phytozome v7.0 (chr-ID Chr7; po s 12762962 to 12763952)
gtgtttctgattataacaacactctgaaggtaattatatatcttgacaccccctatccagagagcctttacttattaatatgactgaattacacattgggccaccttttattgtcatagcttcacattgaaccaccccaaatctaattttttcactttagactagctaactttacatttcttgcactttgaaccatcctgactttcttctctagccatgtctatgactatcctatactcgggtaaagatatgaccggctcataggtggaggatttcactagcgtggtggagccaagtcctcaatgccgttgatgtgctaaagaagtggttttggatggtccaaagtagaacaaacataaatttagctagtccaaagtgaaaatgcggcaaccaaagttggtctaaagtgtaattcactctattaatattaatcatgtacacacatagcgagatgaaactatatgaacatgtaactgacgatgaatgtccacattagtgtcctatatatttttcttttgagaaaaaaacgcatttcaatgtagtacaggaattgctcgccagaaatttagggcccctttgatttggaggaaaaaatataggaattttggaggatttcaatcctatagaaaatttttttatgaatgcctttgaatcagaggattgaatcctaaccaatcatttgaaattcctatggaatggacaatcatatagagattttggagaaaatttagcaagaactctaaccttttggaaacttcctttgagtctctctctctcatttgatttttgcgtttttcctgcggtccaatcaaacgatcattcctgtatttttcttgtgtttttcaatcatctattttacacttcaatttctgtcagaatcttgtgtttcctattcctctattttttcaaccccgcgattcaaaggggcccttatttatagtgttttcatgctgcaggtgggctacgatccagagattgactcgtacccaag

SEQ ID NO: 12952 - DNA, 884 bp, Oryza sativa
  Intron number 1 from transcript LOC_Os07g22910.1 (locus LO C_Os07g22910) derived from phytozome v7.0 (chr-ID Chr7; po s 12905352 to 12906235)
tgttaagtttgagtctctcccagaggtatgtaaaattttagaatgaactgttctctactgaatgtgccaagggactggatgctgatgcttttgttcaaactcactaccaggacatagtgtcaaggataatatcacaactaacattgaaggaagctgttgtaatgagctcgacatcgaccaagttgagaagagcttggatttaccatcctaatctttactttgacacttcaatagtgtttgccagttctgatcgccataagcgagtgccgagcactgagacgtttattgacagagtcaattttatcttgaggacgcacagtggtttaggagtgaacaaacttgctgttatgtttgagttgaggaaggagcatgcacatgacattgatggatatcaaagaggagttgcagtttggagagctgcaggtgtttttcagttttgtgaggagtagccctagcaatcccggccttttcttttttttttttacttccccctccgtttcctgctctctgggggtgttagtccctggctcgacagtttaatgtcgtgtaaaatctgaaactctccccctttcaatcttaataaaatttggtcggccccttcgccaacccggcaaaaaagacattgatggatgggtttcctttgctgttacatccaaggcaagggttgtcaccctcaacttttctccatatcatggatcgcatgatcgcagttacaacttcccatgtcatcttttcaacggcaaaagtggatcccaccttcaagttcttcaacttgataccgttactttgggtccaagtcctcctggcttttgtggctttgctaaccttacggtgcttactttggagaatgtgcttgtattgggcaatttgcagttattactgaa

SEQ ID NO: 12953 - DNA, 690 bp, Oryza sativa
  Intron number 1 from transcript LOC_Os09g07660.2 (locus LO C_Os09g07660) derived from phytozome v7.0 (chr-ID Chr9; po s 3854308 to 3854997)
tggggcgcgccaagaaaatcagaagcccacctgaggtgaccctttcttgcacaactctccccccttgccaagaaaatccgcgtgttctttggctccgggtgaaatcttgattcttcttccttaaaattgtattctgggtggggaattggtttagtgaaggattagttgctgatgtatgcattgtttcttgggttttgtttctgggtcgatggaatggaatatagcaagaatgggctaatttggtggctgcttgctcctagttgttatgtcgatctgtgtttatagatgaattgacaagcagtttggagaaaaaaaatattcacattttgacagttaatttgtagttcgatcaggaattaatttttgatatttgctccttaatctgttggagtatgagcacttctcatgaatctctttggctaatccattccgaacaagatattagatgattttctaagaacgtctgctgaatatctgtatagcaattatgcaaccatgtggtgcctatgtaatccagtccttaatttcttggaaatggaaattgaattttatagtttaggacatttacacaattatctcaaggctttagtttcatttggtaggctggcatttcattgcaattacatttctttttgttctgctgtggatactgatgaggaaatgtttacgaacaggagcttttgattagcc

SEQ ID NO: 12954 - DNA, 906 bp, Oryza sativa
  Intron number 3 from transcript LOC_Os10g28410.2 (locus LO C_Os10g28410) derived from phytozome v7.0 (chr-ID Chr10; p os 14706418 to 14707323 reverse strand)
agaaggggctcctgccgcaggcatgtgagtatatagcaatcaaagcttgcaaattttagctcaactttgtggtttatctagtgtgattagacaggatattgcatgattgaagtgatatgaatttcgtggttttgttttatgtgattagacaagaagatattgcataacttaaagtgatccccttttaagttattgaccttttgattcattatctaaaaagatcttcttgttcaaactgtaagcattaacagcttgtctatattaagggcttggatgccacaaggtttcttgtctgaacactgcataaacagaactaaaatttgggtctccctctgtaatctgctcaaatgaagttccttaggtgattgagaattaactcctagaataaagcttaacaatcaccggggttgccgtgtaaaaccgtttcaaacagcatcaagctctttcttggccagcagagtagtttacagtaacaatgtcatgaacatctattggctagtttggcacaactcaagatttcccaaattaccttacttaagggcttcaatttacagcccctctgactggatccaacttatttgaggcttctagtgcaatgaggatttaggcttaaatgtaaggccttagaaaccttcacctttggcctagcttatctttaaaaaatgcataaactgaagcagtagttcaagctagtccaaaaaggttccctaaatgactatatttcttattttgtggactgcaattattttctggtattccatacttatttgaaaaacagtgatacttggatgattacaagtatgctcacattttactttttgaaatatgcaacattttattattgaagtatcaatctatatatcagtgaaattaaactgaatgtgcatctcatactgcagtaccttc

SEQ ID NO: 12955 - DNA, 417 bp, Oryza sativa
  Intron number 1 from transcript LOC_Os11g11070.2 (locus LO C_Os11g11070) derived from phytozome v7.0 (chr-ID Chr11; p os 6119151 to 6119567 reverse strand)
cgaagggtactacatgacactcatcctgcatttaccttttggttccatctagaaggttcctaatgatagctgattatttattactgaaatgcaaactgtacattttatcttcagcaagttctcttagttaatatcgttagatgatgggaaacaacttggaagttgttaatgttggtttacatatgttccttttcctagttttactggtatgtcgcttcctttgtttgcatagcatccaaattttctgccttttgttttggtcatgcttcagataatctattttgaggattggaaagtggtgattgtctgtttcagtttttcttaatggcaagcatgcaaacttgcatgccacctttttatgttaatcttgccattgttgcaggagcgtgaagagagacgcaaaaaattaaagagaga

SEQ ID NO: 12956 - DNA, 559 bp, Oryza sativa
  Intron number 1 from transcript LOC_Os11g11110.1 (locus LO C_Os11g11110) derived from phytozome v7.0 (chr-ID Chr11; p os 6142922 to 6143480 reverse strand)
tgacaacaaagtcaacataagagttcagactacaggtaatttaaaatattatattatcctgatgtttttaatactgtaagatggactgaagttgttggtttcagacctttttttatcttgaatgcatattagattaatttgtgcaacttaatcaactaattaaattatgtttcctctcaaagtttgtcttttggcatttaatattgtttagattgtcacctaacatatattttcaaaatggtaaatagtcccattatcttgtatattttttcccacttgtggtatagataggtcttacatctaaatagaatgttatgggcatgtttctgttgaaagataattcgactaccaaaatggttagtaacttctaacatcgatattcatgtttgaaccaaaagttaaattcaaatagatgtatctcaaagaaatacttgtaccattatggtcgacttgatctcattgccttcttgatattttatggtttcactgcttttgtccctgaagaaagtgtgcgttctcttctgacgcgtttttatgttggcaggggatccagccattg

SEQ ID NO: 12957 - DNA, 931 bp, Oryza sativa
  Intron number 1 from transcript LOC_Os10g32680.1 (locus LO C_Os10g32680) derived from phytozome v7.0 (chr-ID Chr10; p os 17042927 to 17043857 reverse strand)
ccctccccaaggtaacgcacgcaccgccgcgcgccccacgccgccaccggcaggccgtgtatatctgtgatcgagttagtagtacgatcgaggttggtgcatttctagcgtttgcttttgctcgagctgtccccgtagagcgtgtggcggtggtgcggtttgcctagaactgcaaggggtttctgtttggaggttggattggatgcattctctgctgctgtatggggacgctggtgtgggggcgccgctgtgtaggttgacatgttttggctggtgctctgaagtctcagactctgaattagcgcaacctcgcatgcattgttgctactgatttgttactaatatatttactataatattattgttatgtcttgtaccttaatccttaagtcaacatcatgggaaagtgttgattagaggccctcggtcctggagttattgaaagaaagagatttttgagccactattctagaatttaggacagaccattatacagctttttttttctttaataaggtttgtttaattagaacgtgcttgttcttttgatgttgttacagatggaggatccttgtagtgtgctaaaaatctgaactgtccttgtcagctacattgttagtattgttctgcaggcatggtttgttcatattaatgttttacatgatgtttaaaatggatattaggcctggcatgcaaaattttgatggtaattatgttaaatcgaatgccaatgatcaaccatttctttttcccatatgtagtagtattagatattatatgcttggattatactttgccgtgttcttctttcttttctgtatgattactgaatgttcacagttccaatttccaagggaatgaggtgggctaatgtcttaaattttattccgtttcagggtgctgattcatttttccggacagttatctcaaa

SEQ ID NO: 12958 - DNA, 269 bp, Oryza sativa
  Intron number 2 from transcript LOC_Os10g30080.2 (locus LO C_Os10g30080) derived from phytozome v7.0 (chr-ID Chr10; p os 15551028 to 15551296)
ttcatacagcataccagccaccttggctggaagatgtaagaactccaatcgtcactaacttgaattgtttcatcagttttcaagattagtttttgattgcttcttcttggtttcaattattcgcatcaattggaataacttagtggcaaattatcaagtgcaaacccccgatttcaaatctctcaaattttaaaagaaggccttgattttgatgaggggattgaaatatgctagctctgcagaaagaagagggcgcggccggtgatcct

SEQ ID NO: 12959 - DNA, 865 bp, Oryza sativa
  Intron number 2 from transcript LOC_Os12g15260.1 (locus LO C_Os12g15260) derived from phytozome v7.0 (chr-ID Chr12; p os 8698533 to 8699397 reverse strand)
tttctctgacggattccattctagacccgtcacaggtgactagatacctgtgacgggccgtagccggatggctcaccgatgatggcatcccgtaggacccgtcaaaggtgaccctcatcactgaccagcacttatgtccgtcacaggtatgccgtcaaaggtgtgaggatctggtgtagtgactcgtcgtactagtgtgctaaataacagacatcacggttcagttcctgatgccgctcactccaaatgctgtatagtctatgcatgcatgtgccacacatttctatctctaattaatggtgaggactattcgttaattagggcctaacttgtttttaacatgaatgcgtaaaatattgcttcaagaaaaagggaaaccgatcgattcttcatttcccctggcatatgtactgatcctcttgtatgcaaaaaactcacaatatatatatggagtagtatgtgtaaaatcaaagtgtgtttgattcttattatgtgatgaacaattggcatctgagattattgttttttgatatttggagattattggtaaagtggttttggagatgattggatttgcaggtagtgaataggtgctgctgataggtggtcagaccgagtaggtgctgccggtcagaccggaggtatacgcgtgatcagactggcttgtccgcggtctgaccggccgattctatgtcggtttcggtttcgggttgtttcaatggatatccgtgggtgtttcgtgtttatggcttttagatgatactatgcgtatgtaatactgttttttgctaacaatgagtcaagttggagatagcttggtctcgaaatatggtttctttgtttgattcatgtgtaggtgtcttga

SEQ ID NO: 12960 - DNA, 513 bp, Oryza sativa
  Intron number 1 from transcript LOC_Os10g36200.1 (locus LO C_Os10g36200) derived from phytozome v7.0 (chr-ID Chr10; p os 19281907 to 19282419 reverse strand)
gcagaaagccattgaagccgttgcagacatctacggtaacattctgtaccatcccctttcttctttggctgctgaaacttgaaaaatatgttttgatctctgattcaaaaaacatctgcaaatcacatttggaagcattagcatggttttaggcagaggtttgataagagatatcatgtaaggtggaaattgtttgttacatcacataacacaatgaagatgacgatcgatgatatagttaggcatacggaatgatttcccccctatgtatgggattattaatatgtgctgtttgcggtgaacaactgtacattagtttctaaaggttagacaaaagaactggatgctccacatcatgtattatcagctgaacatgtaatgatgcaagattggatcttcaaagaagtattttgtaagataaactattactgtgtcaacaagaaaatctaatgcattacacacctcatttcatgtacaggtatcgattccatagctgcagatttgaaggacaat

SEQ ID NO: 12961 - DNA, 1028 bp, Oryza sativa
  Intron number 1 from transcript LOC_Os10g12120.1 (locus LO C_Os10g12120) derived from phytozome v7.0 (chr-ID Chr10; p os 6745945 to 6746972)
gtagcgaaagcgaacaaggtatttggtactattttggttgcaggtcgacgtctctaattttatcccttttcttaagaacaatctgaatttaaaacagagcgtgagtacgtaccgaactacctacagtatctagagaatttattatttgtcattcttccaaaatacacatgtctaaatgaaaacgaaaatttagaagagtagtatttggacatgtgaattttgggaggatggcaaatagtaaattatcccctatattgacaaatattgtggtagtcctaagctaaacactggtatggccccaccaaacacagaaaatatatactccctgcattttattttaatcatcatataactattttgccaaaatcatgagaaacttaactatcatgcattttatttttatttatgtgagtatgtaggaaaagaatcaagaaacaacggactttaactccacatgtgcacaacaaaggtgtaagctcaacaaaaatctcatatagaggcagttttacagaggctttttacaaattgcttctaagatcaaaagttttatagtgtaaagaaactttacagaggcactttaaattgctttccatggttaggcattcatgttacgccctccatttcatattataaggagtcaattttttaaaaaaaattgatcaaatatattgaaaagcgtatcaatattttcaagtttcaacacacagcaaagatactatcaaaatatattcaatgttagatttaatgaaataatttggtggtgttgtagatgttgctacgttttaccatataaatatggtcagagtatatagaagtttgccttataaaaaaaaagtcaaaacgttcacttatgtgaaatggagggggtacggacttacggtgctggtgcattttctctttttcagaaaaaccctagtgtgtttgcaactgcatatccggttgctcccttagtaattgcagatcactgatgtgctttacttctatgccctgcagagctaagctgcaggtcgttggagcaatacgtccca

SEQ ID NO: 12962 - DNA, 555 bp, Oryza sativa
  Intron number 2 from transcript LOC_Os10g02760.2 (locus LO C_Os10g02760) derived from phytozome v7.0 (chr-ID Chr10; p os 1087032 to 1087586 reverse strand)
ctacagaagcccaacctcagaaaggtatatggcgttcatggcttgtgttaaaaccgtctgtgagctcacaagatccttgtattcaatgtatctattttgatctgacttggcttcctttctcatatttgaatatacctgagtgagccatgccaacaacaatatcagctgatcaataagtgctgggcgcatagttgtgttgtgtccattcaataattttatggcactactgctttcttcttgttctaaattctatataatctttaagacacaatggtcacatcaacagcctatgtccctcttccattactgcctatacctcaacaagctctgccatcattctttcagtgactatgaggcgcatttggtgcttttgaaatgtcagctatagttttcaaaaattgctgtttgtaaagttaactaggttgtaaaggtgctctatttttcttaaagctatactggtattctgtgtgtaatacaacaaaatgcctggatgattgaatcacatctaatacattttgtatgttcatgtcttgtttggcctccatataggacttc

SEQ ID NO: 12963 - DNA, 853 bp, Oryza sativa
  Intron number 4 from transcript LOC_Os07g29390.2 (locus LO C_Os07g29390) derived from phytozome v7.0 (chr-ID Chr7; po s 17256968 to 17257820 reverse strand)
cggtaagttgtactattttcctttcacaggacaagatttctgaccaacttagcagcatatgatgttaataaaaattatatgcccgattgtcttttaagtgtgttgttagtatatatcgggtcaatttacaattgtacatggtacgttaattatgtcttgctcttctgttggtctggtagtgactgctataccaggttttgatctaaatcttgtggtatgttatgctttggaaatgttgcaatcaactattttcctgcttaaagtagaatcgaaaataagtacaccatgcatggatataaacaaattatccttagggtagtcctttccttatgcacaaaccctgaactcctgaaggccttaacaagataaagaaaactatccttgccattgttggattaatcatcaagttttaaataatcaaaactccataaaaagacgatgaactagtgttcatccggaatttagtaggttaagtagtaatagttttacaggcttgaaatgcttctgccaaatgtagttaatactttcatatcttaaacattgtggttttatgctgcagaactagacctgatgcacatccttttcttgttatgaacttatgatgtttggatgctaattattagcagtacaagcatacaattagtaagagaagtagattgtatgctattgcctgtaaatataggaaattaaatctgatgcatataacctttttttatgggaatttgtgcatatgaccttactgagtagacataaaatatttaatgcaacaatcttaagcattcactgaacataatgctattgtaattttcttcctccaggttattgatactgccaaaggctcaattactataga

SEQ ID NO: 12964 - DNA, 839 bp, Oryza sativa
  Intron number 1 from transcript LOC_Os09g28610.1 (locus LO C_Os09g28610) derived from phytozome v7.0 (chr-ID Chr9; po s 17404900 to 17405738)
tccggccgccgctgcctgcggcgcggtgctgtcaggtcagtagcaccccgttgcctagcagcgttctagtattcgcaggttagccgcctcgtccccttggctggctgctccacttatttgagattttgggtttggggcgatgtttttaggggatctggggttgctcgttctctggtgcgaagtcgtttgatcatggatgggggtgattcaatttcgaatctacggagttatgcatgtgtatcaaataggaggaacccttcgtgtgtgtgtgtgtgtgtgtgtgtgtgtgtgtgtgtgtgtgtgtgtgtgtgtgtgtgttttggagcacaaacacaatgtgggacaagcgaatacttcaattctggtctatgtttttttttaattggcaggcgaatagttaggttctgatttgtgtgtaattatgcaaattccgcgagtttttttttggttgttgaaccgtaaatattggtatttgttagctcgttgtatttttgtataattagagagagagagagagagagagagagagagagagttttgcaatgtcagaccaacttcgccttgtgaagttgaataagtagagatatcaaccattagcaaccactttgtcatacttaaatcgactttcaaggttttggatcagggttattggttttccttacagtatttcggtagtaactggcatccactttcaagggccttcttctctttgttattttttgtcttgattatatttttcgtatttattgtttaatttctttcagttcttcagtattcagcaaagctaataatttgatattgcaggcggcatatccttttactagtggaggcctgacaga

SEQ ID NO: 12965 - DNA, 418 bp, Oryza sativa
  Intron number 1 from transcript LOC_Os11g29980.1 (locus LO C_Os11g29980) derived from phytozome v7.0 (chr-ID Chr11; p os 16962107 to 16962524 reverse strand)
cagcagatcacaagcgcaagcgacaacaaaatctggttggcacccctaattttctaacgatttttgtttatacttccttggtggaaaaaaaactactccctccgtttcatattttataaatcgtttgatttttaagtttatagaaaaatatagtagcatcctttacacaaaataaacatatatatatatattataaaaacttattcaatgttagatttaatgaaactaacttgacattttagatattgtcaaattttactataaattaggctaaacttaattatgtttgactagaaaaaaagccaaacaacttataatataaaacataggaggttggaaatttaatggatatttgtgtagtgacatattcttttttgttttcttcaaaaaggaaaacgaggacttgttcaactctggt

SEQ ID NO: 12966 - DNA, 789 bp, Oryza sativa
  Intron number 1 from transcript LOC_Os10g20650.1 (locus LO C_Os10g20650) derived from phytozome v7.0 (chr-ID Chr10; p os 10359645 to 10360433 reverse strand)
caactccctcctcctcccttccttgggtcttgctggtaatggtggtctctgcctgctgtgccatgaatgtttcttgttcttgatgctcctgttggttttgctttgtagaatctgcttcttgttttccaccaagaagtttcttggagtttttgcttcattctttttcttgtttttcttccattcattttctgtctttctttacttcgtatactacatgcctacattacatacttttttttgggttcattttatcattgttaggttgttctttatttctttttggagctctgtatttccattgcatagcttcattcgccatttttttttgtgatttcctcatcgttactcgagagatgattgtttcttttacgaacaatgcacttacagtactcgctcgcctcccgtaaaagaaaatttagtactaatgccagtggctatgtaccattatttggttattttttacaaaaacttgcctcaagataaaaattttgattatgtatctgttgttattatgttcccctttcttgcctcctcttttttttttttgagattttcctggttacagtactatctcttttaggtttctttagcaccaaaaaaagttcaaaacttccagactttttgaactctgctccctttgttggcgcaaatgccaattttcttttgcaacttgctccacatcttccatcctgttctcttccagatgttcttgcacagcagcactaatcgtctaatccgtctctctgtgattcttgcacagtttcaggtcaagaagcacacgaggtggcc

SEQ ID NO: 12967 - DNA, 962 bp, Oryza sativa
  Intron number 1 from transcript LOC_Os09g07120.2 (locus LO C_Os09g07120) derived from phytozome v7.0 (chr-ID Chr9; po s 3464855 to 3465816 reverse strand)
aggtttgtcggctgtggctgagttctgtatcttcttgtttgttttacttttcaactctgcgctccattcaagaatagttattggttaatgatagcttttaggaatgagaacaaaacataattcaggggtatcagtccttgggtcacaaaatattttacacgcatcacgacatgccacggtaggtgcggagatatgatatgaccataggccattggacctttaggatgaacgctggcagaattcaaaatgttctatatttcaatactattaagttaaatatatttcttcctgcagttttcagcgcttaacatcattagagcttatcatgattgcattaccaatttatttttcttttggagacgtatggttgtatgaaattattggagaagtatgtgtgtatgagttcaactattattgaaccatggttgaaataaagatcaagagcctcctaatataggcctcatcagaagcctatatgatttggttagttccttagaattgtgctttgctagcagtggggctccttcaaataacctcaggtaaaaatatttgtcaaatatgcagaattttttctaccataactgagaatagtgttcgtgtttttcagatataatttggtagtattcttgcagagctttgattatctagctagttcatgtttccctctgaacccaccaatttagttaaaaaaattccaactattgtccaaacaaagttatgccatgaaattatacctttattggctctcattcgtctattattttcttaaatattttgagaatatgttaattttcaattttcaatattttgtttcgactaaactattattgttgccagtgcaccaattatggcgacagtaatttatgcaataacattgctgctgctaatgaataaatgtatatgtctttgccctttgttcctgtataggttcgaatccacaaatttctagagaagacaaagaa

SEQ ID NO: 12968 - DNA, 294 bp, Oryza sativa
  Intron number 1 from transcript LOC_Os09g25934.3 (locus LO C_Os09g25934) derived from phytozome v7.0 (chr-ID Chr9; po s 15578778 to 15579071)
attcacttattcttcgaacacaaggttttacccaggttttctttttcttttctgtctctgttttttttatcgaatctttctgtctcttattgacatcaaaatgactttctcggtctcccaacgaatatagtaaacaagacgctatatttcacgtgctatcttcctattgatatgtttcggcctcttttgtgttcctagccaggctaatgatgacggatatcacagttcacaatgtgttacaatactaatgcgatgcgttcttcattgtgcagaacatcgagcacgtacctgctg

SEQ ID NO: 12969 - DNA, 821 bp, Oryza sativa
  Intron number 1 from transcript LOC_Os10g37860.1 (locus LO C_Os10g37860) derived from phytozome v7.0 (chr-ID Chr10; p os 20199835 to 20200655 reverse strand)
ctgtgaaggacttggaggcagcaggtactccctgcagagctgaactgattcttaactgttctggaggcagcaggtactcctgcagagctgaactgattcttaactgttctgaagaactcgtctgttcgtgaaaattgttctctcttttgactattcggctgttcatccttccttttttgtacaataagaacagtatagtagtttgagactttgagatgtagtagacttacttcagaacttgctgaaagttgtatatattggtgttatgagagagataaaatttcaggctgcatctgacagaatttcctgaactttgcttctgatatgtagtatatgctaatatgcctctccaatacatgatagaattttcagcatgatattgttttctttgtcaccttatacgtagtggatgagccacacgctccagggagaaggaaagaaaaaattcaggaggaaatattcggctgaatcatataataaacttattacagtgacaatactgagagtgaaaaaggctgagtccggctggttataaaacagagcgttgtactgaaatattcagttgctttttatcctttttcaagcgatatcatgtctccttcatacttttggcagaacgtacaccttgccccacaacaacagaaaagagatagatgttgctatcatttaggtccacacaaaacgattagtcgcatatagcagattaccatctttgcagatttgtttggataatattctctctttagagtagagatgaggagccacaaattaataaaaaaaattattggttactcctcaaacacagtaaaaatcactctatc

SEQ ID NO: 12970 - DNA, 577 bp, Oryza sativa
  Intron number 2 from transcript LOC_Os08g13350.2 (locus LO C_Os08g13350) derived from phytozome v7.0 (chr-ID Chr8; po s 7941620 to 7942196)
tgaaagttactggggtatgtgaattactgatatctagttttaatttgattattctgctgtttagtcttttattgtttcattattatttttctcttcccctgcatcagcttgcacagctgattagaatttattatcaagatcacattattaatatgtgcctttgcacagcataatttaaattcttattatatgattagtgatgtgatgttagcttcattttatttctcagcagcttttgtgttgaggtattttatataagtttgacatagtaatttagatggtcatgagtagtaacaatatcaatattgataaacaaccggaacaaactttcaatggtcagaacgtaggagcttgttttttcatataggtttgattagtgtcatcaccaagtaatattttaacatagtacaaacatgacttcttatgctacaactcgtaaatgatggtggagcatcttgttgcctaatactttctgaaaaaaatgatttgttcttttacggttaagttgttttatcttagattggctttcttttatcatcatttaccaaccaacatattgaacttcacaggttgttac

SEQ ID NO: 12971 - DNA, 955 bp, Oryza sativa
  Intron number 1 from transcript LOC_Os07g47380.1 (locus LO C_Os07g47380) derived from phytozome v7.0 (chr-ID Chr7; po s 28336847 to 28337801)
gcttcctcccctctcctcgccggagcgccgcccaggtactaaggtttccttcacttcttaggcctgcaactcctgtttcgtggcgtggggcaggcaattcgtcgaatggcttgtggttgggaagaaatcaagaaattgcagcgcagcgacagtaaaattctagggtaattggctaaggtagtgaagatgctacattctcgggaacgaatcacctgaccgggctgaaatctgtgtagtgtagttcaaggcgtactgtaactttgtaggtgcagtttgtggtgaaaattttccatctcgtgtgttgtttgaaacatgaaactagctcagtcttagcttgaaacaacaacagaacttacttcttggtgtagaaacgttaggtgtgttgtgactactgactagtttcccataattctgtccccctttttggccttatccagttgcaatgtaatcttatcagatgtttctttcaggaagagttgcttgatacactaacagttcaacacaatatccttttgatgtttatgttccttgtatacaattactctgaatgagaaaccccccatttcatattataagatgctttgatttttttctaagttaaacttccataagttcaatcaagttaaagaaaaatatagcaactcttataacacgaaattaattctattaaatctaacatcgaatatattttgattatatgtttgcttgatgttaccatgtttctatgcttttctataaatttgatcaaatttaaagaagtttgatttagaaaaaaaaatcaagtgtcttgtaatatgaaaatggagggagtaacaccctattagcatccctacaacaaatcactgattcctgaactattttgtggttaaattaaaggcttctgaatagttcttatttatatccgaactctcagatgtgtcatttattcttggaacagacatatcaagttctttcc

SEQ ID NO: 12972 - DNA, 610 bp, Oryza sativa
  Intron number 5 from transcript LOC_Os07g41570.1 (locus LO C_Os07g41570) derived from phytozome v7.0 (chr-ID Chr7; po s 24911453 to 24912062)
ctatctgtgtatatcgtgcaggctacattgctgaggtcagtattctgttctgtctcacctaatgtcttctttcattgtacttatcaaattttttattgtttcttagaatgaattttggtttgataaaatatgacctcatttagaatttcatcggtgctctcgaactgtatggattcacacaaactgcaatgtatattaccagcttttgttttcttctaaattccatctagtagaatatatatcatctgaatgctgtagacatatcaaagatggtaatgttactaccttctctacttaaaaagaactaagaacttctgttactaatgttacagtgtacatatgcaaatcaagctttcgttttgtcctcttgaagagtatgctgtttgttatgtgaggggtggtgcattgaagcgcttcccacaaaataaagttgtgtactagccagaaactgactcattttctgataaattgagaaaattctaccttctgatatttgcttgctgaatctgaacattttacggttcttcatgtgttgactgttttgttcctgttcatttgaaaacaaattatttcaggacaggagaaaaattgaggccaacctttttcaggg

SEQ ID NO: 12973 - DNA, 548 bp, Oryza sativa
  Intron number 10 from transcript LOC_Os07g41570.1 (locus L OC_Os07g41570) derived from phytozome v7.0 (chr-ID Chr7; p os 24913265 to 24913812)
tccttggaggagagtttgtaagtattcaaaaggattgtgcattagcctcatatacattctgcttataatcgtctatcattataatattaatccctgccaaattttattattagcaccatttttttgtttaaatctcttctatcctgattttctaggccttatcctgctcattaaatctgaggattattcatctagtctgtcttagcactaacatcttcttttccatgccatgcttattttgactttttaaaactgttttttgagttgttttaactcaatctagttttattcagcctattttttcatctttgttgtacgttttccctacattttttagaagcccatactctcttgaactaatgaaacaggataggacaaatgtttatggtactcctaccacagtaataggtctactaaaatgttttaccatcatttagtcaagaaactttccttgcctgacatgtgcatgagtgatttccatgctgatatttaattaccaatgatctcttctactctaatacatcttgaaggctcatcttccaccaagt

SEQ ID NO: 12974 - DNA, 631 bp, Oryza sativa
  Intron number 1 from transcript LOC_Os11g41875.1 (locus LO C_Os11g41875) derived from phytozome v7.0 (chr-ID Chr11; p os 24711862 to 24712492 reverse strand)
gcttggattcttcatatttgtggtcattggatcatgtatgccttccaaccttatctttatcctctgttgattttatttcactgacacttgtgctgtgttactttagaatgcgctgatgcatagcttattattgtctcttcttttgctttcaaaagataatgacaaatgaattccatcacattagctttaagtcttcatgacaaagcactcttaggttttgaattgatactagaggaattaaaatgctgagtgtcactctgctacaaattcatgataacctaatgaaatagagctggctatgtcactagaaatttaagactgctattgtgcgtgttttatgagtgatttggtgaattcttaattagttattacaactcaaattctaggttatttttatctctgttgtatactataccaacaaatctagctcttcagtgcatgcaagtaggtcatgttttgatcttctgttgtgtagccatgcaactttcttgcctatctatatggaacttacagttcggatgttctctaggccaccttgctatgtttcttctgctattattgcgcttttaacaccatacatttttgtgcatctgcagctttgtttcagataatcaggacagcaactagcggc

SEQ ID NO: 12975 - DNA, 925 bp, Oryza sativa
  Intron number 1 from transcript LOC_Os08g19260.1 (locus LO C_Os08g19260) derived from phytozome v7.0 (chr-ID Chr8; po s 11520174 to 11521098 reverse strand)
gctgatatttgcttagacaaagtaaaggaggaattccctcccaattacctgcccctacccagttattgaaaaggagggagttccttcctcaattttccatccccatctcaccaaaattctcatatctcccaaccaaacaaaacacttaatagcctcatccctctaaactcccaatccttcctaaaaactccctccaaccaaacaggccgctagagtttcacgacatgataaccgaatcagaaaagtttggatctgtctctccatgcacgcggtagacaaaactggaaattttgaatccgttcgtgtcttccatatctcgcgcgcgttcgcgcagtagacctccccacacctacacaccagctgtatccactttgccgtgttcatgtcaaaaatcattttcttcacttcctacacaaatgctattaatattaaggcacatagtaccttgaaggtctttaggcagtggaagggcatcacgatcaagagaaatttgtggattcatgctgaacgaaataaaaattactgacatatagttctcacacatacggtttttgtaatgctcgttagatttactgtgaatctctagggattctggtttcttttatagaaaaacatgctatgggggaccttttctttactgaaatactacttcctaaaatgggggagtgttttcattatcaactcttttgatattgataccactttggagtatgtagtaatagtcgttttggaaatcatatggatttctttagtggcttgtacatgagctaagctgcgagccttggcagtattcagagcatgggtcctgtagtaaagatggaatgcttgcatcagttttctaaagtttgttggattttcatgtggataagaaaatttaacttcatgcttacattatatcaggcttcaaggacaagaacaaattact

SEQ ID NO: 12976 - DNA, 630 bp, Oryza sativa
  Intron number 2 from transcript LOC_Os09g19890.1 (locus LO C_Os09g19890) derived from phytozome v7.0 (chr-ID Chr9; po s 11905534 to 11906163)
cacgtgggtatgttatattctttcacaatcgctggaattcactatgatttgccggtgtcttccttcttggattcacgccgtcttaaattcttaatgatactagttattttaagaaagtggtatgtggctttttgtttggtcccaaacctagggaaatccggtctaactggccaatttagagggccaaacaggtgattacgtgataacaagtaggtgtgcttgttccttgtgaacagcccagtagacccacttttagaataccgatgttttgctttacaaggataaatcttatggcttattattttcacgtatcacattacgaactagttctgaaaatgaacaaacacaaatgttattccaattttgtatgtgtgaaactagttctgaaaatgagcaaacacaaattttattccgattttgtatgtatgaaattgtgtgaatcttttgattccttgttatgatccaaaattgaagtaatggtagtcatgcatgccttccatgtcgtgttatttctcatccctggaaagtcccagataccaatttgtttgtccaagcttcttcctggttatggtccatatattgacataatcgcattcggatgcaggggtacacaggattcttgtagttctg

SEQ ID NO: 12977 - DNA, 933 bp, Oryza sativa
  Intron number 1 from transcript LOC_Os10g25090.1 (locus LO C_Os10g25090) derived from phytozome v7.0 (chr-ID Chr10; p os 12856064 to 12856996 reverse strand)
aatcttggttgctgcgaccactgacgccagtgagctgctggggaaaaggaaaaaaagaagaagaaaatctctgtttgggttggggtctcattgtttgcttgcttgtgcttgtgcttttcttttttgttttcttgcttttgaggttcttgattcctttgttctggaccgccatggatttttggtcgggagaaggcaagattttgtctttgcagcattgggaccatggggggtgtctttgctggttcctgctttgaatgcctgtacccacatctttggtggcgtttgtttctgctgagctggagattttgtgaatgcttgttcgtctctttcttttgctgatgtttattgctctgagttgttaagctaaatcttgttttgttggatcacatgatgtggtttttcggtagatttgggaggaatgaggattttgagcagctttctcttgccccaaatctttcagcagctgtcagcacagtccagacacctttgctggttgatttgatcattgatggggattctgagctagggtttgcattgggatctttgggaaactctgcatctatgcacctggagtgtgttgttcattctgtttgatgattgtaggggagaagttttagtttcaggggagataaatgagttaatgaccattgtaggagcattcaatcatttgtaaagtataccagaaccaacaaaattgcccaagatggatccgtgacatcattgctcatccaaagtagattcagtttagtagctatttgcatctgtgatccatttcattggtcctgatatcatgtgaatctctaggtgggactggtccagctttccgttataagtaatcatgtattcatgttaactgaaaatttgtctggcgatattccacacctattgacttgaagtaattctttactttttattatgcagttactgtcctca

SEQ ID NO: 12978 - DNA, 224 bp, Oryza sativa
  Intron number 2 from transcript LOC_Os12g01200.2 (locus LO C_Os12g01200) derived from phytozome v7.0 (chr-ID Chr12; p os 118538 to 118761 reverse strand)
ctcagcctggtcagtcactctccctctcactcaccctactcccttcttttcttttcgagtttcttggaactcaataatttccacccttctttaccattcgctggacctccttcagcttcagggctgggaaatcaaatccatctccaaatataaatctctacaagaaaattccatctttgatttgatgcatgcaggtttcatcagcttggattgcgggggagacg

SEQ ID NO: 12979 - DNA, 628 bp, Oryza sativa
  Intron number 1 from transcript LOC_Os09g11005.1 (locus LO C_Os09g11005) derived from phytozome v7.0 (chr-ID Chr9; po s 6093107 to 6093734 reverse strand)
ggttttcacaggtgatgagaatcattcacaaaaaatatttactccttttgatctttctcctgtaatttcaatgcttttgagattgaacattttctacgcttccgccagagttgtttccatcttccaatataccagcaccatagctttcaatagttggtcctaggaaattacgaacattttagctgaccagtgtatgcttaattaattaggaaacgtatcccatgataatggatataggaaaaaccgaaaaaagtaaagaaaatgagtgccatgtaaaatatgaagtaaaactacagaaaatatttgatttgagttctttataagatttgacactttattttggatgcacggcagcaaactgttagaataccgcttaatgctttgatcgacattgcacttcgaaaagataaggtatatctaaaatccagatatagtcagaatgcctataaaacagtgaaattccaaatgtagttgctgaggatgctttccatgattagtgacaaaattttattggtaaagaaaagaagcccataagtcggcaaggtacctatgagatataacccattgcatttttgtttgtattgaacttacaattaggcatccatgtcttgcaggtgtttgataattc

SEQ ID NO: 12980 - DNA, 853 bp, Oryza sativa
  Intron number 1 from transcript LOC_Os11g30720.1 (locus LO C_Os11g30720) derived from phytozome v7.0 (chr-ID Chr11; p os 17424453 to 17425305)
ctgatctcactactagaaaactcattttcggtgttgtagggattcgattttcgcaggcggaaatgtaattcggagccaaaaccccgccggcaaaaaaaagtacccggggtggagagggcggtccgcctgcaaagatcaatcttcgcaggcgccgcttatatggcccgcctgaaaagatgcccctatatagtcttcttcctccccgagccatgttcattccccccgaagtttctcactcctaaagtgacttaaatatagagggggaggttttaaacttcaaatcttcggaggatttttctacggtacttagatctactcatttccacactaggtatgtaattttttaagcttttagaccttaatttgtgatggatttatgatgcaaaattgtgaaggaagagctccatattttttaattttatttcttttgatacgttgatgttagatgtatgtgtaatacttgatgcctcttgttgtagtggtttaatgtggtaacataaattcgcattttttttatttttgctatcacatccacctcctagttctagatctagatcttgtcatatatagagagagaataaaatttttaatgtctatttattcggtgcaatcaaaaaatagttgtattttgtaatatgccgatgatatgattttgttagattttcctaatgtactaatttggcatgtctgtgtaaaaaaaattaaaataaactttgattttttattactttacacttaacctttagttaattagttttgaatagcgataagttttttcaataaaccctacaaatttggtatcaattgtgcaaatattttacgtttatttttttagagatatcgaaagtaggga

SEQ ID NO: 12981 - DNA, 507 bp, Oryza sativa
  Intron number 4 from transcript LOC_Os11g41160.1 (locus LO C_Os11g41160) derived from phytozome v7.0 (chr-ID Chr11; p os 24191530 to 24192036 reverse strand)
actgtttagtgaagaggcctccaaggtaaacttatttgagtcctgacttatttaattagcagtacttttctctagcattttttatctttgtcatataatacttcagctattcgtcttctggaaatcttggacatgcccatttccttccattttattcttttgcgtcactaaacagacataatgtgatttggaacaataaatagatttattgggtttttatttttacaccggtaagaaaattataaatacagttaatctatacaagcaaccacaagaatagatcttttgcgtaacttgctcataggtttacaagagagattctaagatttctcttataacagaaaaaactcggatagaattcatcaaccatatattcagcactgtacagtctaacttatgttattttttgtgttacaaacactgtttcttagtccactcagaatcaccaaaaagttgtcctttttaactgcaggatttctcctggaattgctgacttgattaagaagc

SEQ ID NO: 12982 - DNA, 982 bp, Oryza sativa
  Intron number 1 from transcript LOC_Os08g07530.1 (locus LO C_Os08g07530) derived from phytozome v7.0 (chr-ID Chr8; po s 4225501 to 4226482)
ctcctccgtcatcctgcgacaaccacggtgctccagtaagtcaatgcaatgtatttactcatatatatactatcatgagaatataatattatatacgatagcatatgcgttctattaaatataacaaaattatatttaatataaattataacagtagtgtgtatacataaattaagttatatatactagaacaagcttgcaaaatacaataaatttatgcaattatatataatagtatttttttagacaaagagtatatgtttgctactattgttttgtccgtaaagtaagcgtttgagaaattatcgatgccagaaatataaaagtttgactgactctatggggtaaaagccaaatatttacatgggaggaagaagtaattgacgagcaacttaattagttgctcatgtttcatatagttactcgctcatgtttcatgtcagtttgacttttttcttagtaaaagttttttatatttggctaaatttataattcctttgtctaaaatataagcatatttggactcaagatgctactttgactaataatatctataaaagtaagatattttttaaaaaagttgcatattctgatagattgtttaataataaatatagtagcatcaattttacttgattgatcttttttaattggttttttattaatagtcaaagttaaaaatatttgacttgtcactatgctaaaaaaatttatattttgggatggatggagtagaaaaaaagcaacatctacagcactaaattagttttatatattaaatttaacattaaatatattttgataacatgtttgttttgtattgcaaatactactatatttgcctataaacttggttaaacttaaatatgtttaacaagaaaaaaggtcaaacgacaatactatgaatcgaaaagagtaattagttacctatgatttgattgttgcagcagcaaatagaggtgacggctgatactaacgacgg

SEQ ID NO: 12983 - DNA, 887 bp, Oryza sativa
  Intron number 1 from transcript LOC_Os12g07870.1 (locus LO C_Os12g07870) derived from phytozome v7.0 (chr-ID Chr12; p os 3978453 to 3979339)
tgaaggtgcggtggtgcccttcccggaaagctccggtgagcttaggggcttcaagtccggcaagtaacccaaacccttatcttaattgatttggattttgactcttagggttcttacctgaaattagggcccttcgaatttggggaattttgtcgggaaatttcaatttattttattccctctttttgagtttggggagtttcaatattgtttatcctcttttaattttgggaacttcaatctagtttattcctttgctcaattttgtttttttttttgctttggccggcgtttcatcgcgcaggcaggaacggagggcgccgctcggtcccctcggaaagattgagattaagataagataagattttcacggacgacggaagtaaattgaatcggactttcttttttctttgttttaaagtttttttcgtcattttttcgttattacggctgacggaaacgtttcaattttttaagtagtagagaagagaaagagatagagaggatagagatatatagtactgtgtcacatataataggattcgattttttttaccgcgtcacatataattcttttttttttgaattggacagaattcgctacagcagacggagctgccgctctgcgacgccgacgatgaccccgacgccacgtggaacatcacgctgcgggcgtgcatgcaccgcctgcccaccaaaagctgtgtgataagaacgtggcaatcatgcgacttcattactatcaatttaaggtcttgaagtgaaacaaacctcctaatttttgatgagtaactagatggaacctttataccactcagacatgtcagcaaatgaatcttctcttctttcgagagagtgtagtaggctggaggaaggtacgccctgcc

SEQ ID NO: 12984 - DNA, 844 bp, Oryza sativa
  Intron number 2 from transcript LOC_Os11g06410.2 (locus LO C_Os11g06410) derived from phytozome v7.0 (chr-ID Chr11; p os 3088567 to 3089410)
tactgctgaaacttcattacttgaggtaatttttagtgtcatgaggggttgttgtcatgcttaatatagacttgttaagataatattgtgtggtacaatgtggtgcaatttgagaatttttttcccattattcttgggttgattctcatgataattcatgagccacacctcttctttttttagtcctctgccactgatcgtgcgtgtgagaatttgatagtttatattttggtgtggttcgtggattattattacacatggacagctaatttgcgcacgacactttgtttttactattttttcttgtgaggtgacaaattgatttatttttccccatgcattttcttctcgttagttatgagtagcatggaaaggttgcaacatttttttgttttggctagtggttgattggttgccacttgccactgcaataatgttttaaaattgttccactcacattacccagtggagtaatatggtttgatttgtcatttgtgctgctgattaattaggttgttggttgatgcagtttagattcttcagaacactctgatttttagtgctccaatattatcttgctttggcaattatgacaactataggaggctgaaattaccctttattgtgtaacactgatttaaaatctcttcaaatttgtgcattagttatttcttattaggtggccctgattacatatggactctagttaagatatattgtgtgattctgaagatctttttcttttagcaaattgattctgaagattgagatgtatagaaatgtgcaatatacatgtgttggatttccaaaaattcataccaaactgccatttcaggttatattc

SEQ ID NO: 12985 - DNA, 467 bp, Oryza sativa
  Intron number 1 from transcript LOC_Os10g21020.1 (locus LO C_Os10g21020) derived from phytozome v7.0 (chr-ID Chr10; p os 10582978 to 10583444 reverse strand)
ttgccatcaacgacacggatctctaccactccaaggtacatacaacatactattgcagcctgggctgctgcgtagtggtggtgatatgttgctgcgcgcatggtgttcgacgaattgctcaagctgtgattcgctttgatataattcacaaaggaaagcaccttggaaacaatgggtagcacaattgatgagaagaaatagttttgatttgtttatcatttcctagggttcaccttgtcgataatggcgttattcccgctgagacaacatttagatttggatatttgcaagtattgattcacaaaatcacagttccttgttttgaagtgctggatctccacatattgcaatattttcgtttcattttattggtggactttttttgtcctgcattttgtttaagcagcgcgtgatggtgttcttaccagtgtttcctttctaatcagctcgttaggttctattcgaga

SEQ ID NO: 12986 - DNA, 844 bp, Oryza sativa
  Intron number 1 from transcript LOC_Os08g25430.2 (locus LO C_Os08g25430) derived from phytozome v7.0 (chr-ID Chr8; po s 15474328 to 15475171)
gcctgctgcttcctgcagactctcaaccccaccaggtgaggtgattgctcttcctaaatgacatttatcgaaaaaccggggttaaatttttagatatcgttgattcaattccacccctgattcctctatgatgtaaaattgttaatccctaggagttactgtaccattttacaatccttggtaatttctgaaatagaggaatgttagttgtgatgaaggaatcgtaggctcctagctttgccagcacaaccgtttgggggaattgactgacagagaaatgccaggggccttccgattaactccacaaggtggtggggcagtgggttaaatgtcctgggttcaaagcctcaccccttctaattatttgatattaggtcattccctattatttgcgtcttttttttttttggaattgactgaaaaggcatcagcgtgggatctgacagaaaagttcatatctagtggcttgcgaaatcctataggaggaagaggaggctactaagtcgagggccatcacaaagaagaccacattttggaggaggttaaccaaagagattgcctgtttgtctccaccacactgggagttcgccaaaattaagaaaacaattttgatgtccatggcatattagccaagcaacaatggcagcagtggtaccaaaaaaatatatttaagtgaactagtggcatgaaacagaatggcaaaattgcgttggcaaataaggaaaccacaaaccagttaatattcagaaccaaatcatgatttttttttctaaaattgtgcatgataaactattgtcctctgcttgattttcagtgattaacatcgtattgaactgtattccag

SEQ ID NO: 12987 - DNA, 932 bp, Oryza sativa
  Intron number 1 from transcript LOC_Os12g06560.1 (locus LO C_Os12g06560) derived from phytozome v7.0 (chr-ID Chr12; p os 3182455 to 3183386 reverse strand)
cgccaccggcgtctccatctcccacgtccccaacagttgcgtccgctctcctttccccacttcgatccccccctgcggttctgatttttgacacgtatcctctttgagttgttcttcgtctctagagatgtaatcatgaattaggaaatggtattgtcgcctttgctacgagtgatgcgccctagtgcgtatttctctggattatgcgttgctggaggagtgattgatatgagtttccatattattagagggttaatgagcaattgatcattcctttttgtgtagaaatggatcatgggtagctcatagggatgaatgatgcggagtacaagagctatgctctccttctgtttagccttacaaaggctacacatttttttttgtcatgggctcagatttgtcggctaatttttctagtgaagcacaaaataaaataaatctatttggttaatgtttacttgattttggtgtcaattagcttcaaattgctagatgatcaggaccatttcattttcatcatggatattggggaaaaagatctctatgaatattttcttttttaattcctgatgtagttaagttatgtggttcttgttgtttttgatgggtaaattattaggtagtgcccgagcagtgttgtcgagtttaatacactttcggtgactccaatatcaggtggttagttggacggtctcactgccgtagatgacagttgaatgtgcttggatgtttgttcctaaaaatggtgaattagcagcattagcgcttctcattagcactacttatgttaacagtgaaaacttagcattctgtcacctccattatttttttcgtgcattcattttcttatgatgtattttggtttcttcttgttctgctaataatgctattgccgtgatgtaggtggaaagaatagttctgatcggtcattt

SEQ ID NO: 12988 - DNA, 1003 bp, Oryza sativa
  Intron number 1 from transcript LOC_Os07g27950.2 (locus LO C_Os07g27950) derived from phytozome v7.0 (chr-ID Chr7; po s 16302564 to 16303566)
gggatttcaagctcaggtgagggtttgctcggatcaacccccaaaacacttcgtaatcctagtagatatgtgctattaaaagtatctcgaacttatgcattccactctggaatcaagtcgatgtaacagttttttttttcccgttgattcatcattgctataattatcgtattcccatgtcaattatgaattctgttggttttatattttttattcatttctgtctttgaagtgctggtgcagcctgtagtattagttttcgatttaccttcaattcaactaatagtttggcaaatgctactgtgtctacttatatggtaaattctttcttggatttttaacaacaaatttatttgatgtggcaattcgtctttcgtaatgccttcaactcatcatccttgagtacattacattgctcaaacgaagattattctattagtttttcacttttttagaactattcttatgtgatctttcagtgtgctgttgatactattgcatttgcaattttaaagtgggcattgttaggcaatgaatttgtggcatatgttagtataggataactgcaaattgaatgggcaagaatgaattccattttctttgcattgggctgtggacactggaccctatgggagagttatgagctaatgggtcgagccctgttttttgtgatctatttaccacccatgacattgagttgagttggtgtttgaaattggcaacatggaagtacgaactatgtctgaatcaggcaaatgatatgtatggaaattctattgatttataattagatgctaaaagggtatcatcaactacttttactatcagtagatttatgctattgatttgtttgccatgttcaacattgtcattttctcattttccgtaaacttgcattaggagttggttgcttaaatacttaaacttaattgtgtttctgtaaacttagtgttttatgtatatattgttcagtattgtgaagcacctggagtccgcaaacacg

SEQ ID NO: 12989 - DNA, 551 bp, Oryza sativa
  Intron number 1 from transcript LOC_Os11g32410.1 (locus LO C_Os11g32410) derived from phytozome v7.0 (chr-ID Chr11; p os 18670484 to 18671034 reverse strand)
cacgccacagcggcggcggtggcggccgcgggtaggtatgcctctgcctctctctctgtgtggtttctgatcccttcgacctacacttccagttatttgatttagcggacaattagggcaaagtgctacaacattcaagatcacaaacttagattaattgtttattggccgaaatcccaactatttttgtgacctcttaggttttcgttctttatatcttcacaaaagtgatattcagaaatttggccaaaattttcgggatggcacctttcttttctttttttttaacaaaatagtatcaccagcttatgttgaatagactgatgagggacatgaggcataatatacggaatatgatgcatgagactataacaatatgatggtatatagtttagattttaaaatttatattcaaattggctggtttgttccggtaccagtcaccgagttcagattggttacctgttggtcaccaccagtatttggatcgctgattatgacataactgaattgcaggcgggtcgagcacttcacaagctgaaagaaaggtt

SEQ ID NO: 12990 - DNA, 218 bp, Oryza sativa
  Intron number 4 from transcript LOC_Os09g08130.1 (locus LO C_Os09g08130) derived from phytozome v7.0 (chr-ID Chr9; po s 4202198 to 4202415 reverse strand)
gcctcagtatcctgaccgacgaaaaacactttcaggttggctgttcttctgttcttttttctaagaaagaaggtctcgccttctggtagctttcgacttcgtagttctcaaattcttatccttacaattattaatgtttttttttcgcatatatctgacttttcaaactctttgattcttcagggtagctttgagaatctcgagaccgttcgcaattc

SEQ ID NO: 12991 - DNA, 784 bp, Oryza sativa
  Intron number 1 from transcript LOC_Os07g46460.1 (locus LO C_Os07g46460) derived from phytozome v7.0 (chr-ID Chr7; po s 27736138 to 27736921 reverse strand)
gacgacgggaggccgcggagaagcccgcgcagaaggtatgggccgctccgccgatcaggcgcttgtacagtggtgcggatggttgggtgagagatggcgcttggatgggtcggtgttttggggttttgcatgtttggttgtggtgattactgattagattggtttatgaagctatgagcccatacgtgttttcatggattcatccctagttttgaggccattttggtttatttttctctctatacatgcttctagtggatttgcggtcgccccgaatacattggaaatcagagtaagctgcggtagaggtggttcatggaactgatgattcagattatttaacgcctcctgatcactgttattggataggcttttgtcctgatgcaaaagctacttgcatgtgcaagctttttttaatctctagttgatccttgttcactgcaagttgtcgctgttgcgctgttccttttgtggatttttttaaaacagtagggtagtaagtgaacaaactacaacaaatgcaggtgcgataaacaattatttggtaaggaacggatacatgacagctgtggtggtaggtactgatcgcgatcgaattccaggagtaccacattgtgtaatgcattggtgaaaaaggctgtaatgtactttccatggctcttctggaatgtcttgaatgcaagattgtattctgagtcgcaattatgatgctgtaaatcaagcagtgtgttttgctcttgttgatatcagtatttcctttctatttatcaggctgcagatttga

SEQ ID NO: 12992 - DNA, 836 bp, Oryza sativa
  Intron number 1 from transcript LOC_Os08g17610.1 (locus LO C_Os08g17610) derived from phytozome v7.0 (chr-ID Chr8; po s 10767071 to 10767906)
gtcaaaaccttgccacccaagcgcaaggaattcgggtcagcaccccctcccatcttctcctacattacattttattttggctttagaactggcggtcaatttggagaatggagctggttgttatttggggcaatggttgagagctgatgccaatagcccgttctgttgaaaagctttcacctatgatttgctattcgtgatgcaaatgtttaaaatgaatacaagtgcgtattgttacttcacactgaatgctagtatcattactaaaagatgtctattttgtatctgaacagtcgtggcgagtttcaaatcgattttttgaggtttagataacgctgtgtggtccataaatattttcgaaacccaaattccttgtcctaacactcatagtgaatagtgggaattaatcatgcggtcatcctttgtgcaaggttatcactattttgttcacattcagttgtaaccaggaaacatgacaaatttgaaaaaacgaaactcgttcaatatcctgctgaccccgaactttatgaccttgtagtccctggtaagtttgtaaagagatccaagaacatggcaaccagattcaatttaacacgaacactaattcagagaaagcacactatctactgtattctcatgacactcctcgtaaacatgtctatgaaacttggaatgccttccaaaattcaagatcatgtgatgtgtaatatatacatgtgttacatgttttggagatgaatttcattacggacatatcctatggcaggattcgttgattgtacatttccttttgagttttaggctggacttccacctggtgcaactcttctttgtgt

SEQ ID NO: 12993 - DNA, 748 bp, Oryza sativa
  Intron number 3 from transcript LOC_Os08g15460.2 (locus LO C_Os08g15460) derived from phytozome v7.0 (chr-ID Chr8; po s 9406443 to 9407190)
caagatacgcatctgttggttttgcaattgtccaggttagattcttggagcacttatcatatttatttgtcaacatgattgattgaaaattggaagacgtgggatgtcggtttccagggtgccaagggggtacagttagtctcgtctagatttcggagtacttgagcaaacatatctatatgaagctctagaatattatgtcgctagtcgttacattatataccaactgacctttacttgataatatacctttaacctttttgacttgtattgaacatgtcacaaaatatgactgtgaatcttccagattttaggaatgctgggtgctttgagaagttaaagttttttgagaaactatattttttatacagcaatgacctagctctggcgtagaggacaaatgcttaacatatcacaaatactctggaacttatttccacatgctaattggcaaagtaaatatgctgttgaagcacataaaataaaaatcaaccttttgttttacccaattaagtttgtgctgttaagttaactatggaaaaactctgttctgctttgcctggttgtactatactcctagtacttcatagtattttgtggttattagttacaaaatattccttaatttgattgaaaattcggaatgttctagtaccttcctggctggtttctttaatttgtttacttcttgctaggctattgggcaagttctttttcttcgtccttatgttaatgacttcagcacaga

SEQ ID NO: 12994 - DNA, 972 bp, Oryza sativa
  Intron number 1 from transcript LOC_Os07g41390.1 (locus LO C_Os07g41390) derived from phytozome v7.0 (chr-ID Chr7; po s 24799577 to 24800548)
ctgctcctctccgcggccgccgaggaagccgagacgtacgctcttacacccgccgccggagacgacgtacggacacaccggcggtggctccgcgtcgccgcagtggtcgtgtgccccccgccgtgctcggcgccctcgcgctccactgcctccgcctcgcctgctgctgctgctgcggcggcgccgccgccggcgagaagtgtaaaatggacctacgtacgtgtacggtgtacgtgtacaccccgtatatacgtactcggatactcctgtacgccatacggtaacggtagtatatactccctccgtagtcgtaaaggaagtttttgacagtgacacggtctccaaaatataactttaacttcttgtttctataaaaatatttatttaaaagtgatatatgtatacttttataaaattattttttaagacaaatctattcatataatttttacattttcaaactcaacaactttagagttattcatgatttatattcccaatgtttgatttaaacattatactaaacaactttctttacgtttctttacgagtatataaataagggagtatatacaaatgttttcctagtactacttactagcatatacgtacgccatggcccatggatgatatttgccgaacgtgtacgcatatttacttccgtccgtacgctcggaaatgtaatgtgaattttgactgtctaattttgaaccttataactgactatctcaaataatgtttaggtttctttttgccataaataatgatattgttggattcatgttcaaaagtgctttctaatgactatacgattttccaaccgtaagcaaaatagtgcaagactatagtcaaacttgcttatttaacggttaattaaaatacgtcatatatatattttgaacggacggggtacaatatattcttctattacaatattccaaaattatatgctgtttggctgcagctacttgc

SEQ ID NO: 12995 - DNA, 443 bp, Oryza sativa
  Intron number 1 from transcript LOC_Os08g29950.1 (locus LO C_Os08g29950) derived from phytozome v7.0 (chr-ID Chr8; po s 18395965 to 18396407)
ccggcgaagccacctcctccgtcgtgggtggacaggtgggtcccactggcggcgcggccgtacgtcatgctcgcccgcatcgacaagccctacggcacctggctcctcgcgtggccctgcttctgatactgtactatacttccttaagtcgtttgactaaattttggaaagtacagtaaattagtcgaactaaatataccattgtatatatttacatgtaatgtttgtttttctgatgaaaatgttgctatgttcttttagaaaatttagtcaaacttaaaataatttagttttgaaaagaaatttaaacgacttataatatgaaatggaaatgaactatactactattgctactcctaccagctaggcaccatagcattgtacgctagtttgaatcggatttgaagcgaggctgcaactgtttccttggtaggtcaatcacg

SEQ ID NO: 12996 - DNA, 467 bp, Oryza sativa
  Intron number 1 from transcript LOC_Os10g19892.1 (locus LO C_Os10g19892) derived from phytozome v7.0 (chr-ID Chr10; p os 9870266 to 9870732 reverse strand)
ctagtcacaaattctgcatctgctggtttgcctcctgtctccttttctgcttgtgattcccccacccattttgctagtgttcttccatcacttctcttgtaactctcatgttgggtatttcaatagttctctttgtagcaaaccccacatggtctaataatcgccaaaaaaaccacatgaccccttttgattctacagatttatcaaacatgagtttctttgagacatgctttaggtagttgacttagacgaagcatataaggattcttgtttttaataatcgtatgctaataggcagtagttacttgggttagatttcttaccccattttctctcttcttaatccaataacatgcacatttcctgtgggttctcaattatgcgattcattttgcatacattatacaaaagtatataatgatcacttttctgatgaggccacatgtacacacatctttcttttacag

SEQ ID NO: 12997 - DNA, 911 bp, Oryza sativa
  Intron number 2 from transcript LOC_Os09g13650.1 (locus LO C_Os09g13650) derived from phytozome v7.0 (chr-ID Chr9; po s 7964028 to 7964938)
gaggttctcctcctcataagaagagcacttcggaggtaattaaattaatttctaccatgtgcacaatatattgccctacacttcgatcgatcgatatattgatatttctacaaacaattctcacattatggtttctacgtgtttaaaaaccataaacaatttttaagacaatgaccctccattttgttttttaatatatttatatatatacagcgggagattcttcacctgttacagtataaaaatgagtacttgtcgagatgctgtaaatgtcagagttttcagttaattgttatacacacacgtcatgggtacttgtccttttcaagagcaaacgaacatgcatgtatcaaaaatagtcaaattagtattatatatgtcaatgatatatatgaaaagatatgtatatcgagttagttatggtccttttcttaatatgcattagttgaaaagaaaaataattacttaatttttaaggtggaacttatcatcaacatgattatatttccatgaaaaaccaaaagaggtagcaggtcaaataaggttgcaacatcatatctaattctgttattgtccttttccgtgcatggatgtttctcaagcaattcataatcatcatcgtcgacattagtcacttccttctcagatatcggcccaatcatgatcgtctagttgctattaccgtctaattttattttatatgcaactaatcctttaattaattaaaaacgaagagtacaggcggatttcctttgatgctcacacgtgagatatatacatataactacaaaaagaatatctaaacgattcttaatttcctctctgaacgatgcttgaaattttgtctcaaaacattaaaaaaataatttacctaaaaaatggtaaaattttgtagttccgaggacggaaaa

SEQ ID NO: 12998 - DNA, 739 bp, Oryza sativa
  Intron number 1 from transcript LOC_Os11g19460.3 (locus LO C_Os11g19460) derived from phytozome v7.0 (chr-ID Chr11; p os 11196992 to 11197730)
gaccccttctaccaccacataccggccttcttccagttcagtgcatctcccgtcccttgtgatcggtgttggtgtgggtttgcagttgaggtgttcgacggaatgcctgcttgggggttcttgggggcttactgttgctcgtattagaggggctatgaatgttaatgatcttgcgtttttgtctggatccggcttaggctatgtggtggttttgtagtaatggcttggatttccctgtgggattgcaatggtttcattggtactggaatgctcagactcccaataaatcatatataagtgcacaattgtgaattcaatattcgtttatgaactagcaccacacaagtacctaaaactgtttcagaaatcctgtgttgaatattttattacttattacctcaatgattcggttaatttaagcgtgaagtctattttatttttcttgctttaactcttctcagattccattttgtcattataaatacttgggtttatatcagtgaaaccatcccaatcaaaaccatgatggaatagagttttgggcgttgtttacctgtaatatgggggtgaagccaaccgttttttgagtttggtgtgaaattttgattccaataagagtttgagggccaaactagactttacccttaaattaatatcttctcctatatgttttactatgatttgtatatctattttgtgttactttctggattataaatatccaatatttgcctgcaga

SEQ ID NO: 12999 - DNA, 793 bp, Oryza sativa
  Intron number 1 from transcript LOC_Os07g44060.1 (locus LO C_Os07g44060) derived from phytozome v7.0 (chr-ID Chr7; po s 26327982 to 26328774 reverse strand)
cagggcattgtgttgtgcttccgtttagcatctaggtacatgcatgtccatttgctgttttttttctctctctctctctctctctgctgctgtttcagactttcagtgttcttcctccgtttcttttctcagacagttggtaatttgtaattaagcagatgatagtggtgacattatagtttgttcttgatgtagtttgattattttcagtgcttctttgagaaccaattagcgagcatgatcctctctgagcttactctagtttcaagttgcatatggctttctcttatgttttttggtctaattgttcatggacagacctgaaaacagtttttttactggtctctatgaaaagatttagttttgatcaccatttcttcttacaaaattcgctgaatgctttgcataactcgagttttcccttacttaattgttcatattgtcgcaaggctgtatttcccttgttcacacttcatcggttttcagctgtttcagagacaatctaatagtttgatttggcaacttcttttgtattgtacactagttgatatgtgactgatccataaccatgaccatggtgttgctagaccaaacctttgagtttccggagataataatagcacggactataattcccaataaatgcgatcgaaacaggaaaaaaaagtagagtaatatttataacaatatgatgctataaacattttatttttgcaaatgatacaatttttcaatgatttaaggttgctgtgctcacagttaatttattgcaggctctagcaaacctgtaaag

SEQ ID NO: 13000 - DNA, 963 bp, Oryza sativa
  Intron number 1 from transcript LOC_Os08g39310.1 (locus LO C_Os08g39310) derived from phytozome v7.0 (chr-ID Chr8; po s 24835648 to 24836610)
agcccgcgccccgcggcggcatcgaagaaagagaggtggtgcctcccacgctttgtttttcctcttcgatttcccataccttcgcttcgagttagggcttggattagatgttcttttaggttctcgctccgatttttcagatttggttggcgcattgaggttaggtcaagactaaaaacgctactactagttttttttttctctttaacgctcacaaagttcttgatgagtttaatctttattactactgtggatcgagatatttatcacgatgatttagtgggggtggggtaatctggaaggaactggtttccgagcgattcaattggtttgcctgcttgtactacatctttaatgtccacggacgcttgtggaatcacttctagtgtacttgagaaaatctttgaatactgccgtagggatgtcaaccataccagcataattaatgcctctgaacttgttggggggcaataatggatcccgtcattctcctcaaaatgattgccatgcaagcaacctcctttggcctagaaactaagaatcgtaacgataaagttcattgtgctaaacaaatggattttccatattatttcatctggaaactggaatttaacctccagatcatatttatcatgtttgtttactccacttgattaacttccaaatcatattatttgtgtttacttcatttagattgactttcaaaaaaggaacttctcttagatttgctatttggcatgtgcttgttcagacataatgtccaagaagcatcagtgtgtctttatggaagaatgttcctgatatgaaatccggtgtacagactatgagagagataaatgtgcccttatcttgctaaatgctagcatattttactgctcggtctattcattgaaccttttttttttccttggtcgtgtttacgaaccagtgcaagtactggagtaaagagaagaggtggtccag

SEQ ID NO: 13001 - DNA, 989 bp, Oryza sativa
  Intron number 3 from transcript LOC_Os07g25740.1 (locus LO C_Os07g25740) derived from phytozome v7.0 (chr-ID Chr7; po s 14776304 to 14777292 reverse strand)
tttgggctccccacaaattcaggttatgtattacataccttttccttgttatacatgctaaagtttctcttccttcctggatttgtgtacgatacatgcatattatgttctaaatgtttaaagagcaaaactaaatcagatgttgtacaagaaagttacatattactaacctatcaaaaactaatttgatattatgcatttggtaaagttgcaaggatcattgtagtggtctggaatgcctgtgtgaagtgtttctacttctgttgaattcttatattatcaaatttacataatttctatcttttgctgctgtgactgtgagcaacataagttgcagtaaagagatccctggctgtgttcttttggctgtgttgggaacaaatctcctgtgcacggaaaacaaagtgatccattagcgtgtgattaattaattatctattattttttttgaaaatggatcaatatgattttttaaagcaactaccgtacagaaaagttttgcaaaaaaacacaccatttagcagtttgaaaagcgcgtgcgcggaaaacgagagaggtgagttgggaaagttggggaaagaactcagccaaaactggatatttaagatatctgtcatttttttactgcaagtgcaaaccaagtcctagcctaggtgctaatcaaacttatcctctgctaatgttttgctcattataaaactgtcatatatttgagtcattcttttatagaggacgagtgtttggaaattttagtttcactcagagctcactgctaaatagatcgcatagagcactcatgcaaatatttgcaaagtgactagtaccttttattgctgaataggacacaatgaaatatttttgtccaattatgtatcctcctgtcactttgcagcctattataaattttgatgcacggtttttctgtggaagtactaaacaaatatttggatgcagaaacctaccattgggtgtggcactgagatcaacaa

SEQ ID NO: 13002 - DNA, 814 bp, Oryza sativa
  Intron number 1 from transcript LOC_Os10g40220.1 (locus LO C_Os10g40220) derived from phytozome v7.0 (chr-ID Chr10; p os 21459097 to 21459910)
cgcggacgcgcgggctcggggcggctagggcagaggtgggggagaaggggaaaggctagggaccacatcgaacacttgcgggcaatgaatagtgcacttccctattattcccgattttaggttatttcctatatgaatttgattctattatttctaaatcttgcataaacgaagtttactcaatatgtgtattatctcaactaatgaattcaccctaggttaatattactcatattttatttttatataatttatttgagttttaattagggtaaattcttattccatcgcaattaaatttaattgatccaattatggtcgcgataatattttatttattactatccacacctaatctttatttttaatttatatttattttaccaatttgtttttaaggtttattcctgattaactgttctttactcactattaatattcttcgagatcaaatccaggtaaaataggcgaataaaatcggcatgttgcaattagtttgaaaagtttttttttttgaatatctgcatttttagagttttgattttgtcggtcgaattttcagggtgttacactgagccaatcattttttttattgactgacataccaaaatactcaggcctagccttagaaatatattctattcacgacctacttttgttgaattagaagcaagaaccacactcaggtttacggaaatagaattccatgctcacaatatctttgactatgaaaccttcctatgcatgggggataatattctttcatttcttttcacatgcagtgggagttattttgcgggactacaaacctggg

SEQ ID NO: 13003 - DNA, 536 bp, Oryza sativa
  Intron number 2 from transcript LOC_Os10g40120.1 (locus LO C_Os10g40120) derived from phytozome v7.0 (chr-ID Chr10; p os 21409512 to 21410047 reverse strand)
ttagtaacgtgagtccggagcaagtaagcttgttcagaagaactgagcgtgaaagggtgaataagcttttagacgaatacgtccatcaatgctggaaaatgaaggtgctatccattttccccatcttcctccatttctcctgcagtttcatgcacctggcatcagatttttgtgcagtagttatcattaagatgaccttttggttggttgctgccacattagtagtagtacttttttttttcgcgaacacgcaaaggattgcacgtcaatatattaaaagaatagagtttttgttacacgacgcactcagccagaccggcctatgccaaggaaggaagaaaacaaagataaaaaacaaggaggaaaaggaaaaaaaactcgatacgacggtaactctactccaaacagcgggagggagcagaagtagtagtactaattacattaaccgttgaaactttgcacagaatcaaaatgttttcgaaggtgaagattcatgcttaaccttgatttacaatggttcgtatatttcaggtcaa

SEQ ID NO: 13004 - DNA, 726 bp, Oryza sativa
  Intron number 2 from transcript LOC_Os09g38410.1 (locus LO C_Os09g38410) derived from phytozome v7.0 (chr-ID Chr9; po s 22109984 to 22110709 reverse strand)
gtatcaccatcagctgctacagatttgattgcaaggcaagattgagtaaacatttttccttaaaaacatccttaccattttcattttcttagtgctaatttggtagccatctaaaatatctaatcatctggacatatgcttattagattttttattagagtgccgccctgtgttttttgtatgatggtaaattttgtggtttgtaaaatctgatgtaaccaactaatgtgtcttcatttttcatgactattgtttgaaattttagttgttcagatgaattattttgtagctaactgtgcagaatagcaagtggtggttacattttttttttactttcagctgttgaatgatacataaaaataatatttcctgcttcttagttcttatggatttctcacagtgattcgtacgtacatttcacaatagtagtccagttgtcattggctttctatatttgagatttttattaaggaactttgtattacttgtatgcataacaggaatcccatagaaatttgactcttcttcctgctgagatgttaattatattaaacataatgtagtaagtacaattgtgcctgatccctaactgaaaaataaaaatagaacaaaaacaccaaactgttatgaccttttggatcctcatggactattgtttcataacttttaactgttatggctgcccatacaggtccatccctgttcaagaacgatcaagagcagttg

SEQ ID NO: 13005 - DNA, 776 bp, Oryza sativa; identical to SEQ ID NO: 12124
  Intron number 1 from transcript LOC_Os10g38216.1 (locus LO C_Os10g38216) derived from phytozome v7.0 (chr-ID Chr10; p os 20398516 to 20399291)

SEQ ID NO: 13006 - DNA, 299 bp, Oryza sativa
  Intron number 3 from transcript LOC_Os07g12530.2 (locus LO C_Os07g12530) derived from phytozome v7.0 (chr-ID Chr7; po s 7156088 to 7156386 reverse strand)
gaagcgagaatttccggtgtggattttcacgagtcgtgagtttgttttctgttcatcgcagtagcatagagaatgttatgtattttgggattcgggtgggtaaaatgtgtgtctcttcagattaatgtactccttattaacattcctcacaaaaataagtagttatgaacaatcttgggatagctagatcacagatgcattgaatattaagtttgtttgttcttcgcaaaatcatcccatgtctttgatttcgttcaaatgcagatagagctggcgaattgcctaagttggttgaggac

SEQ ID NO: 13007 - DNA, 927 bp, Oryza sativa
  Intron number 2 from transcript LOC_Os12g19280.1 (locus LO C_Os12g19280) derived from phytozome v7.0 (chr-ID Chr12; p os 11172553 to 11173479)
tggcggtcgccgcgaaggtgactccgtgagtttccatctcctcaagaaaaatgatcgagcgaccccacctagcgtgctaactgtcggtttttaatatcggcaatattatttatgggtgcactagatctaggagagatggtgacatagatgtttatattggttgaaaccctcaaagcgaggtaataccctagtccagttgtgagtagattggatctgtataagtgcgcatctgttgacgagaaatccgcgctcggccgatggtgtcgggtctgtgttggcgcaaactaagtcgacgaacacaatggcctaggagatctgcttaactccagtgcaggtccaaaagttgatgagatgcgggcgtgccagtcagtttgatccggcaactgacaagatatacaaataacagatcaaagagccgatcggctgacaagacaatggagtaattccagccgatgccgatagggttttgagttatcggctatatatttgatgtagaatctgacacttgatataaacaatgatataaagacaattagctgatggtaatataacaaaacaaccatataatccagtaaaaccaatcggctaacaatatgatagaataagcactgatccgaaggttaaagcatacatcagctggaggttcgatgttattgaatccacaagattagataaacagtgaaactttggttgcgatcggctaaatccaacttgtatgtaatccttataagccaatgcaacatccagataactcatcggctaaaaccctgatgaaacccttattggcaatcaaaaagcaggctagaggttatggttctaacttctaagcacgactagggctgatgcagcgcaaagtatgaaaagaaacataatgtctagataatcaagcctttgacttattttcagggtagtggataccttagctaa

SEQ ID NO: 13008 - DNA, 387 bp, Oryza sativa
  Intron number 1 from transcript LOC_Os10g04840.1 (locus LO C_Os10g04840) derived from phytozome v7.0 (chr-ID Chr10; p os 2339013 to 2339399)
agcggcgggaggcggaggaggatctcggagaggaggtcgtcgttgtccagcggcggcgccggcgaggtggggcggtggcggcggcggatcatctccgcgctcgctgtgttgtaattttcgatgcaatctagtcgacgtggggttttttcctcttcatatatatttttttttcagttttcaagtaacgttcgctgcaactttggctgaattttcgggggcagtttttctttgatttaccacacttaatgcttgtaaaatcacgtttcacaaaccaaaaatttattaggagttattcaatccaccgtaaaatgtgattttaggtgtttttaattattctttcaattatttacaggggtttgaggatagaaaaaaggtgtgcaccatctg

SEQ ID NO: 13009 - DNA, 944 bp, Oryza sativa
  Intron number 1 from transcript LOC_Os11g45320.1 (locus LO C_Os11g45320) derived from phytozome v7.0 (chr-ID Chr11; p os 26945129 to 26946072)
gcacctcgcaaaaggtcgcatcctagaaggtaattaacgtgccttaattaattctcctcctcatcctcatcttcatgttcaatgatgcatatatacgtacgtgctctgtatctttagtgctagattgattgcatttaatttgggtttatattagatctcggctactcatttgtttggaggattattgtgccttggttcgaatcttttttgttcttttgtatttaatttgtagtcaaacgctactttgtagctgatttgtgatttctgacatacatgttggaaatgcttgagattggaggctttccagtgaatatacctaggttgtttgtttccttctctttttttttcatgtatattctcagaacttgaacagagaaccctagatttgtgatattataataagttttagtcaagaatttgtagatattgcgcgccatggacatgattgattgaaataatatgggtaaagtagcagctaggtggcatattattttttgggtggcatcaatggtactgcattcttttcggtagcatttctgcacatgtcaattatctatcagttgtggcataacccttaaagccgcttactccctccgtcccaaaaaaaacgaatataagattggatatgacaaattctagtataacgaatctggacataggtgtgttcaaatctatagtactaggtgtgtcacatccagtactaggttggttttttatgggacggagggagtagacttttttttttttgtcaagaattcaaagatttggacatgaaaaccagatgcaaatattccttcagtaattttaatttgttcttgtaacaattaacctaatccagcctctatcatctcttgattgctatactgcgttcattccaaatccaaatcctaacctgcaactactgtcacttgccatcatctccagaaaaccagaggaaagagcaa

SEQ ID NO: 13010 - DNA, 687 bp, Oryza sativa
  Intron number 4 from transcript LOC_Os07g44610.1 (locus LO C_Os07g44610) derived from phytozome v7.0 (chr-ID Chr7; po s 26618149 to 26618835 reverse strand)
gagccatctcacggacaagagaggtacaagttaaaaaaagtttgtctggaaattaatggatgtttgttgaaagtacagctacgaacagcagagttacatattatcttttcatagttcactagtcctttccccccacataattctaatggccatgaccccacaagacaccttcccattgaatgaaaaaaagaagtccaaactgccaaatagaacaccataggtctgctgcgatcactttcttcactgttacgttacctacgcgagcttgattttcagaagttctattgaacatctcttttcttcctatttctttcaatacgaacaaatcagttaggaatatattcaaaaggacaatggtaatctgtgattgcctgattacagcacgatcttctctacaaaataatatcacaaatgccccctattattttccccacatgttcagaatacccatattttgtgtttaaaacttatcataatggaatgtttaaaacctaccataatggacttatgtggtttgaatatgttgcctgtatgataacaaacaaagatagttcatatgcgcattattgaatgaataaaatgtcaatcatcagatatttcaagttttggattgagagtactgttgatcttgagactaatcacatttatctgaacttttcatgaacaaccagactacgcttccggtaa

SEQ ID NO: 13011 - DNA, 444 bp, Oryza sativa
  Intron number 2 from transcript LOC_Os08g10490.1 (locus LO C_Os08g10490) derived from phytozome v7.0 (chr-ID Chr8; po s 6161569 to 6162012 reverse strand)
ccggagcaaggtgctcaaagccctcaaccttaaaggtactaccttcgtttcagattacaagacgttttaactttgatcaaagtcaatatgcttcaattttaactaagtttatataataataataataatattttaaaccaaagacaaatttattatgaaaatatattcaattatcgatttaataaaactaatttggtattataaatattactatatttgtttataaacttagttaaatttaaagtagtttgattttaatcaaagttacaacgttttataagccgaaacggaggaagtatctatcaaatggcattaactgtcttctcggccattgatcttggctgccatggttgattcttgaagctttgtgtttttgacgctttaattgtgggtgatggcatgcatgcaggcgtgctgaggacggaggtccacccgacggccggc

SEQ ID NO: 13012 - DNA, 551 bp, Oryza sativa
  Intron number 1 from transcript LOC_Os11g45710.2 (locus LO C_Os11g45710) derived from phytozome v7.0 (chr-ID Chr11; p os 27182831 to 27183381 reverse strand)
ccgcgcctttccctcctccgacgctgacgactcaggttcgtctcactcactttcgtttccctctgtaaagccctagccatgtaagcgctaatcgttgaggtcaatggattattgcattggggttgggagattatgtatttgattagtctttgtggatgcccagttgggaggttttaggttttatcaatttttgagatggggaattgttggcataatcgatttgaatttaatcaattaatccttatattcaattagttttttgatcaattagtcaatgtcaatacgagagtactgaaaagaactttgtttgcccattgcaaatgtcctgttacatcatacatggggataagattactcactataggcacagttatgctttgcacctctctctcattaattttctctataaattcgagcattcaaactgtgttttaacatttaaggccatcactggctggaagcaacaattgtcaaggcaatatggaagccctgatggtgtggcatatttgtttgcagaggaggataatttcttctttgggctagcaacagcg

SEQ ID NO: 13013 - DNA, 1004 bp, Oryza sativa
  Intron number 2 from transcript LOC_Os07g28840.1 (locus LO C_Os07g28840) derived from phytozome v7.0 (chr-ID Chr7; po s 16886343 to 16887346)
tcgccagccacctcccccgcctctcctccgtccaggtaatttcatatgcctatgtcaggctgtcttcgaattgacttgagttgttggatggtttcgatttggagtgcattgctctcgttgtttccgcaacagtggagtgcgttgctcatggtggtggtaggttaataccatattaaatctttggatgcaccggagaattcgcaaaatgtgccggcacgataaaggcatcatgaatactggagttggaataaccatatgcttctcacaataaatcttgtgaaataaatttgtgcgaagaggcacggccttggctttgagaagaccagaaacaagtctggccttaagcgcaccgcagttgcaggaaccaaatgctgcagacagttggtgtgctaagagcaggtacaatagcaggctataagccagctgcaaacatattttaaggagataaatcaggagagagaagagcagcgggctacagatttgtagccagctgtagcacggactccaagacgcagtgtgtctatgacagttggggctaggtattaatagtgtagcatgtaactattgtataaatgagctattagattggctatagatgagttggagttagtagttggctaaactattgaacttgctctaatccattagattggctctacatatgttgaattggtttcactattatgtttcagtttggacaaaaagattggatggatttggcaattttggggagggtaaaaagatcacactaacacatactagtaatttactagataaaatgaaaatgaaaatcttcgacacaaataactctatcgtgatgtcttgatgattctattttttatttgacttcgaaagtgtcaactcaatcttggcctttctatgccccttttgatcttgtaagggcaatgaaagaaactttcatgcttggtctccttatcacatcttttcaattgcttcaatgctttcactgatattccctttgtatctgagcagaccctgatcat

SEQ ID NO: 13014 - DNA, 701 bp, Oryza sativa
  Intron number 2 from transcript LOC_Os08g09460.1 (locus LO C_Os08g09460) derived from phytozome v7.0 (chr-ID Chr8; po s 5479448 to 5480148 reverse strand)
gtgacttctgatctactgaaatacatcggggagaggtaaacctttcctgctaaattcttttcactgttttttttttcgaaaaatagttctactgttatttatatttaatgcagagaattgattatgtcctgcattcatgttatagttgtcagatattttgtatcagatgaacaactcgtagttaggaaaagtgaacaaaagaaaagggaattatgtttctgctctatgaccattctgtgtttgctcaaactaagcttgatatcatgttcataatgactgcaacgcctcaaaacaagatgaatttagaatttcttctgtaaaaggaaaaaggataactaattaacaagtgaacttcagagagagttgcctttctacaaccactgtagtagaactgaataatataagactgcagcttaatgtaaaatgaaaatatcgtccatgtcattttgtcatgatgtgcaatatccagatgtcaaatatttctcatgtgtcctcacatactatcggctttacatgtcatttgatcatttctctggttacgctctgcatctgattatgtacaaaaaaaaaatgatatccgaatctaactctcctgttgacacttcaccaaattaaacaacctgattactgcatttaaatttaatgcctacatgcatgtctctgcaggacaacttcactgaagagcatccgactgattgcat

SEQ ID NO: 13015 - DNA, 450 bp, Oryza sativa
  Intron number 1 from transcript LOC_Os08g14490.1 (locus LO C_Os08g14490) derived from phytozome v7.0 (chr-ID Chr8; po s 8702901 to 8703350)
tccctccctcccccaccgcctctccagtcacgcaggtgcgccccgccctccctgcttctcctttgtgaggggaagcactgcccttctctctggtggtggtggtagatctggtgggatgcaggtcgggagtgggagaatcttggggaggcttagagcttaatctccttcatttgctgcgctccccagatgctgtcttcaggcgcaatgatgattagcttgctactagtactacctaactattttgattgtgggttattgaattgctgctattttgattttttttttgagggcatgaacagtcatcaacaactcaagaaacaagctgaagatgtagtaccacttagtgtattttttttctcttctgttgggggaaggatgtgattttggtgagagaatgacctgtgccttttcttttttacatgtgggaatggggatgttgcagggaggtgc

SEQ ID NO: 13016 - DNA, 666 bp, Oryza sativa
  Intron number 2 from transcript LOC_Os08g40010.1 (locus LO C_Os08g40010) derived from phytozome v7.0 (chr-ID Chr8; po s 25338805 to 25339470)
ggcgagattaagcagcttcaccacaaaggttttggctccctgcgttcagctcatcctcctctttgcttttgctctgcgctcgtgttcattagtcattaatctagtcccctcgtgttcatgtgcccgttgtacatttcgtgtgattaatgattaatctggatgagggaaaataaaataatttgttagcaaattaatttactcttctcatgtagtcaaacttaacaaactttggcgtcaatatgcacacaatactctgagaatggctatgccaaatttgcaaaggatttttttttttgtagcattgcgtttcactagttttcatgacatataatgagaaaaatcattgggctatatgtcgatgtagcctgtcgatcctaaatgattaagtaatttcagtcctggcctttcttagaagatgataagtttcttagttgggcacatgtatttgcgcatgcatgtgtggactgctcgaatttatggagaggaaaacaatcacttctttaattaattgtacacttgattaattaattgattgtcatttcatcatatttgcacctgaaaaaagaatctgatatgtccaacatgcgtaattgcgtattacaatgtactctatctacttgcttgttaaccaattaccagtgcaaaggccaaaggaacaagtcgcag

SEQ ID NO: 13017 - DNA, 845 bp, Oryza sativa
  Intron number 2 from transcript LOC_Os07g29290.1 (locus LO C_Os07g29290) derived from phytozome v7.0 (chr-ID Chr7; po s 17163325 to 17164169 reverse strand)
tggaaggtgctttcaggtactacagggacaaagaggcctaatttgtttcctgtcttgtcttcattttcttttttaatttttgctcccatttctggccatgtccttttctgatttaaccaaaatgtcccttcttgcttgcttgttcctcacatggggctggttgttgttcaagaacttgtgggatttttgtttttcttttgagaccgacgctttgcaaacaaaagaagttttagttagtttctggaattggtggtaggactggtagttccttcatgtttttttttttactttttaggaggtgatgttttgaagaagcaaacaatcaactaattgtaagagcatctattatttatttttttgattgttttgtttctacttagtaagatacttagattccgattggcacaactttttccaaaaaaaaaaacaatattataaaatgtgttttgtagaataattcaggtagtcctttttgcaatcatgaaaaataatactagacaatgaaagtggcgaagtaaaatcccctcaaaatgatttaagaatcaaatagtaaaattgaaaatactatacagtagcttttcgggaaaaaaaaaaaccagtgtcaagcgggcttcgaaggccaaataagagcttaattctaacttgctccatttaccaaatgaagcctctgtacaaaaaattctgaaagagacttggttgtttcctaagatttcttgatttttaaagtggctaaaccgtactattactatataaatggcatttatttcagttgtgtttttgtcctttgatcctttcacacttgttattcaccctgtttttttattattctttttttgcgagaaaag

SEQ ID NO: 13018 - DNA, 727 bp, Oryza sativa
  Intron number 4 from transcript LOC_Os09g23280.1 (locus LO C_Os09g23280) derived from phytozome v7.0 (chr-ID Chr9; po s 13814609 to 13815335)
gaggaatctcacgcacaagagaggtatatgttaaaactttcatctgaaaattaatgatgtttgaagtatagctacaaacagcacaattacttgtttcttttttagtttccacataattctatggctatgagcccacaagactccctcccattgaaagaaaaaaaaacaaattgcaaagtagaacaccaaagattgttaagtctgctgcaataaattcacttactttgcaaagtagaacaccaaagattgttaagtctgctgcaataaattcactttcttcacagttaccttgttactaccttagagccacaagggcgagtttcagaagcactattgaatatttcttttgttcatttttctttccatcaaacaaaatcagttagctgtaaattcaaaagaacaatggtaatctgtgattgcctgattacagcaaagtacaaacttttatacagaaataaatcacagatacccccccctgttcttttcaccagatgttcagaacacccatcttttctgtttacaaacttatcataaaagaaacgaatgtaagttcagtttgttgcctgcacagtaacgcaagcatggatagttaatatccacattatattgaatgaatgcagcttcaatcatcagatatttcatgtcttggattgagagcattgtgaatcttgagactaatcatgttcttctgaactcctcatgaatgagcagactacccttccggtaa

SEQ ID NO: 13019 - DNA, 851 bp, Oryza sativa
  Intron number 1 from transcript LOC_Os11g06020.1 (locus LO C_Os11g06020) derived from phytozome v7.0 (chr-ID Chr11; p os 2839572 to 2840422 reverse strand)
gggaaaggaacttgcagttgcaggtacttaacactgacatgcatgagtgatctcactcaccctcccttgcatgataccttggtatatttttgttgtcttacatcactctcttcctcctcctcctccttcttcttcttcttcttcttcttcttcttcttctttgccttcttgttcttcttcttcttcggcttcttcttcaccttcgccttcgccttcttctttcttaattctaggatcttcttcaattctgctcttctggttctttgagagagtgtgcatgtgtgagagagaaattgctgattaattagcttcagcaattcttgtggtacatagtatacatagatagaaagagagagagagagagagagaaagcaagcaagctgaattgatgcttgtgtgtgcttgtgttgacatctgtatacacatgtgcacggttctttgttaaatcacttgatgaagatgggtacatccctttttcttctttttaatatatttttttcttgatactgatgcctaattattattagtattacttatcctacatcacaacatctctctctctctttctctcttctagagctagctataccatagctagggtagttggtgataagagtagttcttccttgtagcaacttactaccttaattacctagccttgctcttctttgatcttcttccatctctctcttttttgcatggatctacttttatttttacctcaaattgtgaaatatggtaattattttcctctttttatatatgttgttaattaatcaacctgttggtttctttttgttcttgtgttatttgcaggtaattaaattaagaagagagaagcatatatatac

SEQ ID NO: 13020 - DNA, 1053 bp, Oryza sativa
  Intron number 1 from transcript LOC_Os11g07060.2 (locus LO C_Os11g07060) derived from phytozome v7.0 (chr-ID Chr11; p os 3512978 to 3514030)
cggccgctctctggtgttctctctctagcgcagttgtgagtttgagcttctcctgtcgcttgtgttcctgtttaattttgctattaaaatttgaattgcatttgttcatttggcctcctggtaagtatggaattcatctaattatatcattttcctccatactagctccataaaaactgatcagaaacatgaatcttgtcttctagaatagatttgatcatcagttgacacgtgctatatactccctcgatgtctctgtcccaaaataaatgcgcacttctagttcaaatttgaatagaggagcctattttttgtttgggttagttggaaaatccatatcattataaatttcacggtttagaaatatactattattattcacctatttgtaattatatcatttcaattttaaagtattagagatatgccactatatatctttttactgtactccctccatccctaaatgtttgacgccgttgacttttttaaacatgtttgaccattcattttattcaaaaacttttgtgaaatatgtaaaactatatatatacataaaagtatatttaacaatgaatcaaatgataggaaaaaaataataattacttaaattcttttgaataagacgaatagtcaaacatattttaaaaagtcaacgtagtcacacaataagagacggagggagtattttctaaccttttaggacaaatctacccctgtcttctccattcaatcgttcatcctttctttcctctgatcctctctactgtcccctttcaacctgtcatcgccgcgtccaccgcagcgtcgcaccccgccgttgcgctacggctcctcggcctcctcgccggacatcgctctccggatgtgaggactgaggcgccgccggatccaacagcagcaagcaagccctgtctacagccttccaatgttgaaatactttattttgctgcaaccctctagcatcctgctccaaccttgtagcgcacaaattacaaatactttgttcttgttgcagccttactgcgtcctggcatcctgcttgtctaggga

SEQ ID NO: 13021 - DNA, 854 bp, Oryza sativa
  Intron number 2 from transcript LOC_Os08g03570.1 (locus LO C_Os08g03570) derived from phytozome v7.0 (chr-ID Chr8; po s 1666594 to 1667447)
tccgctaaacaggagggcgagtcagactaggggtggtagatctcgatgccctttctttctctttggttatttactgttgctttagatatatgtatatgcgtctaaataatgttgttgcctttttgatcccctttggcccttgagcatgtgtaccaaccaatagtggcattttttttaatgtttagtttgtccatctaatctatgtgccccatgaaggaaactgttttttttttaagaattgctccacctgaaaaagctgtccttttttctttgccatgggattcacttggtgtacaagcacatgaacacctttcagaggtcatttcacatgcatatgtatgggctagatatttcatatggcaagcagtagtgtgtcttttgatggtatgcactattgccagcagtgaagaatttcttagcaaaaattccttttcagtagatgatcccagcccatttcttctgccttaagtaatgcttgttatgtgcacattaagatttcagtcactacacagataggcaagttgaactaaagctattaggtgcaatatttcaactgaagtcaactaagacatgcaaccatatcgatcttgtttttggtagataaatctttaagcaagcagttgccactttgctgatatcgcatttcaagtcaaagccagagtttgcttgctgtgtagtttcattatcaatgaggactggttcatttgtttgtgcggaacaggggatccatatatctgacattaattaggttgctcttttgtttgaccatgggtatgctttaatttattcaactgttgtaatggttaaatgtttggtcattccctttatgttgtaagttcatcatgttgataggg

SEQ ID NO: 13022 - DNA, 951 bp, Oryza sativa
  Intron number 3 from transcript LOC_Os08g03570.1 (locus LO C_Os08g03570) derived from phytozome v7.0 (chr-ID Chr8; po s 1667536 to 1668486)
tgaagcaatctcctggttttggtggcagtagtgtggtaagatgtctatatttctttttttctcttcttcttctttcatccttattcctttaaatctgcttttaagatcagcctttcctcacgttttcatgttttgatttgtaagtcactttctgctacctataggtttaacttttggacttttctcaacttactttctcttatgtttttcttgttacacaaaaagcaattttaattttgagtatcacctgtattatagaatatgtccttgtataactagcataaaacaaaatgatgactgctattgtagttgtttcaatacacatatcttcatttctgctctcagtgctaacaagcaggtgaggaaagtgacatctctccatccaattgcctttgttattgcaatgtctattacattagttcatgttccaacttgatatttcaatacacatatcttcattagttgtttgccacttctcgttgcggcaagttgatgcctaaatggcatcctaacaaactgtagctttcagccacgagaccttctgacagctaatcaatctgcataataattttgacatgttcctgttcaagaaaactacgatatgatttgcagatgtaaatatatcacatctctaaaactacaggctaactatccagttctttagaataaaatgttaagagactgttgcagagtgaaggtcaaacatagcacattacttttgttgtctagaaacatgtataagctgcgatgcagacctagtatgtgtatggctaaacttggatatgttccatctgttttgacttctgttgcttaatctttcaactcttcatgcaaatccgcctgttatgtttcttatgctgcaattattattatgccattcttatatttcccctatttttaattcaactgtataactgattgtggggttatgtatcttgcagttttctcgcc

SEQ ID NO: 13023 - DNA, 450 bp, Oryza sativa
  Intron number 4 from transcript LOC_Os09g25640.1 (locus LO C_Os09g25640) derived from phytozome v7.0 (chr-ID Chr9; po s 15400633 to 15401082)
gttgcttctttgggcggcataaggtgatacattcactcattcatattttttatgttcaaatgtaaataagtattttcttaatataatcttataattatgttagtgattggttgccttgtactgggtgacttttgaattcaagctgatccagacagaatattgagagctgaattctcctttagtctttcattgatctgaaagtctctggccccggggttatttgatatttctgtgcgcacactgttttgagtcgatggtagatatgggaccctctccttaaaaaatcccatagtagtttattcatcattatggaaaatgtttttcatgcctgccattgtcttcagccaaagctttacattatggaaaatgtctttttttttgtcaatgacttactgattcttatcagtatgtttcttgatcagctgagtttgagtgagataaaagaactct

SEQ ID NO: 13024 - DNA, 610 bp, Oryza sativa
  Intron number 2 from transcript LOC_Os10g27470.1 (locus LO C_Os10g27470) derived from phytozome v7.0 (chr-ID Chr10; p os 14417010 to 14417619)
taataggtggccactttgctgctgcagagcgagctgtaagttctccatttagtagtattattttttttcttgatcatccttgacttcccattactatttatactagaatactgtttccttttctgcctgcagtatgctagcatttttttttctttttggcaatgatgatcttaattgagtgcttgcaattaaattttatagcatttggccacaaacaatactgcggggtttctttcagagaaatgtatgaatgattcatgatctggctaacgtatcaagtatcaactagcaaaccagaagtggactatagaatgtacttatcctggatgcagatggtttttctttgcttttagaatgttgtcctgttacgatgttgtgttgacttccaatcgcttttgtggtaactgaaatataacctcctatattgtttttttttgtctttgtactttggattcttatataagttggtctttttcaacataatttttgcaatagcttgtgattcataaaaatatgggcatcatttatgtttagttcaataatttcctcaattttgtttctttcaattttttttattggaaggtaatcatttttgcaaaggaacaacctg

SEQ ID NO: 13025 - DNA, 577 bp, Oryza sativa
  Intron number 1 from transcript LOC_Os11g43490.1 (locus LO C_Os11g43490) derived from phytozome v7.0 (chr-ID Chr11; p os 25787225 to 25787801)
ctccggccgccgccttctgccgccggtcacctgctgtaagctcctctcgccttgtgggcttgttagtttgtggaaggtgatgcaatcaatctcctggcagattcggaatgcgtatgtgatttgtgattgcctcctccgtattattctgtctaggagcatggtagttgctatcgcttggatctgggggggtttcgttttcttaattcgtgaattttagtttgcggtatttcaattatggatcaggaagtttgatgaaagagaagatgtatttggaattttggatgtccctttttctctacagatctgcagaaacctagttagggaattcagtacatgaacagtcaagaaatcaatcattactatacttgttgctagaaggtaaggtagataaagaagctgaaatcaaaatagtcagttttgtgctttatactacttggcttctgcatatatatagcaaaggctcagaacctgcagaagtgttaaattctatttacattccttgcgtgtctgtttctgaactttgcaatgtttgataaactaaaaactcatgttctgcaatactactacaggaatctga

SEQ ID NO: 13026 - DNA, 344 bp, Oryza sativa
  Intron number 1 from transcript LOC_Os10g04720.1 (locus LO C_Os10g04720) derived from phytozome v7.0 (chr-ID Chr10; p os 2250104 to 2250447 reverse strand)
tccggcgccggattccatcgctccgaccaaaaacagtgcgtaaaaactccccctctttttcagtatctgaaaattctgcttttttttcctctgtaaatatatgattttcactctgaatacttatgctatgcttaccagccaaaatttaaattttcaaccgtaaatttagaattgattttagagttttttttatcgaagtttatttttcagcctttgtttttagattgctaagaacacgtatatacattttttattcacaaattattttttatttgcaaatatgccgttaattgacatgttaaatttgatcgtgggttctttaatttaggaaagaagagcaaatc

SEQ ID NO: 13027 - DNA, 609 bp, Oryza sativa
  Intron number 3 from transcript LOC_Os08g30350.1 (locus LO C_Os08g30350) derived from phytozome v7.0 (chr-ID Chr8; po s 18677436 to 18678044 reverse strand)
cccgtggcaccgactcctcaagcgcacccgcaaaggtaacctacccaaacaccattgatcatttgctattcgattcaacaaaatcatttcgagtcagccgaagcgcttggtcaacatgccacattcgaaggttttcactctgttcgattggctcatgattttgtttcatttccatttttgtttcccattcgaaggttttcattttgttttgtggaatttgttgtttcgaatcctgtctgcttgcccctagatctcgagctgcaaagtttgtgcggccaggagcaggtacacatcgggagtgaccgatttactccttttgcattttttttcatgggatggcggatggatggagcaatggatctcggcgcccctgacccgaactgaatctagcacacagcagctcaaaagcgatctgcatcccgtggtccaagctctgatctatgcgtgggtgatgagccccatcgagcttctgttattcggactcgaagctctgaattatttagggaggtttgaaccgcctttttgctatttgctgcaacctgcaagttctataaatttgtgttcagtcatattcttgttcttgaccacttgagtcttcttatgcagtaa

SEQ ID NO: 13028 - DNA, 318 bp, Oryza sativa
  Intron number 3 from transcript LOC_Os11g34680.1 (locus LO C_Os11g34680) derived from phytozome v7.0 (chr-ID Chr11; p os 19850409 to 19850726 reverse strand)
tctcagatgtgagtgacactgaactgacacccccccccctctctgccttcttcagatcatcacaccatcttgagttctttgatgtgtgttcagtctcactgtctgtcgatcttgccacacgtttgattcagttgggatctctctttgacgcacatgacacattaattcttgcccccaacatatataatatatatccacatcctgattcgaatgaatgcttttgatttacttaacaatgagggtcacagatgtgttgatgtttttctttctgttttttattttattcaggcaagaacaatcaaggtcacaaacatctcc

SEQ ID NO: 13029 - DNA, 649 bp, Oryza sativa
  Intron number 2 from transcript LOC_Os11g39010.2 (locus LO C_Os11g39010) derived from phytozome v7.0 (chr-ID Chr11; p os 22759439 to 22760087 reverse strand)
ggccgctccggcacgaccgtgctgcagctcccaaggtcagctaattaattaaactgctaattttcatgcgttttggtgttcttctgatggtttactaaaaagtgaagattccaaggtctgtgttactactaccatgttaatcattttaagctgcacggttataaccatatgaacttatccgcgattaagtgaaattaataagcatgattcgttcaacacactggtcaatttgttttctcaacacaaacgtacactgtaaatgtcaacatgctgcccgttagttaaaaattcagaatgttcttggggcaaactgacgtatgttaatcccgcgtttaagatatttttatgtatatttgttttttgaggaaatgtttatgtatatattttactctgctgaaactgctgcaaattgattaaatgcgacatgctgcgcacttcatcgctccttttaatatttctgtctgaatgttctttgggacatctgattgaacaatgtactatacttaaaaaattcagaacacacaagtcgtcgcgccagattgtcatgcttaatttgttgaactattatttgtttaattttgattctgaccattgtttagttttgatcctagcaggagaggagcaagctgggctacctgttctgttgcat

SEQ ID NO: 13030 - DNA, 1031 bp, Oryza sativa
  Intron number 1 from transcript LOC_Os12g02690.2 (locus LO C_Os12g02690) derived from phytozome v7.0 (chr-ID Chr12; p os 939954 to 940984)
tctctttcgctagccgccatcgctctcttccactggttcgctctctccgtctctctgctatgcccctctctttcgtcgactctttccgttgagctctctggtaagggctaggttgtcttctcctcccttccttcgattttagccgatttgtttggattagaccgaccgtgtccccttcataaatatgctagatctactaaaagctgacatctttcttggttgatttcgatggaatgaaatgtctagtggcttgcttttcatttttcctacacttattcctatttttcctgttgatttgtgttatgccattgtatctttggctacaaatacaagttactgataaggccggatacaatagtgccttcttttaaattgatactgacagatacacacttgattaatagtgcttatttgtgatgcataagaacagatatgcccgcacttgaccttattcgataaggtcaggcaaccaaacatgccctttctaagtttctgtctttctgtgatctttctcagtattttatagttcaaatgatcttagcagaactgaggccacctctacacttgaactgagcagaatttataagagtacatgaacagatttttctacacttgttctttttttcgtgctgttaggctgggaaagatggccaatgatgatatatgctgctgtttgtgatgcatgtgaatagatttttgctctacacttgttctcattttcttgcggtttcttttttcctacacttggtcttattttccttttccttgtactttttcttttgctacatttgatagatactggaaagaacagataccaatgacagtagctacttcacattcttcatatatctgaggccattgttctgcatttatttacctgctggaaatgaggctcaatgatgtcaaatttctgcacatatttgctacattttcgagttattgatgtcaggcaaatactatcaagttccttgttcatcttttgatatcaactgatgtactcatttttttaggtaaccacacttgattttgac

SEQ ID NO: 13031 - DNA, 585 bp, Oryza sativa
  Intron number 1 from transcript LOC_Os11g21804.2 (locus LO C_Os11g21804) derived from phytozome v7.0 (chr-ID Chr11; p os 12046744 to 12047328 reverse strand)
catcgtagcgtcggcgctttcagtttttactgcaggttttgttaattgttccgtttcttcttttgctattttcatttgaagaatttatcttatattatatgaaatactctctctctctctctctctagatctcaagatctctctctttctctctagatctctctctctctctctacattataagattttttgacattttcatccctggtctaaatttactaacatacatatatatgaagcacgtttatggatccatgcaagaatctaatcaaaacccaaacatcttataacgtaaaatagaggaattatatgcttagaacatgcaaatgtctgaattaaattttaggttaagctcactaactttacacgactgtttttacaggaggaagggagctggtagcgcaagaaacgaatcaaaaggtatatacagatggaattcgaaagtagtaattagctgtccataaacaaatcacgaagaagaagaatgttcaaacgagttcatcattgattaattaaattttgaattataaaaagttccggagacgcactaaaacaaaagatgtggtatagcaaaagaattaatgt

SEQ ID NO: 13032 - DNA, 411 bp, Oryza sativa
  Intron number 1 from transcript LOC_Os07g48630.1 (locus LO C_Os07g48630) derived from phytozome v7.0 (chr-ID Chr7; po s 29117022 to 29117432 reverse strand)
agatcagataagggcatagagagagtcagagagaggtatgtgtgtgttccatgctcctaggattcattcaataaagattccattttgagttccctgattttgatgcgtgtctgtatacggcccgattattattttatttttgtcttcttacttgatgatggcctttgatgatcctttgttcatcatttggcacatgggcgcatgttctagcttgttttcacttctgctaaaccatttctctttgttaatgaaatcatcatttgagttaccaaaagcttatgatcattgatcagcaaagtaattactatggggaaaaaaaactaattcgaggtcggcttacgtgcaggtggatctatagatagctactgctctgctgctgctattaagtcagtctgtgctacgatcgaggag

SEQ ID NO: 13033 - DNA, 1002 bp, Oryza sativa
  Intron number 2 from transcript LOC_Os10g14150.1 (locus LO C_Os10g14150) derived from phytozome v7.0 (chr-ID Chr10; p os 7691566 to 7692567 reverse strand)
acggcaaaaacactaagctccagatctgggacacggtcagtagtgcgtgctagctagccctcggtcgatattcttctgcttgaaattctatatattgttgttcggttcctgcgacagtttttgcgctattaaaaagcccatgatttggtgatgttatactctctcgatcgaagtggacatagtaccaatttgacctttcaatcgtgtagctagtgatgagttttggcttatttagtcataacttatttcggtttggcgaattatgccgatgcttctgccattcgtaaaaggtgtaccagctcgcttttttcattttaaaaacaatcatccgaaaacttatttccaaatctaaatattttagctacaatattaattttctaccacgccatgaccttttattatcgtagtcaattagaaggcttagatttaaaaataagctttattattattattttttaaaatcccgcttgcaaatttatgtggctgctacagtgcatctttagcactcaattcctaaagtaatatatttacccataaataaatattaatccaccaaattgtattcccaatgtacatcaatctaaaatatcatgtctcttaatttgagcgtgtgcttggggtgaatttgtggatatagtatgatgtgtgagtagtggtgcgtgcgcgtgtctactttataattatgaaaaaaatatcacaatatcacaaagatatatatgctaatggcttggttgaactgttgaggtagctaccttgttttctcgtgccacaccgtggcaatatatatgattaatggcctgatcggtataacgtgcatgatttctacccgattgtgttttttatttacaaatttacatgttaaatcttggtattgcatgatcaacaaacctgtgggtggagacctaactaagatctggaatgcaattatatgcttggaattgcctcctctccttctcatacttttgatctgttgattttacaggctggccaagaagcattcag

SEQ ID NO: 13034 - DNA, 912 bp, Oryza sativa
  Intron number 1 from transcript LOC_Os08g10608.1 (locus LO C_Os08g10608) derived from phytozome v7.0 (chr-ID Chr8; po s 6245134 to 6246045 reverse strand)
gcggagcaggtaagcgcccgcgccacccaccccgcgtgatctctctctccgtcgatgcgctgtttctcgcatcccctcccattcctctcgtttaggatttaggaccagttattaattggcgcgtctagggtgttcgagccatctactggtctgatctgatctgatccagtgtagtgtgatgaccgatgcgaagtttgaatcttacggtagtgaggctttgatctgtgggcatctcctgaggatataattaggaaatggcggcatattttcgttgaatttttttaaagattctgtttaagaatccacgatgtactatggttttgcgatggggatgtgaattcagagctcgcaagctgagacacaaatgctttgtacattttgagactcgatgacattaatgtagtttgggttgtcgcattggcgctccccaagactccacctgtttatttatttcaacccaaggttcattggttatctctgtatactgtgattttcattgacaaaaaatcgatgatgtgtttgggggtgggaatgatggttagattgggttcagatatgtgaaggaagctgtatagtgtatagtacaaagtaaagttgcataaagggtaaaggaaatgtcttctctattaagtaaaaactaactagagttgtcatgatggctagatgcttataaaatgttttatttgggtgatgctcaattgtttgtgttctgataaaacctttgtcatgtttcaccatagcagagttatgttgcatttaccgtggtacatgtcgatgtcgtgcttacaatttgttgactattctattgcacactttagaatgtagtcattatacggtgccagtagttttgacgtatgtcattctttgtattgttcagactgagagagctttcctgaagcagcccaaggtctt

SEQ ID NO: 13035 - DNA, 927 bp, Oryza sativa
  Intron number 1 from transcript LOC_Os10g25430.1 (locus LO C_Os10g25430) derived from phytozome v7.0 (chr-ID Chr10; p os 13081599 to 13082525 reverse strand)
gttcgtcaccgcgcccggccgccgcatcgtcgccggtatgctatatatacgtgctcgccgaacacttgttccggtatagataaaaactagtttattgtccatgtttatacgtgctacatcagttcatttttctatttgcattgggaatcatctttagaaaaaaaatactctctccatttcaggttacaagacgttttgactttgtcaaaagtcgaactacttcaactttaattaagcttatagacaaatatagtaatatttataatatcaaattagtttcattaaatcaataattaaatatatttttataataaatttgtcttgggttaaaaatgttattatttgtttttcttcaaatttagtcaaacttaaagcattttgactttgaccaaagtcaaaatgtcttataacctgaaacgaaggaagtagaaactaattgtttgtaagttcatttccaaactatttgggaggaaaaggtgttcataggggtatggtagggtgtgcgcgcttgtgttcatagaggcgtacgttgtgagtgtctgcgtttgtactgtgtttctaaaaaacacatgaatttatttactgacaaaaaatacattaaacaaaaaaaaacagaatttgatgttagtgctaagtacacattaccaaatttatttgctacgtctaggtaaactgaataatagaaattaataaacctgtgtgtgcaccccccataattccaagttaagcttattttcacaaaatttggagattttaacagcatgcgatttctgccttgaaaaggtactaccttcatctcaaagtcttttttttttgggacgaaggtagtaacatttgaactccgatggtagtttaattgcttcataatagtgagtcaacttgaaattcgcagtcggtgacctccacggtgatctaaaccaaacgagg

SEQ ID NO: 13036 - DNA, 783 bp, Oryza sativa
  Intron number 3 from transcript LOC_Os09g33920.1 (locus LO C_Os09g33920) derived from phytozome v7.0 (chr-ID Chr9; po s 20020595 to 20021377)
gactattgacattcagaagcaaacaggttttagaggtacaacgcttttatgtgttcagtactactcacttcgttcgtgattgatgagcgcatatgcaaaacaaaaaaaaaatcagtattgatgagtaactaatggtgtgattgttgatttcttggcttctcatcaatatgcacattattcaagctgcatgcatacgtcgttcaccatgtgtgcatccgttcgtagcttagaaatcataattaagtccattcatcatgtaggagtccatgtgtcgcctgcttcatctaccatgttttgattgctccttgatctcgctgcacagttgttatatgatgatcaaaactgaatggagggagtactagtgaagctatgcattccttgacttccatctctgtcattgactgtttgtttatttgttaaatatgtcatttatttaagttatcttggtacacaaaactctaaagggtgtgcgcatatgtaaaagaaaatggaaggatatggcttagtccatggttctggtgaattatgatctgtattcagataatgttatgttctgattcaacttgtataaattccaacttgcactccttaatcccttggacatggaattgttatctttatgttccaggaaaaggttcttgacttataacttacttcttggtcttatttatttctttggtccctcagatgccaaactcatagcttggtttgattagtttatggtacttgggcaaactgtaacagtcctttttttttttcccaaaatgcagcttggctgtggat

SEQ ID NO: 13037 - DNA, 971 bp, Oryza sativa
  Intron number 1 from transcript LOC_Os07g38610.1 (locus LO C_Os07g38610) derived from phytozome v7.0 (chr-ID Chr7; po s 23190183 to 23191153 reverse strand)
gagtacaggagagtgaaggaccaggtaagcaccaaccccaagtcccgcccaaccctaatggagagagagagagaggaatgccactcgcgctgatgcgtccgcgcctccagattagatcgctgcaacgggtgttccctttttgcgattttcgctggcccttttctgttcctcacttagggttctagaatttccggattttcgggcgttttgcggctcttgatgtcagtgagacggtggcttttgtaatccaatcgttttgaactctgaaaaaaatgtagcaaatgaaacaggatagtgactactagttcatattgttattaacaatgtagcggtcattcaaccgcatttttagatttaagacaatttatctgattactggtactccctccgtcccataatataagggattttgagtttttgtttgcgctgtttggccactcgtcttattcaaaagtttttgaaattattatttattttttgtgacttattttattatccaaagtactttaatcacaacttttcgttttttatatttgcacaaatttttttaataatacgagtgatcaaacagtataagcaaaaactcaaaatcccttatattatgggacggaggaagtagtaagtagtaaagtgaccaatgcttaattcctgtattgtaaatagtaaactgaagatatagataacggcaagtttggtgattgtgatttgggaaactggtggtgctttcaatcacctgtcagtggccaaacctggcagatgctctgtggtttaaacttgaaattcgacttagatttgcctggtctttttagttctgttgatgtttggcaagcaggtgctgataatcatcaatctggcaaatatattcaaccatatatgtttggagtcatgagcattgcaattaagcttgtacttcagctgttgttctgtttgctaacaagttatgtatctgctgtactgtctaaaggagagct

SEQ ID NO: 13038 - DNA, 941 bp, Oryza sativa
  Intron number 1 from transcript LOC_Os07g38730.1 (locus LO C_Os07g38730) derived from phytozome v7.0 (chr-ID Chr7; po s 23243038 to 23243978)
cccaggtgacgatgaatcccccctccccctcccccaacctcttcttctttgatccgtagatgcattcctgttcctgatctcgggaggcggccccgcgttccccggcttcgtttgatctggtagccccggttgagttgcgtccgaaatgccagatttgtttcgccgtctgtttttttttgtgtgtatgtgttttttttggggggaaattgtttgcttcggcggagcgaacgatgggtgcagccttccgcttgtacttctcgtttggactctgcggattggttttggccgaaccttcttggtggttggtgcatctccttgccggttggtgaggggattgcaagggacaggacgaacaccgtgcgtctcggaggaagggaattttagccgtagtttttacgctcttttttttaccgtttggaattatatggaggaatgcgtttgattttctccggagtagactgtagatttgcgtgctggttgcatgtttacaagttggcaattgggagtttccagagttctttacggttctagatctgcgaatttacttgtggggtgatgcttagtaaataatgtcacatggaagctctgagtgtcagactgagcacgtagatcgtcctagattggagagtttaatctgggttactattaaaagcggcatcctccactatcgaggaggatttgttttgttggttttactttgcttggtgtaagaattgagtagattattgaatcataaacaattgtgctcatgctgccttgcctgagaattagattccattatattatcatggatgtagcccgctttttgtaggcagctctggtagactgtaatttatttggtactgcataggctaatgattagaattatcagtcagttttgatttctaaacattgtgctgtttgctcttggtgcagtgatacaacggttggcgtcgcacacg

SEQ ID NO: 13039 - DNA, 700 bp, Oryza sativa
  Intron number 2 from transcript LOC_Os11g37730.2 (locus LO C_Os11g37730) derived from phytozome v7.0 (chr-ID Chr11; p os 21840287 to 21840986)
ggcgattcagattgtttgagaggtttgtatgccctctcgagactcctccagaataatagtagtaactctagcgcacgattcagtaattgtcctgtctctcagactctcacctgccctttgcaatgtcaattttgtacaggaccaaaattttgttccagttcagttttcgatgcgtatttacagtttgttcgggatattcttctgtcttgtgtgtacacttatagtttattaacgccagaactgtgcatggaatttgcaattccttgccttccatattctgttttttctgttttgtgaaagattatccatgtaagctgcacacttttgaatgtttttaatgccgcatattgcgactccatatttttgatacttaataaactagagatagagacctaccaattcaattcctgttgaggagtgaggacgccttatcttcttgacctttgcattcttcttgaatttctgcattatttcttggttattccttttatgccgaaaccataaattagaggcatttgatgccaacgaaaaaaatgtttatgttctagactttccagtaagtccatatttcattacaatatagtatagtaaccccatttacagttttaatctgttacattccatgactgtgaacattgccgactattttattaggtacaattataaagcactgacaaaactcgctccttttgtgacagcc

SEQ ID NO: 13040 - DNA, 909 bp, Oryza sativa
  Intron number 2 from transcript LOC_Os11g27930.1 (locus LO C_Os11g27930) derived from phytozome v7.0 (chr-ID Chr11; p os 15605423 to 15606331 reverse strand)
gctcactagaagctcaagtggttagggtgattagtttctttgttttgtcaaatttcatcagtcccaaataaaaagacattctaggttgtttagagattatgatttaaaaaaagaaaagaaaaggtattctaggatgtttagagattaagatttgagaataaaagacaatatagccctaattaaataatgtacggctgaaagaaggaggatatatggttgtggtaaggatgggcagatatttcaaaaggcggtgattaatgtatcgagtaatgcattagctagagtgataattttgttgcgataaaattggaatcctaagtgacaatatttttccgatggagaaagtagttaacatgagagtttaggcagtggattcggaagcatgatgatatagtgtaagggagcaaactccttattcttttactgaaagcttaaagatagccctggtacggtagaaggtaacgctggggttaccagctcaacattacagcaccccacaaaacaaacttcaacatcaaactcgacaaaagatagaaaaagaggtgtagcctgctggttacttaacaggtccaaggccttaacctaattaaagtcctaaacaagaactctgctcgaagtacctccacgacgcttgccccatttctgtgtactctttgtcacattcccatgctacatgcagagaacaccaccatcggcttcccttatgtgtaatggttgctaagttttgtgtactgaatctacggagtataaatatatatgtaaatacaataatttatttttgagatctttggataaaaattacattatatgtaatgagcaggagttatttttatacaaaaaatacgcagatctgaactctaactattgcattgtgaatcttaatttgtttctttgttattccatccgcag

SEQ ID NO: 13041 - DNA, 870 bp, Oryza sativa
  Intron number 1 from transcript LOC_Os07g33921.1 (locus LO C_Os07g33921) derived from phytozome v7.0 (chr-ID Chr7; po s 20285054 to 20285923)
gtacgcttctccctcctcctcctcctcctcctcccctccgccgcacgacgggaagatcgcacgcgtgcttgtcctcgtgccagtccacggctccgcgcgccgtctttctcatggtgtttcacaatttgtaggatgcgttctttattcatgttgatctgccgtagatggggggatcttgagccggaggagaggagtagctagtttctttgattatgcgttttggggtctagcggattttaacatgagatggtttctctttagcgacattttttttgttcatgttgatgtccacggtgattgttctagttatgtcatttttatcttcaagacttcaatgctttgaatcgtgggtatagaccagattattgtcgtgaagatcgacgtattttccgagctgaccctctgcatgctgaaaattttgtagtgggttatatctagattatatgtgtattgttgtcatttaattagcacttaaacttctgtagtatgaacattttcatcattttcctgtgaggacatgggatgagttcctttttttttctcttgttctaaaattgttcggtaatcttgtctggctttgactgatgggctccgatgatggcatgaaatctttgagacctgacattcttgtgatgacaaacataagcatatttcctgagacccaattgaggttttaaccattggtttgctgaatgtgtcttcactgttgaaaaatttgtacacacatttgcttcaaattatgcacatttgattattgtttataggcctgcgatgtccattccacattcagtatttgttaagctgagtgcttttgtttcaaatttgttttgtataggtgaacgttcccaagaccaagaagacctactgcaa

SEQ ID NO: 13042 - DNA, 524 bp, Oryza sativa
  Intron number 2 from transcript LOC_Os10g13870.1 (locus LO C_Os10g13870) derived from phytozome v7.0 (chr-ID Chr10; p os 7553586 to 7554109 reverse strand)
agacaagaagaaacaaggtatgttatgcccctatggtttactggtttttttttctagaattgcagtcccaaaaaaattagacctataataactgcttcttgtgcactcaaagccttaagtttattttgggagttggcatacattttcatgtcatttttagccaaggtagcccaatactttagactattcaaatgggaatggtatgctctagagtaggcttgacttaatctacattattggattacttgtcctgtattccttgttgatgctattaatcatcttccatggtggatgctatagttttattccatggcaataactgctttgtgatcttcgttgctctggcatcaccgagtaatcacttttgtccttctcaggttacttttttgggggtgatgtttcgatttacaaatcaaaacaagattgttgcctgatagaaaacttaaggtattaccatggtgtactactgtgattttgttctccgggtactttttgattgcaggagctcagcttggcagttactg

SEQ ID NO: 13043 - DNA, 611 bp, Oryza sativa
  Intron number 1 from transcript LOC_Os12g03320.1 (locus LO C_Os12g03320) derived from phytozome v7.0 (chr-ID Chr12; p os 1284992 to 1285602 reverse strand)
gctataggtaaacggggccatcgtttggccaaacggcatattggtaaacggaatataattcatgaataaaagttttatatatgtgtttctagcgatctaaaagaaaaatctggaaaataaactataatgaaaaaaaaccctaaaatcaactccaaatttaaagctgaaaatttaaattttgacttataagtataagaaagtatggtattgtgtatttctacatggtcattctgttatccaccatgaatttggttttcaatgcttgttttaagggtagttttaaagaagagtaaatttccgaaaactgtaactttagtgataaaagtatcagtttgctgcaacaataacgtgaaaaattatcacaaaactacaacttttacgttatactcgttctgtcccaaaataaatcaacttctggaattcaaactttgtcacaaaataaatcaacttctaccttctcattcacacttggttcacaaatcgaaaaagtttatttcttcaatactccttacctacctaaccatcaatactaatatgctattaataaggggtattttggtcatttatctatctctttagttttgcattgggaatctaggaattacttcttt

SEQ ID NO: 13044 - DNA, 784 bp, Oryza sativa
  Intron number 3 from transcript LOC_Os08g44770.2 (locus LO C_Os08g44770) derived from phytozome v7.0 (chr-ID Chr8; po s 28130713 to 28131496)
ggtgcatatcaacaggttgattgttcatggactcgattatgcctgcatatgccaacgttccataatccacctgataaatcaacatttgcccttcacccttataagcaccaccaaattcctatttagattttctttgagattgtgcctatttttcagcttgcaagtgtcacctttcctctgcaatgctattagggcacatgctatcctcgcaaattttgtttttggcttttttgaaaaaactcaatactgtgaaaaaaaaattgccgtccaattcactaagagcacccacaatggtaaagtaaggtgctctctataaaacatgtacatctcagcaatagactagattaatagtaaaccacctcaatagtatgtctacatgggtatatatagctctctaatccattgcctcatttttctctatagactatctccaggatagtagatagctttgctctctctcttcatttaatctcttccaagtaggacaatatgctgacatggatctattgtagagagcctatagataaccattgcgggtgccctaaggcctgtctactcaggccctgtttggctaatgggacagggaaatcatttcgcaactactaaaagacatcttaaaatcctaaccattcattctcactctttcatttaatcctaacccttcattcatttccaaatctcaatcccacctcacatttcccattatccaaacacaccctcacattacatggcaaaactttgtcctgcaggaccacattttaacccaaacaatttgacgcacggt

SEQ ID NO: 13045 - DNA, 1013 bp, Oryza sativa
  Intron number 1 from transcript LOC_Os07g14280.1 (locus LO C_Os07g14280) derived from phytozome v7.0 (chr-ID Chr7; po s 8143810 to 8144822 reverse strand)
ccggcgagcagagcagggcaggggaggggatcctggtgagcatccacatcctctttctgattcatctctctcccaccgggactacttttgtctggaattcgcttgcgttccgttcgtttaccctagcttctcttctagatctggaaggagctcttctcttaatttcagagccttaaccttaatacaagtaacagtttctttgttcacccaaaagtttgggggttcaactgaacccccatgtcccaagttggatccgccctctggggggcgcaagatctcgtggaatgagggaatgggtgtaggtcacaccagatcagctatctttcttttattttttgacatgatagagaagaatcagaattgtatagatttgggagctgtgaaataatgaggggtataattaattttgttttcattttttagattatagtctatcgaaacttctgttcttctcatgcctgaggaattcaaatccatgtttgaacgtgttttgagctgtgaaattgttacatcctgttaagtcaattcatcgaattaatccaatgccttgttatactcattcatgaggttagcatgtaagtggttctgttattattttgaagccaccaacatttactatagtggtttgccacaagtctaacaaagtttgtgaattagtaccatttgccaatggtgacccttgagcctcgtctacatacttatttacagtctcgttgtgtttaattccatggttgattttatgaggcgatgatacaccagcattgttctattgcatcccccttctgtctctttgggagtatgacaaaaaatggtgtttagattgttaatattaagtttgtgaggtgactatttcttggtccttgttaaccgtttagggcacttcgggtgggattctattatctagtttcgcaaatttaggctgctatgcccatgaattggtgctgaaacttttatttaatcatgtgcagaattgtggaggacttagaggttgtggcacactacagctttgaacc

SEQ ID NO: 13046 - DNA, 713 bp, Oryza sativa
  Intron number 3 from transcript LOC_Os07g46370.1 (locus LO C_Os07g46370) derived from phytozome v7.0 (chr-ID Chr7; po s 27655804 to 27656516)
acccctccgagccagtcgtgtttccgccactcaaggtatctgcagtttgccatgtagtttattgtcacgaagaggattatgatagtgtacatctgtgcattacatttatcgagccacttctgaaccatgatgtagtattttggtaggtgcaattctcattctcaactcacattcagtaatacaagctgccaatgctgcctgatggaaggctttaaaacaacttattgatatgtcacttctgttggcaaactctctatgaaaatcaaacacatctttctacaaattttttagtgttttttttgctgcaacagatagtacctgaatgcatttcatttatgtgggtcagtgtgtgggtgttggtattcgtgttcgcattagttaatgatccaaaacgaaacaatgaaaagaaagctcagcgcatctagaatgtataaggagtaaatttattcttcatgatctgccagcaagttagttatggatgtacttgtgtgtggtgaactgtccattattatatagttctaaaactgtactgaaaattttggatggagagcactgctagcaaacgattaccagcaagttgtatataacttatttccatatgagtattctatctttaggtgttattttgtttattcacttgacatatgaaggttaataattcttgtaaattgtaaacagagtgttggctccagtgctcaagctgaaatatctta

SEQ ID NO: 13047 - DNA, 912 bp, Oryza sativa
  Intron number 1 from transcript LOC_Os10g20560.1 (locus LO C_Os10g20560) derived from phytozome v7.0 (chr-ID Chr10; p os 10288959 to 10289870)
ggttcttctcttgctggcaaatcctacttctgctggtaagtgtatggtccctgttctcccatttgacaaattaaggccgcgtgcttttgttttatgcatgttttctacaaagaaggtggaacaatctgagcgacaacatttgatttttacagtttcattactagattgaatttaggccccctaaaattgatggattgcgaaagggtctatactagcggttatagtgctcaagtagcatctatataaaggtcctagattttactccctataggttcgaattttagggctttttttaaaattcactccctggctattgtatgttaggtctttttgaaaaattcactctctaacctctcataaaacatgtgttaaaaatcaatctatgaaaacaagctcattttgtttggttgaggattattctttttaataaaaatccgtggagacagtcattcccctaccgctcgattttttaaaattgatgaattgatgaatgatttggcttacgtgatagctatttgagcgtataaacgaatggattaactactaacacaacatttaaatgttactctagaaaagtattcaaagaaaatttttatatgaaacgcaccatttagaaacttaggattaaatccaaaatccagaatcgcaaaacaactgagccatatcctggcacgcctaatctatttttgaataagtcacggggggagagtttccccacctgaatatcacgcctaatctatgtcatcaactctttttataaaacagcagttttaccatcccaagatgtcattcataaatgtcaagacaaacctctatccaagtttagaagatacatacatacacacacaagtgcctgatcggatcagtattcagtactgaataaatacagaatatgcgcggttcctgttgcag

SEQ ID NO: 13048 - DNA, 716 bp, Oryza sativa
  Intron number 3 from transcript LOC_Os08g41400.1 (locus LO C_Os08g41400) derived from phytozome v7.0 (chr-ID Chr8; po s 26143737 to 26144452 reverse strand)
caggttctttctggatattttgctccccccctgaatattcttgttttttctcctttgtttttgttggtttctgaaaaggaaaattttggtagagattcgatttgtgaagggtttgttgtttgattcccaattatgtttttattgacaacaacttccatcaatcagtgaaattgtactgttgttgctgaggctggaattgaggtctgtggtgaaattttttattaccatatgcaaatgttcagagcatgtggggtgttcttgtcatcttcagggttaggctaatgttctgttggattagtgatgatttggcatggcttagtgtttttttatatatttaactcccgaactgtgcattgatcttggcggaatagtacttcattaatcagtttaatcagtgaggctggttcagcttgtttcttgttgcttagtgtagttctgtatactttagtagtactagtcgtaggattttcaccatcttgcaaaattgtccccattccgtgctggtagcttaacttcactcgcataaagtcctgcatcaatgtaaacattcattgtgctacatacgtactcccctacgcattcttgaatgcgttttgctttcgcaagtgcgtataacttctttgtatacattgggcactatagtacaactctcacggcatatacatgtgctcattgggttggttgtcttctttcagagcgttcttcttctcctcctc

SEQ ID NO: 13049 - DNA, 830 bp, Oryza sativa
  Intron number 1 from transcript LOC_Os07g47270.1 (locus LO C_Os07g47270) derived from phytozome v7.0 (chr-ID Chr7; po s 28251524 to 28252353 reverse strand)
gccgggtccgcggcccgcggcgagcgcggcaccaggtgaatcccgcatcttagcccccctccgatttctcttcgcagggtgtggaaagattcgatttcttctggtgaatccgcttgctggcgttgccccggtcagctgtatgattctgtatcggtttcgctggttgcgaatttgcagcgagtggctcagtgcggtagctgcgcattggtgtgatccatattggctcgaattctctcttcgtttgggtttaaagggtaacagtgagaaaaaagaagtcaattttgcatagcgttgattgtttattatgctttcttgcaaattggcgctttggtcatttgattgtggtaaataattcaaggctttaggtttgtaaatgttagtctggttgcttgttgagatagtggggttgaaggggacgcaaagctactttcttggaaagaaaatgtaattgattgttctcgtgagaagtggagtgaaagggagaggaaaataaaatctgaactgaagcttgcagctataataataatattattgcaactttcagtctcaggcgaccaggcagtaatgtttgatgtgttgtttactcttgttgtctctaactgattccttcgcgtgggtaattgcttgcttcgaccttgcttgaattacagtccaccctttgcatagttgttgtagtctgaagcgagtacagtaatttagttgccgtgttgctgcgcatgcaagtattatcattctctcatgagatcattgaattgaggaataatatgttaaaatttgcatgttggatgggtcaagatcgatcaaactcatcacgtggttcaggcattaag

SEQ ID NO: 13050 - DNA, 613 bp, Oryza sativa
  Intron number 1 from transcript LOC_Os10g21770.1 (locus LO C_Os10g21770) derived from phytozome v7.0 (chr-ID Chr10; p os 11099761 to 11100373)
gtggccaaggtaatgagtggaatctcgttaaatgtctctttcagaagatcaatagtgggaagaaacttggaagcctggtatgagctagtgtcaaaggttgtaaacactgcattgacagatcagaaagatcgtttcttttggaaaaagaataaagatggtattttcacagtataatctatgtacaagtcgctcatgtatgaaggggtagttcctaggaagaatttcatttggaagctcaagattccacttaaaatcaaaagtttcttgtggtacctcaaggaaagggtaattctcactaagaataatctagcaaagagaaggtggaacggtagcctaagttgtttttgtagctctaaggaaacaatacagtaccttttcttaatttgattgttcaatgactaggtatatttggagtgtgctcctttttacctttgggattaggcaaccgtgtagcatgtctcaaatgtttgagaattggctaaattgtgttgaacctaggctcaagataatattgtttgtggggatagctgcatttctttgggcaatttggttatataggaactatgtggtctttaatggctccaatcctatatctttcttacaggtcattttc

SEQ ID NO: 13051 - DNA, 768 bp, Oryza sativa
  Intron number 1 from transcript LOC_Os08g08220.3 (locus LO C_Os08g08220) derived from phytozome v7.0 (chr-ID Chr8; po s 4699867 to 4700634)
ggatcgatctccgcggattcgacggcttcatcgaggtatcctcgtatgatggctcctccccccccccacgtagcggctcctttcgagggggttggttggttggttggttggttggtcgggggggtttgaggtttgaggccccgatgtttgtttgggcgtgccgtgtgggggaaggtgtgggagttttttttttcctcgcgtgtaatttttggcggtgttggatcgggttatgggggatagctgggaggttagcgaggtttggggtgtgtggttgggatgggagattggttgatcccgtcgattaggggtgtcccgcggcgagatttggtcccgttgcgcatttctgtttttctttttttgaaatgacctgattaattcaatccagttcgtagggtgtagctctctgtctggatcagattaggctttagtttatccatgtgtgattgcttcctagatttgaactggtcgggagtgtaccatgtgaatactgctttcgtatgaactgtgcggttactaacttccattcctaattaatatgactaatttttagggaagaaatgacttggtacctatgctagtatttttttcccctcatggataatgcttgataacgactttgagaagggcaaataaattcctaaaaaatgtttagcgttgctgttttttttttctttagtgttttctcacagttcaatatttactcatctacaccattatttgatccaccttgcaggttaagtcagcatagctaataactccgtctactgt

SEQ ID NO: 13052 - DNA, 742 bp, Oryza sativa
  Intron number 3 from transcript LOC_Os08g08220.3 (locus LO C_Os08g08220) derived from phytozome v7.0 (chr-ID Chr8; po s 4701670 to 4702411)
ctgacgagagagcggtgtaccaggaagcactacaggcatgtgttcctttgttcctagttattgaggcaattttgtatgattgagttgtttttcttctacgttttctgaatcaaattggagagttgatttgatagataatataaacagttggcaccataatgtttttttcctagttcatcaataatcaaaaggatactcttgtgacgtgaagagaaccacagatagctagtttggtgttaagttgtttaaatttgcaaatttgtttagatttgctcattatcaatctcctgggttcctcagtttgctcctcaaattatttggttttctgacctttgaacatactatagctgccctcaatttttttgacctgttttgtccttgaaaaaatcatactatttattctccattcttcaagtagaaagatagaagttctttgaagatgattatacatacttctaattttacttcaaacctgtttcatattttgttttgatttttttttgttgaattatattgcaatcatgaaagttgtatttttgttttttgaatgaggcatataaatttctcatttgtatgtttatcttgtccatgacaagtttttatccagtctaggatacattttccaggtagaagttatgtactttagtgattgaggtatatgttggtctttattttgagtctgctttgtgatatttctttttatactatgttatacagaatattatccaggataaaagggaag

SEQ ID NO: 13053 - DNA, 991 bp, Oryza sativa
  Intron number 1 from transcript LOC_Os11g25060.1 (locus LO C_Os11g25060) derived from phytozome v7.0 (chr-ID Chr11; p os 13821969 to 13822959)
acctaaggtacatacgtctggttaaattcttcagcattttctactcatctcgttgatatctgattaaattagttctttgtgtgagcatatttcttatcaaaaatatttgaaacctcaacttaatttggcgagattttgtaattaaacaagtcgtcaatctgtacgtatgtacatgggccattgtatattttttctttgttaaaggatattaaaattcagaatgaataaatttagaatatatgttcataaatctactattaataaaaagaagtatagagtctcgcttgtatagcttgaaagtaaaaaaacaaaaactgggttttcaatgttatattttatttaacacaaattattaatatcatctatagttataataaatattgtgatacatgcaaattaatggttagatctttccaggcaaattgtaaattttttgattgtgtccaactatatatacttcctctatatttttaatagataacatcgttaaattttggacacacgtttggtgattcgtcttattaaaaatctttacataattatcatttattgtatcatctagttgttttattttgtgtgtacacgacaagattgtatgcacaaaatatgttattgactaaaagtaatttaaacatgttttatatcgtatgtcgttgcatagatttttcagataagaacgaatgaccaaatgtgtatctcaaagttaacagcgttatctattaaaaacagagggaatgtatataactagagataagcatatacatagacagataaatcgataaatagataccttatatatgtagattaattactcaagtagattttggtttacgtggttaacttgtgaagtcctccaaacagttccatagtgtcaccaactaaaatgttttcttcgatcaagacaaaacacaaatagactaatcatatcctaattatcctcatctatattttttgttgcagggagatcacggaggattacgggcgtgatctg

SEQ ID NO: 13054 - DNA, 972 bp, Oryza sativa
  Intron number 1 from transcript LOC_Os07g32890.1 (locus LO C_Os07g32890) derived from phytozome v7.0 (chr-ID Chr7; po s 19665836 to 19666807 reverse strand)
ccaccacggcagcgaggcccagccgacgtctcaaggtgtggtcaccctgctcctgtttcttttgatctcggcattgccttgcccttgtagatgtgtggttgtattgggaattctgcgaacggttggtacgctaaggagactaaggcaggattaggggggacgtaatagcgtgttggttcttcggggaatttcgtcgaacattttgagtgcaaggttgctccgagcttgaggattgactatggagatctggacctgtctctttgcatacgaggaacataaggaaacgattgcttagttgattgcacagcgtgttagtccttacttggcataggaaggggccttcatgatgccagttcccttgttggagcttcgtcaggtagttatcaacgtgcactgaaaacacaacgtggagcttcgtcaggtagtccttacattgcatgctttgtctatttctttatcaatgcattactgtacatcatcacacccttacccataatatttggtacagttagtgcatctcttgtttaggaattaggattcctagttagacaaaaattaaaaaggtggatcgatcaaaattactacttcacgaggacttttattaactttaccaaagattcctacttctcaaatattatgagttagtaagtttactacaaggctgtactgcacagccttgctcacaatatttggtacagttactgcatctcatgtttagggactcctagttaggcaagtaaattgaaaagattgatcgattaaattactacaagtgcataaaccgttattgatagttagtaagaggagatgctgaaagcacaagtgcctgagtttaagtttgattgcatgagttttcaccatagtctctatgcgcatactgcaagcgaattgactgcacattgagtaggtgacacatttccttttcttatcgatacagagtcatcacaaaaggtgcatccatttgaggaggaa

SEQ ID NO: 13055 - DNA, 917 bp, Oryza sativa
  Intron number 1 from transcript LOC_Os11g43934.2 (locus LO C_Os11g43934) derived from phytozome v7.0 (chr-ID Chr11; p os 26058254 to 26059170 reverse strand)
agcagaggctgcttccaccgcatcgtctatcgccggtgagcatccctccctacccacacctcatcaggtattctgcgttatccctcaaaaaagtttgggacagggttagatctgcctctgcccagttccacctactttcaacttgttatttttgatttttgtttttagcagatgtaatttggttactgaatctcatccaaacacccttagaatagttgcattagaacggaaaatgtaagctcacataatttctactcatcctaactcacataaatttcttaagaagaatctataccacaaactactcagtcactcaaaatatctttttattaaggtatattcttataagaagttttcattccataaaattttctaaaggacatactgtgacacttggcattaatctaatttaacatttttttctttattaggttataaattttctaaaagacatattgtgccacttggcatgaatctaatttaacattctttctttatcaggttatcaggttagaaacaatgtgaattcaatatttttataaagtttaagtacgattcatacataaaattaaagaaaaatataaatttatatataagtgataacataataaaatacaagttaaaattattaaaggaaaaatattattaataaacaatgatattgatgtatttctaaatactttcacgtaatatttattaagtatcaatgagcaaaataaatgatttaccatatgacagattaattattaaaattgttttcatccgttgcaacacacgggtattttgctagttgaactcaaacgatccctttgtggccttgtgggcttgtaggaggcgaaagaaggagaattattgatcaatcaattcagaacgaacggctcagatattggggaggaagacacgaagcggacctatgc

SEQ ID NO: 13056 - DNA, 836 bp, Oryza sativa
  Intron number 1 from transcript LOC_Os10g33370.1 (locus LO C_Os10g33370) derived from phytozome v7.0 (chr-ID Chr10; p os 17493098 to 17493933)
aagctggaggacgaattgtgggtgccatcacccaagtaagtatatatatctatatatatgttcactgcgtcgagcttattcgggttaattgattgggaattgggattgaaacctcaatttttggcctgagcccccaaaaaatcctggaaatggtatagatattaggatttaacggtgtgaaaattcatgtcaggattgtgtttgcactcatttgtttaaccgaaaatgtgaaacttcatgtcaaaacagggacaaaattcatgttaaaaggcttgatatcaaaataagggtaaaaatacaaagtcctcagaaaagtaggggcaaatctataaatataacgactgtatgtctttgacactggaatagggtaaacacaaagctttagttaaaaaaaatgaatacaatcacaaaattgtaaaagtaaatgtaaaatcaccattgaagtttaatttaaaacatggataagaatatgattgtccctataatatcaacaagctttctacataatattatttgaaaatattactagaatggtacgtaggtctggttgaaaatggtaaaatgttagttttttttttctttgggtcggcttggccttgacaatttaaattgagcccgtgcattttcaaactaccgtgcccggggtttaatgaaggttccaaaagcattcagtcaccaaataccgctctcaagcggttttattgataacggtgataaatgctctgttacaacaaaaaccggtaaaatttagataaattttgctagaattttaaatttgaatttgaattttgaaattggcaggttcaccaagcagtttctcaattcttccagatact

SEQ ID NO: 13057 - DNA, 681 bp, Oryza sativa
  Intron number 1 from transcript LOC_Os10g19850.1 (locus LO C_Os10g19850) derived from phytozome v7.0 (chr-ID Chr10; p os 9825280 to 9825960 reverse strand)
cggcgtcgaaggcgacgcttcccttggtgtcgacggtgagcgcgaggatcttcgagccgcccttctcgtcttgccggcccatgccgggcgcgtactgcgcgacgtggatcgggttgtggttcagctcgctctcgacctcctcctcgtcgtcgtcgtcgtcggccacctccgcctccggcagcaacgctaagaggaggagcaggaaagaacccaatgagttgatcaagaagccgccatgtaaattgttctctcgatccatcgcctcggtcatttcttctccagctatttcatccttgtccttaattacctagatttgaattgctcaagcaaacaggatataatctgaattatttgtccaattgctgcaactgtttctgaactgttcaagaaatcagtcaattatcacagtccagttgctgcaactactctgtctctgaattggaagcagtcaattatcataatccaattgccgcaactactctgaattctttactttctgggggcagaattgctagtgcggagcttaaagaatcattttctaaaatcttaatcacaaaagggttcaattttttttctcaaaattcagaacaacaactaagcagttgggaattaattattgatggatgaatctgtttgatgattccagtgccggggcctggcagtgatcaggggaaggcgtca

SEQ ID NO: 13058 - DNA, 866 bp, Oryza sativa
  Intron number 1 from transcript LOC_Os12g07970.3 (locus LO C_Os12g07970) derived from phytozome v7.0 (chr-ID Chr12; p os 4043638 to 4044503)
gggatcttgaggtgattcccctttcccgttcccaggtttgttgggattgttgctattcctgccattattgtggggggtttgctcgtccgcgaaaaaaatctttgtgctgtttctgttctgaatccatgtgcggccgccgtcgggggtttggcgaatcttgaccaaaatttcgcgacttgggttggagtatccgttggtgtgatggtctaatccatatccaatgtggagtttggaggtggatggttggggttttgcccgagatcttgggagttgggtagaaagttgaggtttttagatgcagatctttcttgatctgggagcgtttctggctgagatttttcttctactctctgccccctgatgacttgaatctgtggaactagtgcaacgcggtagcaccgtttgcttgcttggaactgcaggattggttaaaaattgctttgttttaagcttagtttggtactgtttaactgaaaagcttagcgcaagtttgcctttttttaggtacttggatacgcgtagggccgatctacaagtagatattatctgtcgatcggcttgtatagtcatttcttctggaatctaaaatactattgtttgttcaagatctccctcttttctcctggaacgtagagttagtggcagtatgaaatcaaaaccacgtggtttcaaattgcagtttgtattttctttttttttaaaaaaaaatattatgctgttttcgattgttttctgctgttcttaccacaaagtactttactcagtagggtaaaagggcacaatatagagatattcatctcttggtatgtttaactaactgatgtgtgcttcttctttgatcttcattaagcaggttttctgagtta

SEQ ID NO: 13059 - DNA, 712 bp, Oryza sativa
  Intron number 1 from transcript LOC_Os10g38900.1 (locus LO C_Os10g38900) derived from phytozome v7.0 (chr-ID Chr10; p os 20654203 to 20654914)
aggtacctgatccgccacttattcagtattcaccacaaaatcttccgatctagacttgcaggttcactgctgtcacctgtcagcactgtggttctagcatttgacagtcagtgcatggcgcgcattgttggcttatgtgatttgaaaacttcataagtggcctttgcgcgagtagtagatgatctgtttgctagttttcctgcgttggttccatttattggtgatcagatttttggcatttagtgtgttatgtagcttatgtagcactacttgaacttcaactctgttaatctgttggctatgattatattgtgcttcacgggaaaatataatttcatccaaaccagtctcttttggggctctactaacttcaatttcaacacaaagaaacaggagaaagtacagatatatttgaaagatcatgatactgttcattgcttgttagtgttgactgatctctattccaacacttgtgaatcaaaacacccaattctttcctttcacaatacattgattggtggagttattaagtattcatttcggttattatatacttagatatgctcatttctggtgcctagtaccagaaattttattgctcgcttggataagtttccatgtgttccttaatttagtcatagaacacaattcaaccttgtaacaaggttatcctggttgatttctgactgttaaatatatttggtaaaggcta

SEQ ID NO: 13060 - DNA, 647 bp, Oryza sativa
  Intron number 2 from transcript LOC_Os11g47710.1 (locus LO C_Os11g47710) derived from phytozome v7.0 (chr-ID Chr11; p os 28263834 to 28264480 reverse strand)
ccgagatcaagaaggtggccaagcaaggacaggtgcgcccccccaaactcattgccttccctcacttatgatttcatactcccatcatattcatcaatagtttcattcgattcaaccttgtcacatactttactgaatgccaacatactaagctttatgtctgataaaaatccccaccataccttatacaatagatggcttggtgttacatttcttccttgattaggcaatttcgcacagtagcttggcagatgttatgaggtctaaaaatgtatcatacacattatcttattctactctccagttcccattgcttacatttatttgcataggattgcttcacattggttaaatctaaccaatttaatctggttgagattatcagttacaggcttttgtttgttgttgacatgttctgttaggagaaagcagaatttctgtcaggatctgtttgatgaatttctatttcatagaatttacctttgtccccttaaggctaagttatagtttttgtgctgcttgtaactcaaagcccaacatgaaattaaaaagagaaaaagaactccaaatgcttgcttttagtgatcatcggttgtggcatatgttttgatgccctttaacatttttcacagggagccgtaaaaatt

SEQ ID NO: 13061 - DNA, 325 bp, Oryza sativa
  Intron number 6 from transcript LOC_Os09g29950.3 (locus LO C_Os09g29950) derived from phytozome v7.0 (chr-ID Chr9; po s 18226689 to 18227013 reverse strand)
ttgactttcaggtatattctttggctcagctcttgttaaatttgttatacaatttgcttgtactgaggtgagcaagacatttaataggcaactttgtttttggaccataacattttaatgatttagctcactgaaagacctgcttgttgaatgcaatgaatcatctaggaccatgtagcttcatctaacgcacttctagtcttctagctgacaagtactttgattttcaatgttagatttgttctattatgctctttgattgttttattatgttcaaatatttgatactgttactaatgtgatttgtaggagcaaaaggaacttg

SEQ ID NO: 13062 - DNA, 571 bp, Oryza sativa
  Intron number 9 from transcript LOC_Os11g03734.1 (locus LO C_Os11g03734) derived from phytozome v7.0 (chr-ID Chr11; p os 1464647 to 1465217)
gaagctgctttcctcactggtttagagaaaaacaggtgatccctttagttcctctcaggatactctctcctttatcttgggtttagagcattagagtatattggcaatttggcatatctctgtatttggaagtttagtatttgtcatcccgatactgacttatccctaagaggcttttcttatctcgaagatagtttcttaacctccaagccatgcatgctatataaacagcccttgaagcttaatacaataattattcatcttatttcgccaatccctctcgtttacacagaggaaatataaaatcatgcatataatgttgtctccagattatgcatgaacataaaagatctttgaagggattcctagacaaatggttaatttgtctctacaattattatctcattcttctacttcaccacagaaggaaaataactatttcagaaattataggaaaactagtatgtataaatttctaatttgtaaatatttctttttgcggggaagaggaagctttattaaaaaaacaaatatttacactgaattggactttgcttgcttctttgcagcg

SEQ ID NO: 13063 - DNA, 904 bp, Oryza sativa
  Intron number 1 from transcript LOC_Os11g02720.1 (locus LO C_Os11g02720) derived from phytozome v7.0 (chr-ID Chr11; p os 881267 to 882170)
aagggagaggaggtcgtgctcgtgcacgcgtccatgtatgtatgcatggacggatggaactatcttgttgcttgatactttgaatctgtgagtttgtgaagaatttagtgctagttgcttgatttcttgtttgaactgagacctccacctttaggattttaattttatagtgatataggtgatgttttaagcttctttttttttgtttttggaatttatgataatatgattaaaccagataagatgacccatttacctcatctgattgctgaacggttgttttcagaatgcgttcttgtctgtctgctatctttgaagcgatgaaatggctgtattagctcgcgagatcaacgagctggctcgagtttcttaccgagctgccatttgagctcgttagccataacgagccagctcgagctggctcgttaacctaccgagccagagcgagtcgagccgagccgagctggctcgatatccaaccctagatatgtactactccgtcccaaaaagaatccaatcctagcaacgaatctggacacacatgtgtctagattcattgctagagtttgtctttttttggacggagggggtatagtataggcacacctattccgcgggaaggatctgctatattgctacacgcgcgccaaggttgcccgcccaaattagttttccctcctttggtgcattttactcttcaacccactgattctttatttttcacatatattcctcagtggtgcagctgagctcgctggatgttgtacaaaggaatagaattagcaaatgatacattctatggggtgttttgtgaaaactttgttttattttatggggtgttttgtgaaaactttgttttattttaatagggggaattgttttggcggcaggaggcctcatccca

SEQ ID NO: 13064 - DNA, 1004 bp, Oryza sativa
  Intron number 1 from transcript LOC_Os08g10240.1 (locus LO C_Os08g10240) derived from phytozome v7.0 (chr-ID Chr8; po s 5938905 to 5939908 reverse strand)
cggatccggcgcctcctccctccccaccggcggcggtgaggtggtgatgacgagaggctggcggcggcacggatttgtcgagctcgactagttttttttttctgcctgttgttccatatgatccagatgatgcagatgttttgtgcatgttgtgatgtttgatctgtgctaatgatgattttgtattttgtgtttgaatttggaaatgagcagccatatgcatatgaattgaatttgaatctagatctctagatgtggatttgaattttgaaaatgaatcaatgggcttttctccaaatcttcgctggcggcttggcagcaacatggttttttttgccccaaattagattttcgctgacggccgatttaacacagccaccagcgaaaatgaatttttgctagcggctgatgtaagatgaccgctagcaaagatccatttttgctggtggctggcttaagatgaccatcagcgaaaatgaattatcgctggcggaatcgtgatcttcactagcctttgttttgtggcggctctaaattccgccagtgaaaatctaaaatggccgcaaaaaaaatggttttcgtagtagtgcgtcgtcgccgtcgaatcctcccttatcggcttcgctcattaatctcatctcccttcgatcctctctcatcgcttccgctcattcgagcaggtacaatagcaggctatgtcagctataaacacatatcgatgagatgaaagaagagagagatgaacagcgggctacagatttgtagtcagctgcagcatgggctacaagatgaaatgtatgtatgacaggtgggaccatgtactaatagtgtagtatacatttatatgtgtttatatgttagtactattatataaattggctattaaattgactacaataatttggagccagtagttggctatatattaaacttgctcttaatccaagcaaaccacctgtctccatcaaggaatatttgagcctccatcgtcgtccacggccact

SEQ ID NO: 13065 - DNA, 978 bp, Oryza sativa
  Intron number 2 from transcript LOC_Os11g19220.1 (locus LO C_Os11g19220) derived from phytozome v7.0 (chr-ID Chr11; p os 10974556 to 10975533 reverse strand)
gactcagggtataagtttgttgttttgtgtttaccttagtggtggtataatgttatttggatcattggatgtggccttattttcaacttgcttgagttccttaccatcgttcaagtcttgtctcttaaattctagtagtccaccgtgaacataatttcttatcagctatttatgtacactatactatcgctgcagttactaatacttggttttcacatgtcatccataagtcatatcaacaaaggttgaaaaattagtttatactctactctataaatttatgttgaaagtgctagcttcaggaatagctatggacaaaattataaatagtatgaatttataaaagggttactggtcagcaaaaagactcagtggaacatatcgagcgaagagtaagaatcaaccagtgtctccttgcttcagtaattaagctctactttagcgtgattactgatgaccaagactttttgaagttataggaaaattttttgagatcttaagatctattaacaaaaatatgagctacagttttttttgtaagttttaatgctctatgggaattgtgtggtgaacctaaatgacaccgtgaacatgtatttctttctaaaatttgaatatgcttgttagaaaaaaatgaaagctactgacttcggagttttgatgaatatttctgcttccttttttaaagtcaactttaagtagtactctaactcttcttttttattatgaaacgtatggaattaaattttgtgaaaacaagtgaataatgaaataatggctgcaattcagaacaaattcagttcctttgagtcaattcttaaagaatgttgttttctttgatattgagtgatatgcaccaacaaaaatatttttctcattgcacttttcttattagttgttttagggtgtactatagctgcatcacaaatatgccaaacttattgtaatgtatatacgcaggacacctgatcacacaaa

SEQ ID NO: 13066 - DNA, 739 bp, Oryza sativa
  Intron number 2 from transcript LOC_Os12g03430.1 (locus LO C_Os12g03430) derived from phytozome v7.0 (chr-ID Chr12; p os 1337214 to 1337952 reverse strand)
ccgtcctaaccctgaccggagacctcatctgccaggtgacttgcagttgttttctatttgccgcattttcacatccatacattgcagcctacttagtactacttaattggttgacgaacaatgaaccagtagtctccctctcttgttgtagagggcttcctattactctgcaatagcacatagccaggcgtgcttagatgggcattagcatcaaatggtcaaatcataccaattttccttcaaaacaacattgaaatgttatccattgctaataccacttggaaatcaatttactgagttatggttcttttctgccctagctgcactcttttagtttccttgttttctaaatatgacatgatgtgaaactcttaactggctaggctgttacggtcttatcaaatttcaggtccatatctttttatccaatcctgtgtcaaccataatctgaatatattgtctttactcaactgtgtcggtctttagcctatgctaatctgtaactcatattatttgattcctcaacggactttactccagcaacagtgtcctattccattattaaaaaacaatgtctattccaactgggttgcatccatggattgggcaaaatatttgatatttcacctgttcttgttattgtggtatcttgttaaggtttcttacgagatatttactgttgccattgtttggtactgctccagctcgcaattgataaagtgccaaagctagatttgaa

SEQ ID NO: 13067 - DNA, 680 bp, Oryza sativa
  Intron number 1 from transcript LOC_Os08g15490.1 (locus LO C_Os08g15490) derived from phytozome v7.0 (chr-ID Chr8; po s 9419386 to 9420065 reverse strand)
gaatagaagaaggtgacgggagtgctacaaatcgaaggaaaatcagaggcatgtgctttgagctaaaaggggaaaatttttgtgctattattttgttccggtttttctttttgtgtgccatgaatcgaattttctctaaaagcaatggaactgagcctaccaaaggcccagaatgtagtaaatatggcctacagttgcgtgggattccggcccgttgatctgcgtagttgtagggaatttcagcccatttgtctcatcaaattcagtccataagcgcgcgtgattctagcccgtcaatctgccaaatttcagcccatctaaaagtcagcagagaagtccaattttgaggaatatcaatcaaatttgaaaatatttcaaagagaactaaattacaatatgacattatgaccacacgctgagcacctaaattctatttgctctaataggacatacttgatatggagtatgattttccctactgaatattttttcttatttaactctaattttccatgctattttttaaaaacttgctggtgaagctggtagcctgatggaccgctttcggtcgaaaagaaatagtaataagttaaaaaaatcaaattaccctgaactactccaataaggagcctcctgtctacagcaccatatatatacctcatgtatgttttttttagata

SEQ ID NO: 13068 - DNA, 618 bp, Oryza sativa
  Intron number 1 from transcript LOC_Os08g11240.1 (locus LO C_Os08g11240) derived from phytozome v7.0 (chr-ID Chr8; po s 6606968 to 6607585)
aggcgacgacacgcggaggctcggggcgcgaggcggtgacgcgcggtgacggtggcaacagagagagggggaaaaaggaggagctgggttaggggaccccgtcgaacaccttaggtgcaatgaacagtgccgttttctaattaacccgattttagtgtaatttccgtataaatttgattccacaattcttaattttgcatatatgcattttactcaatatttgtgttatcttaactaatgaattcaccctagattaatattactcatattttatttttatgtaatttatttgagttttaattagggttaattcttattccatcgtatttaaatttaattgatccaaatatggtcgcgataatattttatttatttctatcccacctaatctttattttgtatttattttaccaatttgtttttaaggtttattcctaattaactattctttactcacgattaataatcttcgagatcaaatccagataaaatagacgaataagatcggcatgatgcaattagtttaaaaagtttttgaaaatccatatttttagagttttgattttgtcggtcaaattttcagggtgttacaaaatacaaggccccctcggaggagag

SEQ ID NO: 13069 - DNA, 679 bp, Oryza sativa
  Intron number 1 from transcript LOC_Os09g30400.3 (locus LO C_Os09g30400) derived from phytozome v7.0 (chr-ID Chr9; po s 18498900 to 18499578 reverse strand)
tggtttgtgcttatctcttactacttgaggtacatctttttgaccaggtttttttttgtggtaacggcgatttttggggataaagtttgcatcttaggtcgggattttttcttgtttcagtggtggaatgtctccattttgagcgaaattgcgtcttttgtgggttcatgtttggggatttgggggaaatcgtgcggcctggtttgctgtggtggggaatttttttcttgtttcagttgattggtttctccatttcatatcaaaccgtgtcttttgagtttctcgtgcatatatggagaggatatccatggttatctagaaaaaaaatgcaaagttttcaacttgctctgtaatggactcttccaacgttttgcattcatttcttgagctcctcaccttggttttcttcattattgtgttcaaacctactctgatcttggttctgaacttctgatgtttgtctggttactggtcatgtaggattgatggctttgtggtctggtctcttgctaacttcttgtgcttctgtgattctgataagcttttcttcgtgttttgtgtagagataacagtttttttctcttatcaattatgctatgagatattccatgtttaatcaggactaactaatgctgtattacctgatactcgtttcagttaaacttgattgctctgtcgc

SEQ ID NO: 13070 - DNA, 832 bp, Oryza sativa
  Intron number 2 from transcript LOC_Os09g29630.1 (locus LO C_Os09g29630) derived from phytozome v7.0 (chr-ID Chr9; po s 18013029 to 18013860)
cgaggtaatgttgttttcatctgaagcaacatgactccatccacatgtttggcctaatgatttattgtttgttggtcacattgtattgaatggcagtgcagttagcttgtttatgacactaccttgattattgcaatatagcagcatcacattttaaagaaaatcattccttgagttctgatgattgtgtaatgtagcttttcatgaccaaacagcttgcgatattgctcgaaatcaccaagaaggcaaaaattccttggtggtgttgtatatgttctgggtgaaatatctataagctctcaaaactttgttccaacaaaaatgaatctgggggattatcctagcttataaaaagatatagatatagattttatactgttttctatacaatcaaaacttttaatcttatcttgctaactctctattgctgttatttaaactctaatcatatataggttctagatatctgcctattgtttgaattgataaaaaccatgctctgtttgaataatcttttacttgactccatataactttcactgtccttttgtaaaagaaaaggacattatctctatcctgattctcctgttttttccctgccatggttcattcttcagatataaccatctccagttctatgtgcaattgatcatatagttagaacaaaagcatttgcatgaaatgcactggtgattttactgataccttatcatgtctggtatcattgcacataactaattcttgttttatgatgattattctgttctagtatgctaatgttgtccttacctttccagctgtcaattttatcaagatatttgctcacagttag

SEQ ID NO: 13071 - DNA, 452 bp, Oryza sativa
  Intron number 1 from transcript LOC_Os11g18500.1 (locus LO C_Os11g18500) derived from phytozome v7.0 (chr-ID Chr11; p os 10424665 to 10425116 reverse strand)
atcttagtaggtaccaactatatagagttgggagttttgagagacgatgctatttggttgggagatattggagttgtggtgggatagggatgggaattgataaaggaactctctcctttctaatatctggatagtggtggtaattgagaggaaatttctcctatactttatctaaaaaaaaatctcaaccacctgttttttttctaacttctaatcttcaactaaactaccaatcatctatcaattcccaccacctctaccaaacaaaagattgggactaaaaatcaaatttccatgttaatctcaccatcaatttactcgttgaaactaccaatcatcttccctcgagttttcaaacaagtcgtaatcattttattccccattccaccactacactgagttgcttcatacactgaattttttaatacatttaggtcattgtaagtttcgct

SEQ ID NO: 13072 - DNA, 1039 bp, Oryza sativa
  Intron number 1 from transcript LOC_Os07g33110.2 (locus LO C_Os07g33110) derived from phytozome v7.0 (chr-ID Chr7; po s 19772045 to 19773083 reverse strand)
ctccttggattgttggattggttggtttgggaaaggttaggcgccctcctttcgcttgggtacgcgtctctctgtttttcggttcttggtttgtttggttcgagaggcttgtagtctcgcggatttgtttttcgttgcagagattattaggagttaatctgttcttcttggaaggaggttcagtgattgaggatttgatccaactgtgagaaaaatcttggcccttttggatctgggagcggtgcaaagctactggagcgcctcacatgtccacaagtgctcgattttagcagtttcatgggttatgttcttggattcagtagatttctgatgcagacagtaattttttaccgaacaagtaatcggtgaatttacagttttttctttctttctttattacgagaggacgaagctctagttcactgtaccttgtttattatcgcttcctcctcgtgtaaaggatcaatttttacgatagcgatcgtgagtggtttagctccccctctctctctcttgccgctgggtgccttgctggtcccgttgctttcagatgctgctttatttgtctccttttgcccaatttgcgtgtacccttgtgcccttatctcctatggttgcttccactgtcaccaaagggggactcgccatctaccttgttcctcagttcatgcgaatttcatgcggtcctgggctgtgactgggagtagattgaggtcaatatgctgtcaaaggcatttcttttcttttccttttcgttgcttgttttccccttctgatgttgtgtgttgagtttattgtttggtttgctggtagatccagtatttggatcatttttccttttttttttctttcattgcttctgcggagggatgagtttgtgcatgaatcttttgttggttggattcgcttagttttcacactagtcctttgattcagcgcaaatctttgttaattggctcgcttaattctgacataaagtgttccttcttgggttctgcttgcagggttgatctcgtttgcggagtaacaaatttgcaag

SEQ ID NO: 13073 - DNA, 990 bp, Oryza sativa
  Intron number 1 from transcript LOC_Os08g05670.1 (locus LO C_Os08g05670) derived from phytozome v7.0 (chr-ID Chr8; po s 3036462 to 3037451 reverse strand)
tcagtgtgagatttggagctctccaggtatggcattgttctgttatgcttctccatatctgtttggaaacttgcactatgcaattacattagtcaatgtctatttccctttataatttgctttgtaagcaacacaaatgttaccagttgtcttccttttaggttgtaacttgtactgtatactggatatcttactcaatttctaacaagctacaaggacacctaagctaagattactttcataaaaaaggctaagctccctggtctggtctatctctcagcgatgcaattttccttggcgttccaagtttatacaatgcaaatgctgttattttattggacaaggtcatttgcactgacagaaaatagaagtttggacaataaacaagaaaacatgtgggtcacctaatccaacatcatcacttacatacacttttcatacttacatgttctgaacaagttattgtctattgaatgacctcacagtcgctccataagttgacattcattgcttggtatcatacaaagaaatgcaccttggaaaatactatcgcataatttcgagtttatcaccatcatgttttttgtccaaatatgctgagcctttttggggatataggattctataaatggcaacactacccctgtctcttctcacctttttgtaatcatgtccgtcctgcctctctggttagacagtgatttgatatcctagtgagcttctggtttgagctttgtatcatggcatgtgggggcgtccttaataaacagaaataataatacaagaaaagaacaagagagggtgggggcaaaaaaaagtcaaggcaagggtattttcaacttaaattctctttacgatggcatttaacagcttatgttttttccagtgatattttccaacatctcaatctacgtgatggtgctaagcagatttacttttatttatatgtaatcaggtgttgagatcagcagttcataattatccaagctg

SEQ ID NO: 13074 - DNA, 684 bp, Oryza sativa
  Intron number 1 from transcript LOC_Os09g32992.1 (locus LO C_Os09g32992) derived from phytozome v7.0 (chr-ID Chr9; po s 19697523 to 19698206 reverse strand)
ggatcacctttgggcctctgtctttgggattcttggtaagcatctcatgcatgctagttcaccatctatacatgcatccatatggtagcatatggcatggcatggtctcccaaatcatgattttgtttaattatatgtatgacctcaagatatattattcttactgacatgcatgaaaaatgcacttttcttctccacaggaaacatcgtctcattcctggttttcctcgcaccgatgtgagttttgctcatttacgccctgattttttcttttccaaatcattcattcacctaaacttaattacgcgttctgacaagtgcacaattaaattttattttttactaaaaaacttaactacgcgcacgtcctgactcctgacacgcgtgtagttaagctttgtcttgttcttaaaaaaaacaaaagaagaaaaaaatctcaataactacgcgttgtggggattgtgccagagttttgaatttcaaaacatgtctttttgccagtggggactgaaagaactgaaatcaccgaaattttggtaatttcggattttttttgaattttcaacatattttgattaaatctgaataaatttacaaatatttgacaaaaaccgaaaatttcggggagactttgtgcttgccggtggggcccgaaattttcgaaccgaaatttcaaaccaatgg

SEQ ID NO: 13075 - DNA, 451 bp, Oryza sativa
  Intron number 1 from transcript LOC_Os11g05270.1 (locus LO C_Os11g05270) derived from phytozome v7.0 (chr-ID Chr11; p os 2332052 to 2332502 reverse strand)
acttgatcccagaggcattagaaaattggagcaaggtttgttgactttgtttttagattcgatgagaaaaaaagggctgtcccttgcattaagttggtaatggagaaatgggacactcacctgaaaataaggaaagcaaaggatccctgaaaatgatagacagcagttctctttagctttcgacaaccggggaagaacaaaaatcaaatgttaacacagcaagttaataggttttttcatctgatacatcagatagggtggctcttcacacaacgatctacatgattcaatccagctggcaagaagataaatgtattgccagaaagtggaagaggcaaatagtctacttgtatgttttaataactgaagatgaccaatgtacactgaacacggtttcttttcttactttcttttttttttctctttttgactaaactaggacaacttgaca

SEQ ID NO: 13076 - DNA, 782 bp, Oryza sativa
  Intron number 2 from transcript LOC_Os08g13780.1 (locus LO C_Os08g13780) derived from phytozome v7.0 (chr-ID Chr8; po s 8215913 to 8216694)
gccacgccaaggaggaggtgaggagaaagttttgcttgtcattcttgactggtctggccggggctgggcattcttgtgtcatcttctgtgttggggaattttggatttggatcatctccttcttgtgaaaattcttgggatcatattgcatcatcgatttcataggttcaatcctgtcacttagatgctgttcttgtgtaggaatgtggaacttaggatctttttgctttcttgatttctatttacccacctgtttcattcagttgtgcttcagcgaagaaatattggttggttggaatgatgtggcaactaggcaattgttaggggggcaattcggctatgttctgtggaactttgattcagggaactgctttcttgttttctgtcaaaattattttagacttatttgctcctgcttttgttattctgattttgctgtttaatgtggttcattttaatcaaactgtaaaaatgtggggaatttattgggtgatgttcgattggttcatctagacgtactttgatacaggaacggctttctagttttctgtcaaaattgcttgacactttcgttaatctgatttttgctgtttaatgtggttcattttaatcaaactgtaaaaatgtggggaatttaatgtggtgattttgctttcattgtaactgaatcatccagatgtacttggggattgggattgcatcactggcgccatcgcatgttttggaatcttggagttttgggagcttgttcttgagcgtttcttggtttctctgagtaggtc

SEQ ID NO: 13077 - DNA, 721 bp, Oryza sativa
  Intron number 4 from transcript LOC_Os12g04500.1 (locus LO C_Os12g04500) derived from phytozome v7.0 (chr-ID Chr12; p os 1915614 to 1916334)
tcatcggataacattccttcaaggatcaataggtgaacactcttatggatctaccatattatttcgaccatctattacaatacaagcatcttatgatatttggatgaacatgccaaagtcagatgtgcagataatttagtaaaaacatagagcacaaaaaaggagaacatctttgtatgcatatagagaaaaaaggtagtggaaaccttatcatttgtgaaaaataatcaaatatagaaccaagctggtttaaggctaaacttgatatggagatctctccgaatccttaattgatttggagtcacatgtagtataattaaggaacaagccccacagctcacgtcgtcttaatattctatctcgacagttttggtgtaaaatcaataatgaagatatggagtgatacgcaaatcaatcttgtcgatcttccatgatgtggtgtctaataaaatggtctttagttgcagacaactaactagcaccacatgtctttgtcacaatatattctattatacatgcacaacaaatggagcaacaagagggcactctaaaagtaaagtaaaaaaaaatcctccagatatcataagatatgaataaaaaaagaaatttgtaatggatagtacatggagaataattctgtgttcaatttctggattgcatatcatggtttttgatcttagaataaactctgatacagttatgattttgttatctgaatcag

SEQ ID NO: 13078 - DNA, 667 bp, Oryza sativa
  Intron number 1 from transcript LOC_Os10g32710.2 (locus LO C_Os10g32710) derived from phytozome v7.0 (chr-ID Chr10; p os 17052225 to 17052891 reverse strand)
tcagcaacgaagttgttctgcgggggcacaccaaggtagcccataagcaactcgccgatattatctgtttgtccttgctaaagtttgtgtgctcaaatttctggatatttattgtgccatttacatttgtatcattttgtgaataatttagctcagctaagttggtttcattagcagttatttagctgaattagacaaaccagaattcctacacattttgttgtctgtagtattgttgtaggctaggttccagagaagatatatttatgattgagtattactggtgacttatttggcctaattgagcgacttggcaagtccaaagaaagagaattgttggtgatcttagctagatgaagggcatggtaaattttagttttgaaaaggaataaatcaaatggtgctttcttgagatggccctcaaaggtttggtctcctggtggtgccattaagggatttctgcaactttgcgtgcttagttgtttacttggttttgttgattgcttaatctagttgaggtacacaagtgagggataggttaattccagaaccattttttttgtctttgttatgagattactagatacacatattgtatttactggttaacaattaaatgattttctttgcaggttgtctcagccctcgctgttgaccatacaggatc

SEQ ID NO: 13079 - DNA, 513 bp, Oryza sativa
  Intron number 1 from transcript LOC_Os07g39980.1 (locus LO C_Os07g39980) derived from phytozome v7.0 (chr-ID Chr7; po s 23984514 to 23985026)
ttaggtatgctctctctctctctctctctctctttttgctcgcggcttccggatgtttctcaggtgatagggtttaggattacccccaacgttttatttttgtaaagaaaataggggattgctcgatgttgtctgtctatgtagcagtatgatttctggtctggaatgcatgccatagttgttctagatttattttagataatgagtagttgactctagtagtttagttagccttgcaacgatctctgattgattcagagttctgtgcctgaaattccttgttggctatttatccttttctgggtgtttgttgtttcaaatagtttccaagtatttcttttgagagaagaacttgagattttgtgggaagcaaatgcttttgattagtgcctacaaattgacgctaatgtttcctttgttttgcaaaggaaagcgcatgtacaatcctcatgtatttttattaatttttcccttacagaggtcgagaaggtggtggacaaaatccaaggaaat

SEQ ID NO: 13080 - DNA, 722 bp, Oryza sativa
  Intron number 1 from transcript LOC_Os08g34840.1 (locus LO C_Os08g34840) derived from phytozome v7.0 (chr-ID Chr8; po s 21914437 to 21915158)
cggcgagagaggaggcgcagcagcggcgacggccggtgagagaggaggcgggccggtggccgacgagagaggaggtgggtcggcggcctgtgagagaggaggcgaggggcgggcggcgaagaggaccaaaatatattttttaacttttttccgttttctcctttcccccttttatttatttctaattttttatttctatttagatttttttttaaattgtcaaattgaatatcaagaacatggacatgtattttaagatatgtgtttatttttctatcttggtcggatttgctcttgctcctaaaagaaagaaaatgatgtttcgtacgttctgcggatgatctctctgctaaggttgcacccttagcaggttgacaacttgttaattagatggttaggttgtttagtgatacgatggtactggggaggcatccacttccatcagatctccatgcagcagcaacttttgtgctaatagagagcgtcgtagtagtttgccagggggtttaatgctctgccccgccctctgcattttggaatcaaaagtcaaaacacccattgctgcaacgcagcgctacgtccttggcaaaacgttgacacgatttattttttgtgaatagctaatttagttctcgagtttcaccgaaaactcaatttagtcctttagattttattttatccacatagatcctctaagtatttgttttggcctaaaatcatcc

SEQ ID NO: 13081 - DNA, 660 bp, Oryza sativa
  Intron number 2 from transcript LOC_Os10g27450.2 (locus LO C_Os10g27450) derived from phytozome v7.0 (chr-ID Chr10; p os 14406088 to 14406747 reverse strand)
acgccaatcgggaacctcgaggatatcaccttaaggtatcagcttttaatctgttatggggtcaatctgcaaacatttttgtgtgggaaaacacttggtcatcaagctgacgcctacgaaatatcttctgaattttgatgtctatgtcataatatctagtgattcataagggtataccagggtaatagaactgacagtggtatgccgttttacttaaaaagaaaaggcgaaagtattgggacttgtctgattatacaattgttgtaaactcttaacaaaatttgtgaataggcaatcagctgattagcagcacttcttttagaataaaagaggaaatagagcaatgttctgctaaaatctctacagggagaaaaaaaaactttaattgtttgatagcacaattagcatcagttattattattttttatcaatcccctttactttttaccatgaggaaaatatcagggagggcatgctttctgttctgcacaaaaaaaaagaagaagaaaaaggaaaaacaaaacatagttgttttggctgaaccttgaggctacctccatgtagtaataggctgtaactggagcgtgtgctcctttcctgaaacatgctcctagctttaagcttggatggtccttgctgcagggcattgcgtatcctcaa

SEQ ID NO: 13082 - DNA, 783 bp, Oryza sativa
  Intron number 1 from transcript LOC_Os09g19380.1 (locus LO C_Os09g19380) derived from phytozome v7.0 (chr-ID Chr9; po s 11602487 to 11603269 reverse strand)
cggcgtgagtgattttggggggggagggggtggtggtgtgcgagaggcagagaagagaggagagggagtcgggtgcatgcggaggggagagggggcacagcgcgacgacgatgacgagcgcttggtctagggttttctatggaggatgcgcagcggcgcagcgcatgcgagacggggagagaggagttgggtgcgagaaggagagtgggatcgggggaagcgcgcggagagacgtgcgggcgtggggcgagtgggaaagatgcgatgggatccgtgagacgatccgatccgttggttctatcgtagatgatacaggccgttggatttgatgaatgagtatgtaggtataagaatgagttggtgaattatagggtagactaagaattaaaatgttgccttactatttcaaagttacataatgatatttaattatttgaaccctagagaagccatcttgtctaatttgaagaaatgtcaatatgtgaagtaagaacatttatgtgactatctaaatctcttccttgtgaatacctgcaatagagagtaacaaattagtcctagttttatattcctgatcctatcgttattgtacttgctactttgagtttgtcaaagaaacaatcctattttgattaatttattcaacactgtgatagaattgcgtaaatttctaaaactgaaatgtaagtttttgaactttttgttgggtgccattctaactatatctgtctacattccacacatgaagataaaactggtgtgggtgaatccttgaattgggca

SEQ ID NO: 13083 - DNA, 747 bp, Oryza sativa
  Intron number 1 from transcript LOC_Os09g33876.1 (locus LO C_Os09g33876) derived from phytozome v7.0 (chr-ID Chr9; po s 20000878 to 20001624)
gtgaggccgacgaggtcgtctccacgcgcgagcaggtgctgtctgtgaattgcgatcaatgcccttgcgtgtttcgttccgtcgttcaaatgagagaggcccccccttttcggatttctggatagcgagtggcgctgctgttgtggtgatggtgatttgtggctttgatgctgattcggttttgggtgcgagaatcctgcgtgttctgtggtaattcgacgttctgagcgacaggtgcaatgcgatgtacgagtggtttatgcttgtatggtgatggtgattagtgtctttgatgatgatcggttttgggatcagaaaccctcgcgtattctgtggtcatttgatagaatttctgggaaacaggtgcaatgcgatggtggtgtgcttagagtcgcagcgaaatttgttcatggcttctctgctttacagatagcaaaacgtttcatccttcggggaaaaaaatagcaaaacatttaccaagatctcaatagattatagatatgatgttttctcttcataaattgtttcgatagcttggatggttgtttactctacagattgagagtttgagactgctattttccttctctgcattgtatgtcattaacgtaattgtgttttggtccttttgttcatgctgccctgcctttctgtttctctattcttaattcttgtatacttggtgtcagaactaactcaaaatctcaaatgggcctcttctgtgttcattttcttatgaacagagat

SEQ ID NO: 13084 - DNA, 943 bp, Oryza sativa
  Intron number 1 from transcript LOC_Os09g23690.1 (locus LO C_Os09g23690) derived from phytozome v7.0 (chr-ID Chr9; po s 14084798 to 14085740 reverse strand)
aagagcaggggattaagaagccggttgatcgtcaggtgaggctgtcttttcgctaatcgtgatccatcgattgcttgtttcagtcactagaaagatttatctgccaatcaaatcaattcagctgctgcgatttgcctatagtatgatgtttcggtgccaaattctgtttcatctagtacatagttgggctaaaattaattagtagtttgaacagttgaatttatcatatgtagcaattgaaacatatgttttgttctaatatctcatgggagtaggagagtagtgctccctccgatcagtattacttgtcatttagtagcgtgaacagttgaatttatcatatgtaacaattgaaacataacaattgaaacatatgttttgttctaatatctcatgggagtagaagagtagtgctccctcctatctgtattacttgttgtttagtagcttgaatagttgaatgtagcatatataccaattgaaacatatgttttgtactagtatctcgtgggagtagaagggtagtgctcgctccggtcagtattacttgtcgtttctgacaagcaaatactactaagcgcaagtcaattcgacactctgaaacgtcatatgtttccgtccgtacggagtattaatgtaaaatcagttatagctaaatagtccttaatgtctggttacaacttagtaaccgtcagcattaataaattttctttactcaacatgttgctcctagtaattaatgtaagatcgcttgcttggtagtgccatcgtgtgttaagagtaaataaatagtacccagcatacctcaagttttaagcatattaagactatctgcgcattgatgccttctattctttctatctattttcgtggaacggtggcttattgaaatgctattacaaccacagattcgggtgttcttctctgttgctgcaagttctgt

SEQ ID NO: 13085 - DNA, 678 bp, Oryza sativa
  Intron number 2 from transcript LOC_Os12g06130.1 (locus LO C_Os12g06130) derived from phytozome v7.0 (chr-ID Chr12; p os 2867819 to 2868496)
ccgcccagtacaaactctaccagccgttggatcgggtcagatccaacggccaggattttggtaccgggcggtactggtaccgaccgctgtaccgcaacaacgctcgaaaaaaaatgttgtttcaagtttaaaacatattatacttaatttattatagatattatagataactgtaaatgcacagatatctggttagtattcatagaattaatcacaaagatatggaagcagagaagggggggagatgaattttcgcattgcattaacaccaaagtgagggaagcattgacctctcctgctgaactcccctatataaaaccctcttggggcccttgaaagccaccaaccaaatagagcagtgtccatttctttctcttctcctctcctctcctctcttctccacaaccttcaggtagcaactttgttatttgattcttgattgacttgttcttctagttcttcataaactcttcttgttcatgagcaaaaaaacaaaaagcaaaatcaatcttgatatgcacttctttttcatgaccaaacaaagatcgatcttgatcgatgtgcgctgttcttgttcacgagcaaaaaaacaatcgatctcttttttctttcgtttttgtatatctaccaatggtgttctatttacatgtatgatcttgatttgtgaatcagggaagc

SEQ ID NO: 13086 - DNA, 377 bp, Oryza sativa
  Intron number 1 from transcript LOC_Os12g15860.1 (locus LO C_Os12g15860) derived from phytozome v7.0 (chr-ID Chr12; p os 9039093 to 9039469)
acaggtgggccccacccgtcagcgagggtggcgggcgggcccgcccgtcagcggcgcgcgcgcggagagagggccgaatgggccgcggggaagaggagagagagggggagggatgggccgagccggcccaagagggggaggagggggaaaaaggactttttagagcttttctttttataaaatcattttaacattgtttatttcttaataattattatttgtgctctgaaaattccactaaaatttgagggctctttttagaccaaggagaatttaacaaaaattctctgggccacctttgaatttttcttgtacgtattttagtgtttgccaatttctttttgaattttaattaattctattattccttttagaaa

SEQ ID NO: 13087 - DNA, 792 bp, Oryza sativa
  Intron number 1 from transcript LOC_Os11g44230.1 (locus LO C_Os11g44230) derived from phytozome v7.0 (chr-ID Chr11; p os 26252735 to 26253526)
gcgcttgcaggaacctgccagaggtaaattaatatagagctctagcttatattatttttaaattaacatttctagcttatttttgctaataatatatactatacaaattttgtgtcacgcatgtaataccattatatatatttgtacttaaaaatatttttcttagatttttgtaatatattatgaaagaagttaatattcaaggtatgtatatacatgttgcatgtcatataaaagctaatagatacgtcttgtgctttgggacttagggaggtagtttgtgcattaattaattacctgtttccatacgttatctcaactcaactaagtctgaattaataattttgtgcttggtttcatgtttagtattttcttgagcttatatatgtttattttatatagacagagggaatagacttttttttaaaaaaagaaagttgtattataccttcattttatattataagtcgcttagagttttttttttcaagtcaaacttttttttaagtttgactaagtttatatgaaaatttagtattatccaaaacacggaattagctaacatgaatatatgctgatattaggtttgttttgtgttaaaaatgctactaaatatttttatatataaacttggtgatacttgaataagtttgagaagaattcgaaatatatagttgacctcatgagttgattatcaaaaattaatatttttatagaataataatgtttttatatacacacgcacagaaagaagctggaataataattgtttctaatttcagaggaagaaaa

SEQ ID NO: 13088 - DNA, 603 bp, Oryza sativa
  Intron number 2 from transcript LOC_Os10g07200.1 (locus LO C_Os10g07200) derived from phytozome v7.0 (chr-ID Chr10; p os 3779619 to 3780221 reverse strand)
gaaacatcgccctgtgctcaacattcctcccaccggtagtgactctccttcaattcacttctctgtttttttttgttcttctcagctttgattttctcttttctaactgtggctaatatacctagaaatcaaaatgaattcaacaaattaattgcaataaaacttaaggcccctttgattcaaagaaaatttataggaattttagaggattttatttctataagaacttttcctacatagccctttagccctttgaatcaaagaaattgatcctatggaatcctatgaaattcctatgtaatgtgtcttcttattcaaattttggagaaaatttaacatgaggtagaacctcatggaaaaaaatatttgagtctttatctctcctcaagttctcatattttcatgcagttcaatcaaacggttattcctaattaagtttttcgtgtgttttgtatttctctgttttacactattcctgtcagaattctatatttttcctattacttcgtttttttcattccagtgattcaaaggggtttttaatgtgataatatgtgatccaattcagctctactgtaccaagtcccgccaccggaggggaaa

SEQ ID NO: 13089 - DNA, 598 bp, Oryza sativa
  Intron number 1 from transcript LOC_Os11g13510.1 (locus LO C_Os11g13510) derived from phytozome v7.0 (chr-ID Chr11; p os 7401418 to 7402015)
aacggtaagtttacttgagttactttctatcgtgtgctttcatacgggttcttatattctagtcatcattaatcaacccgtgcatctctcagcctgtagctagattaatataaaaagaacattcaaagttcttttcatttggaattttcattaaagtttcttgttggaattttctatcgtggtctctcctacacatcgatttatatccatgccctgcatagtggtggtagccttttgtttttattttgtttctaccaatgatgaagttatattccttcaaataatcaaaattatttcaggctgaaattaaccaacacaaaatgtagtacaacttttgcatgcagagatagttttacatgtatatagattgttcacatgtacgtatgcaaaaatgagaatgaggatcccctgtacagtttgcatttatgccactgacatgtagaccataccaaagtgaggcccacatgtcagtggcacaactgcaaactgcataaagtcaggggatctgtttcccaaaaatgaatatgggtgcatttattagcctacaaatgattcatactgcttcacaaacttgcttataggtaccttattgtgattg

SEQ ID NO: 13090 - DNA, 824 bp, Oryza sativa
  Intron number 1 from transcript LOC_Os09g33480.1 (locus LO C_Os09g33480) derived from phytozome v7.0 (chr-ID Chr9; po s 19738583 to 19739406 reverse strand)
ggctacatcaaaaccctcgcacaggtggttgggaggtatatatggccgtcttgaacgatcctcccccccttctccctctcacgcgcatctcgcatccgtgggatttcgtggaaacactcgatttaatctgttagttcgtgattgggtcgtgattgggggtgaggaaatgggacggaggaagtggatttggggatatttatagttaggtgatatgtgaagtttttccatggtattatttgttaacttcatctgtggtggattggctgataaatacctgtttcagtgatagtgtattctgtactgttgatgcatattttattttattttcacaaatgtgactgggattttatttatagattccacatgtatttgtcattttcttttgattcgctacggtttccatattaatctggtctcatggtgttgcatgtagttagttattatgggggaataaattggtatttctatggggatgatttgtaaattagaagggaggtcatgccctcctgttatcaacacgatgttttttaatcatgcttcatgccctgttttgaaaattgattgtgttctattaattctgtcaaccactgacatatttaggcgtccatcttcatggtagcatgtgctagtttttctggtttctctttaattatcgcatcatgtaagtcctactgtataacaatttatttgcttagtttattcatttattttcttgatatatgccctgggtattggccattatataaattgctcataattctttttaaccaaatgtgtcctttcttccagtgaggaagaagcaaggcataagatctactcagtgt

SEQ ID NO: 13091 - DNA, 844 bp, Oryza sativa
  Intron number 1 from transcript LOC_Os10g18510.1 (locus LO C_Os10g18510) derived from phytozome v7.0 (chr-ID Chr10; p os 9322913 to 9323756 reverse strand)
ctcaaggtaagtaaaaatgaaaacggcaaaatgatctgtctgttttagagtaattaatactcactgctgtgattcctctgttcaagctttgatagttatttctttaataaataatttataaatagttaaaattattcaacattattatttacttcattgtttgaataactgtatatacttcatcgtttgaataagattggactccctccgtctcaaattgtaaagcattatcattcttaaaagaattgagcgtattttattgttagattctccttctaaatacatccatatgatactaattttataattattgatacataatatgaaataaattaatgattaaaagtaaataccgtgtaaaataattatagaccttatactttataatttccattttaaaccatatttttttttacaaaattgacacatttagtttattatgaaatattactaatgtctaatgaattttagaatcatcacatttgacatattctatcaaaacttgacaatacaaccaacttactaaaattttagtatttaaatttttttgaagatttatttttgccgtaatctggacatgctcttaatgtataataattggcccgatggtacttgcagattaatgttttgcgtgacaaaatttggtttcacagattaaaattttgtacacaggaagcaactgaaatttcgtagaagatccaaaatgctaatccgatatcaagatgttaaattcctcacccaaaaaaaaacaaatttcaaattctgaattgagaaactgatatttccatcttgttttttttgctgggcaggatcagcactaacgcaggaggccttccagctgtcg

SEQ ID NO: 13092 - DNA, 835 bp, Oryza sativa
  Intron number 1 from transcript LOC_Os11g37560.1 (locus LO C_Os11g37560) derived from phytozome v7.0 (chr-ID Chr11; p os 21711342 to 21712176 reverse strand)
gccggtgacggagacggcgaccgaggcggcgaaaggtatggggtgattggtgcacgtgaggttgcttaaagatcacaagtactctttcttgtgaacgcattatcttttcgatttcttttttactagctttttgaccgtggctaacatgataattgagctaaaaaggacaactcctttttaatctgacagaatgtatgaaactaacaatccaaccataaatcccttcctgaggaatagttgaaaaactgggaatctatttttaatcttttttatgtgtataatagaagtgtttgatttatgtcaacaaaaaaaagtgtttgattcgattgataggtgaatggatttagggaacttgttagatatttatggaaaattttgattgtgtgcactgccatttttgtctcgccattggcaatagaaattgtagctgtgcagataacacacaggtgcctgcagtattggcatcttgttttgttatccatgcatatttcttcatttatctgggtatcaaacatgaatttattgtcgaagtgcgatgctgattccaccaaatgacttactcccgctgtccaataaatgtagctaaaagtagcataaatgcaccaaaataacacctgtagacattaagcatatagaaaaaaaattatcagcatttctattagttgcaagttgcatctgcatttttttttcagacatacatgtattcttatgcgggatacacaattaactgcagtattttagttagtaaggtattgtaaaaccatgctgttcttaatctgcaatctgacattagcaatcagtttcagtgccggactctggtgattcatctcctttc

SEQ ID NO: 13093 - DNA, 745 bp, Oryza sativa
  Intron number 1 from transcript LOC_Os08g25470.1 (locus LO C_Os08g25470) derived from phytozome v7.0 (chr-ID Chr8; po s 15499739 to 15500483)
gtcgtaagtagatgctctccatctgtcataaaataaaataatgtagttagattattgacagaaataatgtagttagattatttaaattcgtagtagtataatgtgtaactagatttgtttatttattttaaaatggagatagtattagatatagacacggctactccaacttacattaattacttgatcgatcattacaataaaatcttttgagggacgatccgtggttcttcgaaagtaattgatgttggtagagtgctatattattttatatctcttcatggttttcgggatgtcacttagtttggccaaaagttttatttatgttatgaaagtagtatttttaacttaaaatccaaattatggtttctaactataactccaaatctatttcagattcaaatctctaccaaacaatcttatttaagatttcgtttggcacaactctagatcttaaattcacactgaatttagaccttataagttaaattaaattgatttaaattttatattccttctgaagtaaaaacaaaatgattcattcaaatattatcaatatactcatatattcaaatcggtgaatttacgaagctaaaaatattactatatttatctacaaagttaatcaaaccttatttctatatttattttctatatttatgaacaaacttagtcgaaccaagaatagttggatctaaaacgacggagggagtatcatgtgactcgcagatacgaggggaactac

SEQ ID NO: 13094 - DNA, 823 bp, Oryza sativa
  Intron number 1 from transcript LOC_Os10g39950.1 (locus LO C_Os10g39950) derived from phytozome v7.0 (chr-ID Chr10; p os 21327135 to 21327957 reverse strand)
tcaagttcaggttctccggcttccgcgccgttcaggtcaaatgtttttttctcttttcttttttttccgcattgagcagcgctgcattgttgagcgattcgtaggagatcagtctatccggggaatagcgatgaatgtacgaccctatgtcgtggtctgttgcgagattgagcattttactatcgataatggtcaattgttgtgtgaaatttactagaaaaaaatcaatgttgtgactggtgctaatgcgttgaacagttttattacaacacgcattgcttgtaagtaaaagaaatgtatatggaatactttccctccttagccatgctgttttgttttgattcggcaagagaatgcgacgatatttgttttagatgaaaggtcagtgtaatgatgatcgtggaaagttgggatggacctttaatctgattatgcatcatggggtgttctcaagaaaatatgtatcgcgaggttgtgggaggttaaattagtacgatgtgggaggcaagttactttatgagcattttttgcaggctccaaatatgtaaggtcatctttggtaagtggtgacaattcttttctcaaatatgatattcctaatgtaactatgatagtttgaatagaaaagggacatccaggtttcaacatttctgctaagttcatgtaactatttttctagtagcaatttcatcgagtgtgacttggtgtgcacaacaatgagtgtacttgagtaccggtgcaaaatggaagacatatgtttctttcccgatgacatttcttattcccgatttgtcagcaggttccagtagtatcagacaggctg

SEQ ID NO: 13095 - DNA, 555 bp, Oryza sativa
  Intron number 1 from transcript LOC_Os07g43570.1 (locus LO C_Os07g43570) derived from phytozome v7.0 (chr-ID Chr7; po s 26060575 to 26061129 reverse strand)
gaaggtgagtgcactccgtccgccctaaaatatagtctctatgtttctaaatatttgacacggttgattttttggtacatgcttaaccattcatcttattcgaaaacttttgtgaaatatatatatatatataagtatatttaacaataaatcaaatgatagaaacgaattaataattacttaaatttttttaataagatgaacggttaaacatgtttaagaaaccaatggcattaaatatttaaaaacggagggaataatatattttaagacgtatgatcttttacatgatggacttatcaggcatacgctatgatttttttttctcaagatgatgggcatatgttttcatcaatgtaatagtgaatgaatatcgaacctgctacacaaaagatatgaagaatatcattactcccttcagttataaatatttctgtttagcacctcctggctattccctttttttttcctcaacaaatatgaaatactaaactgagatttatctatcattgtattccaggcaaaaagaaatcaaccccggttcttgcaattgta

SEQ ID NO: 13096 - DNA, 551 bp, Oryza sativa
  Intron number 1 from transcript LOC_Os11g42810.1 (locus LO C_Os11g42810) derived from phytozome v7.0 (chr-ID Chr11; p os 25322731 to 25323281 reverse strand)
gagtcgccgccgctgcttgagtcagtggatcgccggtacgcagataatcgatcgatctatactagtccttcttcatatggattgatcattgcgcacgaattcaacttataccctcaaagaaattagcgtgatacattgggtgcgtttttttcttggagaattataaacttattaaaaaataacgagatttagagggaaagacgtccctcctccaaacatctttcaaaaagtggttgtgagcgtgttgtgaaattataaactttaaagggttgtaaaattaaaacgagtttgtaacatgtttctaacactatattggatgtttgtttggttcttagccatattcttttttgagtttattaaccggattatttaaataggttatttgtgccacacttcaaatagaaatactccctttgtcccaaaatatatataggaaattagtaatggactagacatcatttggtactaagaatctggatagacatcctgaatagattaacagtactaggttgtatctaatctaatacttatattactatattttaggacaa

SEQ ID NO: 13097 - DNA, 551 bp, Oryza sativa
  Intron number 1 from transcript LOC_Os08g36994.1 (locus LO C_Os08g36994) derived from phytozome v7.0 (chr-ID Chr8; po s 23388119 to 23388669)
ctgcttctgccgaattctctccggtgagcatccccgtacgtacgcgcatccccttcctcatccctctccacccacgccttctctctacgcggctatgccttaacccttagcttctccttctagatctagaagttgcttttctctttgccttttaaccttggtactaataatagcagtttgtttccgaagagaattttagggttcaactgaacccccatgcgttagctgtgtacatggatgcagaggccgggtttatcccattttctttttttttttaaaaaaaaactgaacacccatgccactcgttaggtcaggtcggcccctgttgttggtcttgtgatattttggaaaccaagatgctcatggtagtcacatacttggttctaatcagaacaaattggatcgcacatcatgattatatttgatttgcacttataaatgattgatgcttgctgttttttttttgtttttactgaagaaacacgttgttaattaattagttaattgttattgcagatttgcaggccaaaggcctgatacaattaccaaac

SEQ ID NO: 13098 - DNA, 994 bp, Oryza sativa
  Intron number 1 from transcript LOC_Os09g32260.1 (locus LO C_Os09g32260) derived from phytozome v7.0 (chr-ID Chr9; po s 19253980 to 19254973 reverse strand)
ggatctcccaggtaattaattaattaattaaacaaacatgtgtttgcatgcatgatcttgtgaaattttatatgctcctacttaatatctccccttctctggctctctctcctcgatcttactcacttagcttgctttcgctgtggattagcttttgtgttcatatgatcatattgaataattcatttttttcctgcaatatatgaatagtttgtactacatatattcagaagtgcatgtttgttgttggctatgcatgtatatgcatgcctagtccttttttcatgattttgagcatatatttcttacctatccttgccctgccagaggtaattagtcgcgtctagatttcaaacatgcatatatggtgcaagtttttcaatagctaatccaaaagtctaagctcttaaaactactacatgtgtgatcctaaaagaaaactatgggatggatttcaagttttctatggtattccttttttttttccttactgagtcttgcttgcttaaaacatgtgaatatgatatcattggtgatataatatcttggtggtacacatgcatatataacatattcaatcccccttctctcccttcccttctattagtgtgagtacgtatatctataatctatatttgcatcgtctttgttctcttcttttttaaaaaaaaactttcctgcaagagttggtggttaatttggaacacataaacttcttattgttatttctaggggtcttatattagaagctatcttaattctatgttctttataaaaaaaagtaaaatatcaacagaaattacaaaccaaagctctagcttcagcactgtatgtgcatatgcatcgtccttactctcatatatatatgtaggagatgtttatgaggttctgaatgttcaaatatgtggtcacattttttcacacttacacattcacaatctatatgttctatgtattaattttctctaataaatgtgctccagagaaggcaaaa

SEQ ID NO: 13099 - DNA, 579 bp, Oryza sativa
  Intron number 1 from transcript LOC_Os09g03800.1 (locus LO C_Os09g03800) derived from phytozome v7.0 (chr-ID Chr9; po s 1924806 to 1925384)
ctttctagcacctatagtaaaggaagcatatcatggaaatgactcatatggaacattagctcaaatctatggatatggagttgtctgatggtttcatagtgcacttcatcatgagctctcttggtcctgactttggtccttttaagattaattataatgctcagaaagagaagtggaccatacaggagctaattgcacactcagtcgaagaggaagagtgtcaaagagcagaaaaacaaaggcttaaagactaactcaacctcgctaatgccaattacaaaggcaaaagaaagatgtaccaaggggaatgctctaatagcaacgagaaaaaaaatcaatctcctcacgggatgctagtgggagcaagcaagctattgcaagcactcagactaatgatgatccttccaagactccacaccgcctgttctgcgaggcggatggacattggcaaaggaattgctcatgcttaaagcatagttagctaagaaaggtaacactaattctgaagaaatatctaatgtggatgaatccctttacactgaattttcccttaatacttggtgggttgactcaggtacc

SEQ ID NO: 13100 - DNA, 1002 bp, Oryza sativa
  Intron number 2 from transcript LOC_Os09g33986.1 (locus LO C_Os09g33986) derived from phytozome v7.0 (chr-ID Chr9; po s 20067714 to 20068715 reverse strand)
gcccgggaacccagaggacgcagtaagattcgaaatctttgatctgttctttccggtgttcgtcgtggtggtggtggtttcggatcgtgattagggcgaaaaagattactccttgcgggggttatggaggagattgatgcattgtggactgttagttcgtagtggcgatttgggtgatgagggggaagctattcttttaggtgattggatttgggtggtgaggattgaggggaatcatgggatgcgtttttcccctggtgaaatcgacctgagatggctaggtctcacttttttgtcgagtgagaaattgaggttttaacacaacctagggtttgtggatgggttgctgctagttaagtatgctttcttgggttgtggcaatggtgtttatatctccatctgttaaatcgccacaatctagggtttgtagatgggttgctgctagttactgcaaatcatctgttctcttgggttgtggcgcggtgaagttgtgataatgatgttattgttatgatcctatgtaaattttagtcttcataactgtgggtgattcttgtattgttattttctcagtgcttatagaggagtacagagatgcttgatgggtcatccgtagttattgtatgaactatgaactgtggattggtatttggttattcttccttaagaataattgatggaatgccaaatcagtggaaaagtgagggtttatgtgtgcttgtggtaggagtttcacatttcttagttttgggctaagtagataacatcatcatatctgggtggtcagacattacttttaatcaacaagcaaacaattttagtttctgttagggttgttcaaattgcaaacagcaaactttgcggttataacttccgaaaataccttcagtttccaaactgtctatcagtatcgctttagtgtcaactcttttcatgctactgtttttgctgctttgatacggtcttgtttaactcttgccattgtatcaaacaggtatcctt

SEQ ID NO: 13101 - DNA, 768 bp, Oryza sativa
  Intron number 1 from transcript LOC_Os11g06240.1 (locus LO C_Os11g06240) derived from phytozome v7.0 (chr-ID Chr11; p os 2983315 to 2984082 reverse strand)
cgcgagcacggcgatcggtggtccggcgcggcaaggttcgaccaccgcctcctgccccctacctccctaccttctccgttctggttttgatttttctgctatctctcgtctgcgcgccctgtgtgaattggctagatctagtgaaaatggctcgctcggttgaatcgagttagaacggccagatttgttggtgagtatgcactgcgggttgaaaatactggtaatttttcgttagaaattttgcccaaccatcccttccttggatcaacctgctactcgaacccaaacccttgaggtacagtttgttctttcatttcggacttctccatctacattcactaatttgttatgagctttatgatcattgcggtaaatagcaataggaagatacataacgtcacatgttttacgagggcaagtagtagatttagcactaataatgtgagcttatgactggacattcatccgcatatttctgcgtcacagataactgcctgcaccgaatatttccacttcagctctcttccttttttgatattgattgagtttctctgttctggagtttatcttgtttatctgtatagttgtgttcatgtgaatctgatgttatagggtgaggcaatggtttctgcaattagtgggggacttattttctatttagcctgccatgttattcaatcttttgttcaaatgagaaactttctgtaacacttgggagtatttatcagtcttgatgaatttgttccatttcatggttgtgcagcaaca

SEQ ID NO: 13102 - DNA, 981 bp, Oryza sativa
  Intron number 4 from transcript LOC_Os07g33800.1 (locus LO C_Os07g33800) derived from phytozome v7.0 (chr-ID Chr7; po s 20227719 to 20228699 reverse strand)
agcaattctacggtccttcaggaggtaccataaggtacaaaaaaaaattcagtgtaaaatttggtacctaatagtacatagatatcaagaggtaccaaatttacaatagaaaaaagtggtacctcatggtaccttcttaaggaccgtaaaattgctctattttgaaagagcctatttcggagaaataacaatgccgtacctaacttatttagtggaaatgtatgaaaccatatatatatatatataaatagaccccaaaactggcgcctatctcacgaaaatgtcctgaatatataatccattaaacctgaaaattgattgctcgatcctgctggacttttccatctctttggttgacatatctgcttcagttatgtacgcacattgacaaatgaagttaagcttcgctaatctcccaaatttaatatcccctcaagtcaaatttctgacgaccttttgcgttttcaattaatcttactaaattagctatgtatataaaaaagccatatgttgttctctttcagtcttctaaaccaaggatctagtttttctagttttaatatggttccatcctattgatcaataatatccttctaatgaagcctagaatattaacgcaaccgacctgtatgaatgattcgattaattctgttaaaatttaggtggaatgaccctgtcaatcaatcacaaagaataagatctttgatcaagactagggaaggattacatctttaattagttccctttactgattcataaaaaatatgcttctaaggacaaagcattgatgccctttgttttggactagtactgcagtactgctctgtgtgataaggtaaacaagaaggattaaacagttttaggacaggtgcaattaaggtgtacactcaatcaagatctgaatgtccacacctaccaccctgtctgaaagaatttgtttcttgattggcttgaaaaatcttttgttttcttgcaggactc

SEQ ID NO: 13103 - DNA, 749 bp, Oryza sativa
  Intron number 2 from transcript LOC_Os12g03880.1 (locus LO C_Os12g03880) derived from phytozome v7.0 (chr-ID Chr12; p os 1602207 to 1602955 reverse strand)
tcaaggaggtccgcgaggaggtcgccaagtacaaggtataatcgatagccaagtacaaggctatcgatctctgttcaatacatacactgcaagaacataacagaacagtgttcaataaactgcaagaatagaaaacataacagaatagtgttcaataaactgcattgggttgaaggggcataatttgttctgtaagtgaaattggtggatttagtgtgctatcttaaggtgatcatgctgagttatgaaaataataataggatatgctgggttactttgaatttagctctatgttgtgccattttatccatatgcgttgtatatattctctgtgtgtggtattattagatgttctgtgagatgtgaaagtacaattttcaaccttatgtaacttttccaatgctatttatatctcaagtattccattgtttatatcatgatgtgatgccatatataatgatacatatagatatagggtttgatattagctagtattggctattgggtcatgatgttaaaagttgacttgttatggtgtgagtagctcaagtctctagctggtttatgtttttcttttcactgcaatctttttctactacaatgtagtttgtactgactgatctctgtaagaattctaactaggtcattatgtcgtgaacttgtgatgctatccaatgagtgaataaccatgatcttgtttttgttataaaacaggttggagctcctgctcgtgttggtctggttgctcc

SEQ ID NO: 13104 - DNA, 521 bp, Oryza sativa
  Intron number 1 from transcript LOC_Os12g05510.1 (locus LO C_Os12g05510) derived from phytozome v7.0 (chr-ID Chr12; p os 2521095 to 2521615 reverse strand)
ctggggtcgtacgcctacgtggaggagcgcggctaggggacggcggagaagcgcgcgtggctggagcgcgacctcgccggcgtggacaggcggaggacgccgtgggtggtggcggtggcgcacgggccgtggtacagcaccaacggggcgcaccagggcgagggcgagcggatgcgccgcgccatggagcccctcctctacgacgcccgcgtcgacgtcgtcttctccgcccacgtccacgcctacgagcgattcgtatgtatcgtaaacttaatcatctctctaattcactcattttgaccttttctcaatcaaacctctttaaaattttcactcattttgacaactaaattagttttatattttttgatatgtttgttttgtggcaaaaatattgttatatttttctataaacctgatgaaactttaaaaattttgacaataaaattgaattataatacgaaacggaagagtaattaactcatcatgcatcatacatagcattcaattactcttaattg

SEQ ID NO: 13105 - DNA, 350 bp, Oryza sativa
  Intron number 1 from transcript LOC_Os10g40090.1 (locus LO C_Os10g40090) derived from phytozome v7.0 (chr-ID Chr10; p os 21393707 to 21394056)
cggccagccctacggctccggctccaccgacagtaatgttactatcttatcgtgtaatgttattctctccgcctcaaaatattagttccgccgacaacggtaaagttactatcttatcgtgtaatgttactatctcctcttcaaaatattagtttactggctcatcatgtagtgttactatctttgtctcaagatagtacgatagaataacgaatctgaacagtgtctaaatccatggcgatggagtaactgtgaagctcatccatgatctatggcgatcgatcgattaattggttgagttttgtttttttccaggtggcgcgtgcgggatcaagaacgtcaacctgcct

SEQ ID NO: 13106 - DNA, 713 bp, Oryza sativa
  Intron number 1 from transcript LOC_Os09g29440.1 (locus LO C_Os09g29440) derived from phytozome v7.0 (chr-ID Chr9; po s 17892929 to 17893641 reverse strand)
aggctgacgccaggtaggcggagaccaaggacagtggcgttggcagcgtcgcaggcgaagcggacccagtcgtaggccggcgtggaggagttccaagcgatcggccgctggtgcctgtgcccatgcgcgctccacacgacaaagctgtggaggccctactctaagttgggcaagatcgagaggaagaagaagacaagggcaaaattgtcattttacgtgctttctctctcatccattgactgaatattatattttaatgcgtctaatgttctgaagcaaattaccatatttttggagtgtcctcggacaaattcacgtctttgcggtgtcccacagctaattacatatttttttgggtgttatgtaacaaattttgcctaaaaagaattcttgaaaagaagaagattgcagatagtagtatcttgggatgacaatagtcaaggaaaatgctcaaaccgtttttctcggaaaccaaattgggacgtacaccaataacgatatcagtaatgctgtagtatactatttttgaaacgaaattatcgaaataaagcctcaaaaacaacatactgtcataaggatagtcacagtatgtttacattttaaattagcgtcatatacaactactagtaaaaattcaaagtattaattaagtactacttaatacttttgtggttaagtttttttttaaaaaaaatgataggttgacgatactc

SEQ ID NO: 13107 - DNA, 700 bp, Oryza sativa
  Intron number 2 from transcript LOC_Os07g34790.1 (locus LO C_Os07g34790) derived from phytozome v7.0 (chr-ID Chr7; po s 20849236 to 20849935)
tatccgaactatccgagaattatccgatccgaaaggtatccgtattcgtttttctctagagtagacggaaactatccgttctgttttcatccctaatacaaatatgacatattatttacaattttattgtattttttagaactcaatatgcagttaatgtcaaatcattatcttcatatatcatttttatattatttaaacatggacatatatcatttctataatatataatatgcattctttcatatattccacggcaaagcgtggggtatcaagtattgaaggcggctagctggttaattggtttccaatttctggtgctggtcataggttacccgacctccgtcatttgtttcctttgggcttatatttggtgctttttatatattagtcctctgttttaggttataagacgttttgactttgacttaagtttatagacaaatatagtaatatttataataataaattagtttcatcaaatcaataattgaatatatattcataataaatttgtcttgggttaaaaatgttagttttttctataaacttggtcaaatttaaagcagtttgatattgattaaagttaaaacgtcttataacttaaaacggagtgagtaccaatttatttgacaatgctcctatattacccttttttttcacaggatccgcgcgtattagtgcataactgtctgtgctg

SEQ ID NO: 13108 - DNA, 825 bp, Oryza sativa
  Intron number 5 from transcript LOC_Os08g27030.2 (locus LO C_Os08g27030) derived from phytozome v7.0 (chr-ID Chr8; po s 16511869 to 16512693 reverse strand)
aggctacaagagcttcccaagtgggcattcttcaggtaataaacagtgcacagttgtactctagatatgatgtcttatgctttaggttttttttttttgaagttgtaacttaactgtaagtaattttctcattggttcaaatttcattatgatttatgccttatgtttttgtggtgctcctcattatttttgagtacttgtgagttgtgacatgcatttatttacatcagtttatcccacactctctacatcatgtacgtttccacggattttctccaatggttattttgcatcactgctgtttagtctagtggttgtttcaggttttatacctgagcattatttgatactgctcttgcaatattaatatctcatgtatatatgtgctcctggcttcctgggaactatgtaggaaagctgggaagaaggtttaactatgaactgtttctctactagtttaaatcccatgctattgagcagttagtttttttttttttaacaattgaaattgtatttgaatgcatctcttaatgcatataggttgtatttgcgagttcaggtgccaggagccagcagattaatttttttaatctcattcttgttttcttccaaattgtttgtattttggtttttttgttctatcatgcatccccatatcagcagtttgttctctataaagtaatggtttggagattgctatttcatggccatacccataacatgttatccttccctatgtgttggtagataatctgatgtatctgtttcgatactttcttcattactttaggggcttttgctggtctgggttttcttgcgtggtac

SEQ ID NO: 13109 - DNA, 236 bp, Oryza sativa
  Intron number 1 from transcript LOC_Os10g22450.1 (locus LO C_Os10g22450) derived from phytozome v7.0 (chr-ID Chr10; p os 11553431 to 11553666)
cacttcaagaccaccaccaccgtccccaagctcgggtactacgcatgtataattaaacacgaaatgctagctgctcatctttcttctcatcttgttgatgagatgagacgatcgatggagaggaattttgaaattgggtagtagtacctgtttgtttttcacttaattacttaattgtgttcgatttgattaacttttggagttgtttatgtatgcaatggatgaaatgcagggtg

SEQ ID NO: 13110 - DNA, 587 bp, Oryza sativa
  Intron number 1 from transcript LOC_Os11g18170.1 (locus LO C_Os11g18170) derived from phytozome v7.0 (chr-ID Chr11; p os 10226692 to 10227278 reverse strand)
acctgcccacctccgtccacgacatctccgtcaaggtagccatgctacggcgtctcgcttttctcttttttgatactgtctcgtggtttcttgaaagagggtggatgaggaggttctttccgtgattggggctcgatgcgatgtagtctagtgagatgttgcttttagttgtggggggtgattgtttttatctttggccaggaaccctagattgctccttttgttgggaatatttgtaattcttggcggaattggatcatgtcgccatgatgggacgttggatttcaggttaattctgttgttgtcaccgtaaagatgaactttattctatattaaggttagatgggaagtttaccttttctctgaacatagcacagtgtggatagatggcgtcagttctgatagggactttcacatcctaccgatgttattagtagtaattggtttaacattactgtgcgaaatttcagttgaacatacttagtgattaacgctttcctacttaactctttatgttactccgtattctgtttctttgattcggcctgtcagctgatgtttggttcttccaaaggatataaagggaa

SEQ ID NO: 13111 - DNA, 438 bp, Oryza sativa
  Intron number 2 from transcript LOC_Os10g39440.1 (locus LO C_Os10g39440) derived from phytozome v7.0 (chr-ID Chr10; p os 20977246 to 20977683)
caaccattgcaggtaagttcgtggttagagaaaaaacgaatctttttttttctgccatagtttgtgtgccatgtcgttatgtgacgctagggcccgtgtttggtggcaattattgtgatacttgtggagatcatgatggatttggtggaatcatctgcagtaaaaatagttttagttgttcttctctgttcatgatatcacaaaaaaaaacaactgatatttttttttcagtagaattttgagtcaattatgagtaggatttaacaaatgtacggatctcatgaatgatctgtatttatggaacttgatactgtctgcatcgtaaggtttcagaaatttgattgataccgatggttttgacttcttgctgaccctgtggacttgttgggatgatctttatcaggtgcggtactgtacatcaagaaggaattcaacttg

SEQ ID NO: 13112 - DNA, 523 bp, Oryza sativa
  Intron number 1 from transcript LOC_Os09g01290.1 (locus LO C_Os09g01290) derived from phytozome v7.0 (chr-ID Chr9; po s 246326 to 246848 reverse strand)
ctcctcaacttaacacaggggaaacaagtgagctgcctgcctgattgtctttttctttttatcgtctgcaccaaacctacaatcgtagaaactaacttgtttgattggcaggagttcctagaagcaccaaaagcaaattaagcttacatgtgttgctgttagccactaacaaataatcttacttgtttttttgtaaacatgtctttcatcaacaaaagagtggttgactgtattcatttgtcgcaatttgtaattccaaatcataaccaacatcgagtactgaaatgcattctgtaatttatacaaggagcatcttccattttgttgtgttggtcatgccgctgcacaatacagcttacaaatttcatatcttgttttagtgtagcactgagtctaggttagcatttgcaatagtttaaaaggtgagtgatctgatatttcaaatggtaaatttgaaggacttcaacaccctctgtcaaccattgtaggtgaggaggaaagttaaggggttcttcaaacgata

SEQ ID NO: 13113 - DNA, 1035 bp, Oryza sativa
  Intron number 1 from transcript LOC_Os12g18530.1 (locus LO C_Os12g18530) derived from phytozome v7.0 (chr-ID Chr12; p os 10713922 to 10714956 reverse strand)
tcaggcggctcctcggcacggcgctcggctgcgaggttcgtgcgtgcgtgcccttggtcgtcgcggcggcggcggcgcctcctcgtcgtcgctagtccggccggccaccgaccgtgcctcgtgatccgcgcggatgacgcggctctgtttctctctctgcgtttttttcttttttttttgcccaaaaataaaacaaacagacaaaaatgccgttgcttcttgtaattatgacatcattatgtttgtttcgtgtagcttacatgcatccacatccattcataaaagggaatttgtcatttggatgatgagctttcgctttaatcacttgctcagcacatgtcgttatcaatttatcatctttgttccgtttttggtgattaggataggactaatccatccatcccgtctggattaggactaacgggtaattactcagttcatatcctcgaacccatgcgaatcatcttttttaccaacacttgcttgataattgactgactagtgactagtcgtattcactgtacgagtaggtccaaccaattcttgtgcctactgcctatcgaattttgtttttataaaatataaggggtgaatatagttctttcacttctttgaccatattttgtaacttttttttactagcttagatcttccattacttttacgtttcaccttagcgtaaatacaggtttgttttcagaaacaggaatgctttggcccctagcttttctaataccaacaattgtatttttctagtccctcagttctaaggtaaaaatgttgttgctttcatgctcgtaaatttgcgtgcatgcgttggattgcggcacgggttggtgagcgataggtactgcaatggcctcatatggtatggctagagcaatagcaagatcttaacacggcgtggtgatagtgaccttacactttacagtatggtgcatttgaagttctctaagatggtgttcttttttttctctcaatttctgtttgatactttcaggtcattgcatttgggtcagttccactgaagagcta

SEQ ID NO: 13114 - DNA, 901 bp, Oryza sativa
  Intron number 1 from transcript LOC_Os11g16560.1 (locus LO C_Os11g16560) derived from phytozome v7.0 (chr-ID Chr11; p os 9177842 to 9178742 reverse strand)
ttcgcctgcctccccggcctcgtcgccggcatacggtgagctagatcccgttcaagtttaatcttcccccaccacgttcagcattcccgaaaatgcggcgtaatttgaatttattttttcctccctgtttgctgtttggtctaaggtgcgttccgattgttgtgcgtccgtcttagctcgcacgggtgattccttgtgatatttactcggcttggcgatgatcctttttcaaatcttggcatgtatacctagccaaatcagaaagttttttttttcttttgtttctgtaatcgtgagctttatgtgttcaacgcacacatcaacctagattgggagtgaaagagtgggaaatgatggatggagctggcaaggatggagggaaaatttgggagaaatatgcttgggttaaagaggaatggtggctctgttgggttcgtgtatgtactagtgccttgctaacatccatggtttcctgatgaatgttagtaatgcccagaccttaccagtgcacaaaatgcaattttgtgcctacattttcttgctgactaatacatgacctctacaaagtgcagaatagagttatagaagtgcaggtgttcagttaaatactgtggtacgagactacgagttaacgggttgtcttatctaattgtgctttcaactgaattctggaactgggagtagcctgggacagagttcattgtatatggcatcatgtggcctttgaacccatgacccatgtgtgtcaagcttattagcgtgcccaaactgttacgccattcatgctttctttccatcctgaatataggatggatgttggagtatttatttcagtatatctaatgatgcggcttgattttgaatattgtgcaggaaggacattggtcttgcagcacccatc

SEQ ID NO: 13115 - DNA, 792 bp, Oryza sativa
  Intron number 1 from transcript LOC_Os09g35690.2 (locus LO C_Os09g35690) derived from phytozome v7.0 (chr-ID Chr9; po s 20530865 to 20531656 reverse strand)
ttctccttcgctgcttctccggggaaagaggcaaggtagtagttcgcatccatctgagttctctcctttcgtttgctctgggagagggagcgatctctccttccttggtttgttcttggtttgagtgcttcgtttcttgattggaaagtgggagagagaagaaagttcgcacctttgtggcgaaaaaaaaatctcactttttgtttgtgcaaagaaaaattctctctttttggttggtcgtgtgacatgtgggttcgtggcaattggaaaggcagaagaatctcgtgtgcctgcgagctgtatctctccgagtaatgtcaatcaaatgaatgttctgatggaggattgttcagttgtatttgggggaatgacgtccccttttcacacatttatgtcagtcctgttcaggtgaaactggatggtgctttactagtagctgtgtacatttgggagcatctaaatttggggaaactgtttataaatttgaacaatgttcgataaattttaaattgtagttactaatttaaagagtcaaatttatatgcatttacatggagccatggaggatgtggtattctaatagagcatcaggcacagtggtcagtggggacattgtagtatggaaattacaggaagtgtaggttgcacattcctgcttctggtggaagcatgaacatctaatctgagtttttttctgaattaagatggattcttagacaggttctgatttgtaatgtttgatttacttgatgtattgtcagtgttaattagcaaatcattgcaggttcatca

SEQ ID NO: 13116 - DNA, 853 bp, Oryza sativa
  Intron number 2 from transcript LOC_Os11g05570.1 (locus LO C_Os11g05570) derived from phytozome v7.0 (chr-ID Chr11; p os 2526282 to 2527134)
ctaccaagacactcttgcaacccttaaatttgcaggtattcatgtcggttttcctgtctcttagtatatatttagtagtacttcacttcgccttgttgctggtggcgctgcacattactattaactcatgaagtaggataagattccgagatacataattttagtttcatcaacatacaaagtggtgatttggaagttggaacacatacaactatacaaggctaaccagcattgtgcctcatcatgtgttatgacctacttatggaataagaactttggttgacttggccagaaggaaggaaataatcttttcttttaagagcctgatactaattcttacaaagtctgtgcagaactggacttttgaatatactactataggatacaaacatctcaccttttctgctgataatagttgttatgttcttcttggttctctatctcataaaattttctccttccccttcatctcattcttgtaagatttaactgctttcatttccacatacttccaccctattaattcaaaacactacaagcgtcgcttatatgtggtacaatctcgtttttattttgtcataatgcatgaatgctaaacaatagtcagtcaaatctcgaacatgttttggtaattccatcatgtttgcatttaatattcaaatcctatagttggtaaaaaaaatgtgacttcccttgagtactggataatatgaagagtaaaacatgaatagtaactcataagttggcagtcagccataccacgtagagaattttaccaccagtgaacttacttagtttgttgttcttctcctgggcagattcgaagaccttgaaggaagaacaaagggaggag

SEQ ID NO: 13117 - DNA, 715 bp, Oryza sativa
  Intron number 1 from transcript LOC_Os07g43720.1 (locus LO C_Os07g43720) derived from phytozome v7.0 (chr-ID Chr7; po s 26166153 to 26166867 reverse strand)
ccccgcggccttccaggcgtaccagaagtactacggtgagctctccgccccctccccccgccggattcgcctctttcgctggggttggtgaactcccgtggtgtggtgttagggtttcgaccaggagagggggaattgtggggggttttcagtcggttgtgctacttttgggttttttttttacttgtctgtgttttggcgaattttggggaattttgtgctgtttaggttgataattccgttggtcaagtatctgatatttttagagcttttttctttttttttttggcctagttgatgaaaggatgtcaatggctaagcacttctctagggtttaaaagactgcaataacttttagttaagtgtgtgttagtaggaagaccaattttggagatagtggtcatggttgtttaatctgtacaacatggtctaattagaggctgtactaggcaattcgtggtacaatttactgtaaacaaaattattggtacaattcagttatcatgtcatgattccttagcacctgaaagcataatttgttacgaagtacagagatgatctttgatgcacagtgattgaacatctgttggactctagcgttacttagatcatgtttgctgaatcctgaggtactctgatgctgtctaaatctattagtttgatcttttttttttggctagatattgtatcagcgttttcaaacgtgaacacacga

SEQ ID NO: 13118 - DNA, 779 bp, Oryza sativa
  Intron number 1 from transcript LOC_Os08g05910.1 (locus LO C_Os08g05910) derived from phytozome v7.0 (chr-ID Chr8; po s 3188260 to 3189038 reverse strand)
tcaccatcgccatcttcaccgccgtccaagcctcggtcagtcccctgatttgacgttcgtgctcactgctttgacgttcgtgcgaactgctttggcgttcgtgccaccagtgcgagctgagccggccgccatggccggagcgagctgagctctccggcaactcaggagagatggtgcttttttttttgtttttaaatctgactctgcttttttttttatcttgaaaagttttttttactttttatcttttgaggatggatggatggatggttggttagttattttaattcgatgagcagaaaatatccagtatttttctccatttttggatttttaccatgcatagtggagcagtaaaaaaaaaaggatcaaaccttttttgggagattctcttgtgaaaataacatgcaccaaaacaacaacagtattaatcaattgttaaataaatcaagtatctggactaaccatcaccagcagctgccatcatatcatgtaattaatactacacaagccaagattgaatttcatttcttctcacatatttttcatatgactaattaattattacagtacaaaatgtcagtaattttccgtggtagtaaaatttaaatattaaacaaactccatgtactacacatgccaagattgaaaacttttttttttgcttatatatttttcatcatatgataattcaattaattataataagtataaaaattaataaaaataatttcgtgcgtgcagggggtgacgatcctgacgatctcgacggcggcgcc

SEQ ID NO: 13119 - DNA, 971 bp, Oryza sativa
  Intron number 2 from transcript LOC_Os11g44040.1 (locus LO C_Os11g44040) derived from phytozome v7.0 (chr-ID Chr11; p os 26146276 to 26147246)
ggaagcgcaagtggtatatagtggtatggatatccaatcttactccctcttctatttgttctctttaacatttctaattgcacatttggcaccgatggatctgggaagtttagggtacacctgtcctcttgttgagcatccctgtaaaacacactttagagaattagagcaagtacatgctgagatagacaagagaaataagaaaagagaggagccacctgtcatgcaaggtgacctcttacaccaattccagaaaaaaaaagagtaatggattgcttgcaaatgaataaataaatagttattatgtgttggagctatcgtattagagatagtatattgcatatgttaacttttaatcgatgagtaaatgatgtgaaacgaaaattgaatgtagcaattatccctctaccattagaattgcttttaatccctttgcttgaatccataacatggtttgagactgaaaatgaaatcctgtttttgtttcatgtatttcacatatcatcttacatggagatgggttttgtccctcgaagagacatcccctcgtttcgtgtatgacgtttaaaatgtcattaaaaaatctgaaaaaaattgctaagttagatcaatatatgatatatctttccacaaacatgcataacatgcatgttaaacttcgacttacaaaattcaaaataaaaaagacaaatttaactgcgaaatacgtgttatatttatagtcaaatttgtttttttttttctacttgtataggttgaatttgaacatgcatgcttttgtagtgatatatcacatattgatctattttattaaaaaaatttaatgacttttaagtgatatgcaaaaatgaggggatattagagttttaatctatcttacaggccatatgtcatctgtgttttgttcactgaattccttaacatatcattttgcagacagtttgtatcgtctgtgctgcttgtaagttcct

SEQ ID NO: 13120 - DNA, 965 bp, Oryza sativa
  Intron number 2 from transcript LOC_Os10g23250.1 (locus LO C_Os10g23250) derived from phytozome v7.0 (chr-ID Chr10; p os 12062025 to 12062989)
gcctcaactaattttagaaaaacacaaggggaaaggtcagatttggaggagaaaaaccgagccaaatcggtctcagttcggctgctagaggtagaagataaacagtgtcgagggaggcaaattagacttttcgtcttgggctggctgaaaacaaagcaaagaaagaaagagaagggggaaactcggctgggccgactagggctgcacggccgtgcacacaaaagagggagatgggccggaaagggcccaagactaggaagaggattattattacttttccaattaaaataatcacttaaatgatctttgaattgttaaaaatacttccaatgctcaaataatttcaagaaaaatcctgaaaataattggacactcaaagtacttaaaaaaattataattagaccatttaatgattaatttaatatgtgggtaattactgaaatgctctttgtatgattaaaattaggaattgagctccgaaaaatctgagaaaattccagagagtataattaaccatggacaatttaataaaaattaaatacatccatgctttatatttagaaaattttatttcccacatttaacttcacttgtaaattaatgaacatttaatataaattctaataataatttattaaataatttataaatcctgaaacaaaaatcaggatgtgacaccaattcatatactccaaattcaagatcccaagatacatgagaggacggcacactcttttccaagccactaaacaattgcctccattggccttctctcgaagataatcagtgtgattacagtgaacaaaagaggaatgatgatgatgtcattatgggagatcgggacccaaaccgactgaaaaatggagtggggtcatcctctatgtcattaagaggaggttcagctacagacttatagcttaattaatgttgtgtttcagggaacactgggttgctcactgttgttg

SEQ ID NO: 13121 - DNA, 1028 bp, Oryza sativa
  Intron number 1 from transcript LOC_Os12g21860.1 (locus LO C_Os12g21860) derived from phytozome v7.0 (chr-ID Chr12; p os 12303519 to 12304546)
gccgctggctcgccctcgccagcgtctccccgcaggtcagtctcgtgccccgccgccactcgcatctcctcaccctcgcgattcccaaccctaaccatcgtctccccgccccgaaggtctccggcgccgccaccccccccaaacaaccggcgccgccaccgatccccgcccgccggaagccctcccgtcgccaggtagaagatgatgaaattgaagtgttgtcaagttcctccaaggtgtttgtttttctcatggttaaagtgtagtacaaactgtgcaaataaaatcaatgttttcatcccgttcatatccatgactacaaattattaggacttgatctagcctgagatagccaatgatcgattcatttttttctttccaagttgtgctaatgtatatatgtttagaattacatgccatttgggttcacattgttcagaattatctaatctttctgtcattagagtagctggactggttgctccaacagttaaagctggtgcttgacgttggtataggttcttggtttaggaaatttgtgtgctgaatttttagctttggttgtttgcccttgacaaaccacggcatgactaggtatctcattgagcttgtctcggatcacagtagaattgtgttttcccaatttggttctgtcacattcaaaaaatagaagatagttcagtctattgaatgcaccatggagttgatagtgaactgtactagattaggagttttctatgacttcgtttggttgataataagtgattcttcccttttggaataaatacaaatcaacctagcatcttcttgtacatgggtataacagtgtgacaataaaatattctccttcccgaatcattcacagttactgcatataacaaattctactgctccgaaattagagcaatattggcaaaaattacagcaatgcacacttcaggaaaatattatagcataattgtcctgcttcagttattaatgggcgaaatttatttatgaacaatctttcttcagtggcctgtttgttg

SEQ ID NO: 13122 - DNA, 470 bp, Oryza sativa
  Intron number 5 from transcript LOC_Os10g40020.1 (locus LO C_Os10g40020) derived from phytozome v7.0 (chr-ID Chr10; p os 21365388 to 21365857 reverse strand)
tttgaggctctgaacctacctctcaacatactcatgtaagagcaagaatctgaacgcttcttctatatgtactccctcctccgtttgttttagcagatgatgccgtttacatttgacatgacgcttgactatttatctatttaaaataccatttattttgttataacttgttttaccatcaaaataatttttttagggaaaacaacactagattgtgtcttttcattgagtatagcagaagaaaaaacaatccttagaagcaagaaaagtgaaaaactttgtacactttaaaataacttttaaggattgactcatattttttatatttgtactaaaattttttcaataagatgaacaaagtcaaatgtcatgtcaaaatttaacaccatcatctattaaaagccggatggagtattattattttgtcaacttaaataataaatttttaactgtggttataaacagtaata

SEQ ID NO: 13123 - DNA, 921 bp, Oryza sativa
  Intron number 1 from transcript LOC_Os12g02560.1 (locus LO C_Os12g02560) derived from phytozome v7.0 (chr-ID Chr12; p os 880835 to 881755)
aagccggctcaagaaggcccaaaacgccggtgtgacgaacaatgcgtcaaatccgatagcggacaaagacgattgtagattaccattaagtaacttgagtacagttgaggaactatcaagtagtagtatttggatttgtaatatggatgcttatgttcagctgaagcatcaacaattgcaacttgctacttctgaatatcactatgagtttgtcctgattagtgtcggtttcggatgaaggtgtctgaacctttgtgtagacaatagaagggaaattcgatgaaaaataggaaaatgtgcggtttaattttggtttcatatagtcatcctgatttttaataggattattcttacatcagagtgagttagtgtcacaatgttaacccctacttatgtaattcgtgagtttctctgcaaagcttgagcatgggtcaaaatgattgcaatctatttgatgtatataatttttttatcaaggattggggcctcactaccttaaaaataatttcattaggaagcagcgaattcatggttgccagtaatggctatcatttgtagatcttttgaacaaagctgaagccatatccagaattaaccaatggatacagtgcattaggagaagggttttttttttggtggatcatggatagttgaagcctctatgttgagagtatgtcattatttatacttaacaggagagcttgctactttgcttgatatgccattattctttatttcctatgccccttcccttccagagcataaatggtcttttagtttgaatctactaagcatcttctgctattgtcttttagtatttctgcaattggtttattacttataaaatcatggtgttaaccacctaatttggtttacataatttctctctcatgcataatccttttcagggcaatctactgc

SEQ ID NO: 13124 - DNA, 992 bp, Oryza sativa
  Intron number 1 from transcript LOC_Os11g42930.1 (locus LO C_Os11g42930) derived from phytozome v7.0 (chr-ID Chr11; p os 25414877 to 25415868 reverse strand)
ccaggttcagcagcatttccctctgaccgaaagtggtgagctacctcctccctccatttctccttccccctctccgttgcagtgggccagaggaggaggtcgagcctccacactgaaacagacacacacataagaactaattttgagtagaaaatgttggagcaattgtgtcgtgcaaggtcgattcacagtttatttctgtcaatgaaccacttttgcagcagcattgtttcgcttatgaatatgcttataagccaaattttgaattttgagacttaattttgtggttttcttcatcgtagtttattttacagcatttcctttccaatcgctaagtacacacatgtaaaagttttactcacaaattattttttagttggtaataaacggttcagatatgcatattaccccccagcagccatcttgttttcatattcaacctaattgaccctgcaacagcataatatgctgagcattctttggtgtattgcaatctaaaccacaactttaagaaaaatgcacatattcctattcttagggctgtggcaaaatgtttattgcgagtccccctcctttttcccacataagtagcagtcaccggagagaaatgtttattgcgagttttgaagggaattttccttctccacaaatatttctgagttgaacaaatcttccacacatgacatgttgtgctcctgccgagtggtgatttctgggcgctgagatattttgattggctattgggattataagcgcttagagagttagaggtgttctgcactgaatgctttttcaacctggccaggaagtagcgttgtgacatctggccataagggtgtctaagctgacaccttctccttatgaaaggaatgaacaaataacaccatttatcacctcagaagtatatagaacaagatacggttgttggtaaaacttgtctaaaatttacaactttggcaggagacaaggacgagcagaatttgccaggagac

SEQ ID NO: 13125 - DNA, 953 bp, Oryza sativa
  Intron number 1 from transcript LOC_Os08g19770.1 (locus LO C_Os08g19770) derived from phytozome v7.0 (chr-ID Chr8; po s 11843321 to 11844273 reverse strand)
ctcttcctggggcaaagaagcaggtggctggatcggtgaggctggtgacaggtgccgagagagggatatggaggacgccgcttcatcctcgtcgccgctgctgctccttgacgttgccgcaattgctccgtgacgctagcgttgctgctacatggatgccgttgctcctagccagggtcgtcgccactgccgtcgctcaactgctccaccgagccgccggagccaccgccctctcacatcccaaaaaatatacgatcgggattgatagggaatgaatgtatatgtggttggttagccggggccgggggaacccaaaccttataatccagtccatttaactccctaaactgtttcacaaggcggttttgcacatatggcgggctgactgaaccgtatttgccacgttgtcatgctgaccaggcaattgcaaagtaacaagagggaaaagtggagcgatcgcgaaataacatgagggagggaacgcacatcagtctatatatcattcttgcctcatcgtactccctcatcccatcttctaggtttcttctctcgagtgttgcgcccatggcgaccatggctgcgtgaatcgtgatcacgcacggacgggaagatcaaggtgatcgcggagtacgtcttggagtaggtgagatccctgactccattgcagtgtttgatgcaagaaggtttcttccctttttatctagggttttgtggtgattgttttactcacattggttgacagcctccacgagggaggcatggagtcaagatataattatctttggtttctttggttttgatttctttagttctgtcattgaggtttagggctttgatgtttttctgttgcatagtgcagatcgatgtgtgtaggatgatcttttctaatcttgtcaagtctagtataaattaaattaatttcgtcttttataatgcagcacaagctagaaaga

SEQ ID NO: 13126 - DNA, 676 bp, Oryza sativa
  Intron number 2 from transcript LOC_Os08g07270.1 (locus LO C_Os08g07270) derived from phytozome v7.0 (chr-ID Chr8; po s 4056750 to 4057425 reverse strand)
tgaggcgggagcaggtcaccgcccaagtcaagcaggtgatggagcacgaacgttctctcaatatcctactatttctatcccaaaatataacaactttcggctataaatttagacatgaattgtttagatttgtaaccaaagtttgttatattttggacggatgtattacttgattcggtcataagtatttcatacctacaaaaatatttggatgaatttttgagacaaccataagtaatttcccctactgtgttttccttaaaaaaaccataagtaatttctcaaatgtttagatttttttttttaaaaaaaacggatggtggagatttgcttcaaaaagtacaatcatcgtaatcatcgtaacattttacaaaatgttaagctcattataatatgaaattggtagtcaatttttttaaagtttgattgaatcttctcctgaacatcaaataaatatatttatgaccagaggaagttgttgtttagctcgtgtcttcttttctctctagctttttcgagtttattttatgtgaggttaatttgtcctatggagtttttgtttttcttattatctagtttttttttaaaaaaatctctggctaggtgaatcctagatgcagaaattggggatgcaaacttatcttccttatcataaatttaaaaaaaaaaacaggtg

SEQ ID NO: 13127 - DNA, 981 bp, Oryza sativa
  Intron number 3 from transcript LOC_Os10g31850.2 (locus LO C_Os10g31850) derived from phytozome v7.0 (chr-ID Chr10; p os 16635704 to 16636684 reverse strand)
accgtcacgagatcccccgccacgaaatcaagaaggtgtttgtttgttctcactcttctgtttgattttagcatcagctttcccttttgttttcaattcgtgtaagctttgatgcttgtcatacccaatttcatccgatataatccgtgtcaaatttatctgaattttgcttggacacacaacgcctgatagacaaaaaagaaaagaaaaaaatctgcggtcaatatttgatggcgtgtcgccggagagatcatacctcagttttcacaaacctatcaatttcttcagtccaaaattcaaaatccgattagtaattgccatttcagtctgatgctgatgcatgcctctggagccctggacaatgatgtttgggacccctgccatgaagtggccaagaatgcccccatcccaagaattttttttttcctttcctttccttctcccccccttcttcagataaggttgtctaattgtcttagtgctccatggggacagattcttcttgatattttccattccacaactcaacttgcacactaggttagtttctgctactagtgaccattgtctggtccacatgattgattgcttgcttgcttgcttatctccatgtgacaatgtcactagaaggatgacggcagaggaggaaagggaaatgacaaaggcatgtctcaccatcagccaagattaacttgagtgcggtcagctgattgattcctgaataattgagtagcagcacatgattgattcgtttatgtggcccaacaggtgtccatagctaacagtgcctcaaatagtcaaactgattgtgcaattatcacagcactaatttcctgggggaatctagtggataagaatttcaatggctgttacgcttttgtcattatcactaactttcttaaccagattgtggagttactgaaactgttttactttatggtgtatcacaggttatctgctctctctgcgacaaagaacagg

SEQ ID NO: 13128 - DNA, 1038 bp, Oryza sativa
  Intron number 1 from transcript LOC_Os12g07970.2 (locus LO C_Os12g07970) derived from phytozome v7.0 (chr-ID Chr12; p os 4043614 to 4044651)
cgggcgggcgggcggcaagaaacagggatcttgaggtgattcccctttcccgttcccaggtttgttgggattgttgctattcctgccattattgtggggggtttgctcgtccgcgaaaaaaatctttgtgctgtttctgttctgaatccatgtgcggccgccgtcgggggtttggcgaatcttgaccaaaatttcgcgacttgggttggagtatccgttggtgtgatggtctaatccatatccaatgtggagtttggaggtggatggttggggttttgcccgagatcttgggagttgggtagaaagttgaggtttttagatgcagatctttcttgatctgggagcgtttctggctgagatttttcttctactctctgccccctgatgacttgaatctgtggaactagtgcaacgcggtagcaccgtttgcttgcttggaactgcaggattggttaaaaattgctttgttttaagcttagtttggtactgtttaactgaaaagcttagcgcaagtttgcctttttttaggtacttggatacgcgtagggccgatctacaagtagatattatctgtcgatcggcttgtatagtcatttcttctggaatctaaaatactattgtttgttcaagatctccctcttttctcctggaacgtagagttagtggcagtatgaaatcaaaaccacgtggtttcaaattgcagtttgtattttctttttttttaaaaaaaaatattatgctgttttcgattgttttctgctgttcttaccacaaagtactttactcagtagggtaaaagggcacaatatagagatattcatctcttggtatgtttaactaactgatgtgtgcttcttctttgatcttcattaagcaggttttctgagttaatgcacagaatatagagaattttccagttaatttgcttatgagatcagtaaactgctatggatatatgaagcagaagtgaagctcacactgtttcacactggtgaatgatcagtattttgtctgtttcagatcttagtgtccctagat

SEQ ID NO: 13129 - DNA, 385 bp, Oryza sativa
  Intron number 1 from transcript LOC_Os11g38870.2 (locus LO C_Os11g38870) derived from phytozome v7.0 (chr-ID Chr11; p os 22670801 to 22671185 reverse strand)
ccccaagtgaggtcagcccccctcctggttaactaatcatgctggcttcttgttcttgatgtgggggaaaagaaagagaagaaaacggtttcttggtgggattatgtgcagatctttagtactactgtttcttgcaagaagaattcgggctaagctagctttgtctcctagtacacatggttagttcttgtgtatttgtagtttggtttcttgtgtaggtataaaaaagtgtagcttctggtgatttctgtgttatcattgttgggttttttgaatggactgagcctgatcttctaatagtttgatgatgtttggaggaggaggagttgttttcgatttggttttgagccttgtttcttttggtgctccagtagacctttgtgtg

SEQ ID NO: 13130 - DNA, 528 bp, Oryza sativa
  Intron number 1 from transcript LOC_Os09g26560.1 (locus LO C_Os09g26560) derived from phytozome v7.0 (chr-ID Chr9; po s 16082553 to 16083080 reverse strand)
gcccttccaggctgcagcggccgccgcgaccacaggtttgaccagccccctcctacactcctcgccgctcctcgccgccgccgcgtctccctgcaactacgatcgttccgctagccctaggccctagccctagtagcgaaggactgacccaagcgccatcgaacccgagaagtttttttttttttttggggtccttcgatatgcccatccgatgcaattatctgcttgaatttgatcttcctttttcacaatcactggctagtaatttagattttttttccttgacaaaaaaatatgataatttgagggaaaatgtttgatttttcaagatcaagctttgatgctttatccaccaatcttctgttgattatttacataataatctccgtggattatgcatctccttttcttactacttttactctctccgtcaaaatgacacgaacctatgttcttctcaatatccgctgcatcactattacacatacgggatcagtgtaattgcttaccaattactgtatctcacag

SEQ ID NO: 13131 - DNA, 904 bp, Oryza sativa
  Intron number 1 from transcript LOC_Os10g42730.3 (locus LO C_Os10g42730) derived from phytozome v7.0 (chr-ID Chr10; p os 22984026 to 22984929)
gctctggctctagctatgtcacagcgtgaacaggccctataccgaagctgccgatggaagaaagcaatgtcatagctgcagcacaacagaggtacattttttttgagaatttcagaacattccaaatagaaaggtttaaatttattattgaacttgcagttgtgtaattgtttgtggagttttgattagtctaaaataacaccgctgatactagagtatgttgcacaaaatggtacacgctcaattgctctggacagactattgaaaatactaactccttatattaaaggaattagaacaaagtcattgatttcgactagtatcttggaaggtgtaacatccattagtttatctttttatccttcttctgagcaccccccaaaattgcagctaacttccttctaaaatattttatatcttcctgcaaaattcataaaggtatttgttagatagaaacaatcaattgaggacttgtaaagaagatgcaaaaatatttagtgcatcttacatgcgtgtattccttcgacaacctattgccttgccagtgctccatgttttttagtacaaagagcccacatgagacgctggaagaattgaattatattagagaagtgataacatacatttaggtagtgaaaaaaactattattgtagtggctgcataacatacagatctccttgtaatggcaaattctgtatgaccgtgacttcccaggaagtaatatgatggtcaggccattgtgttgctatgtgcttttcttctggttccaacagctgaaaatattgttgtaatccttctagctgttttgtgagaaaacgtcattactgcggtatgttcatgtcctttttggtttatttctaagtagaatacttacaacttttcttagttccttgcgttgtgtgg

SEQ ID NO: 13132 - DNA, 595 bp, Oryza sativa
  Intron number 1 from transcript LOC_Os08g37605.1 (locus LO C_Os08g37605) derived from phytozome v7.0 (chr-ID Chr8; po s 23826845 to 23827439)
gccggccatccatctgagttagaacggaatcgaaggtaaatcgttcttctctctctcagcgccacgtcatgagccggcttggtgtagagctcgtccggatttagttgattgttcgattcgtttccgttcaatcaaacccatccggtttcttccccattctattacttggacgcgtgcgaggtgcagtaataatagatagcaatttgtttccaaaagaattcgagggttcagctgaatctcatgcggtactttaggtccgcccctggagtttttgagggtgtttgttatgcgattttgctgtgtttagctttactctagattctagatgacttggtttatttaggagatggattgttgttttcaagggtttattccgcatttctggtaatcaataggcactagatacttattctaaatttccttttgaggaaagtgagattctcccctgcacaaggcggtactgcggtagtaacatagaaaatctctgtaacgttactgaaataatttgaattcctttttccatcacatcctttgggtatattatttgaatatttttattcctaacttgtttcatagttctgatttttttcctcag

SEQ ID NO: 13133 - DNA, 419 bp, Oryza sativa
  Intron number 2 from transcript LOC_Os08g19470.1 (locus LO C_Os08g19470) derived from phytozome v7.0 (chr-ID Chr8; po s 11629539 to 11629957)
gcacagctaggtaatgttttgttttgttgttcctatacagcagtaactactataatttgaaaacttgaggtgcttacttttctctggagttatatcttacattttgattttgattcctcttagattaacttgttatgttgcatctgcttgaaaaccagattggttattatgaaacagaatactattgaaatttaattcagtcaggaactaaaacagaatctttgcgatggcttaaatacgttctggattactttatctgtgtttaaaaacaaactctataactgctgaggacagtggatgtcacctgaggctgctgagtacagactgctaccttgttccgtttgtcatgaggaaagtactttctacataaatttatgttgctttattttctttgctgctcattttccccagggcgctag

SEQ ID NO: 13134 - DNA, 749 bp, Oryza sativa
  Intron number 2 from transcript LOC_Os09g10930.1 (locus LO C_Os09g10930) derived from phytozome v7.0 (chr-ID Chr9; po s 6016165 to 6016913)
tcctgcatcggtggctgccctgtcaggggtcgttggtaatcatttattcacatttgttcctgtaatcgcattcttttcctgtgacatagtatcaaatacttttgttatatgtttgttggttactatgggttatattatagtccatctccaactggattggaactttggatttaatcattggatgtattttgattataatgaaagcacaatcgaaatagtaggtattcatcattattcagtatagcttctgttcatggtttagattagctcattgaatttgttgcagtctttatacaagcatttgatatgtcgtaggtttctgataaactgctgaacatgtaaccggtgatactacataagtatcccttgagctgctgactgactgacatggtctgcctattgtaaagctctcaagctcttataccaggacaatttactgttaaaccaaggagctgtggacataatatatatgattcatgcatatatgatatactgtttaggttgtcaaaaataacatctgttcccagcatatgaaattacttgaactggtattggaaacagaaatttgtgaaggctttggttttttttcttctgactgcagcttatagattaactgtatcgacattgatgggaaggatgttgattgaaagagttggatgcattactgctacagcagtaatttgcattccttgttcatgcgcttgatattaatcagttatttaagtgacatgcagccccatcaccaccaa

SEQ ID NO: 13135 - DNA, 919 bp, Oryza sativa
  Intron number 1 from transcript LOC_Os08g38070.1 (locus LO C_Os08g38070) derived from phytozome v7.0 (chr-ID Chr8; po s 24114988 to 24115906)
ttagagtatgtagttagagttatattaggataggattggtttgtgtggactccttccatatctgtaatccttccttatctcctccccatgtactcctatatatatcggccccctgaggctcaatacaaagtgtctcacgttacgcaatatacctctcctatactatccatcagatttcacctgtccaggttttgagaatttgaggtccagcttctcggttatcaaaaggttttgagattcaatgagatttctcaactagtgcagaacagaggctttgaattttggaattctataagatttgtacagattgttctcttttgggttacaggcttacagcatcgctagagactgaaacaactgaaatgatgctgtagtttgtctattactccttctgttttcacccctgcgtgggtgggtgggtaaatggttggtaagagggtgcaaatgaagttattttggaacaaatggctgaggctagaagtgaagttattttgggacggagtgggtacttaccaagattgttctgagatactcttttgcaatgaaattttcaattaaagaaaagttatcttttgtcacaaaatattttgctattacaaatttacaattcatatgtgcaggcacaagcatacatgctaaatagccttacaatgcattaatttccttaccactaaatataggtcattaggtcttcctgtgatccttgagatcaaacttcaggagaccttgaccattaacttcatgcatatagaatcagcatcttgagaacaaatgcaattagatgtttcttagaagtatttcataatgttttcattgatatatcattacaaatatcatgtctaaaatctttcatagtttattttgtgcttgtaattgcattacagattgcaacttattctagccctggggcacaaaattg

SEQ ID NO: 13136 - DNA, 562 bp, Oryza sativa
  Intron number 1 from transcript LOC_Os07g15910.1 (locus LO C_Os07g15910) derived from phytozome v7.0 (chr-ID Chr7; po s 9246201 to 9246762 reverse strand)
gtttgatagatattttgtaccaaaaggttagttatactttatagttctccatttctcaattttttttttcatttttatccgttctatgttgagattttgcaaggtcaagtttccaaggcatgttcgttttgatttgttttgtggtgttgaaaacggtcaaaattgttatgatatattgtacatgatcaatgtatatagatttcacaatgttttgatatgtttatttatagaagatctatatggcacggttgttttgtgcactttaaatctatatatctggttatgaaagagaattgagagaaagaaagagggtagtttggtaattttatctagttttttctagttgtatgtctagttgtcatgtattgggaatatatgagtggtagtttttttttaaaaaatgaagtcataatatagttttaatttttccgtgtttatactaattgtaatatttttcacaatgtttaatttatttgtttacatattagcataattattttaatgtgacatattattaaaactatttaaactaagttagtttttttttctcaatgcatagacg

SEQ ID NO: 13137 - DNA, 711 bp, Oryza sativa
  Intron number 2 from transcript LOC_Os07g40550.2 (locus LO C_Os07g40550) derived from phytozome v7.0 (chr-ID Chr7; po s 24296247 to 24296957 reverse strand)
ctctcaaggctgactccttcgagaagctggagaaggtacttggattcaattccaatagctcgtcggtcattttccgttgcaattcttttaatttttttcaggcgtgtcaatttttagatggaggatggctgttaagcttgttaaatttctgtggattggttggcatcttgcaagaatctcatactgcagcgtattagttggaagtactttgtttggtgatggattatgacatgccgaataaactagtactaatatgcaattatcaagaggataaaggggagaatttggggggtttggtgcctcctcctttgaagcagcacaaattttagttttctctgttgttcatacggtttcctggttggaaattaaatcttgctgtatcatttcgtctatctgatcatcatcatgggcaattctaactgggagaagaacaggattgctattgtaccagtttatgtttacatggccactgaatgagtgggatacatgcataatttgtaaactaaccattcacccttgtatgcagctatgaatttgccaaaaaaatattgtatgtcttgttatgcacactttgtgtttgagttttttttccctttctagttatgcaagttcaatttctttagctgtatgctctccttagggtctgacaatactctttcttgcactgtatgtgtaggttgggcaaggcacctatagcagtgtatttagggc

SEQ ID NO: 13138 - DNA, 889 bp, Oryza sativa
  Intron number 1 from transcript LOC_Os08g13800.1 (locus LO C_Os08g13800) derived from phytozome v7.0 (chr-ID Chr8; po s 8229184 to 8230072)
gccaccttgctgcagagcgtgccggagaataccaggtaatcaattaggatgagccggcgccgcacatagagtttttctgtctcctccactcgcttttcttcatgaacatgagcatcggttcttgcaatgtgccaacagaactgacaaatggagaagacaaaaacacatcagaccattatctaagaaaaaacacacattagatcatgagagcaattagctcttttatgacaatttcactgttagagcatgtgacagtcattttcttttttgctttgttctaatatccctaaattagtcacttttaaaaaataattattgagtaatcattatggacaaaaggttaaaattggacaatatttaaggcagtatgatgcagaaataggtaaaagtttattagcttatggctttatgaaaatagcgcatttggagtacagaacaaaatgcatttgtaaaatatagagtcaatatatgtaaggtggtgttggtcacaaactcctactttggataatcttcaaaagttccctgaatgtccacagttattacagagaaaaccaaataacagtagacagttcccagaaagcaaacaacaaacaaatctaaatatttatgtgtattatggtatatcacgaactaataggagtttggtgaagcgatctaagttttaaaaagatattagatcctaaaaagaaaaaaaaagggaaaacactgtgcatgatcttaaatcaattttgcactacctccggtcaggaatatttaacacctgcgctgctgcgattagtgacactggcatcaaatattcttgactggatggagtacttatctttctgaagaaatcctaatgtttctatgttcagaggcagacaggtaggtccctaaactatacaaataa

SEQ ID NO: 13139 - DNA, 762 bp, Oryza sativa
  Intron number 1 from transcript LOC_Os10g31940.1 (locus LO C_Os10g31940) derived from phytozome v7.0 (chr-ID Chr10; p os 16699550 to 16700311 reverse strand)
ctcctccatccccttccagtccctcaagctcgaccgtgagcctccccgtctccgcttctcggttctcgcttttgtctccagtcccgtgtgaatctgctcggctgacggtagggtagtagagtagcaggctggctagcagcccagttgtggcgccgccgcgtgatacggtggtggtctactgaactggagcctcctaggatagcagtgagcatgtggttcgtagattagactggagattgtgggatttcgatctgattcaatttttgttctcaacgggagttaggttgaattgtgatttgtgagtaggtaaaaggttgaatgttgatttgtgctcatcgcatagcctaaagttttttttttcctttgaagtgtgggataattggattagtactggttaagaacttcgggaagtatgaacattgatttgtaaaattcatggtggcctagtaccagaattggagctgaacagcgataggatcataggagaaccggcattagattttcatagagtaagatgttcccaattatagttctggatcacgttggtgttgatggactcctactttatactataaccctatggaacttccaattttagtttccgaaatatcaaactgttccaactgaagactgatgttcttgttaataatgtcatgttcctagttttttctctattacggtattatatgttttgaatttgtgtttataattctgttaaatcttgcagtccctgaattgcaaggtgagccggaggacatatct

SEQ ID NO: 13140 - DNA, 418 bp, Oryza sativa
  Intron number 2 from transcript LOC_Os09g29100.1 (locus LO C_Os09g29100) derived from phytozome v7.0 (chr-ID Chr9; po s 17680428 to 17680845)
acttggaccgcttcctctcactctaccagcttccggtaagaaaccttatagctgtagtagtactagtactcgctccatactcgtaaagaaagtcgtttagggcagcggtacggtctccaaaacataactttaacttcttgtttctataaaaatatttattgaaaagtgatatatgtatacttttatgaaagtaattttcaaaacaaatctattcatataatttttatattttcaaactcaataacttgagagttttttatggtttatattcccaaggtttgacttaaatattgttctaaatgacttcctttatgagtacggagggattaattaactactgctcggttctcgaagaaaatggtaaatctgggacgtttcagctgttcaggatcagtaattctgtgcacttgtctgcagg

SEQ ID NO: 13141 - DNA, 161 bp, Oryza sativa
  Intron number 2 from transcript LOC_Os11g29470.1 (locus LO C_Os11g29470) derived from phytozome v7.0 (chr-ID Chr11; p os 16633164 to 16633324 reverse strand)
atcgtcctagaatagtcccagctggcgagtaagttttaaataaatttcattttgacttcttcaagtgtatgcttaacaaaaagctttatttgtggatatactaataatttacttttctgtttgtagcgcttttgaagtgtatcctcatatctcatctcgta

SEQ ID NO: 13142 - DNA, 999 bp, Oryza sativa
  Intron number 2 from transcript LOC_Os07g46240.1 (locus LO C_Os07g46240) derived from phytozome v7.0 (chr-ID Chr7; po s 27591630 to 27592628 reverse strand)
cagaccccaccacaggtaactaaacaaatgcccaatttgctgatttctttttggctgaatttaaaattcggtggtctctgaatcttcttgatttaaatagtgagattggctgagtcttttctacgcatgtggggtgtgtgtgcgtgtgtgagtgagatcaactgtttgtagcacaaaactggttggtggacatgtcaataattttgtttggtataatcaagcaactcttttgtatagttcaatcccctccacttgacatttcggcataaaaatttctgcgatcatgtggcgactttggctgcaacgacaatggcagaattggttttttaactagttccaagaaacagtttttagaggatacagaaagttgagtttgatctcgttttatacaattctaaaccacttgtactactattttactttgaaaagatttgattgggttttggatatattttgtggtataactcgtatctgagtaaaaagaaagttgaagtattttgcaagttggaaatgctttcaatcaatcaagcagattagcaatgtttgcactcagcaacaaccgaataaatcagcaacgcgtgcagctatgtgcgagcccaaagttgctcagcctttcggtgacagaaaaagataagagaggtggtagtgtttgacacgatttcttaatcaatgtagcctaacgtatagccttcattcattagatgactcatgtgtaacttaagctctaatacctccctaatagaatacctctagaatagagtaatgcactaatgcttggaatcgaatctccagttcaccgtacaagttgattttcatagcaattattccataggtaccaaaacctattgcccgttagattaagtagtagattaagcttcaggttgcagaacatgtgctaggtaatgtcctatgctaatccaatttggttgtaattgagtaaattaattaactttgagtgtggcaggtggcgttcgcgtcgctcaattcgcgcgtgtacac

SEQ ID NO: 13143 - DNA, 752 bp, Oryza sativa
  Intron number 1 from transcript LOC_Os08g43170.1 (locus LO C_Os08g43170) derived from phytozome v7.0 (chr-ID Chr8; po s 27299763 to 27300514)
tggacatctacttccctcccgcctgcgtccaccaggtgagctttctctctcgcacgagttttgttttttttaaaaaaatcttaaaaaaaaaacaaaatctccgttcgattcgttgtttttttcctctcctgctgcgatgtgatgcgatgctggcgtggcgagcttggctgatccgaggaggcttgtggagatcatggatggtttgtttgttttttcttttttttttcaaatcaaaatttgacaattgtttgttttggggggaaattaccgcggcgggggtttatgggtgatgggtgaaaacctggatttggaggagatggctgagatcgtcaggagtgggattgtcgtaaacgtttcaaccttcgtttcccaatgctttcactttcctagatttgtggatcattagcgcggcggttttttccccatagagtgtgtgaaatcagctctcaactgcattatacctggtgcctggtattcagaaagcgaacagagcatggcatttggtgttgcattagggaagagtccgatgagtttatctactaacaatgcatggataattgtatcaacggataataataatattgtaatattctgcgttggttctagattttatcaatgaatgataatatgctatttatgctgtgttggttctagttttttagagcagattacccttgacagaattttgttacacttagagttgaatgttcatgtgtttaacaaattgctgcaggaagcgctggaagcgcacg

SEQ ID NO: 13144 - DNA, 771 bp, Oryza sativa
  Intron number 1 from transcript LOC_Os07g20180.1 (locus LO C_Os07g20180) derived from phytozome v7.0 (chr-ID Chr7; po s 11646454 to 11647224)
ggaagagcaggtacataccaaaagccatatcctgatgagtttgatttaggtccctatgtgccttgttttgttaaatttactggaaaagattgtaggactgcaatagaacacatgggacagtttctcgtgcattgtggtgaagccaactctaatgatattttgaagttaagattatttcccctatcattgtctggtgctgctcttatttggtttgtcacgcttatgccaaattctattcatacatggtctcagttagagcattaattttattgtcgtttttttggaagctggtgaagtgggtcacaatataatagactataatggcagtgttcataattcagcttgttattctaccaacagttatagccgaattaatgacaattcaccgagcatgcatgtaactccccaaaatttcaccgagcattactcattcttcattgccgaaatcaaatgtaaatagttttcaacagaatgggtcatatgtacaaccaacaatgcataaagccaaacataggcttcaaaatgatgacattaaattagcaagttcggctatggaccaatttcgtgaggaatttagtttcaagagaaagaaccttgaagaagaaatatatagagacatgatgaagaggttgaatgtttgtgttttaaataaaaggtctgaaccaacttttgtactagaacaaaagccgaataatgtagaattatcgactaagaaaaaaatggtacatgtgtttgagttttctgaaattgaagaaccttttgttctaccag

SEQ ID NO: 13145 - DNA, 1053 bp, Oryza sativa
  Intron number 2 from transcript LOC_Os07g33610.2 (locus LO C_Os07g33610) derived from phytozome v7.0 (chr-ID Chr7; po s 20077669 to 20078721)
atatagaactggagttaaccttttctgaccactaagtatgtaatttgcttctaatttttgaaatgtctacctgtttttcttggcagatattctgcataataatatgccaaaaaaaaaggatgtttcctgcatacatggcctgtgccaaggctaaaactatacttgtcgattgagagtcctgcagttatgcagaagaattaaatctagaatattgttcaaaatttcttattacataggataggacatggatcgtttcgttagggatgaccaaattgttgtaaccagatcttttcaatggtttgctttgcttgctttgcaaaatttaattctgttgtatgtagcatctttcctcgagctaatattagatccaaaggaatcagttcttctcattatttgcttgtctatgtacttccctttttagtttttttagggaattcgtttttgtgtctttcatttgaggaggaaatgcaattatttgactagcataaatccagaaattctattggctagcataaatgtgattctttgagctggcttccatttatttccagtaattcacctatgtcgtgctaagctgctcctatcatgtggggtgatagaattgtttacttataaactaatattgtaagttatcatgaatcagactcattactctggtgacaatgaggggttgttcccttatctcaatttgtaatctttgcttgtttgttgtatgacttttgagaaagtgatatattcagctttgccaactaggccatttattgagttctaaagaaaatatcaaatttgttcaatcatactcccttgtctatcatgcagaaagaaaacaactctggtttgcctatatacatacatgtagacaaatccacaagctgatcagccaaccttcatagtgcataacaacatactccatcaatggattcctccatgccttttgctctgctgcttgccttgctcatacccaccctcctccgctttgtcatcaggcgcaagtactcatcctataatctccctccaggttctcttggcttcccattgattggccagagcatc

SEQ ID NO: 13146 - DNA, 1044 bp, Oryza sativa
  Intron number 2 from transcript LOC_Os07g23550.1 (locus LO C_Os07g23550) derived from phytozome v7.0 (chr-ID Chr7; po s 13314184 to 13315227)
accttcatcattttcagttcaatatcggcactgaggtatgctatctgaactttacccataatagctgtatcgacaatgcttccagtatttatatctcgtttttcttgtctacctgttacttattttgagggattgataaagcatgcaacaatatataatgttcctcctatcttatgtgccatgaagtattcaaatttctggaagttaaacaaaagcttcctgcatcctgtatatataagtgctgcttatgtggtaaccttttcagtactcctactgaataagacagataattggtccataaatctaacacatttagaccaaatctttaaattcgactcagcgtataatagatctatttatcatggtatttgaccaatatcaacatggtgtttgactttcggtgtaattaattccttaattctggatccagctctagaagaagatatgcacttatttgatttatcttttttaattaaatttatgaagttattgaatcacttctattccaaaattaatttcttaattctggatcatacagttaaggtagtttagttcaatttctttttccaaaattgtttcatctaaggtcatcctttataaaagactaaacttatattggtcagaatcttaagctcccccaaacgatcccttaatatgcttttgtttgaccatgaagattttctacttccccccatgaggcctacactttagcttggagcagatgcattaattctggtgcatttgtgttagactagtcgccatgcttttatttatataaccgtctcatctgattatgctgcttatgcttatttctaaccgtttcttctaattatgctgcttttgcatgagcctgtgtttatgactttgtacgtatataaaatgaacaaactatgtacaccatagctccactctcaggctgtctattagatatgagccatactttagatttattgaaatcagttatgctacagtgactgcaagtttcactgatgacaacactgtttgacagggcgtcaacagaatcgttggaatattcagccgttg

SEQ ID NO: 13147 - DNA, 742 bp, Oryza sativa
  Intron number 1 from transcript LOC_Os12g03710.1 (locus LO C_Os12g03710) derived from phytozome v7.0 (chr-ID Chr12; p os 1496665 to 1497406)
tacggtcaccgcgggtaagccaagcccctcctcttctctcttattcctgattaatctccgcaattccatcccgccgattcatccattgctttctttttttcctacaatacttgcttgcttacgcgatctcatcaatttctcgattcttttagggataatttctaagtaggtcactttgctttgctaccatgatatgatatgatatcatctgcctaggatttaggatacatgtacagcttcccccttacaagaccaaacctctctccccccaataaataaataaataaatcggaggcagtaatacatccaaattgatgtttcatcaactgcaccagcatcccaactgtggtttgtaagattcttttctactgatatgtgtcatccagtagtttgagtatttcttctattcatatgctgtcaacatttaattagtttttgtttatgtccactaatgcgttcgcatttcgactccattcacctttttaagccttaagtcatgtttagattactagtatttcttatctgtgcagttatctttatgtttgggttattttatatgaaatggggattgagagatggggggatcgtctcctttttttttcttttctctttttgggactctggattatctgaagggcaatgatgggaggcgggggggtttcggatgggtacgagggatcaaagaggccacgaatgatcgaatccaatccatacttcgcagtgaccgcaggcagtcccttgg

SEQ ID NO: 13148 - DNA, 486 bp, Oryza sativa
  Intron number 3 from transcript LOC_Os08g41250.1 (locus LO C_Os08g41250) derived from phytozome v7.0 (chr-ID Chr8; po s 26045415 to 26045900 reverse strand)
tcagtggtagtggcaaaactattctcttctaccaggtaattttctgtttcaatcattcaatgcccatatatggttcctttttatgtgtgtttctcactccttcagtgacagttattttttatttttgatggattaaagcggagaaatgaaattgtatcaaattgatgaataatggctaaacatttaatggtcttcaattctgaactcgtttttctttctattgtttcaacctctatacatgtacagttcagtagcttaggaaatgaccattttaaataacctactcaatctgattttgatgttgtaatctatgggtatctcttcagcttaccttgcttcgacttaatatgctcctgtctgtattctttccatgatatattgaatcgcaacatcatacatcaccactgttcccttttcatgttaatttgagttgagtatcttttgtctctgtggtctgtgctaattctccctttctctagcttcggg

SEQ ID NO: 13149 - DNA, 782 bp, Oryza sativa
  Intron number 1 from transcript LOC_Os07g47030.4 (locus LO C_Os07g47030) derived from phytozome v7.0 (chr-ID Chr7; po s 28107580 to 28108361 reverse strand)
gacggccaggcgaagcaggcggcgtcgcacggaaggtacgtctccaagccctagaaattcttccacctcctccatccgttttccccacctttggtcgacagctcgcccctcctcccagatcttccgatgttcctctctcctttttgtgtcaatcgtgtgaaaatctctcggtgtgagcccgatcgttccagtgggtgcggcgttccaatggattttgtttattttctttgttcccgtggctctagcattcttgctatgttctgaaactctgtattgcaacttaatcgaaaaatgcaattgcgtacctatgtgccaaaatattagtacttccgaactgtcatccaaggtccggaattaaggggtgactgcaaccgatgttttaaatcacagacataataaacttgtacagagtagtgtgtttcattccaatagctttttcggtttgttttctttttcatgtggctatagctttcttgctaagttctgaaattatgcatgcatcttcccttctataacatagtaaatgaacttaattaggaagaaccaactatttagcaatgaaccattaaatgacgtgtcattctgttgttcgttgttaatttacttgcctgtaattgtaaaatagaatttcctggttagtacagtcatcaaaatttagctatgcatatggagcaatatagagggcaattatcagagaaatctttttttttttgtatattatagactagtaattctgtgctctcttcaacagattcacccctatccttggatctggaatctgg

SEQ ID NO: 13150 - DNA, 613 bp, Oryza sativa
  Intron number 1 from transcript LOC_Os12g10810.1 (locus LO C_Os12g10810) derived from phytozome v7.0 (chr-ID Chr12; p os 5816479 to 5817091)
gcacggcctctaccacctcgacgacaccagcgaaagtaagcaaagcatcgagcatctccgattccccccaattaatcccactactcctcatctgctgtcaagttaatattatttctcttagttttaccccccatttcgactgtcaaagttttcatcaatttaacaagagtaaatttcacttaacgccaggtattatatggtctaaattatacaaaaccatagaggttttagcacgtggcacataaccctgggtattattatggctataaagtttcacaaaaccactttatcaatcattttgactttgatttatcattcttttgagttctacaatcacatatcagatttatgagttttttccacaatgctacattcttctaagtaaagcttttttcaattaatataggattataccaatttgtttaacggtgtggttttgtaaaaaactttaggaccataatatcttaggttatgtgccatgtggcaaaatccatgtggttttgtgcaacttctccacctttcgattgatagatttttcatcttttgtcaagtagtatatactaatcactgtttgcttaatcgatccattccatcatcagctcgcctggaaccg

SEQ ID NO: 13151 - DNA, 1044 bp, Oryza sativa
  Intron number 1 from transcript LOC_Os12g22030.2 (locus LO C_Os12g22030) derived from phytozome v7.0 (chr-ID Chr12; p os 12391998 to 12393041 reverse strand)
gctcacatcagtggcctagttgccgcgcaggtatggaattgtttgtgttcctgtgtccttatgtaattgtgctctaaattgcatttgcctagttggtcgggttctcgatttattggtattaaattttagttcatcgcgattacctggataattcttactaggtagcatcggctcctaattgccacatgccatgatgccactattgtcgatggctttgttctgcgagtttagttgctgggtttgacaatgttacgaaatagtccctccagtcaaacttattagacattaggagaactaggattagtactctgaagtcccaacgtcaaataaatttgactagagactccctctgatttccttgtttcgtcctacatagttgatgcaacatttgtgcgtgcggacatgcccttcttttctgtatctaggtcagtatttcatttcaagtccctttgctattgtgaggaagagattggttgatgcctgggaattagttgtgatatcacaaataagggaaatgcttgactcagatagatattttaaaattacaacccggaatgacgggttgtttccctgtgaggttgtgactagtatgtaccctcgtggtacattcttttgtctgcgtttgtgtataccactgtctgaatgtgacaactgacatgtgtttgttgcaactagcaattgttataaaccctatcattttggcaattacccatcttccctatttgtacaatgatctaaattaagctgtcattaagaatttcctgggcttccaagaattgctttcactaaactgcttgtgatctctaagtgttgaaatacagtaattgatggagtcattgtattagcagttaattttgaacctattaacatacaaatggaatagggaatccattcaatctcaacatgagatgttatcatgcaatgaatcctatgatactcctgtattcagtcagggccttaaatcttttgaaacatctctttgctataattattactattgacattgacttttgtaggaggctgcaaatccttttcaatattctg

SEQ ID NO: 13152 - DNA, 861 bp, Oryza sativa
  Intron number 1 from transcript LOC_Os12g07110.1 (locus LO C_Os12g07110) derived from phytozome v7.0 (chr-ID Chr12; p os 3482956 to 3483816)
ttccatccctccacgccacgatcgccttccgcaaggtaaccgccctcccctcgccgccgcggctcggagcttgcatgcatgcacgcatcatcatcatcggctcatcgcagatgtagggtagggacggtggtaagtgcagcgccagcttgtgtggcgaaacctagagagagaacactgttacctgcagttccaactacccgttggattaactatccctctctgtcccataatactgttcatttttttggcctcttctgtttgtcccaaaataagtttattttgatttttgagtgatcattgcatcggagtttataaaaatagagaataaatgtattgagagtaagataaagttagcaataattgcattgtgattcgataaattatgggtattttagattttttggttttgtattttggtacgtgtgggatgaatgaaaaatgggatggaggtagtagcttttgtcaaattctcttcttttgggggcattgcatcgcgtcctacatgctttgatacattgccaaagcaatcacctagtcaatttttattttgtaatgagtcaatcagtaagtggagtggttgcacaattacgatgggccgcccaaagaacgaaccttgcagtttgtttgtttgtttgttgcatatatggattttcctttacatattgcaattctaacctaaaagttcactatacaatgggcccaaaggaggagccttgcaggctgcagcctgtttgttgcacgtggaatttgtttgcatattgcaatctgacctacttgaaatttcagttatttatttatgattctgttcctttaccttgtgagattcatatctttactatgcaggtttcttcttcagtgcac

SEQ ID NO: 13153 - DNA, 733 bp, Oryza sativa
  Intron number 2 from transcript LOC_Os12g07110.1 (locus LO C_Os12g07110) derived from phytozome v7.0 (chr-ID Chr12; p os 3484293 to 3485025)
ccgagacgcgggctgagtggcaaattgctctgcaggtaggcccctgtttcttcttctgtaattgtttcatatgctaatcttgtgtgttctatttctgtggagatgtgaagaaggaatgcaatggataaatacatagagcaaaattcctacgtagtgaaacatgcatagatagaaatgagtgttccagacaaggtttgtcctaagaaaccctgcaattgcaggtgttctgctctgctaatatgcttatctaaatagcggacaaccaacagtattcaactagtaacatcgtggcaaaaaaagtattgaagtagtaatacagaatgatagtgcagttctttatttaacgtaatcatgtaaattgagtaacggggtattcagatttgtcaatgggtggcacaacatttgattattatggtatgtgtgtaactgacagtggtaggttcgtaggtgtgacagcagcagacacaggaatggtatgggttaccgagcgtatatgtacatgctgtcataccgtgaaaagtatagtgcctcatgaagatactagtcattggaaatattgcacatgctgcatgcttatataaatcttaattggtttgtttaacatacatccaccctgactctgtttcctatttttcccccctattgctctctaatgttgagatcaaccttgttcctgttccattgagatctgaacttgagtttctctaagttactgttcttctatttgcaaggc

SEQ ID NO: 13154 - DNA, 817 bp, Oryza sativa
  Intron number 2 from transcript LOC_Os08g27720.1 (locus LO C_Os08g27720) derived from phytozome v7.0 (chr-ID Chr8; po s 16890083 to 16890899)
cctcgatcctttcatctccctcgacgagttcgagtgtacgtactgtaccaccacccatctaccttctcttctctcgctcatctcgcctccctctcttcccctctagtagtgtacacaagttgaaaacgtacgtctttgactgaatcccaaaaaataaatttgtcccttacaagatgaggatttttggattaattaaacggctggacggttttatagcattgagcacatactaatacatgttcttttaagtaagtgatgtcattaacttttttatgatgtttgatcatcttatttttttaaaaaaaatgattcagtatcatttattttgttgttatttgttttatcattaacggaattcaagaatgactttttttaatggctgtagtaaatttttgaataactgaataagacaaatatttaaatttcaatcaaaagttaacaacgtcatctattaaaaatgagatggagtatcaatgacgtacctacatgtaactacccgatgtccttagacaccaggtagcttgtctatttctagctattttatatcatattaatcatcatataactcaaaaattagactataagtaatttttattttgagttcaccaacggaggatattatgtaggcacacgaattaattagttggagtaaccagtgatcaagaaaaatggtttccaaacggatatatgttgagtatcgtgtaatgtcccttcaggtcaccaactagctctcatatgattattcaacagagtattcacaccttgttaacgttccctttctgtttctattttacagtttctccaccagccggcttcc

SEQ ID NO: 13155 - DNA, 846 bp, Oryza sativa
  Intron number 1 from transcript LOC_Os12g10630.1 (locus LO C_Os12g10630) derived from phytozome v7.0 (chr-ID Chr12; p os 5673557 to 5674402)
gttcttgagagacacacacacacaaacactgcaaggtttgttttcttatcagttactactgcttttgtggtctcttattcttcttattattatttggatttgttttcttttgttccatcttgtttgttcctccactgtttccaaccagtgcaggaacaccacctgttgtccatcaattggtgtccctcccacagcaaaaaggaacatacctagactactgctagacagtctaggaggtttcttgttttctcactaattttgattattagtttgagttgttgtttttttttgtgtgtatttatgctagtagaagtctagaggagctaggaggggttcaagctcaaaggcttgtccatgcatatgttaggctacaagttgatattgctaagaacaaattaagcaaagcatcccttgcttctagtagtagtagtactagtgattaaattcttgtgcatggtgattgattggtgagtagcccaaggagaaaaataagtttatttttttctttttaggctttggaccagaataagacctccatcttggaggttgcaactggtttattatctttgtttgtcaagatcccaagaacatctccatgactaatcctcttctctctttttgttgtctttatgtttgtatgtttgtctcctttttgagactcccaatgagcaatggattcttgcaatcttgattggtttatagtagtacttggatagttttgcaaattaagctcagctcccatggcgccatggcggcattcgtctatttcgtcttgctcttgctgattcttgctgtgtgtccgccattgcagcaagctcgggtagcttctggaagcttctgctgtgt

SEQ ID NO: 13156 - DNA, 831 bp, Oryza sativa
  Intron number 1 from transcript LOC_Os07g34980.1 (locus LO C_Os07g34980) derived from phytozome v7.0 (chr-ID Chr7; po s 20958431 to 20959261)
cctacacgtacgtcccaccttcacctttaataaattgtgccttgttgatttggttcaaccagtctttcgtcttcacttagtcttcagtcttcattgcctgattactactcagcagggacattctttcatcttgagatgcccttatctctgtgaaaacaaatcaaacgatgagattagttcagcattcaagcatgattttcattaccccatcaacaaaaatctgcatgcttttttgagagagatttgataatttaacataaatgggtttcgattatctgacatcttggcccactttcattcactcagatgatcctacatgtcatcctcacaagtgtcaattaaagcaactgtgtaacgaaaaaaatgtcaaattatcaaatttctccttttttttggaagggtttaagttgggatgcacaattattcccgtgtgaaaatcaaccaaaaacgatttcaaaaccaaagaaactgttcaccttcccctgtttaatatttaccttcaaagtgtcgtgtggccttcctattgtttccactagtcataactcatatcaatggatgtgcagcaagcaagttttggatctgggttgtaattggatcgttctccctcatggtatctatttcatggttgcttgttcatatttggatcaaacgagagagaaaaagaggtaaataactaaatattagtctcacaacattctcctttgcgtaaggatatatgcatctgattcaattatatagctgcccgctaagagcctatatgagtgacaagaatagactgcttcactattttctttttcagaacaagcaagatttgaactacgattgctgtcg

SEQ ID NO: 13157 - DNA, 576 bp, Oryza sativa
  Intron number 1 from transcript LOC_Os10g39570.1 (locus LO C_Os10g39570) derived from phytozome v7.0 (chr-ID Chr10; p os 21083120 to 21083695)
cctggcatctttttatttgttgctggcatcatcaagtatggagagagaacattggcactcatgcagtgaagacaaggcaagttttccaaaagtagatggagacgaggttgactattttggccttgtttcttttgtcttgcactcagtgccaggcattcgagagctctttgcaggacataccttgcaccagatggaacaagatcatcgggaagtattgacatcaaaaattaatgaagtgcatttgcccaagttattggagatagagttgtgtctgatgtatgatgatctgtatactaaggctttggtgcttaggacaaggaggggcataattctccggtgtgtatcccaggtatctctagtagttgctttcattatctttcaagtaataagcaacacaaagagatatagtggagcagatgttacagtgacttatgtgttatttgctggaagctttcttctggaagtttgtggagtatttacctttattatgtcaccatggacctgggcatggtccaaggctaagaaatgcaatggagttaatcacatttctgaatttcttttctccagcaatagtgg

SEQ ID NO: 13158 - DNA, 1007 bp, Oryza sativa
  Intron number 1 from transcript LOC_Os11g40650.1 (locus LO C_Os11g40650) derived from phytozome v7.0 (chr-ID Chr11; p os 23793713 to 23794719 reverse strand)
acacttctgcaattatcaggttatctgtgaggaaggtagtttcaggaatattaaggaagtggattacttgcatggctaaatgcatggcaataagctccgcttgattaatatagcattgtgattagaagtcaagtgaataaagttaccaatacccgttgaaccatctttccaacttgcatccacataacatctatttccattgagatgatttgaatatttcaaataagtacttaccattgcctcagcaccatgacatacttgagacggctccttgtgtttgccctgaaatttaaatccattccttgccttccagatatgccacataagagtaagaattgtattcaacgctgctaagttagaaccattaattattggcaatataagcaatgatgtgagccatacaagcattaggagggaaactatctatagaaacattccttgtttagtttccaaaatattttgcccaaaaatgtcacatcgaatctttagacacatgcatggagcattaaatatagataaaaatactaattgcaaagtttgcatggaaatcgcgagacgaatattttgagcctaattagtccatgattagccataaatgctgcagtaacccacatgtatgtgctaatgatagattaattatgcttaataaattcgtctcgcggtttataggcgagttatgaaattagttttttcattcgtgtccgaaaatcccttccgacatccggtcaaacgtccgatgtgacacccaaaaattttcttttcgcgaactaaacacaccctaaggatgtgttctttcccccattttcccaacccatctgtctcgttttccgcgtgcacgcttttcaaacagctaaatactgtgatttataaaaaactttctatatgaaagttgttttaaaaaattatattaatccattttttaaaaaattagttaatacttaattaatcatacaataatacgagcttcatttggcgtgctagggaggaggggttgggaaccgctgctc

SEQ ID NO: 13159 - DNA, 958 bp, Oryza sativa
  Intron number 1 from transcript LOC_Os11g17290.3 (locus LO C_Os11g17290) derived from phytozome v7.0 (chr-ID Chr11; p os 9622227 to 9623184)
gcacggcgtgggcgtcttccctgctagctggacaggtttctaacccatctttttttttctgttaactgaaatgctacttgtgctaagtatagttcagaaatccttcctaggaatgtattttgataatgctaaagtgaaacatgagacagattcttgctgctatattcttagtcagaccaaacatgtcaatgtgttatgcttgattggttattgaattaaaaaaaagttgaacgttcatgtgtacagatatatatgtgttatagtatttaagttctctcagaattttaatgtgtacagcatctaattatgtttgcttcaaattttcagttatcaattcttggaaagttggattgcctttttgtctgtttaatagtcccaatgagtgaacataatattgtctcgaggcattctttgaaaagtacagccgggtttttttttatctccatcacaaattcacaatgcttcaagctttgcaggatagatgctcattttgcttctgtcatcctctagcagtgataattgataatgctaaagttaaaaacacagattgtatactacaatttttttcttataccttttgatttgtgtcacagtggcgtttattaggaggaacctgtgagcaacttttgtatcaagtctacttctcgtgagaagagggtcgacaatgaaatgtcagtcttttatgcagtaatcgtgctttatatgacagtaatatatttttatagacatgcatggtttccgatacacattaaatgttttttctgttagtgcacggtgcctgattttatgttttcttagtaagatggttactcagtttacagttacatgtctttgtccctgcagtaacacaaaccttactttgcagtaacatattttattttttgcagtaactcatctatgtgctttatccttttttcatgcagtgggttcagttgttaaagacggcaaggcctagaaa

SEQ ID NO: 13160 - DNA, 903 bp, Oryza sativa
  Intron number 1 from transcript LOC_Os07g35140.1 (locus LO C_Os07g35140) derived from phytozome v7.0 (chr-ID Chr7; po s 21045026 to 21045928)
gcaagacgtcgcaccctcaccaaccgcaaacagtaacaaccaacacatatgctacacacacgatcatttcttctcctccgaataaatttgctcaaaagctatagttggagcttaactactattgttgtacgttgttataaatgttaaacttttgaccatattgattgtgttttttttttggaattattggagcttagattgaaggaagggtccatatcaattaaaacttgctagtagtaattattaattttgaatttgggggttacgtttatatactattaataagagatttcatgattgtccagcttatatgcatggtattaattttaatgtcatctttttatttaactcaaattctgaatacaatctatggcatgataatataatccacctaatcaacaaccagatctttcattttaacatgagagatctcatagtgcttaattagtataaggtgtaaacagatagatttgttacataggggctgttcagattatatcattttcaatcataatatttttttcggtaaagttacttaaaaaatgcctatatttagttgttgccaaacattggtaaatatataaaaaatcctgctaaaattttagtaatattgtcaacttgccaaaaatatcaaattttggtaaaatttattttgactacgatctgaacgccccataaatttgtttgaattggcaaagacaaatcatattattattactattactgtcatgtttggttgtgagctcacaatggtcaaatacgtaaccacttaatggtggtgttttctgtcagtgcattatcttttctacaaataacattgaaacaatctctgtatgatcactactaattttcttctttatttatgcaggaaccaaccacaggaagaccttagttatcgttcta

SEQ ID NO: 13161 - DNA, 258 bp, Oryza sativa
  Intron number 1 from transcript LOC_Os09g17120.1 (locus LO C_Os09g17120) derived from phytozome v7.0 (chr-ID Chr9; po s 10488104 to 10488361 reverse strand)
agtacattttttgtattttactaaggaacaggaaagtaaacttaaatatactaaataatcaggggcagactcctttagaaatagcagacagtaagattcatgaagggttttactatgtatgggtaatacacttctcactctttttgtgtttccactttccagtacaaacaaagcaaaataattaagtagttttgaattacagatccatatgttttctttgcagaacccagaaaaattgatattgctggcattaacaca

SEQ ID NO: 13162 - DNA, 709 bp, Oryza sativa
  Intron number 1 from transcript LOC_Os12g25690.1 (locus LO C_Os12g25690) derived from phytozome v7.0 (chr-ID Chr12; p os 14885313 to 14886021)
tctcctcaagatctgtcttaagttcttgagatctggtaagattcttcatgatctcgtgcatacttctgcggttgatctgtagttcgagtatggaccatgcaagctgtgtggtttcctgttttagttgttcatctcaagatacttaatgctgtgaatctctgaatttgcttgagattcatgccttgcacatatatgatcccttgctagattcagtaacttgatttactctgtgtttgtgccattaaatttgtttcctttcacccctgtttggaactatttccttttattttactgcttgctacagtgctgtcgtcgttgatgaattagaggcattattattctgctcgtaacttgaattcgttagctaaactttttgttagtgttgttgtggtgacggatctccatctgtcattctcctgatgcagtttgacaccaataggcacatattattatcatgaactgctcattggtttatcagtttaattgtgttcctcagaacctgactaaatgtatttcacagcctagcagtctttgcatgtttcttttgacatattggtcattgtgcttgtaaactgtgtatctagatagcttctattaactcaaaaatgctgcttacaagttctgatctatataattacttttagtgcttattcttcaatctcctgaaaatcagttttcattatcacagtttcagaactaagctgagaag

SEQ ID NO: 13163 - DNA, 917 bp, Oryza sativa
  Intron number 1 from transcript LOC_Os08g34370.1 (locus LO C_Os08g34370) derived from phytozome v7.0 (chr-ID Chr8; po s 21566933 to 21567849)
cgcctaagaaggtagcgagctgaaactatcgaattcgttctcttctagtagtagcatttggctcccagggttcgatcgttaggttgcgtgggtaattaatgcactagttcccctcttcgggcttccttgcgatgttctatggtggatttgcccctgcacactacgaaaattgcagcctattgctgttgtggtgctttgatttctccgtggaagggtggtattttggcaatctggggttgtatgacctcagaattcaactattagcaaatgtagggtccaactttgtgtataagggttacaactagatatgtcttcattttggtaatatgacagtatgttgatatcgccttctacttctaggatatgaaattaaagtatagctgcctccatttattttaggcaattttacaccgtgtcatctgaaacgtgtttataaacgttcatgcttttggttaaaagtttttgtttcctgttactttttgacacgtgagctgtgagaaactcattgtctgcatcgcctgaagtgtatagaactttatataactctgggtttcttgatggttcagaaatctagtgtagctgtatatggtctggacatttgtagcatcactgtacaatctgctgattcaattttggactatctgtataacacccttttgttatgctttatattacagaccagctaatagcacaaatgtttgattcactgttagcaccactgtatattgtgactggttagaatgactacaattgttgtcatgggtcacccagaaatttgagaaatacaacataagatttttagctttcttgagaagaggtggatggcagagaatttggggtacaggctgaaatttcatatcggttttcatcattatataatcttgataagctcgacattgtaaaagttcttggactag

SEQ ID NO: 13164 - DNA, 397 bp, Oryza sativa
  Intron number 3 from transcript LOC_Os10g26570.1 (locus LO C_Os10g26570) derived from phytozome v7.0 (chr-ID Chr10; p os 13780447 to 13780843 reverse strand)
acagagcacttttgaaggtatgttttattgctttgacattgagcaatcagatttacctagacatggataagctcaaatagacaaatactcaataacaagtacttcattagactctggtcatgtcaagatgtgctctggattttgttttttcgttttcggaatacagtgcatgagcatggataacctgaacttagtttcaatgatttttaaatgcagaatcatatctaagccatgtggcggtaggaatttttcgttcgagtattattcctgctactctaaaggacatgttgtagaactgctcgttgtttactttcttcttgatacaataagaagttctcattgcaaattttttccttctttaggttattaagtttgcttcaccaacatctgctggagc

SEQ ID NO: 13165 - DNA, 822 bp, Oryza sativa
  Intron number 1 from transcript LOC_Os09g37040.1 (locus LO C_Os09g37040) derived from phytozome v7.0 (chr-ID Chr9; po s 21366843 to 21367664)
gctcgaggccgcctcccgtgtccccgagctcaaaggtctcgccttctcttaactgcgtctcattaacttttcctcacctcgatttctctctcttttcttactgccactttactcgatctatgccacacacattgtactgccaagaagggatggacaaatcccttttgctgtttgtggaaatcgcaaggtttttgggggtaaaagctgcgagttttgagtggttttggatagatctttttatatctaagagaaaggcatttgttataaacttggatatactgcctttttatactcagggtatcatggaattttagatggtactgttctttgtttaggaccgcctgtgcctctggagattagacagagcatatttcttaaaaaagtgcctttaaatattctttggctgatgtaatagccacccactgtcaatttgttatccccttttccactttgcagtcatttcattggaccattttatatcccttttgatgctactatatggtgttcttgatgattgttggtagccaaaggaattcttttcgggcttcaaaaggctaaaggcgcctgcttgatgatcagtatcatgaatctgttctttcagtcctgtttgagcaattcatttgatactattctttggtcgacagtacattcttagccccctttttttttcgggaatactgttaagtcttgcatatctttgtattaagattgaggagtttgaccacatctgaacattattagcacatggtattatcacttactagtatgtgtaatatttaactttgaggtttcttggtgcagaaaattcatcaaaaataatcc

SEQ ID NO: 13166 - DNA, 593 bp, Oryza sativa
  Intron number 1 from transcript LOC_Os12g06750.1 (locus LO C_Os12g06750) derived from phytozome v7.0 (chr-ID Chr12; p os 3283441 to 3284033)
tcctgcgccctcacatccacacttgcttgccgtaagttgctagtctatccgttccaaaacataaccatctttctaatttaaactgcaaatgtagctaatttaaactaaaaagttaactatattttgaaagatggagcattcattactcttctgtgtttttaattgttttcacgattacataaaagacaaaacacaccaccaccacatacgcacatataatatcatttctttagcagcgagagataatccataaactctcatagaatactaactctctccgtttaatattataagtcgtttgacttttttctttgtcaaaattatttaggttcgatcaagtttatagagaaaattacaacatctacgacacaaaattagttttaataaatttaatattgaatatattttaataatgtgtttgttttgtattgaaaatatcagtatatttttctacaaacttgatcaaacttaaaaaaaaattgactaagaaaaaaatcaaatgatttataatataaacggagggaatattaattaatggattggtattgttatgtgcagggggtgggacggagtgcaccgttgaaacgccacac

SEQ ID NO: 13167 - DNA, 834 bp, Oryza sativa
  Intron number 1 from transcript LOC_Os11g43760.1 (locus LO C_Os11g43760) derived from phytozome v7.0 (chr-ID Chr11; p os 25962688 to 25963521)
cgaatccaggtgcgcattttgattttttctgcaaatgcagttgcagactctgcagttgcatttgctcttacctgcttgattatcattaagtctggttcgatttgagattatgtttatgtttcaatcatgcatgaagtccttgtttttcatggtgatgaactgatgattgatgtgggggctgcctgttagtcttgaggaatccattgtggttgaaagtaataaagatgaaaaggtggctgattggggttttgggaagttgtgtgttcctgatttctgggatcaattcatgcatgatggattaatgcaaattgcttaactggtcataaagctgatgtatgtttgattaaggagtaactgttcctgaatggccatctcccttatgtccaaattgatggctatttactcgatggcaacccagaactagataaattgctgttgcataaatagctctgttgaacttcaggtgaagtaactgcagttagttcaggttgtgatgatgcctcttatggacatatcaattctgttgaacatctcaatctctgtccctatgttctcatgcagaactagataatgctgctgcatcagcaactctgttatgtttaagctgcagtaactgtagtagaattatgaaatatcccattttgttgtctgaatgtccatttaaacttttagtggattatttatgaaaggtgtttagctcacatgtcatatacttatatatatcctgaaatttgaaaaactgcaatcggttcattacttttttgattgacatatttctcttgtgaacaattcttttcagggcaatctgcagcacgagtacactggtcgcagttg

SEQ ID NO: 13168 - DNA, 901 bp, Oryza sativa
  Intron number 1 from transcript LOC_Os10g07510.1 (locus LO C_Os10g07510) derived from phytozome v7.0 (chr-ID Chr10; p os 3991182 to 3992082 reverse strand)
gctgcgtcgcccacatcttccacctccaacaccaggtatatactactcatactcactcgatctcctcctcctcatcgtcgccgtcggtggcggcgagtcatttagatgttcgtcatggtggttgtgcgatcgatcgagcttctattttggttttggttttggttttggtttcttgggtttgatttggttggtttttggaggaaggatggatgtctttttcttgaagaaggcaaaggagtccttttttggggaggagagaaggctagcaagctaagcaagggagttaatctggagaaatggacttctctctttctgttactactcactactactcaggcctaccagtgatgatgtgcacatctcatcatccatctcatcattaaatcccatcatctactctctctcttgttcttgctttctcttctttcattctttctctgaatcttctgatagatagattgatagatagatgcatgatgatatccccatttatcacatcattttatatcatgcatcaggttgttgtcccccccccccctctctctctcttgctctgaaatcaaggagggtatgcatacatgcttggatttcacacccacaaaagaaaaatggtaatttagcaagccctagctaggaattaggatgcatcaatctctagtagttcttgaagctgcagctagtatagctcccaaccatttctcctcttccttttctttactaatatgatcagcatttcattaagatttttttgtatatagtatagctacctacattttctcttgatctgattatgccaagtactaattttctgtccattttactgatgatgatctggttcaattccccatgtgtatatgtactctcaggtggcaggtctccagtccgagctgaactacctgca

SEQ ID NO: 13169 - DNA, 585 bp, Oryza sativa
  Intron number 1 from transcript LOC_Os11g07560.1 (locus LO C_Os11g07560) derived from phytozome v7.0 (chr-ID Chr11; p os 3823384 to 3823968 reverse strand)
aggtgaggggaaaggggaggagagggaagaagaaaggaggaggagcgaaagagagagaatgagcggtggggggaggcgttgtgggagaggaacgaaagaagataaggacgagataaaaaaaagtcgttctcgctccctccgctcggctcggctcggctctattaatgtgccggttctagacccaaaaccggcacctatgtgtggggcccgccaacggctagtgtgagagggagaagattaaatgtgccggttttgggtctagattctttgacacaggttttaggtgttagtttcatttaaaaactggcacctatttggacataaaggtgccggtttttgaatatgtggcgcatgggggtgggcgcatgggcggggaaggcattataggtgccggtttttggtgtgccggcacctatagtggcgacacctatttgcctttttgtagtagtgtagtgcactcagaatgtttcactatatatagatcaaatgtcgcagtgaattaaaatattcttttgcaacaaatcacatacatattatggaaatcctctattaaacgaatccattttattttttgtttcacagaaa

SEQ ID NO: 13170 - DNA, 633 bp, Oryza sativa
  Intron number 1 from transcript LOC_Os10g10360.2 (locus LO C_Os10g10360) derived from phytozome v7.0 (chr-ID Chr10; p os 5713677 to 5714309 reverse strand)
gatgtaatttctgctctctattttaaagattcagtttcttcactctaccaatgatgtgctgtttcgatgtttaagtttcagcaactattttcttggtaggattatgctctaaattttcttgaatctagagggtaataatggttgttaacgacctggtctgaacgagaaaagaagtaatccagcaagattcaactattgatgaagggtgtatagtataatttcgtcaataatactgaaggggatattttctgtgttccttttctgcttgaccatatctgtattccgtaagctttttctcttactttgtaccaccactcttcgccacgctgtttgtctccttcatgattttccatgcccacattcgaagaaaaaaaaaattctgctggaaagttatttatctccattgagcagagcagcaacttctttctaaaattctctccatagatttaactgagattgttatttgactttgccctagggaagatatctattgccctctcattaatggatgtcaataacataaggggatctcatcaagtactattaaacaataaggacagaacaggatgatatttactggctatgcaactttctccatctaaattcatggtggattcattcagctaactaagc

SEQ ID NO: 13171 - DNA, 902 bp, Oryza sativa
  Intron number 2 from transcript LOC_Os08g43590.1 (locus LO C_Os08g43590) derived from phytozome v7.0 (chr-ID Chr8; po s 27567581 to 27568482)
gttctttcatatttgttttcgagtgtaggtaagttccgaaattttgtcggaccaactcattttactctctagattttgagaattttgattttcattactgccaggtgatatattattttgcagagtgtgagattggaaaaaaaaggtttgtcgtgcattgccttttcgacagaattgtcatcttgcacatatataatcaatttacttatgtttcgcagcatggactgttccaaaccaatctactcgctgaatctgagtctactaatctagtagtttcactcatgtcaattgttcatccatatatttcctcagtactttatttagacagatcacaatgtatcctcttgttgtttagttcattgaacttctgaagttctcactcccagcatgggtcttatatttactcttgagtattcggaagctacatctacaagatcttgttcagagatcttccaggatgatgctaggctgatattagatacaaattcaagaaactagctgctttcaaatatttgcatgtcaaaatggatccgatatttactcttgagtattccgaaccaaacaccaccctagcttgagatcgttggatcgagattgaactgttggagttccactgctctcatcgtgatccttccacaaggattcaagtgccaattattgcttacctcatgactgctgcgaaaattagtctcgcggtgcagctatttacttgttggttaactgcctatatatctggtatgtgcataactgtcccatgggcaatttatttctttacttgttatattccaaaaactttgttagcaaatattttttttgcagctgctgttgacattgttcaacaaatatttgctctactttctgattagcatttaattttctcttgtccaggaagttgacttcag

SEQ ID NO: 13172 - DNA, 676 bp, Oryza sativa
  Intron number 2 from transcript LOC_Os07g10970.2 (locus LO C_Os07g10970) derived from phytozome v7.0 (chr-ID Chr7; po s 6019155 to 6019830 reverse strand)
gaacagtgagaaataaggtgcgttttattttttcatatattctgggtgctatagaaatgctacagaaacttctgccatgtttcatgttttgcctatttcggcacatttgaacttctgggtgttcatgaatgaaatgtggagcaaagatgatggatggtggattagtgagggataaattaaatattatatgtaataaagctaataaatagctcaggttaagttatttcagcaatgctgatgtagaaagtttttgaagaaatcgtagtttggaaataatcgatcgtataatctaaggcaaagaataataatctgtttattgttcagtaaaagaatgaggtggccattttctagtccattagattaggaattgtaggaaaaaattgttttattttccgcatgttgatctttctgcacagaagggtgcaacgaggaaaaatcatatgaagaccttgactagctgcagaaaaatgcattctctttaattggaggtgcattggtttgacttattgactactcttcctgagtcttcactcgttttcccaactaactccgtgtcttccctcctctcatcatataatagttcatcagaactgtttcttgccacttcatagtattcctcctttctgaatcttgatattgttctatagagttgtccttggtagatacctggtacaag

SEQ ID NO: 13173 - DNA, 1030 bp, Oryza sativa
  Intron number 1 from transcript LOC_Os10g03740.1 (locus LO C_Os10g03740) derived from phytozome v7.0 (chr-ID Chr10; p os 1688030 to 1689059 reverse strand)
agggtacagaggtatggttatttgtattacttagtgtatccatccaccttgatttaggtatcaatatgaaaaaattgaaacttaagcttttcttctcgtcatttcataattgcaatggtttagtagcctgaacctgtaaaactaacatcgcatagctaattcatatgttgtgaaaccatgatgtattgataatatgatggatgttatcaacacttgatgcaatctagttcatgtactccggtcatttgtgcattattcaactagccctgaagtttcttagttcgaagtttgatctaaaaatgaaacatgatcatttctcatgtaggactttacatgttctagtctagatgcaatatcagggttgccaactgaatgcattttgtccaatatctgacagactattttactttagttgtactttttgaaagagagggttattggtgattgtatgtcctacacctgccccaaggccagattttttatggctgcaaatacatgtgcatgctatttgtaagatagtgaaagaaaaatattgatttgtataggctgtcattttcgattgtccaatctttcatgtaatctttatatttcaggattaattgtatattgcattttacattttagacagtatacttggttgggatgtgtaatgtgttgggtgttacaacacacagacattatgctagcataattttaatgttaggagtcattaaaagacaacatacaaacagaaaattcttctggggaattgttgaatgtcctactgcttcctgatgatatatttgtgttgttttttttactggttttggacttccatggaaaccatcctgacagtgagttgcatgtgctcgagagactcttggtgaaaacaaacaagtagaacattgtttattttggtcttttgttgacatcagttcattttctactgtgatcttttgccatccattatcttgaagctctcaatttagttgataagttttgtgattgaggaagtggtgtttttgcagctgacgttcgaaaacaatttgca

SEQ ID NO: 13174 - DNA, 907 bp, Oryza sativa
  Intron number 2 from transcript LOC_Os12g03080.1 (locus LO C_Os12g03080) derived from phytozome v7.0 (chr-ID Chr12; p os 1162258 to 1163164 reverse strand)
aaggcaaaggcttaacacctatttttccatatcaggtaccattaaccgggcgtcatctgttacgcttttatatgtctatcttgctctgcacgtgtaaaacatggttgaacttagaaagaaaataacaatcaggcatacaaacatatactagcgttagttttcattgcataaaaaataattacgaatattgcacctgaatcatttgaaattcagtatgtagcatctcattctgaaatttaatatgtaggatttgggccaaagagaagcttccaagtttcaaacatatgggcatggaagctgctgtatggattatttaagattgtgggagacaagttagcaccacttgtaataagagagtatagttctcttatgggtgttacgaaagatctccaggagcttcaagatttagttgaggagatcaaaagcgggctacaggtagcaggtgataatgcaattggtaataaaccaccatctaattggctaaaaaaattgaaagattttgcttacgatcttgaagatttggtacatgaatttcatcttcagtctgagaaacatgacacagataatgatcgtgacaagtatgctgtgctcaaatacatgcgcacaaaaccaaaactagccatgtttcaactcaaaatggccaacaagataaagacaatcaaaaacagatttgctgcaattgtcgagcaaagaggcgatgtcaatactatattgaatgctataccaatcgatcataatgttcataaaaacaagattatcagtgagccatccttattgggcaatgttgatgactcaaaaatacatgtgagatgaggagaagcacaagatcatatgtaagttaatagatgaccaacagaaaatctcaatagtttcaattgttggacttggtggaaccggtaaaactact

SEQ ID NO: 13175 - DNA, 439 bp, Oryza sativa
  Intron number 1 from transcript LOC_Os10g37830.2 (locus LO C_Os10g37830) derived from phytozome v7.0 (chr-ID Chr10; p os 20181253 to 20181691)
gcggctcaaaggtatgatgaaaatttcccccttttgatgtttcttttctttccatgtagtagttgaaagttgaaactatatgaaacacgttcgtgggattgaaatttttttttgtctgcaattaattgttggtgattagtcgctgttttttttttgtggggattgaaacgttttctctttgtgccatgccgtgtgttttaatcatagcatgtttttgtttttttcatttgcaaagtgataaacctgaaccgctccaaaactaaccaattgtcctttttaccttacgataatcgtgattcggtacttttagcatccaaaggacagagattttttttagtaataaaagtatttttagtagaaaacgcttagctttgctaaattttctgtcttcttgttaattgcaggagttctggctggagaagagcaaaggcagggtttg

SEQ ID NO: 13176 - DNA, 961 bp, Oryza sativa
  Intron number 3 from transcript LOC_Os11g10980.1 (locus LO C_Os11g10980) derived from phytozome v7.0 (chr-ID Chr11; p os 6056148 to 6057108)
tcaataagctgtgccctgtaagttgacggcatgacagaaatgattggcagtatcttttggcgcaaatactttgatacgcttaggcaaataggatttaggatatataaaatgtgcctatttgatccttttgtgttactttatcaatttacttaacagtgacttggtggcatgtttacagtttactaaaaagatcagtttccatcattaaatgtgatatgtttttctattatttaggttttagtttcaatagttaacatcagtatctgtgaactcattttgattttcttatgggtatttgtaaatgcttggatatgtaaacattgctttttctttaattactacccagtatcccacatactgtatgtctttcttgagatgctgttatatttctctgttcctatttaattagttattgtcaagtgttttatgctgttaggtacaaaaactgcgcaaaatgcttcctgttgtagctattccttggagatatgcctttaccaaagattccatttcttagttccatgtgaatgcaattccaatatatttgccttgagcttctgaataacaatttttcagtgaaaactaaatttggccaactttctccatttgggatgcatattgtactacttcatgtagagatttatgttgcttagatttatgctagtttcctcgtttgattttattaaaacaatgttaccagaaatggtgtagtgaatggtgaagtttgaatttcatatatttttgaatatctggtgttccgaagactttctaatctaattgacaatctgttattgtgtcctcatttttaatgatcacaatttacaaatccacatgtttgaaagttcatgccttttgttattcagttgtactatccgatatttctgctttctccttttaagttaagatttgtgctaagaggcatatcctattaacttctaactaattttaatacactatataggta

SEQ ID NO: 13177 - DNA, 754 bp, Oryza sativa
  Intron number 1 from transcript LOC_Os08g34130.1 (locus LO C_Os08g34130) derived from phytozome v7.0 (chr-ID Chr8; po s 21395581 to 21396334)
ggccgccagttcaggtgatccggcattctgaaatttgcttgaaaagaaacatggaaatctgcacggtcatgctgttttgcgtctgctccttgatttgttgataatcttcgcgcttgatgaattatgattggactactttagtggcgaagtaacaacagaatagattgaatgcttgatgtttttttagggtagattgaatgcttgatgttggggagagagaatttatacatgacatttcgatttttaagcatttagtgaaatttggccaaatttcattgtgttgtgtgctcctagattgcagttacaacttgctacaagaaaataattggataaaaaagggaatcacgaaaagaagagactatgtatgcatcatagtgtcttatgacttaagaatcaaaaaacgaattgatcaaaaaaggaatcaccattcaccaaaatactaagtatgcatcatagtgtctggaaagaggtggcgatctatttttattttttctaaaaaaaaagagtggcgtctatttttatttttgcgaaaccttttctttttattgcaaaccacatgtactatatagactaaggatcttgcattcctaaggttcttgtttgctaccctaggtacatcatattttggtttgttcaaacaggagtactgggtttaaactattgttacagtgggcaaatcttctctcttgaactcttgctatcttgaactggacattgcttactaacctagatgttccaaataacagtgagttgg

SEQ ID NO: 13178 - DNA, 821 bp, Oryza sativa
  Intron number 2 from transcript LOC_Os09g36200.1 (locus LO C_Os09g36200) derived from phytozome v7.0 (chr-ID Chr9; po s 20868967 to 20869787 reverse strand)
tccgctactacatcttccgcaaggagctccccgtggtacgtacgtggcccctttcctcgtcgctcgctttactgatgctctcttcttctttcagacttggagaccacaagcttttttccttttttttttcccctttgctcttttcatttttgcaatcaagacgtactctgtgtcaatgtccctgagataattgatgggatccaataattcttgtctgctaaagcaggcaaatcccttgactttctagatctgattttagacactgttattagtggcaccaaaaactgatctccaacaagtaggggaaacaattttaatctctcagattggcatccatccatctgttacatatcaattaaatcgttataaaaaaaattaaaatatttgataatatagattcacatataatatgtaagtttaaattcgacttttataagttgtaataaatataaccaatcaaactctaattagtttactatgttcactgttaaatttgttacttttattataacttgtataagtcaaatgtcaaatttaaacttatatgtttgtggtgcaatatattatatgttaatctattttatcaactttttaagaatattatatactagtgaaattaatcaactgtgttcaaagttgcatgcccacttgacacgtgccaaacacgacttggaagttcagatgtgagaataaaaatcgaaatttttgaacagcttcctgaaattgattaattcgagcctaatcgcttgctttggttgaccgttgactcggcgcgtgttcggccaggttctgaaggcgttcgtccacggcgacggcaacct

SEQ ID NO: 13179 - DNA, 1046 bp, Oryza sativa
  Intron number 2 from transcript LOC_Os07g33540.1 (locus LO C_Os07g33540) derived from phytozome v7.0 (chr-ID Chr7; po s 20039876 to 20040921)
aactgcagttacagtaaatttgtctgtgtactcaggcacgtacataaaactggagctaaccttctccacttcgtatgtactaactcgcttctagttcttaaaatgcctacctatttttccttgctcatattctgcataataatataccaaggataaaggatgcatgttctgcatacatggtctgtgctgctgtgccaaggctaaaactagaccttataagatcgcatagtgggatttcctacaggaactcagggagaactcctgtaattgttgactgagtttcctgcagtcacaaaaagaactaaaaactagaatattgttgaaaatgtcttattacataggccatggattgtttccttaggaatgtccaagttgttgccaccagttcttttcaatcttttgctttgcttgctgtgcaaaatttagtgctgttgtatgtaaacattctctccaactatgagcaaatagtaacgtctttcttctacctaatattagatccaaagaaatattcagttcatctctttctttgcttctggttatgtacttccctttttgacttttatttttcgagggtagtcatttatgtcgcacttattttagggggaaatgtgattctttgactagcataaatgcagaaattctattggctagcatcattttttcttttagttttacaacttgatgatgaactagcttccatttattttcagttattcacatatctcgtgctaagctgctcctattatgtggctagggatggagttttttttacttataaactaatattttataagttatcatgaatcaaccttgctgctctggtgacaacaacgagagtttgttaaaagaatcctatactgtttctttatgccccattctctcctttgctcatttgtctgtcgtatgacttttgagtaagtaatatattccaatgggctacctacgccttctgttgagttctaaagaaaaatactaaatttgttaaatcataatcccttatatatcatgcagattgcagaaggaacaactctgtattacctctatat

SEQ ID NO: 13180 - DNA, 463 bp, Oryza sativa
  Intron number 1 from transcript LOC_Os08g40860.1 (locus LO C_Os08g40860) derived from phytozome v7.0 (chr-ID Chr8; po s 25851365 to 25851827)
aggaggtcgtgcaggcgcacttcaacaagaggctggtaaaatcgcacatggccttcaaactaatttttgacaaactctttgatgcaaagattgcaatctgttttcttcctagttagtgagacatattagaggaaaagattcatgttgttctcttgcttgaaatgctcttcgggagtgtggactctactactctagtggcgaaatgttgcttggttagtgctcatgtttaagtttttctgtgtttctgcccttgcaagaaaatagtatcatgatcttaatatgtcttatttatgtatgattagtcacttttatttttctttaagttcacaattttccctcttgcaatcttttctctcagtttgatgtcatatgcagttggcactatatttagggattccttttttgtgtatgaagtgaaactatttgttccccgtttaccaggtttattccgagtgctcagatc

SEQ ID NO: 13181 - DNA, 922 bp, Oryza sativa
  Intron number 1 from transcript LOC_Os11g27264.2 (locus LO C_Os11g27264) derived from phytozome v7.0 (chr-ID Chr11; p os 15219938 to 15220859)
ttcgacggcccattgccattctccctcgaaaccgggtatgtatatatactgaatgcaaagcgtgagtacatcttgcagtctcaatatttttttttaataataaaggattatattaagtatcgatatgtatcgataagcatgatattgttcattcaccaagcgctatattcaccggtgcaccggagaagtagtttgggatggtccaagctaaaattggcaaaattaccgatccatatggaaaagaatggtttaaagatgatccaaaaggtaatcatgcaggagattgtgtcatttagcatgtaaaacaatactagtgattgggcagcgatgatgggaaactatgcacctaattaagatacatagcatcgaggtatcacacatggtactcatagatatcatcatatcaaatcagatacctaagtattagacctgataccccttagaaaaatagacataccaacaagttctaaatgaaataataaaacatcaaactttagtttggatagatccctattgctactcatgtgagataaacacctctaaagagagtgatattctccaatctatgacttgccccaatccaaataatagtcctcctgttggaataaaattcaaaagccatagaaagaactcaacaataccacattgatagggttagatgaatttctaatgcaaacaatttcatttctatttaaccataccgctgaaaatataaaaatggcactaccaaaaatttgtttttgaagaaaaggtatgggtccgtatatttctccaatgaacgcagtcaaaaaaaaaaaaaagaacgccggtctaccactggtccaagaaatgacaaacatataatgcaagccatggatacatcatgtgcacacttatgaccgctgcaggtacgtggaagtgaacgagagcactggcgtgcagc

SEQ ID NO: 13182 - DNA, 888 bp, Oryza sativa
  Intron number 1 from transcript LOC_Os11g29690.1 (locus LO C_Os11g29690) derived from phytozome v7.0 (chr-ID Chr11; p os 16742065 to 16742952)
ggagtacccttggtctgcaatttgattggtcaaaagtatgtcccttgagcttcgatgccagttttatactagatctttatgttgttttctcttgtttgattgaactattccagcttgtagtgcttttgatattgtctagtgatacttaagtaatagatagattttacctttccattaggatttctgcaattgttccagtcatgctgaattcatttcaatcttggtattattatgaatctatataattccattgcagtatataacaaaattattccctacccattaatcgatataatgcaaattctgatcttataacataaggattaaggcggtgacggaatagataaagatatgaaaggaatagacttgtatgataaggacggaaaatacattgttttggtgacagaataggaaataaatagcacatgttagggtaaagtcattaaatttacatcctaaccttttatatttatcaacaaacctatttaaactatgcaccttctctctctttttttaatggaggtagtagaactctaagacatgctcacatacgttatttttaaataattgataaaaatctgacctctatgcccaagtgggatatacacagccaattctacggacttaaggaattttattttagtatggctgttctgcaagctatgtgcctgaacattacaacccctgaaagtaatgtcaaaataatctcacagtgcttacatcatataattatatcatcttgttcagcttgaaatttgaggcatactggcaatcttttgacattacggagatatgcaaaggttgtacaattagctcttcctaatgacaacttaaccaaggatgctaatgacttcttgtgtaaaatccttctgtcactacagcgcaact

SEQ ID NO: 13183 - DNA, 898 bp, Oryza sativa; identical to SEQ ID NO: 12192
  Intron number 1 from transcript LOC_Os10g38272.1 (locus LO C_Os10g38272) derived from phytozome v7.0 (chr-ID Chr10; p os 20408505 to 20409402 reverse strand)

SEQ ID NO: 13184 - DNA, 968 bp, Oryza sativa
  Intron number 2 from transcript LOC_Os09g39100.1 (locus LO C_Os09g39100) derived from phytozome v7.0 (chr-ID Chr9; po s 22445963 to 22446930 reverse strand)
cagattcgaccctgtaagtgtctcactccatgcatataataccagctgacagcatgcatctgattagttattaggagtccatccatatatatattacaatgacaattaataacggactattagagttattaattaacaagaaaagtttgctgatatgaaagatagaaactgagaaagggaggaagaatgttgctacgcatgacaacaacttaacatcgtttcttaatatttatataaaaaaatactttgttgcatgaggatggagaaaaactgattgaaagataataaaaagtatattgatggttagaggatttttgtcgtctaaaggactaattaagagcccatacctacctgtgaacatgctccatactcactcgggcctcatcttttcgcttatgcttatgcttatcagctaaaatttaaatttttaaccttaaatttagaactgattttgaggttttctaattgaagtttattttttagcctttgcttttagatcgataagaacacgtatataaaatttttatttacagattacttttcgtttgcaaatatattatttcgcttaagcgaaacgatggctccatccgtttcttttataagtcttagtatcttcatctctcatctatattcgctaacatccatatgaatttggatacaagtatatatgtgtcgatcaatttaaaacctaaaacatcttatataatgtaaaaaggaggaagtatatttgtaaggatataagtctaatggaaacaccacgtttattttttgaggcatagaaattttccaaaaaaaaatatagatagtactgtataaatacatttattagcatatatgataatagatatcgatcaaatagtagtagctaaaattgaatttctccactgtttactaacaattataccgctgtacatatatttcgtacacatacagaggaagcctccatttgtgaagatcgacggcgagtg

SEQ ID NO: 13185 - DNA, 412 bp, Oryza sativa
  Intron number 2 from transcript LOC_Os10g37730.2 (locus LO C_Os10g37730) derived from phytozome v7.0 (chr-ID Chr10; p os 20117152 to 20117563 reverse strand)
tgaacgtacggaactactgcgggcaggtagatctttgggggatattatgggggttgatccttgtgttttagtgctatttcgtgcgtaggaatcgaattaatgtgagatctatcgtctagaagtaatggaattagaagttcttatgtcgtatctcaagtaaaaggagtgtgaagattcagtcttttggttgatttcttagctctatagttagctatggatacataaatttatttgtaatctgtggacctgagcaaggtttgagtcttttagtgccttctgaggctcctgctctatgcttacacactggtataggtgttccatttctattcatccattttatctttatccgagttggaacattttgttgatatttttcttcgtttatttggaatggtggatgaagactgcgttg

SEQ ID NO: 13186 - DNA, 461 bp, Oryza sativa
  Intron number 1 from transcript LOC_Os09g18530.1 (locus LO C_Os09g18530) derived from phytozome v7.0 (chr-ID Chr9; po s 11361629 to 11362089 reverse strand)
aggcaagacggggttgaatccaaaataatatccttgtaagtttaatatatattgataacttcattgtcttgattttgaaatctttaattgaatagtttgtttttttctaaaagtactaacatagactttcacagagacctgtcttacagtaatttacatggtgcaatatctgctgatttttctttgttacagtcactccgatacttgtgagtacaataaatcatattctaacttatttggttaccctaattatattgtttacctggaaacaccaagacttatatttcaggaatttgtcatacaacaatttgaatggatcagtacctcattctttaacaagcttatcatcccttattcttctgtaagtatttgttttttgatcatcgacagaacaacctagtataagtgcatataatttgggataattgttttcttcagagacttatcaggaaatcattttg

SEQ ID NO: 13187 - DNA, 749 bp, Oryza sativa
  Intron number 1 from transcript LOC_Os12g12850.1 (locus LO C_Os12g12850) derived from phytozome v7.0 (chr-ID Chr12; p os 7099679 to 7100427 reverse strand)
gcaccttttgtctctctcctctcctccgaggtaaggtaaagcttctccccccctatccccatggcgtccatcctagctcgttttctctctgtaaattatatcgttcttggttggttcctgttgttggctgccgggtgggggggattgtggtgcggaaaatttgagttcttggatggattagcgatcttttttttttagttcttggtattggcgatccctagagatgttatctctttcctgtatgggaataaagattacttttcttttgtttgtttgggtgttggtgttgtgaggatgtttgtggatagggatgctgtgttgtatcggtgatctttatccaattctctatcttgggtgtgtggttcagtgattgaacagatgggagtggtagttctttttgctgggagttttgtagcagtgcaatttccttctgaactaatcatagagtagaaagaagaggaaacaaatatatactggagaaatagctatttatgatttgcaatttaatgaatatctttttagatgatgtgcaaatttagtgaagaagatgaagcacagtatctttggtttagaaacgaaagaataataagcagagcatgttttgtagtgttattgtagattccatactctccattgtgcttatctctgagcatttagcttacttccattggggatcaagtatctagattagtttctaactatatcagaattgttggtcccgaacaggtttggggaagctacttctgacc

SEQ ID NO: 13188 - DNA, 1023 bp, Oryza sativa
  Intron number 2 from transcript LOC_Os10g22570.1 (locus LO C_Os10g22570) derived from phytozome v7.0 (chr-ID Chr10; p os 11640440 to 11641462 reverse strand)
ggaaattcctgcaggtatataatggttatttggtaaaaaaaaaggaaatatttatgagatcatgaacgaaaaacctgctccctattatttttgagtttgtcttaactcaaacttcttaacaagtttataggataatattatataatatctacgaccttaagttagttccattcaatctattttatagtatatccgtatggaatggaggtttaaatgtttagattaagctttgcgagcaaaatatatagcatggatacgaataagctgttaggacggtagaccaaataatccatggtttgtgtgtacgagctagctcagtctaagttagaaatattatttcctatatgcgctactccctctacgtgacatgcatttgacttttctttatatccaagctacaactttgacataacttttatgaaaataagtttataaatgtaacaaattatgatatcatggaaataattttcaagacaaatctgcacatgttatttttatattttaacttaatatttaaaatgttttattatttaaattttcataaatttaaaaagtcaaacgccaagtatttttaacagaggccggcagtaacatttacaaagatgaagattattgtagtgtgtctaaatatggaaattctgatttatcagttattattcgatccattttaagctactacttcatccgtcccaaaatatggcaacttactattgaattagaaacagcttaatagcatgaatttggacaatctaaattcatactaatttaatactccctccatttcatattataagactttctagcattacatatattcttgaatatagatgttaataaatctatatgaatgtggagaatgctagaaagtcttataatatgaaacggatgaagtataagttagctatattttgaaacatatggagtatttatttttgtgaaagatagggttttgtcactaaataaaaggtcgaaatttctttcggaaatgttaggcgaagaccacggtttcagtgacggcagacc

SEQ ID NO: 13189 - DNA, 461 bp, Oryza sativa
  Intron number 2 from transcript LOC_Os09g12270.1 (locus LO C_Os09g12270) derived from phytozome v7.0 (chr-ID Chr9; po s 6990207 to 6990667)
gccgcctccgcatttgccaggttcgtcggggccttctcttcttcgtatgatcgctgtaatggttcttgaatgcttctggaatggttcttgaaatcaatattcgtgagatataatgtttgtcataattaatttctgttttaagggttttagtatgagccagtaaatctgtattaatgaaaacttgaacttccaaatgccattggagcaattacttggaatcttggatactgaagaagtacaatacttgatgtattgacagccctattagtggctcatttttcattgctcatttgattatctgtatagctgttgttgctctaactgattatagttattgaactggttgaatgtttgactcgaggcatcataaccttttttttacatctgtttaggaatatgccacattaatccttgtatgtttttcaggctacacttggaagttgcgattcggctaccaggac

SEQ ID NO: 13190 - DNA, 994 bp, Oryza sativa
  Intron number 1 from transcript LOC_Os11g19810.2 (locus LO C_Os11g19810) derived from phytozome v7.0 (chr-ID Chr11; p os 11409124 to 11410117 reverse strand)
gcggtggtcggcgccgacccgctgccggcggtgaggtaggtgcctatgctcttctctccggttcgaattctgtgctagtgctaccctttgtgagctttctcaggtattgagctgtgaaatttgagcaaaggccttgtgtgtgcttcgatgtggggggttttggaaccctaatttcaatatatctagtgtttcatctctttctctttttttttctgctacgaggagagtgattaggctacatttgagttagtgatagtgatttgctgttgatttggattctaggaatcatacttgtaggggggcagagatgaagagggtaggaatggatatgtagtggcgcaggttcttcctcctctactacttgtttctgctcgtcctgcaatcttatcgttgtatagaaatggttgcgcatacatgcttgtactgttggctgttgatgtttggacaaggtcaagtgtggctccttcccatggtggtgatgtgtggctgctatatgacataatatggctggtgacttgtaagtgttttgggtattgctagaggaaatattaagctagattaagacacctaacagagcttttatgtaggtaattttgttgtctgtacatgataataactcatggcaaagctagatttatacttcggtgtattctgcttagtttgttgtatgctaaacaaagtgtatgcactgatgtaattttaagtattatacctcaaaatattgttatactcatgtttgtactaattatggatggtgaagatttagtgtattaccacaatttgtataatttagacaatagtatcatgtctaattaattttttgtatataatttgggttaaaaaagttctagcttctaaatttttaaccaagttgccattcttttgtttaaccaatcgcatggatcgaattaagatatacaatttttaattagaatctaattaattgtgggttgtttcagcttctcaaaagccctcgctctggccgccccaagaa

SEQ ID NO: 13191 - DNA, 981 bp, Oryza sativa
  Intron number 3 from transcript LOC_Os07g15410.1 (locus LO C_Os07g15410) derived from phytozome v7.0 (chr-ID Chr7; po s 8909913 to 8910893 reverse strand)
aattcttcacttttggagaagataacaagctcaaagtatttccaccaaatacctataaattcaagccaaaatcccacataatattagacgaagtccaggaatgcatattaggcaatttttggtaccaatataataataagagggaagaaaagggtacatgctgtctatacaaaacagtcttgctgaatatttccatttactaaattacctaatgccagcctcaaaaaataatgaaataatacaacaaaagcctatatatgtagtctttgatggaaagctcctcggagtttatatatcctttgaagaaataatagcccaaaaaatatatgcaaaaataatgggcggcctattgtggaaaaaaaaatatagatgttgatgaagctttaagtcaagccaggaaaattttgggaataaactattatatggagccagctgcaaaggaatatatacaaaaatgcaaaagagccaaaaataagaaagctctagaaaccccatattatatgaatacaaaagttgaaggatcttctaaaaaacctacatataaagaatgcttaactaaagggatggatcccttagatggtgaatacattgactggaaaataattgaaaattttgaagatgcctcccctcaattgaaaaaagagttaaaagaagaaatacttaaagaattaaagaaagaaatgaatgacaaatttgaagaaataaaaaaggcttatgatgaggaatttgatgtattttttctgatgttgataccgtggatatgggcagccagaccaataagcaatatagccaaatataagaaattgataataaattatcaaatttttgggcatggtaagcctaataataatatataattttaaatcaatataattttgaatcaatccaaaaatgcttttcggtgaatgacagtgaatgacgtttcactgctaaaaatactgtggagaatataacttttgaaaaaggaagagacacaggtgc

SEQ ID NO: 13192 - DNA, 819 bp, Oryza sativa
  Intron number 1 from transcript LOC_Os07g23169.2 (locus LO C_Os07g23169) derived from phytozome v7.0 (chr-ID Chr7; po s 13066011 to 13066829 reverse strand)
cggcaagtttttcaaggtttcaatctccgctctcctccctgttaccctgcgcagatctgtcgtctactttttttttccggactgcgcaaatcgttaggaattaggatttctattgtgcgagatagatgttcttcgtcgtggagacctccagtcctccacacttgttgaagctgcgttgttgttgttgtgatgtgagctaggtaggcaggagatcgagggaatgacagtgccaccgtgttccactgtttctcgaggcatgaaattagaacggaactccccatggtaatgcaatcccttgcatagatcgacacgatggcctgtaataaattccatacatttgttaccagatcgtccaatcggagatgatggtttggaataatatgctgctctgtttattctcccatgttattcatggcttgaggggcatatatcatgatggatattacgggccttgtggacctcttcgcagcgcagcatcttgttcgtatgagttttgactctttgagtcctacactagtaactcataccacagggttgctatttacatcaatcgtgtttcctttgtgttaggtgatctagtgtttttctccacattttccacagtttgctgctattgtgcttgggtacaatgatatcaagaaaatgtgacctagactttttctgtgaataggtaaggataatatgaattgatgtagtaagacactataactaaattttaaggaaacaaataagtacttttaaggaaacaagtaactaacctgatcatctcattttgttaggaaagaaggtatttgctaaaggaatttccagaacttctta

SEQ ID NO: 13193 - DNA, 743 bp, Oryza sativa
  Intron number 1 from transcript LOC_Os11g15620.1 (locus LO C_Os11g15620) derived from phytozome v7.0 (chr-ID Chr11; p os 8856142 to 8856884)
tcaccaatttagagttgataacttcacctaaagtggtatgtttgcatgtatactaactcctagtatcatttatgccatatgctacatttttttattctaattagagttatatatacattttctatcttgcaaaggtctatgcatgcaacctgtctatgatcagtaaataatacatgcaaagtattgactagcctattccctgtgcttttctacagattaaaaagatgaactcaattttgaatattaaaaaaagttaccgttagacgtaaaatgttttgtatattatttgataaaatgcatatatacatgagtggaagacggaattcttaaacagatcacaataacttttaaatttgattatctctaaatcacaaagaactctttcttgtaaggagtggagttggattatgtttctacgcagatcttcctaatgttcttttttttttgtgaatgccaatacggtacgttggtatcaagtacttctaacagcacaatattcaaatgcatggatttgagattaattagtgttgtatccattgaaggatgtgtatttagctggtatgactcatttaagtattttataaaaacataaacatgcaaaatcttgtactacaaaacataaaataaatcctgcagaatgctcatatttaatccagtatgggtcaaaacttttggagttttgatgttaaattgttcatattctgttgtgcttcatgcagttcattgtcagaaaggatttgctt

SEQ ID NO: 13194 - DNA, 1002 bp, Oryza sativa
  Intron number 1 from transcript LOC_Os10g36690.5 (locus LO C_Os10g36690) derived from phytozome v7.0 (chr-ID Chr10; p os 19550396 to 19551397)
tcatctttcttcctgagctggcttctttactacaggtccgtagttttttcagcttggtttcttgctcgtattgtttcttggattggagtggtgtcggtgtgtgtggatccattggggaatggaggtgctagctaccgctgggtggtgtggcattcatgtgggttgcccctgccatttctgtgagattttctggatctctgtggcctgtggtgcttagctgccaccatcttgctgcttccgctttgccttttgcctagaatatttatcttctttagcctctttgccctttatcctagtagcaactttctttgccttcagctggaagcataaatcttgcttgtactgattttggtgaagcataagccttcagcaagaagcatgagcctatgcttctgtgtagtttcctcctcttgagtgaagcatagtgttttttttttcttcctaagaatcatttcatgatctacagttattagtggtattttgcgtcccctcctgctttcttgaatgctatctgttcgtctgttttcatagtcttgaattgtttcaactgctgcagcttaataaatttaagacaaacagtcaggtgtatgtttcctggtgttgtcagtagtcagattaaacaattttgctcggtagatcccagagttttacaatgatctgttgtatttgactccatattcaaatttgtaatccgaaatttattgccatgtgatcttcactagtagtactaaggttggtgccacaattagtgtgctgcagtacatgccatggggaatttttaagatagtgttaaatttgtaccatactccagtaatacaactccaattcatccattaggcaactttagagccttgcatatcaattcagcttttcgttttcagctcagatcaggcaattgtagctcaagttcttcaatttcatgcctttttctgcatccaacaaagcttagatttcagctaaattaagctcctagctgacgagttcttgaaacttgcagcagcc

SEQ ID NO: 13195 - DNA, 806 bp, Oryza sativa
  Intron number 2 from transcript LOC_Os10g42066.1 (locus LO C_Os10g42066) derived from phytozome v7.0 (chr-ID Chr10; p os 22558547 to 22559352 reverse strand)
ggattacatctcctggcctcacgaccgtctcgacggtaaccattctttctctctctctctgctttccttctctttcgttgcgattgaccgggttcgctgatgctagatgattagacatgtcgctgaatctggacggaaatgtgggctaggttaattccctcccttttgctctgagaatgaacggcagattttgcacctgtacatcttcatggggaacgaacgaaccatgaacgtagacgcctctgcactagttgatccattcgtcgtcagggtttgctaatcatgttcatagggagcccacgggtggataggttaatgaatctggacggaaatattaactaggttaatttcttgcttttggtttcagaacccgtagattttcgtgcgaaccatgtatgaaattgtttgaatttgacagattttgaataaatttgaccaaattcgcaaaaaaattgcaaaaaaccgaaatttcagaaatttcgaaccctgcatgtcagtaacttcagaatttcagacaagtaactgaattttttctgcctgcgcaaatgcaaatacaagttcattgattcagataaaagttctttaagttactgctcctatctgattttctttgaccacaagaagcggtcatatcatacatgtaaagtttcatacaaagcaattaaaagcttacattttcaaactacaatttggtccattcatcactagtcattgcactccttggtgttcagttttaacaaaaacttccctgacataagaagctgaaaatgtatatatgtatggccatgcatccagcgaatctgcag

SEQ ID NO: 13196 - DNA, 756 bp, Oryza sativa
  Intron number 2 from transcript LOC_Os12g21960.1 (locus LO C_Os12g21960) derived from phytozome v7.0 (chr-ID Chr12; p os 12358758 to 12359513 reverse strand)
ggtaaattactttgctggttgtacatttgtttttctattaactagcaaaacaacgttctcccatgtttactaaaaatattttcttgcagtgggatcctcctgcagtcgagtatacatatcagcagacactgaaatggtcgatttttacttcgctcacctggataaatttgagcatgaattgaagcacttgcagggcccatttgaatcgcataatacaaaaataaaggaataggaaaacacaggattataatagaaatttaagtacaaaacaaagaatggcaaaatacagagaaaaaatatagggatgaccatttgattggaccgcaagaaaacacaggaatcagatgagaatatagtcataggaaaattttcaagagattgaagttcttgttaaattttcttcaaaatctctataggattgtacattctatagtaatttcaaaggataatatatgattcaattttttgtttcaaaggcctgtacatgaaatttttctataggattgaaattctctaaaactttttatgtttttcctccaaatcaaaggggtagcatacccaacaacttaccaataatttatccctaaaatttaatttttggtttcttaaactgaaatagaaagtgaaaaaactcccccctccaaaagaaggcctaaattcaattcccaaaatctaaaagtgtgtgcttctgttaaaatttttaattctgcttgtactccagtacaagcagcaacagcagctatttaagcagcaaaa

SEQ ID NO: 13197 - DNA, 286 bp, Oryza sativa
  Intron number 1 from transcript LOC_Os08g06280.1 (locus LO C_Os08g06280) derived from phytozome v7.0 (chr-ID Chr8; po s 3462414 to 3462699 reverse strand)
taccataaagattgggtcataagcactgttgttaggtgctgcttctgctcctaattatttttttctctctggatgtttttttgttgaatggttgataattcctccatctttgagtttctatcttctctttggcttgctctggtcttgttcatgattctttacctgtttcttgattgctgatggcaagcatttccttgttgtttttggactcaagatttagctggtaattttatatccacctaccttatcatgtacttgttcttgctcatcttttatcaggttatca

SEQ ID NO: 13198 - DNA, 1014 bp, Oryza sativa
  Intron number 1 from transcript LOC_Os11g04650.1 (locus LO C_Os11g04650) derived from phytozome v7.0 (chr-ID Chr11; p os 1980774 to 1981787)
gtcgaacactcgtccgccgtcatcgagccacaactgtaagctttaatctctatctgtttctgttgaatgaatgctggttgatcctgcgattcatcccatagtactgttccctcgttctgcatgcatttacttgcgtgtgatgctactcagatctaagtacagttgcaactcctctcagcaatgataattcttggcatgtgtacttaagtctattattcccctgtcctacagaaagtaaatcaatttatgtagcagagctgccgcatcattgatttgcaatggctttcggcacacttccattgcatatgattcttcttcgataagattgcacgatgctggtagctgaaatctcatagtaataatcatattcactgaaaacaataccacgatgctcaacccgcatccacccaaatactacactatccatcttctctgtcttcatggacggtcaccggccgtcgcctgtagctttctttccttttccaacacacctatggcagcttgattagctaaccaaccaagcgcaaagtatcttgatacatcatacatgtactgcaactctaacgacatgttatcttcatgggcacatggtagtcttacatttgctttgccaatctactgaaaactcacttatggtctcatctaccttatgctgtttacttttaatggatataattggaagctcttttgggaccatgccaacatattggcgcatcattctgtaagactaacgttctgaaatctgaactaggtagggtaagttcaaataagttatcgccgtgtttagtaccaaagtttttttttccaaacttcaaacttttccatcacatcaaaacttttctacacacataaacttccaatttccgttacatcgttccaatttcaaccaaacttccaatttttgtgtgaactaaacacagcctatgttgagattggttccttttttatgcattttttagtttcttctgaaaaaaaatgttgttttaggtcaacaacggttgtcgtttgtacacg

SEQ ID NO: 13199 - DNA, 930 bp, Oryza sativa
  Intron number 1 from transcript LOC_Os07g42490.1 (locus LO C_Os07g42490) derived from phytozome v7.0 (chr-ID Chr7; po s 25428674 to 25429603)
ccatagagtttcctcctcttctcctttagtgcaaggtagagaagagcatgtgtgtgtgtgtgtgtgtgtgaactgtgaagtgcagagtgcttctgtagttctgtgttatgtccatagtgatcttgttaggattgttgctatggatgcatgatgttatggttgatctctgaattacagtagggacttttctgagatctctggattagtggggggtgctaaatttttttctggttgcatcagcttgggtttctggtattggtgtgggttcttgctctgaattttggttcagaatgtcgatttgtttgtgtttgttctctgaagttgagagtagctatgatccatccagcacagaactgcaggtcctgcctgccggctgcatatacaggacatgccattttgcaagctctgggcttatggtttctcttttggagttcttcttcttgcatgatctgtgttctctaacaaaggaagcaagatttagcaactttattcagagacaagaaaaggatctggcaaccttttgtttctgttttatcctactcgtaaagattgttatttaagcaaaaatttcccaaaagttttaaatataatttccatgatgtgccactctcatgtccttgaacctggcactcattatgggctcctcagaagtgctgtagctaatgtcactaatcttttgtatctttgttcatagtcttgtattttatgatgcttatccctttgtgctttccatgtttgatgtccaaatgtcatggcaatgtttttgacttctagtaggggttttagtacctttttgttagataagtacatccaaattctgtttatttattcaaaaatcattctgtttattcactgaaaacatttgtccattcaatggactcataaactgtctgtgtttttcaggcttgaggatccatctagaagatagca

SEQ ID NO: 13200 - DNA, 493 bp, Oryza sativa
  Intron number 1 from transcript LOC_Os07g11980.1 (locus LO C_Os07g11980) derived from phytozome v7.0 (chr-ID Chr7; po s 6641507 to 6641999 reverse strand)
ctattacctccttgctccgctgctcctcgccgtcggtaagatacacccttgcgttgattagcaaaatgcgaatagctgctgctgctagtgtttcttcattaatttgtttgactttatgcaggcagatgccttgaactgttatgggcttgtgctattatgctcatgatgtaaaaagtaatatatttgtgtactgctgatggtgtatgaatgcttttagatgtattttcattttcttcctattaaatggtgctaccgatgctcttgatatgctgatgaattgcaatggtgtttgagtaaacgggtaggggtactgtcttttacccccaggctgtgtcggttagtggtcatgaaagatccaatgtcatgttatatttttttataaaatactgaatgctataacaaaagaaaatgaaattaattttatgcactatttttttagtctcacggaatacatactgtgcagtcatgaatgtttcaaacccagctgccaaac

SEQ ID NO: 13201 - DNA, 641 bp, Oryza sativa
  Intron number 2 from transcript LOC_Os10g35390.1 (locus LO C_Os10g35390) derived from phytozome v7.0 (chr-ID Chr10; p os 18846147 to 18846787)
ggggattcgccgcaggcgctctcaggtttgcagcctcctccactctcttctcgcaaaatgtgttgctatgttcctctcgctgggctggcctcatagccattaatgtagtttgctggaacattacattcggaacgttgttggcaattgcttgacaaaatgtggaattgtggaggggagaaaaatcgtttgaacctgcagtgacaaaattgccatctataattttaaaactgaaggtgtggaaatcaaacataatcattgccagcacatcattcttgttaaccaccttgacatattgttggcttataacagttagctccacaccaacttggaaggtgtcaatggaatgtaagtataaattgaggataactggcagttgttaagactttctacagaacttgtagcagctaaaactagctattgtgcatttatgtttcatggaatttgagcggcaatggatatttcttactaagacgtataatgcaaaacaaaaaaaaaaaaaactatgtctatgcagtttacatgtaatgtgcggatgcaaataaaatcatgttcatggacaaactaatgggattcataccaaattccagaattgcatttcttatgtggttacttttgtttgttgatttggttaccagacatcg

SEQ ID NO: 13202 - DNA, 1009 bp, Oryza sativa
  Intron number 3 from transcript LOC_Os11g02040.1 (locus LO C_Os11g02040) derived from phytozome v7.0 (chr-ID Chr11; p os 545601 to 546609 reverse strand)
tgtctaagcatctccgcattgattttgacttcctggtactcctaatctcttggcagctatggaaggaacgcaactctagggtcttcgactcggcgctctcttcagtctcagtgattctggagtccattttctcggagggtcatatgtggtttttagatggggttaccgcttttggggttttactgagagtgtagcatggttttattccttcccgctctttggagttacggttggtcaccgtagtagttactaagcttcagtttttgtttttgttttttcctctttcctgggcataacccagtctggctgattgtgttgtgtgacaaaattctttttcttctaatatattgacgtaccatacttttgcgcgttcgtgaaaaaaaaaaatatcaaacgcatgcaaggtgatatggtgaatatacagtatcagcaacacaagatggtgatatatgaaacggcaaggttcttcttcattgatcagaatttgcgatagatataatagatcgaatagaaggtgttaggtgtgccatcccaattattcccacacgtcctgatcgtggcgctggaacaccacacgattccacgaacacgcgcgctcggatcgcacaccacgcaaaacgcacgaaaaaactagttacagctacaccaactacagctaaaagtacagcgaataataagcagaagattgcaaggagcagatagagtagagaggaaaaagtgcaccgaaggtccctcaacttgtcattgagttataaaatcgtcccccaactgtaaaaccagatatattacatctctcaacttacaaaaccgtttactttaggtctttggtggttttgactccgattttatccgacgtgacagctgagtcaacgtggactcacatgggccccacatgttagggtggtcacgtcatcaccttctatctcccctcttctctcccttcctcctctctctctctctctcttgtctggtagggcggccagcggattgggaggaggccggcaacggg

SEQ ID NO: 13203 - DNA, 992 bp, Oryza sativa
  Intron number 1 from transcript LOC_Os10g02610.1 (locus LO C_Os10g02610) derived from phytozome v7.0 (chr-ID Chr10; p os 997265 to 998256)
gcgggaggcggaggtggtagcatgattgggaggcagagggggcactcggcggtgacgcgacggcggcgcgagggggaggtggaggcggcggcgctggtgacggggacagcgtgaggggaggcagaggcagcagtgggggagagggagtgggagtgggagcaggccatggcggctagggtttgggggtggttagggttagtgggtgtccttttgcgaaaaagccactcggcttccgcattttagagcgtagccctaatccgtgatttttctcttcttcacatgcaatatccatatttcctaagggaatccacgtaaaataacacctcagaggtactgtttgggaaggagctagatcgaattacgcacaaatcggaggactttttggcaaaattctaccgtgcgcgcactgtagcactccgacgtggcatcacccagcggccgcccctaccgcgctgctcaatgttttccgatatacagcttaataccatctactatacagatagaagtcatctctaggatcaaagcattaattgatgtaatctatttgaaatggctaactagacaatccgttgtatgggtttgtctaatattttatttagatatgatgtggaaaattatatagtcaacgtcagattaaacacgaggttaaaagactaattcattaatgtggatagaaaacgaggagggagtattactgattcgatggctaaagagaactagtgaaacccactctaaaattacagtacttattatagttcagaaaagaaaattgttgaataggagtaacatcgtttattcaaatggcaccactttccctgtaatctagaaactaaaaataaataaatatgcatactaatgtaattagccttgacaactacaaagctatggactggagttaaatccccctagtagataggatcaacaatttgaatgcataacatgtgacatttcagtttttttttcttttgcaacagttcaggattacaagattt

SEQ ID NO: 13204 - DNA, 400 bp, Oryza sativa
  Intron number 1 from transcript LOC_Os09g34900.1 (locus LO C_Os09g34900) derived from phytozome v7.0 (chr-ID Chr9; po s 20339459 to 20339858 reverse strand)
tcctccccaggcggtctcgccgccgttttcacggcgtaggtgctctgcttgatccgatctgaaatatcccctttttatagctgtgtgggttggcgattaaggaggattggagttggaggtcgttggggggggggggggggggctaatagtcttaagaaactcttgttcatatctttgattcacctttggttggtggcataaaaaatgtaaagttttgaatttatttcttttccttttataaattcggtatgatgtctgtctttccatcaaaagcttactgctttggttagaagtttaatgttttgtgctcaaaagatagcacaatcgtagtggttctcatgttctttattaattgaagcaagcagagaagggatctgtagtggctgcgagtggacgtgtc

SEQ ID NO: 13205 - DNA, 721 bp, Oryza sativa
  Intron number 3 from transcript LOC_Os12g01744.1 (locus LO C_Os12g01744) derived from phytozome v7.0 (chr-ID Chr12; p os 449417 to 450137)
ttgtaaggtatgtgatcctcaatccagtgtttgcgtattaatttacttattgtatcaagcttttctattaacagagttgtggtttcctgtttttcttgttctgtatatattgcaattcaatatttttatatcagctactggatgacaatgattttcgaaaactgacatggcacctcacttggtcgcattaacgaatctagagtcatgttctatttaatttcagcgatatgtgcagttcattatgatttctctaatatatgatgtgtctcagcctgtgagatagttgccagacacttataatcggtaggtcacccaagatacaagtacaaagcaagagatattcatcaaagggtacacaacaattttgtaggtaagtggctttcagttttgttgtaaaaaaaaacttatgggaaattttagatgtgctactttattcgctgaagtgttatctgtatagattagtttcacctcattatacacgagttcatgcaagaccaacacaaattattgccatgcattctctatattcttcactgtgtatgatacataatgatataagtgatatggtggcattaaactattgagaactgcagtttggtattatgtgccagattacccatttcaaaattatacaaatgaaacatcctattgcaatagctattgtttggttttaaatatctgaagaggattttaccaaattgttctttcgtccaggacagcc

SEQ ID NO: 13206 - DNA, 937 bp, Oryza sativa
  Intron number 1 from transcript LOC_Os12g17900.1 (locus LO C_Os12g17900) derived from phytozome v7.0 (chr-ID Chr12; p os 10282726 to 10283662 reverse strand)
tcaggcgcctcctcctccgccgtctcgctcctgaggtatgtgggatgcacgcgcccccccctcctccgcccgcttatcttatcttgctcgcttgctgcgttggacggcctcgttgtagtctcgcgttttgctgtacggctctgcaggtgttgtgccgcttgcgttgctaatctcagtggtgtcgaggtaaattacttcgctcttttgcccgatctgtgatggaactgagcccaattttagctcaaaaagattgggtagctttggtcggttcatactacggaactttagattatgcaacttactagagctcttcgtgtatataaataaatagtttgcactgtttttctttgggcgagtctttctggcattcatataactttagccgtaatatttcaattttttgcaaacaatgaatctcaaatttcatgatttgttggtcgaagaaaacgagttcattattttgcatcttcgctccaatgtgatgcagtccttgctgtagtagtatgcaaatttattgtccattccacatatgtaatcttctaaaaggtttgataggtagttgtaggtattaggtagtaccatggtacttttgggtttaatagatactactccctccgtcacataatataagggattttgagtttttgtttgcattatttgaccacttgtcttattcaaaaaatttgtgcaaatataaaaaatgaaaagttgtgcttaaagtactttggataataaagtaagtcacaaaaaaaataattccaaaattttttgaataagacgagtggtcaaacagtgcaagcaaaaactcaaaatcccttatattatgggacggtgggagtactccgttgtttgagtatataactgtttgaattaattggtacttctgtaattaatttttgcaggtatttcttcacatcgagtgttcctcatcaacctg

SEQ ID NO: 13207 - DNA, 482 bp, Oryza sativa
  Intron number 1 from transcript LOC_Os11g30484.1 (locus LO C_Os11g30484) derived from phytozome v7.0 (chr-ID Chr11; p os 17256246 to 17256727)
gagcgcgagctcctcgccaagcaagtgcgttctcttcccctttcacctcccttccttctgctcgcttaatttgggcgctttagcttcttcgattttacggggattttttttgttagctgtattgagctggaacccgtggaaaagatgaaatagagatagtaaaatcagccatgataacctttgattttgcagaaattcagctgtactgtacataagaggaaaagcttttgcccttctttgaaaaaaaaaagagagaagaaattcagctgcacttagcatcagttaggtgggaattccttaatgctctgcaatacttgtttctttgatttcttgaacggatcatggccgattagctcagataccctgccctgatgtgaaaagtgtagatgaactgtgcttttactcaacaagtcccctatactccactgtttttttaggtgtctgatgttttcttgtttaggttgctctggatctctccgaag

SEQ ID NO: 13208 - DNA, 503 bp, Oryza sativa
  Intron number 4 from transcript LOC_Os07g42410.1 (locus LO C_Os07g42410) derived from phytozome v7.0 (chr-ID Chr7; po s 25381700 to 25382202)
gagctggtatgcatgacaatgtttatagtgttcttttgtttgtcgaatggggttttgagtctcgttcgattagttttatgcctgtttttgttcatagttcatatgtcactcagtttatctacacttgaattgagtcgaatcgcgactcgagtgccttcacaagttatttgtgggaacatccagggagaacttttattattgattggcttgattactgagatgatgcattcaatgccactgtccatattattcatgctgtgaagctttgttaatgggggaatacagtaaataatccatttccaattttagaaagaaatgaacaacttaattaattgttgcatgtgttgaactgcaatattagggtacatgttttatcgttttaacatgccttcattgaggcaacatattgttcttctcaacacaatttgcttaccatcttacaaatttttttttcccgggtgaaaatgttgcagaatcagcagcagctgcagatattacgaagt

SEQ ID NO: 13209 - DNA, 702 bp, Oryza sativa
  Intron number 1 from transcript LOC_Os08g10510.1 (locus LO C_Os08g10510) derived from phytozome v7.0 (chr-ID Chr8; po s 6173963 to 6174664 reverse strand)
cggcctccaaggtgatgttgattaaattctgcatttcttggaggtttttactgcacctgcgtcactgcttgtaacaagaagtggaacggttttgatgtttccgtcttcttgttttttttgaatatttggaggtagtattgtatattttttgcactgtggaattgatttttgatccctataaaggctcaagaacaacagggtgttgctgttagtaagcactaagcagggttgggtgggtctgtttgattcgttttgcagccttagaaaggtgcagtcttttgttaatcgagaattggttaataattggagcagtcgtgtgtttgtgatttcatttattcttttttaatttgcctgctgcagatgttatgtttagtcagatttaagatgtttatgcttttttgagcaattatagagcaactctctaaaccctgctttcctgatcatttcgttgtgctgttatcagcaacttgccttcattctttgttttgtttaaaaaaaaaaccttgaatgtacagatttaagcagtaatggttttgctcaagattagagttttcttcaaaacagttgctctgagagtagctcgagtagtttgaagcgattttgaactcttaacattattctaaagtcagcatttcttacagctcatgtacctaaattctgcattcatctatttcctcacataggcaagcaacatagtaaaac

SEQ ID NO: 13210 - DNA, 477 bp, Oryza sativa
  Intron number 1 from transcript LOC_Os08g07860.1 (locus LO C_Os08g07860) derived from phytozome v7.0 (chr-ID Chr8; po s 4421460 to 4421936 reverse strand)
ggggaatccctggccaataaactcacctcaagccggtaggttgtttgtcatccatataaaaagactacttctcacaggataacaccagagtaatttgaaagcttttagacatgcattgatcatacaaaagaagaacacaatatctgcataagatggtatgccccaattatcccattcttgaaattatattatcactagtgctctagagctatcagtccccaaatctctcaactccttgaaaaaaaatcaaatgagtaatcttaaacagtctcatcttccatcttctttccatcttccatcttcttttcaagtcaacatcctcctccccacatttgaatcttcctatgcacaatttgcagatgttctctataggaaaaaaaacaactattccttgtgagacacaaaacaaaattcaactgctactgaatgtttctcattggcatgcccagatgtagaatgtttcttatttgtgatcag

SEQ ID NO: 13211 - DNA, 713 bp, Oryza sativa
  Intron number 1 from transcript LOC_Os11g40850.1 (locus LO C_Os11g40850) derived from phytozome v7.0 (chr-ID Chr11; p os 23973462 to 23974174)
gcgcgacgatctcccggtaagttttatttgattttctcatgctgcacaggccacggaatctgaaattatttgtacgaggtttgctccagttcaacaaaaagtatctcgaggtatcggtatctcacgataccaaatcgtttccgatcgttggatctagctaagaaaaatggtcattattagatctaacgattgaaaacaggaaacgatttggcaccgtaaggtatcggtattttgaggtacttttggttgttatgaagcaaatctctattcgtatgcatgttttttggctgtgttcttccctcaagattcatgacctcatctatctcgttttttgtgcctacgctttctaaactactaaacggtacgttttttttaagtttctatatgaaagttgctgtaaaaatcatattaatctatttctcaatttttttttaaactaacacttaattaattatatgttaattcgtcacttcgttttgtgtgcaaagcagagcatcttgctgccatgtgttcattcatgtagagcaattttggaactttttcatttgtcaaaaacttttggcccacttgctttgcattgcttcatgtctgcgtcattaattttagcagcatgcatgtagatctatgtatttatcataatttaagaattgaagtgattgattattggtctctgaaactattttgattttgggatttctgtgcaggaaacgtga

SEQ ID NO: 13212 - DNA, 794 bp, Oryza sativa
  Intron number 1 from transcript LOC_Os12g12460.1 (locus LO C_Os12g12460) derived from phytozome v7.0 (chr-ID Chr12; p os 6864965 to 6865758 reverse strand)
accaaaattaacaacaaaggaggtaacaggtcgccttgccggagaccatcatgatgataaataacctctcatggctctctctattgactaaaactcgagtagacaaaagtagagagtaacagcatatgaggttgcagcaccgataaccaaaacccaactgatctaagacctccaagaaacggccaagatggaatcaacaacctttgaaatatccaactttagaagaacatgtggtcccttattcccatctagtataatattgggctggaaggttttctaacgattgctcaggtcacaagtctaactagactttggaatacatatgttttccttgcgtgggttgcaagtgtcagaagcagctccataactcaatgtcaatccaagcacacttgatttacaggggtttaatgcccaactgatttcgaggggtttagcatagttagggaaaaaaaacaaatttagggggtcatatgtgatattcaatactacctccgtcccataaatattgaatttctacctttgaacctttatcccataaaaactgtatttctaccaagagataatccacttagtgccactgagtttatcgcacttctataatctaccaccgattttgccaagttcaataatataccatcgtgttttctttaaccttcattgtgtgccatcacagtccagttggcatccgttagcgctgtaaaaagacctatttgccccaaatgataggtgggccctagctgttatctctatttctctctcctatcttcttctacctccagccaggcaacagcagg

SEQ ID NO: 13213 - DNA, 742 bp, Oryza sativa
  Intron number 1 from transcript LOC_Os07g48840.2 (locus LO C_Os07g48840) derived from phytozome v7.0 (chr-ID Chr7; po s 29224647 to 29225388)
acaccgccgcgtagataaggcccttcttccattcggtatgcctatcatttttcgattttgcgcaacacgtgatcaattgttctgattatatttcaaataattaatcaaattatccagctccgtaataattagggttccccactttcttcatttttttgtacactgataattgcttcaggtcaaaattgatacaacaaggcaaacacgcactatctttgcaatacattaattttaatactacacaaggcaaacggcaaacttctttattttagtaatcgtactacatttcagtgttgttctttcgatgttcttgaaaatcaccacaaatttagttttcttgaatgccagtttttagtaccgcaatccaaattcagactttcaatatcaatcatttggcaattaaaaaaaaatcacatatagatacaaagagattcattttactttgaacgctcccatatcatgatatggagctaatctgctagtcaaacacttctaaaagggattatgactgattaaggggaaatcaagattcagagccttaccaaattgtttggtgaatttgttagtgtagactatgacttcagtaatgtgcaagagtagcattaaagtagaaaagtacaacgtagagttctaacacctgtttagaccgtgctcaaatcctttcctcgttattgtggcatggtgcttatattataactgattcaatattctgaataaacctattccaggttctatcacagag

SEQ ID NO: 13214 - DNA, 937 bp, Oryza sativa
  Intron number 1 from transcript LOC_Os07g41310.1 (locus LO C_Os07g41310) derived from phytozome v7.0 (chr-ID Chr7; po s 24750985 to 24751921)
cgtcgccttcttctcctctctgattccgtcgtcaggtcggtgcctgtgcctgtgcctctgcatttcccattggttcttgcagtactatttggatttcggttcttggttctcaggttgttcttctccggttgattcattcacgcctaaatttttgcgtcttttttttgggtgccgtgtgctgtatgattcgtctgtaaggattccggagtttttttttttttggtgttgttttttttttcttcttattttactctattcggagaaaatttctcttccccatcgtagcgcgattatcgtgatcaaaatggatgtgacaataaaggaatgagctgttttccgtttacctcattaaagattttaatttggtgtttatgacctttccaaaatggacaattaagagtcatgaataccaaatttaaatttttattgttgtatatgcgtggtgcgatgggttttgctcatagtatatgtttgtttgtttcggatcatatgtcaaaacaaactatttctgtttagttcatgatcaggttttaatccatttttccaaaaaaaaatgtcaaagcaaactgaacatgtagcgagtgtgtgcatattatttctgttagagctcagagcgaagaatcagccttatgtgtcgcgtcatgctacaatcgtgatcttttcttgttacgtactactatatgttgttaacacaaatattataatcactgaagctattggcacaaatcactattatgtttcatgtatgtctattcatctgaactgtgatcctgatcatgcacaagatgataaagttcgatcctttatcttcacatgcatgattaaccatcaaagatgagatgtgccctaccaaaacgttcttcaatctggatgtatcactaaattctgacttgtttcttgatacattatgcagaggcatacgatccgcttgatccaa

SEQ ID NO: 13215 - DNA, 507 bp, Oryza sativa
  Intron number 1 from transcript LOC_Os11g03770.1 (locus LO C_Os11g03770) derived from phytozome v7.0 (chr-ID Chr11; p os 1480973 to 1481479 reverse strand)
gaggcgcggcaagcgccgcgacggcttagtgggaggtcacaccaggtcggagaataattctccaaaccccctccccaagttgggttcacacaatcaaaccattggattgagaatgtgcgacgatgtgagggaaagaagggtcggaggcgtcacgaatgtttttttttcacacgtaacacaacactaaaaatctgtcgttgtcacacgtaacaaatatatttctctgtcttctcttttttatgtaagtaaaatcatattattaataacttagagaacatgctattaattgttattatacatgccttagccatatttggtcagagatttacggggaatcaataattgactctacggatctactctatctaatcattaactagagacacgatctattcgtttttaacaccatgcaaaacatgtccatatatagttcacacgcaaggccacaaaggtattcatccaaaaaaactattcgacatcatcttgcagatcgatcgaggtttcaca

SEQ ID NO: 13216 - DNA, 499 bp, Oryza sativa
  Intron number 3 from transcript LOC_Os09g32830.1 (locus LO C_Os09g32830) derived from phytozome v7.0 (chr-ID Chr9; po s 19577509 to 19578007)
aagcacctgctggattacccatcgctcccatcaaggttggtgattacttgctccggcatgataatactggcccttttagacatgggcgagatcaaactttagaatctttaattatgaatcatttttaatatatttaaaggtgaggtcaaactttataattttttattatgaatcatttttaatatatttgtcttttaaatatggtgactacatatatagattagtcctaaaaatactgtaataaaatcatatatttgttaacacttttatacatattataattaaaaataatggtcaaagttatttttcgaagaccgtgctcttgtccaaaacgataaatattatcaacccggagggagtagtaggggggaagaaaaacaagatgtatattctgatacagattgtgtgtacatctcaatggctggatgacattgattgttttgattgtttttgttgtctgtttcatcagtacaagtttgctaacatctcgccgagtttc

SEQ ID NO: 13217 - DNA, 843 bp, Oryza sativa
  Intron number 1 from transcript LOC_Os07g40310.1 (locus LO C_Os07g40310) derived from phytozome v7.0 (chr-ID Chr7; po s 24173406 to 24174248 reverse strand)
ggtggccgcggttcccggcgacggacgggcagctggtccgtggcagcgcgcggcgagtgcccaactcgtcggaccctctccacaaccgctgatgtgattacggcattctctgccgattgccactctgttcttagcgtttcttgcgttagattctccatgttttttgtcataacatcggttatgatgtagatcatggcactatgtttgttcagagaattgaaatgcgtatagaagtacatgattttgatttttttttatctagcttcgattggcacctcgagtgtttgtaatcagaaattaatcaagatttttgcgtgttttgtccgcttttgcattcgattttctttgatgaactgaactgccctgacatggtggagcccacatgtaagtctccatccttcctctatcactgcgtcaaaacgtcgaacaccttgcgcgcgccaccgccaccgcaaccgccgccgcaatgtccgtcaccgccggggtcgccctcgccgtcgccgacgcggtgtgggcggagatcaggtccgcgggccaagcctccgacgagcacctatccatgtgagtaaaaccaagcgcccgccgcctcgctccctcctcttccttgacctcggttgcttcgaaacagcctcgaggccttgttcggcaagaacatggtgcgcgcctgcaagatcctcgacgagggcggcgtccgccgcgtcaccggcgcgcccagcggccgctcgctcttccttgtcagctcccccatctctcgattcctcctgttcttcttcgtgtcacagccaaaagtgagtgagtgaggatttgcctgacctagggttttgcgtctcggcgattcaggtg

SEQ ID NO: 13218 - DNA, 774 bp, Oryza sativa
  Intron number 1 from transcript LOC_Os09g39120.1 (locus LO C_Os09g39120) derived from phytozome v7.0 (chr-ID Chr9; po s 22455938 to 22456711 reverse strand)
agctgtgactgccgtcaaggaccaagacggttgcggtaagtaatttgccatcaccgatctccattcaaaataatttcaaaattcaaagcgtgtatgtatttcgtgagttaaacgttataaattttgactataccgatactcactccagtgatatataggcttaattagtgaaataaaaaaaatggtgtctgaatgaacttctcaaatatgatgcatgttggtttcgttgtcgatgataatacacgttggaagatagtaaacgatcgcggagatcgtaccaagtaaaacttgccaaatatgatagttacatgttttacaattttaaatggagggagtaattctgtgtgtaataaaagttactctctctgggctgataatacttgtcgttttagacaagggtgaggtcaaactttagaatctttgattatgaatcatttttaaaatatttatctttcaaatatggtaactacatgtatagattagtcttgaaaagtactttaataaaatttatatatttgttaacactttatacatattataatagaaaataatggtcaaagttgttttttggagaccgtgcccttgtccaaaacgacaagtattatcaacccggagggagtaactaattgagtggttttgatttgattgatgtaccaattcaactagtactactaatgctccatatgcatatactcctaactaaattaagggattgttccaaaaaaaaaactaaattaagggagctgctgggccttctcggcggtgggcgcggtg

SEQ ID NO: 13219 - DNA, 870 bp, Oryza sativa; identical to SEQ ID NO: 13041
  Intron number 1 from transcript LOC_Os07g33979.1 (locus LO C_Os07g33979) derived from phytozome v7.0 (chr-ID Chr7; po s 20303273 to 20304142)

SEQ ID NO: 13220 - DNA, 902 bp, Oryza sativa
  Intron number 3 from transcript LOC_Os08g03610.1 (locus LO C_Os08g03610) derived from phytozome v7.0 (chr-ID Chr8; po s 1686070 to 1686971 reverse strand)
tcagggtatgttctcatctctgaatgtttctaccctctatatttctcgcatcgcgcattcgctctccggtttcgctctctggtagtaatcatcgtcggctcatcggctcggtgataaccagggttggaaattccgaaacgaaatttccgaaatttcggacattttagacctctctgatatgatattatttcggccaaatttttttatttttttaattttttcgtgaactttggtaatatttgttcaaattcaactaaattttattcaaaatttcggaaatttcagaccgaaatttcaaaaaatttggcatttccatgaggaccgatcaaatcggctaaaccgaaaggtttaaccctggtgataaatagttagtgtgttcttgaatgatctttccacaactgaacagcaacctgagttgatcaactggaaagatggaataaccttttaactttgcctagaatatcagtagtcggcacaggtttttctgaagctgaaaatatggaattttcaattagattttctcatttctgtgaacaaaatttcatgggaccattgactgaacaaaccagcacttgcttttatctttaattttgcatcaactaggggatgcatatggttctcctcttcttaaaaaagatgacaactttggtaggttcagcttgctccatggtttttcatggaatcagttctcaaagtaggcatgtacctatgattagccagcagaactcgatgcctcggccaagatttttatcttccaattccgttatcaggacaatgaaactaaatgatgatggtccattgggacaaatgaaacaatctgaatcttatgtgatgtcaaatgttccatgatgacgatgctagctttgttctctgaatttccttttctttctcctacttgcagg

SEQ ID NO: 13221 - DNA, 346 bp, Oryza sativa
  Intron number 4 from transcript LOC_Os11g40380.1 (locus LO C_Os11g40380) derived from phytozome v7.0 (chr-ID Chr11; p os 23608454 to 23608799 reverse strand)
tcattggtccgcaatccaggtaaagtgacttcaagaatttgtcaaaaacgtaatttgaatgtttttgtcttgtttcacttgaatttagattatatacgattatttttctggccaaacttggggtgaaattcagggtgcctgttttgtatgtagtttggcacatttctcccattcacttcttggctgtcttctttcttgcaacttaacttgtttaattaccatagcacagcaaatctttgatcagaaaataccgttctgttaattttttctatggcacttctctgattgtgtgatcatgattgataataaaggacaaagccagcacctcatctgcaatttaggaagc

SEQ ID NO: 13222 - DNA, 1049 bp, Oryza sativa
  Intron number 1 from transcript LOC_Os11g11410.4 (locus LO C_Os11g11410) derived from phytozome v7.0 (chr-ID Chr11; p os 6336062 to 6337110)
actcataatttcttctgccgtgagtaccctatatttcttttttacttttttttaattactggatagacacagacgcacacacgtatcactagactcgtaacaccacacttacacctccacaaatacactccctaatatatcattatctcattaaattctgagtaccccatatttcaactctatctacaacaaagtgccttggtatcatatctatctgttctttaactccatagatatataatatatattttacaagggaaataggtagagttagttatgtgtatgatttagggtagataccaaacacattaaaatgattctggtcccgtgaccaagatagaattaattaaaatgcagacatggcccatgaatcgtattatgtgacatgagcaaactaaacatagtttggtcccacctcatagagtcataggttttgtctttttaaggaaggttagagcatgctaattgtttaggtccaattgaatttacaggtcaccccttgagcagtcaaacaagttcttcaaactctgtagtaatttgtgctagtccaactagcctctcaagagttatttgctcatttttctccatttgtttgaatgaacatgtcacaataatatcttgcaactcaatagttaatttatatcttgcatgtttttagaagagtcaaccatctcggccctcgtgattaccccatgattgtgctaggttttaattcatttacctttaattaactatgccattgtaagtttttctagtttgggtttttttataaattaaatcaaatctattcttctatagtaatttgcataagctccctacccttttcgaaggttatgcgtacacggaacatccaacctataatgacttggctagaaataatatctaagtaaaaaatgttccaagtaatgaagtgaatgctatattgcttttggattttttttattgtactactaatataaggtattaaaatgattgttcaaaatactaagttctttttcatttcacaaaattcagccgcagattattcaagcacaaataagggagaagaa

SEQ ID NO: 13223 - DNA, 641 bp, Oryza sativa
  Intron number 2 from transcript LOC_Os07g40070.1 (locus LO C_Os07g40070) derived from phytozome v7.0 (chr-ID Chr7; po s 24052262 to 24052902)
aggagagctccggcggtggtggcaccgagcctgaggttagcgccaccctgccgtcgtggtctcctccccatcccacatgttcaccggagaagagaaagaaactgtaggagagaggggcattttggtcagttgaagtgcaaaaaatggtaaaaatcttgtgaaatggcgaatatggcaaagcaacggtttggcataggttgaaagtggcattttaacgacgccattccgcggaatggcattgtggcaaaacccaatcttagaagtggtagaatgtccaatttctcggtgttgatggtgttattttgacctttgcgatagtgtgtagatgtgtgcaaaatacactcattcctatattttttaataatgatgaaatgaatttattcgttacaaaatattttttaaagagcttatagagtagtacatatacaattactcgcctatgaggctatgattttcatctttcaagattggcgctccgtgtgctcttcattgcactcgtcatatgcatgtttattctacctggtgaaggtaaaacaaaagcaggtcatgccgcacaaggggactgataaaatgatcgttctagaactttatccctgctggtttcagaatcgagttttcctttggacaaattttgaactagt

SEQ ID NO: 13224 - DNA, 958 bp, Oryza sativa
  Intron number 1 from transcript LOC_Os12g10540.1 (locus LO C_Os12g10540) derived from phytozome v7.0 (chr-ID Chr12; p os 5584197 to 5585154)
tagtttcctgcggccgacctcttgcttctcactttgtgatgagttttctttggtcaattcttagctagatatgttaagatagttagttaagcaaatcgaaattgctagcttttccatgctttcttaaacatgattcttcagatttggttggttcttttttttcctttttgtggagacgtgctgttcttgcatcttatccttcttgattcatctacccatctggttctttgagctttctttttcgcttcttcccttcattatttcgagcaatctctgcacatctgaaagttttgtttcttgagactacttttgctagatcttgtttactcgatcactctatacttgcatctaggctcctttctaaataggcgatgattgagctttgcttatgtcaaatgatgggatagatattgtcccagtctccaaatttgatccatatccgccaagtctttcatcatctttttctttcttttttatgagcaaaaatcatctttttctttcaaagttcagcttttttctcttgttttacccctctttagctatagctggtttcttattccttttggatttacatgtataaaacatgcttgaatttgttagatcgatcactttatacacatactatgtgaatcacgatctcagatctctcagtatagttgaattcattaatttcttagatcgatcagcgtgtgatgtagtactgtaaatcactactagatctttcatcagtctcttttctgcatctatcaatttctcatgcaagttttagttgtttctttaatccggtctctctctcttttttaatcagctgagagtttgtgctgttctttaatcattaccagatctttcatcagtactctctcttctgcatctatcaaacttctcatgcaatgtttttgctgttctttgatctgatctctggtctccttttttgttgatcagttgagagcaagaagac

SEQ ID NO: 13225 - DNA, 641 bp, Oryza sativa
  Intron number 1 from transcript LOC_Os09g04230.1 (locus LO C_Os09g04230) derived from phytozome v7.0 (chr-ID Chr9; po s 2232219 to 2232859)
caacttcgtctgataaactgatcgtatgtttgatcatgcaactacatattgaaaattactactccctccatcccaaaatataagcattttttgagtctcactacggtctccgttatactactttgacgaacaacatctacgaaagtaaaatgttttaaataaaaagagttgcatattatgatagttcatttaatgataaatatagtaagattaaatttatatgattaatctttttatttttttttgctattaatagtcaaaatttaaaagtttgacttgtctctattctaaaaatgcttatattttgggacggagggagtatgtatgtgcagagataaagaggtatcaaactacacattgaggacacaattatttgatgaactgagtggaagattagtttccttctctccattcttctcacgttgatttctgttaatttgataatggtggtttgtattatcgggttcggtgtgggtgaacaattttttagctacaaaagaagtacttgagctcaacttggtgggatgtttgcgataagattatcgtggaaagtttgttgggatatggacctagggtagttgattatgatgcaaagtatttatttattgccattttgcatgtagggtagcacacctgcagtt

SEQ ID NO: 13226 - DNA, 511 bp, Oryza sativa
  Intron number 2 from transcript LOC_Os10g34614.1 (locus LO C_Os10g34614) derived from phytozome v7.0 (chr-ID Chr10; p os 18380137 to 18380647)
caagagcctacggccccttcgacaaatccagtcagtcactaactcactattcgatcttgatttccatcgcgtctatatctatgtcacgtatctaggatttttatatatagataatccacttgtatagtttttaaaaatattctaaatataacaaagttagaagtataaattgatcaaatgtgcatcttatattaataaaggggttttgtttttcttttttcaaaagtttttcttacgtatgtatatatatacatcgggttaagattatttgggtggtcccaggaggccaggaccacctcctagatccttatgactatgtaggaatgtttcgattcaattgtactgatattgattgatactccattatcaaattgattgcataatctagtgcattgtactggcctgtggaatttttgttcttcgtactgtatgaacaattaagtgcaatctttatattcatataaatactcaaattttgattttttacatgtatgtagcgtctatcccacct

SEQ ID NO: 13227 - DNA, 857 bp, Oryza sativa
  Intron number 2 from transcript LOC_Os11g29940.1 (locus LO C_Os11g29940) derived from phytozome v7.0 (chr-ID Chr11; p os 16934540 to 16935396)
gacaggactacgtcgagattcccatcgatttgagggtaacttttatttccgctaaaagtttttgggtttttggttttccctaccattcaccccccctctggtaggcttggttacttgtgttcgatcctacaatttttatttcgactttttttattaatctcgtatttggtttttatatggaaacttatttcaatattccttatttttaattccgaatttcaactatttttaaattgtatttctacttggactctcctttccttttctaattttagattttattttatttttattttgaattttgattaatctcgtattgggttcttatacggaaacttcttttagtattgcttattttaaactccgaatttaagctatttttaaattgtacttatacttggactctccttttttattttttctttttctccaatttatgtgagaattatttttattccgaattttaattaatctcgtattgggttcttctatgaactcttattttaatattccttatttttaattccgaatttcagctatttttaaattgtattcctacttggactctcatttcctttttctaattttggattttattttatttttatttcgatttttgattaatctcgtattgggttcttatatggaaacttatttcaatattccttatttttaattccgaatttcagctatttttaaattgtatctctacttggactctcctttccttttctaattttggattttattttattttatgttttaattttgattctcgagttcgaatcctggctggcgcgcaattaaataaaataattgcagcccactccaatagccaacctgctccaatctcgccg

SEQ ID NO: 13228 - DNA, 839 bp, Oryza sativa
  Intron number 1 from transcript LOC_Os08g41310.1 (locus LO C_Os08g41310) derived from phytozome v7.0 (chr-ID Chr8; po s 26092899 to 26093737 reverse strand)
cagagaggtacactggtactgcgtacttcgccggcaataatctctgaaaaataaaataaaattttccattgctcgcagcttttgacttttactgttgccctgcactcgtaaagctggaaggacgataggaaaaagaattaacaaaaagtaaagcttttcctacgttctagatggtgtactagctaggaagttagtcagtcactgcaagaaatttgatggtctttttatttgaccgtaactaagatttcatgatcttggcctcggtcaatatttcctcgtttttatgagaattgaacggttttctgtgaaattcccgcgttccaaactttctgatagtctcatacagtttaatttgtggtcctccatctgtttcaaaatataaggcgtattttgtttcattagaagaatggtttgacctacaattgctctattacgatactataatttatgtgatacaaaagtataataataagtaatccgttacgaatctaataaattcaagtacttgaaaggagtgtttatggataggttgtccctgaaaagggagattttttcagacaatgccctgaaaaaaggaagaagagacagggaaagagagcattatgctgttaagctgttgcccagaaaacattatgctgctaagctgttgccaccaccactgcaggaattcagaggacactgcaatgttaggcatcagcacaggctttgcacactctcctttattccaaagggagaacaaaaaaaaagttggcctacttattacttgaaaccttatgccaaactgctgttctgcatttgctgcagtagtagttgtagtgcttcatcctgaactgtcaact

SEQ ID NO: 13229 - DNA, 806 bp, Oryza sativa
  Intron number 1 from transcript LOC_Os07g13490.1 (locus LO C_Os07g13490) derived from phytozome v7.0 (chr-ID Chr7; po s 7729862 to 7730667 reverse strand)
ccgccgtcttccaccaagattcgccgccaagagaagtacgtataaatcctattcccctcccgatcgattaggatttttttttttgaaaaaaaggagagtgattctagccagtagatttgctgctgattgcagtgcgtgtaggattaatttcgtgcatttttatggttattttattttattttggcggttagattcgcgtataggtttcttcctaaccatcattacgattcagttagtttctctacgcctgaaaatacaagagtaataagttgaatatgaaataaatagtactcgctccatcctcaaaagtactatctcagaccatatcgtccgcctcgcacgccaccgcctcctacgacacgtagttactgttagtgaggatgagactcacaccaaaataatgctctcgtaaaaaataaaacatgccattttggacatattattcttggtttggtggcgaatgttttcaacatattgtagtgtaaaagttagagattaatatatttttatgaatattggacacatgaaaatcacttatagatttgtctcaaaataattttataatatcataattaataaggtttttactaatctattgcaatataaaatgagatgtggtacaaattatattttggagaccatgatttactgaaaataatggttattttcgatagatcagaacaattatatctgtatattatgtatatttttctggctattatgtatatctcgcaagttgaatatataactaacttacaaaatcaaactactctaattgtattggatgcagagagcgtgacacttgg

SEQ ID NO: 13230 - DNA, 660 bp, Oryza sativa
  Intron number 1 from transcript LOC_Os07g46590.1 (locus LO C_Os07g46590) derived from phytozome v7.0 (chr-ID Chr7; po s 27832563 to 27833222 reverse strand)
aaatcgtgctagcagagaggtaaatgttgtgaatttcttccgttgcttgttttgctttctgtgcagctcttgtacatcacagacatcattttctggtttgcaaattgaaataatattaacttgatattagtaatttaggttgttgctgaagctgaaagtatcctataaaggtcttgtaggaaataaaaaactaaccgtgtggcatttagaaaccaagaacttcttgactttttaatcttttataatacgtatgttatgactggaactagcttttacagaacaggaatattgcattcgaccatcattggcctctgaatggtgcaattttacctcttttggtttaattgcattcgactgaaatgaaatattttggttatcatggatcttgagcggatttaaagacatatactttattcatatgtgcaattcgtcacgtttaggttatatatatacatatgtcgtatctagtttctgggatatggaaatgtttgttattcttgtgcgcctacttgtggtcttcaaatgataaggatgtgcttttttttgagtgccaaaagagtcaacattcataattgatggttctacattttcaacaaagttatcttctccaatttatacccgtgatagtttcaatctttttgtggcagatctgccagcagc

SEQ ID NO: 13231 - DNA, 525 bp, Oryza sativa
  Intron number 2 from transcript LOC_Os11g27630.1 (locus LO C_Os11g27630) derived from phytozome v7.0 (chr-ID Chr11; p os 15446540 to 15447064)
agatttcgtgattgttttggtgatctatcgtcaaggtaatatactgcatatagttagatagtttgaaggacttttaatttgatgttggggtaactctgtagaggaacggtgcattatgacttggaactacactcgaattcagattttcactgtgtttcctagattctttgttttttgatgatgtgtctattttgttctttatacttgttcagcagcatagcggctttctaataaagtcatcagtgatcaatgagacctttgccacccaaaggtactactgtcagtttaggaattattattagttgcttgcattatggctgagcacgattaacattatggttgtttagagcatgattagcaattgcaataattaaattatggagaatgtaatatcgcttaacaattttactcagatttatgatgaattgtcaattctgaatccaaccaaatcaaagaaagaagaatttgacagctttcgttcaaaatgcagaatccaaccaaataaaagaaaaaccaacccaatca

SEQ ID NO: 13232 - DNA, 933 bp, Oryza sativa
  Intron number 2 from transcript LOC_Os07g15280.1 (locus LO C_Os07g15280) derived from phytozome v7.0 (chr-ID Chr7; po s 8812972 to 8813904 reverse strand)
tgcgagcagatcatcgccaggtgacgacgaatccggagggttctctggccatcacgtttctgaatttactttactttaggatcaatttagtttgaagatgctctgctatttacgtgctggatgatggattgctacgcgtatgccgaacttgcttcttttaactctgttcaggggattaatgatggaattgtgggctttctacagtttgtgctagtgaagaacttgctaggttctcggtgcgctagcgtttctatgcattttgtgctagctcgtggttatgtgactgatgctatcatagttcaaggtgaatggtcaattcgccatgaattggttagtatctgggaccgtcgcaagttgcttctagagtagcgcgatgtatgaatttgttggttctgagatttgtctatcatcttagatttgtatcttgatattgctgcttcttgttgtttgtgtgttatgcatgtgtggtggtagcgacttacttaagtcgatctggtgaaaatgtgcatggcaatgttgagctactggaacctatttttattctcatacaggctgctttcccatcagaccaatttactatctcttatacttccaaataaagcacaacttctttaaaaaaaactatgcgaagaaaatccatacatgtagatcgtattatcatttcttcaagctagaatttgagaaaattaattggttatgttcacacaattcaaaaagtaaagtaagttctttcactgacggtactgcaaattgtttatgtctttcattgcccaaggtatgacacttctgcacaattttttgtgagtaaatactttagcatgttctaaatgtcttctttcatcagtatgattacactctcttgtgaagttatatgcactacatacggctaatattctttgctaaacctttagtgttgcagcagatattcagact

SEQ ID NO: 13233 - DNA, 854 bp, Oryza sativa
  Intron number 2 from transcript LOC_Os10g26690.1 (locus LO C_Os10g26690) derived from phytozome v7.0 (chr-ID Chr10; p os 13866615 to 13867468 reverse strand)
gccctgaagcctgttcctgtaattgtccgctgcaagtaagtctttttgcattgcatttctttaacctttgctcttacttttgttgtttcattgcatattccgaagggctaatatgtatggtaccattgcaaaaatcacgtagttggaaaacatacaaagttaataatctgtagattttttcttggtttgttctactgcttttcacttgcgattcatggcatcctatgctctttgaccatctttttgagataacgggatgttttttgaccatctgctcatgtatatatatatgttggctcttcttttttgttttctcaatgtactcattttttagttttctagttatcattcatatgcaaatatgatctatggaatgtaattaatgcagcatatcccttgatacatctataatcataagtccgatttcacaaacaagtgaagcattatcctactgagattactcagtcaactgcaggaaactcttattaccgccgattcattgttttatatgaagttggtctttttgtatgttaccacggaacatgatatggagacagcctattcctattcggtttcgatttgttattttggtgcattactctttagctttaacaacatgtaagtagaaatgtttcattctgtcattgacaaggcgcatcttgggaacagcatcaccaaactacatgtctagcatttgcatcatacagtgtgtgcgcgccagatagcgaactgttttttctccccactttttcaacttgacacctggtattgtcctgaggcaggcttggctaactatctgtggcgtgttatgctctgcaggtgctgcggtcgggtgaagctgccacacttctact

SEQ ID NO: 13234 - DNA, 560 bp, Oryza sativa
  Intron number 1 from transcript LOC_Os10g26690.1 (locus LO C_Os10g26690) derived from phytozome v7.0 (chr-ID Chr10; p os 13867480 to 13868039 reverse strand)
gctgttcccaagaagaaggttaattacctctgccctcccatttcaatggtgtgatctttattttttctgttggactgtggtttttttacatcgccattggtgttcgtttaatctgcagtagtatggcgtgcgcgcaccaggtgtttgacgaattgcttgtgccttctaaggaccgaagtcctgtctatttttcttttttgatagttacattatgccctccgattgtttggagtgacagagggagacagtagggacatggagaacatcctaagctttaagttgtactagctcattcactttgagcatgcgttttggtttcttgtcctcaaatctcgctggggcaatctgtttgcagaaaggtatctaacgcggattgtgcgaacctattcgtgctgttttggccaaaaatttgtgtccattttaatctgttgattgagccgtgaacgcattctgcaagcagtattcttagtctttctcggtggccactagcctttactgatggatatgctgcacttaatctgatgccttacaggtttcaaagtataagaagggcctgagga

SEQ ID NO: 13235 - DNA, 377 bp, Oryza sativa
  Intron number 2 from transcript LOC_Os08g30540.1 (locus LO C_Os08g30540) derived from phytozome v7.0 (chr-ID Chr8; po s 18795286 to 18795662 reverse strand)
tccagggcgaagggaacaagtctggagtgagagaggtgggtaggagattgggtgttaatccattttggatgattttcaggatttgaatctctcttctctctttgttaatctatagtttaatttgtgggcacgataaattcatgtggatttttctggaggtagctgaagatacctagtttccattttattttgtttctcttaaaaattttatgtggtttgcactcagaaaattggagaatatgggctcggtagaactttgtttgaatttttaggagatttgaacagagtagataaattctgtaaaaattctatttattcatgataaataacctagtattttaataaattatttaccctatacacttttatgcagttta

SEQ ID NO: 13236 - DNA, 750 bp, Oryza sativa
  Intron number 2 from transcript LOC_Os10g07602.1 (locus LO C_Os10g07602) derived from phytozome v7.0 (chr-ID Chr10; p os 4206139 to 4206888 reverse strand)
aaggtacaaaaacttaggtacatatggatttgagttcatctcaggatttttttttcaacattttctcttctccgaatcgaattgaccaaacttattaatgtttttaaggcctgaccattttaatgcagcatttgcagggagcctagtttcctttgacaaggtgaagattcaaaattcgagttaagttgctcccaaaaattcagacaaaagagtgattcgtttgaatttattcaatggctaaactattgaattagaaccgatctatctatctatctatacctatgcctatggtaattgtgactttctacgaggcctcacattaactagaaaaatctaatcattgattagattaatgataaaaacacaaccacatattttacaattttaaagaaacttttgtcttattatgaaaatcttgtagattctcattcatgccatgctagaggatggcaaatgcttggtgttggaggaagttcttaggatggcaaatgtattataaaatacattttcaccaaatttcaagctcaaactcaactttatttaagagtaaaaaaaagacaaatttaggtgaatagtaacataacactattcacacgaaatttgtctttttttttctctttaccgaagttgagtttagagctgatatttagtgagaatgtatttcatatctatacctatctattgtaattgtttcatgaattttcaaaatttttaggtacgattttcttgagtttccaacactcaactcgt

SEQ ID NO: 13237 - DNA, 534 bp, Oryza sativa
  Intron number 3 from transcript LOC_Os11g37740.1 (locus LO C_Os11g37740) derived from phytozome v7.0 (chr-ID Chr11; p os 21849897 to 21850430)
agcttcgagaatacgttgacaataagaggtaagtgtgtagtacctaacattttctttttttgctttccatgatgaacttaagctcatgggagttctataagctactagaagagtgctttattagtttatggttgcgatagctgtagacctttatctatactactggtatatagaactttttctatatttctttaacaataaaagaatgaaaattttgcattaggttaggaaaacagaaaatgctatgaattctaatgttaattgctgaacaggaaaagatatatgaccatctaactacattaatccactcattgctagtgccacacaccaatttgatctaaaaccatttgattcaatagaattaacttatataatgagaattatttttgcacacaattgttttgggcactcatattgcttcagtttgagaaaatgataattaaataatctcttatttatacatatatacggtttatcatttcactaatccatgccccttctattcccatggggataggtacttgattgttattg

SEQ ID NO: 13238 - DNA, 895 bp, Oryza sativa
  Intron number 2 from transcript LOC_Os11g39670.2 (locus LO C_Os11g39670) derived from phytozome v7.0 (chr-ID Chr11; p os 23162542 to 23163436)
tccagctctacgacgagtacctcgccttgcagaaggtacaggagcctgttaattaattgtcatttgctactgctgctgtttgtagtttctgagatgctgctcttgcgtgactgcctgcaatacaagttggatggataagatttaagcttgcgctgtaaaattataatgcaaagctcgtgattcgcaagacttttaaactgttggataagacttttatggagcttgtcattgactcattgctgctgctgctgtttgtagtttctgattctgctcttgcgtgactgcctgcaatagaagttggatgaattaagattaagcttgcactgtgaaattatattgctttagtttgtgatttccaagagttcaataactgttcgagatgattgatagaaaaatttgcaactttcgtgtgaacttagacatgaactggttcttaactggcctattcatatggttaattcattggcatgtgttatgttactttctgactattagtgagttgtgcctattgcaaccttgtaattttgggggtagcaaaatattaggaagaaccaaaaattgaaactagaaactactctttttggccagtagtcatggctattaattggttatttcgttgattatattggatcactgattgattctgctttactgatcttgtgaactcaaaattactcatggcttcatggacttatccttgcctggacgacacttttgtttatggcgtaaatatgatactgtgttactgcgatttaacctattttggcatcaatgtctcattgttctaccgaagacacgtgtgtatctgcttgtgtgtatgcttgcagtgattgaacatagttggttatttaattctggactgagatatggtggcaacaattcctaattatgacag

SEQ ID NO: 13239 - DNA, 943 bp, Oryza sativa
  Intron number 1 from transcript LOC_Os11g34970.1 (locus LO C_Os11g34970) derived from phytozome v7.0 (chr-ID Chr11; p os 20030475 to 20031417)
gtgacggcccgcggcggcgtggggcgcgaggacggctaggcgcggtgtggcagaggagggggaagggctaggatggctaggaactccatcaaacaccttatgtgcaatgaatagtgcactttcctattattcccgattttaggttattttcaatataaatttgatttcataatttctaaatcttgtataaatgaagtttatcccatatttgtgttatcctaactaaaattctccttaatttgatatcactcatattttgtttatataatttatttgagttttaattagggtaaattcttattctatcgcaattaaatttaattgatccaaatatggtcgcgataatattttatttattactatccatacctaatcttttatttttaatttatatttattttaccaatttgtttttaaggtttattaaagattctataattttctaatgagaccgttattaacataatagcacattagctcaatttatctatatgttagtttattttatatggaggggtttaatatatcaaatttcaatccctaaatgcaattaggaacttggtgcaaaatcgatctacatatcgaattaaatactcccgtaattctattatatatacagagagctcagttcatttgaatgatcatcatttcatgtgtactcgtattatggcacccacctatattattcaaatattttaatatttgataaaataggttaataataacttttattttatttgattttaatatcttgcacataattattcgtagggttaaatatattctcataaatcatatctattgcttaaatgtagttcttttctttaccttcttggtgatcatttacggtttggcaagcaataggaatcataacaaccagcatgatgcaaaagttttaaaaagtttgaaattttagtgatttttattgtcagggattttcagg

SEQ ID NO: 13240 - DNA, 722 bp, Oryza sativa
  Intron number 1 from transcript LOC_Os07g29600.1 (locus LO C_Os07g29600) derived from phytozome v7.0 (chr-ID Chr7; po s 17399245 to 17399966)
ggtctgcgcgctgctcacctgcgtcttcgccgtcggtacatccccctctctcgcccgcggcctcctccttcccattgcttgtcgcgcgagtgcaatcttggggtggggtgatttttatttgattttttagatgtttgcctcctcggattcttgcttcatgggagtctattggtcctactaagttcttggattgattcggtgggtggtgtgttcctggaatatgttgtgattcatggtgggaattaatcgaatcaccataggttctgttcactcttgccgccctcggagactctgtagttgatagtgtgttctttggctctccttgctttacgacttttacacgttgtggtgtggtaggctgctgcttgctcaaattgggaacaattcaatcccgcaagcaaaaattttggaggttctttgccacttccgtctcaggatttagtatatacttcactcagacgcttctacctttttcttttattcccccctttcttctctaggttttatgggcttcatggttcatcagtttcttctattttgtttgttccattgtttttgtatctttccttcttgcaagttttagttcacagaatttttgggttttccaataaagagtaggtgcatattagtcagcaatttttttatgaaagctctcattggtgttttcatctcttctgttgaatgcagtgggctcattagttggagtcttcatcggcgcgttc

SEQ ID NO: 13241 - DNA, 971 bp, Oryza sativa
  Intron number 1 from transcript LOC_Os11g39220.1 (locus LO C_Os11g39220) derived from phytozome v7.0 (chr-ID Chr11; p os 22890715 to 22891685 reverse strand)
atctccctcggcgtcaagctcggcgtccagtacaggtaaaggattacaaattgagtaatactaaataattagtaattgactagttcctgtcggtgctgaatgttctgcacgtctcatggtttctcttcaaatttttttcacgctcaactgcaatttgttatacacttatactaattgttaaactcaatcaaatgtatgcttcctcgaagagttcgtgtgttccaatccaatgggaactcaataaatctaaaaaaaattggtaatagttagctggttactggtagtctggtagtgatcttctttccttcttcttcttctttttttttttaccgagatgaataattgaggaaaacaaagcgaccatgcgatgtaatcatgtaatacatgctaattgtgttttcaccttcgcaataattaaagcattattgctgtgattgcgaaaggggggcttgtacctatcgatagctcaacgagatacagtactgctgctgttggctgttggcaacaatatgccaatattgcatttgcactcttccacgagggcaactattgttagttgggttgttagttataagggctatgaaaagcaacagttcatttataatacgaaattttttgtttctcttttgtaatggtttgatattaaatgatggtcgtcttttgcaaccgtcgagtgtcagcctgcttacttgctatgataaagagagctaattaattcttgattttgatggctcaatcaagcatcaaaacgtgcttgagcttgcttttggaaagcatttttgttggttattagtttttaggccattttatttacaggatgaatgatagcatgccaagctccaaaaatgcagatgatcttttaccctttttttaacaaagttattttttaggagctttgcattggaaattcactacatgacctgcttgttaatgcagcctttggggaggttctataataaatctgggaacca

SEQ ID NO: 13242 - DNA, 833 bp, Oryza sativa
  Intron number 2 from transcript LOC_Os12g08820.2 (locus LO C_Os12g08820) derived from phytozome v7.0 (chr-ID Chr12; p os 4550766 to 4551598)
ggtaaattcctttcttatgaagcaatttttcatcgtatatgcgatgactccgttttagtttactgagctggatatatatggctctttgcaacttgaaagtactagctgttgttaatttgaagtcagaatttggtggaaagtttctcgttgtctgttctgatattgacttcactaatatgcttgtagtaataatctataacttggtttaactacctttgatctccctgtaagatagtaaatggaatgttcgttcagtacgttacttttggttttaaaaaaacacgtgttttactgcaatagggttggcacaacaatggttaagttatagattattattttattgccgggccgacgatgagaagccggccaagatttattaaggctgaagaaaagtttggttacagtgaacagcagcacagtcgctgaaaagataatctcagtaccaaggtgctaagatactataaagcacagtcaaaagccgaaaagacacgaaccagagcatttctggtcaaaaccagcacgaatatcgaatataacaatggggaggtatggctatggctatgtgattggcgtgccaagcccgacaatcctccaagtctaccatttgtccgtaatggcgtcagcgttaagttatagattattcttgctgtctttctttagggtgtctctattggcctatccatgtttattatctacatactctagtatagtgctcaagcgaattcagtgaacatacatgcatatgtaataatcccttccttgatatggttccactgtatacagtcctaacaccatcatttgtattgtcagctccaaaagggtcagagcgctac

SEQ ID NO: 13243 - DNA, 1029 bp, Oryza sativa
  Intron number 1 from transcript LOC_Os08g44800.1 (locus LO C_Os08g44800) derived from phytozome v7.0 (chr-ID Chr8; po s 28136357 to 28137385 reverse strand)
acggtaacatccttagatgtcatttcccttcttgaaggcgttgttgtggtatttattctctttctccatgctaatctccaggtgaaaatatttctccaacttttggatgactagcgacgaatcacatcgcatcctccggggggcttcgcttcggagaaccttcttcgtgtagcagatgtcgtggatgggatcctatttcgctcatagccagttgatggtccccattgtttgttcctcgcattttgcgactacacttggacgagcaactgatttgcaatgtagttacatgatacctttcgcttcggtttgatgttgtcggtggcgatgtgcaagagtttcgattggcgctgatttcggggagtaaacaaggattacatgcaacaagcatggttttcattaactatgtagtcccccatcccaaaatataagaacataggactggatgtggcatcttgcatgtccagattcgtagtactagaaaatgtcacattcggtcctaggttcttatattttgggacggagggagtattatgttctctatgtctttaggatggtgattcaattaatttaccaaactatgatatgtaatctaaggatctcttattgcattatggatggcgtaattctattagaattgctgactaaaaaatctatgtggtttatcgctactcaataataaaggggagttggaaatttgttccatcactttatttctcattttgatttatttttatctttaccttttctttaacaaacttatggttgtgtgtcttttgacagaagccggagatgtaatctatttccattatctaaaatgctatgatatgtaatttgtagtcgtttgaagtacaagttctgtaataatgggttatagcttcttcgaatcaaaaggctagaatgaattttattacttaaaaaaagagtagtaagtaaagattgagtagaattggaacagctgcgcagcagtgtgtacgtacctccgttgatgcggcaggcgggggcagagcagaggctggccacgaagaagca

SEQ ID NO: 13244 - DNA, 785 bp, Oryza sativa
  Intron number 1 from transcript LOC_Os11g31190.1 (locus LO C_Os11g31190) derived from phytozome v7.0 (chr-ID Chr11; p os 17707307 to 17708091 reverse strand)
tcagcatccctgggccttcgcctttggtctcctaggtgtgttgcctttgatctgatccaaggaattctcttgagaattaatcttgcatggttatttacttttgttgttattattctctacatttttaatcatgtacttttccatgttccacttttgttgccaaagctactatatttttcctaccaattcatccaaaactactatattatagcaaggcagctagtggatcgactttgcacttttggatgcaattgtgagtggtttacattagaggggccatgcatagccaaataaattgtttggcaaaatatgatttcccttgtagttagcacaatattgtgatctttcattcctttactctttttgttccaccaccctcattattgcaaagccccctcttttagaaccaaactaaagataagaaacatttgattcatcattagaggagattagatatacatacatactacacatgcattgctgtgataagcctagccaggcacagaaagagccaagacaaaaggagctcaaaagaaaaggggctccaatatcttgcccggcctgatcagtgtaacatgacgtcacccacacaattattaaaaggatagatgcatatgtgttcgttacgtatctccttgtgtcacgttgctgtgcatggttcactcgcttaattataacgtccgtcgcattttatgcatgcacttcgtttttagttaatcaaattaaacaagatcctaacatatgatttctattttattctctttgcaggcaacatcatctccttc

SEQ ID NO: 13245 - DNA, 653 bp, Oryza sativa
  Intron number 3 from transcript LOC_Os09g26180.1 (locus LO C_Os09g26180) derived from phytozome v7.0 (chr-ID Chr9; po s 15782368 to 15783020 reverse strand)
aagttcatttcggacattgcaagcgactctcttcagtatgtaacttttactgcctcattcgttttgttttccaacttaaacgtatgtgcgattattttgttcctttttagtggttatcgattcttggagtcgaattttcgttaccttcagatagtgaatgagaaatatgatttctgatgatggtcatgaaccatgaggtttcttgcatcattcataaatggaggtgtatgcaatatgcttcattcttgagatgttgagtagcctcatttctcctatgctggcagctttttgagataaccatgttgattttaggcttgttttcttcatactgtcaacttgcatcttctttgtgcttccttttttttgtttctatcatccttctcacattatgaccatggaatgaaacatcaaacatggtatcttatgtctatattgttaagacaatagattgcgaaatatgcataacattgatgtggtagggaatctaatttcagtactgactgaaactttatgtgtaaagtcaagcttcttatggtgttgcttgtatcataacttgtgacagttaaaaggtatcatgcacactaatttgttcatcacatgattattgtcctgaactaggcactgcaaagccagggtagcagcacctatcaaag

SEQ ID NO: 13246 - DNA, 526 bp, Oryza sativa
  Intron number 5 from transcript LOC_Os07g26460.1 (locus LO C_Os07g26460) derived from phytozome v7.0 (chr-ID Chr7; po s 15221267 to 15221792)
gctggcgagttcaagcttttcggtagcaatctttacctaaatattttgccttcaaaattaagttacatcttgtgttgcactttcactgtccagtaatcatcaatgatgcaactgcaacaaccaaaaaatataatgtttaggccctaattaacctacaattactagcatctagagggagcacactgtctccaatataacattaacagattgctctattactgtctgcaatatgcaactgttgctgttagattgaacctcttaattaccagcactgcagtactagattgactgagagagatattgaaggacctttcctttgatatatcagtaccataattgtttctcaattcatgtagaaatgattagtttttcatgcccaagagtttcaagttgaacatgattagtcttctttccatggccacagattgtaactagtatggtcttgcaagcatattattatataggagtatctaacaatccctgagtttcaggttgccataaagcttgctccagacaggaagaaatt

SEQ ID NO: 13247 - DNA, 645 bp, Oryza sativa
  Intron number 2 from transcript LOC_Os07g42080.1 (locus LO C_Os07g42080) derived from phytozome v7.0 (chr-ID Chr7; po s 25191827 to 25192471)
tccccaagaaaagtactactatggctcaacttatcgtgacaatgcttagttcttcttcctgcccattaggatatcttgcttctcgattaatacaaatcgactatatatgtagcataggtcagatagttaacacatgttacaagaagtaattcatgtttattttgagttgttgggtcaaagaattgggtactgaagtgttttactggagctctggcttatttggactgactgtctgttttactgagtggaacctgttatggtttcctatatattgttgaactttgatggactacataattttgacttcgacatgcacagagaactttctcttgcattcagcttggtgttgatatggggcctagaatccataaatcataatattcttttgggccttgcttccctgcgagctcaatttaaccagaaattcatcattttagtacctactcttcttttgtattagccctatctatatctccattgaaacatttttacaaattaatgaacatttcagcctcttttttttccttccaagcaatcaagcatcctctggttttgcttcattccttgcatttgtagagatttgtgcttgcttttgtagagctatttctgataagttttttttgtgtgttgatatcccatcagaga

SEQ ID NO: 13248 - DNA, 733 bp, Oryza sativa
  Intron number 1 from transcript LOC_Os12g08290.1 (locus LO C_Os12g08290) derived from phytozome v7.0 (chr-ID Chr12; p os 4220488 to 4221220 reverse strand)
cggcaaggagtgtggcgaagttgggggtgaggcccgtgaggacggagcccgcgaggaagatgcaggcggcgagatagaggaggggggagagggaggaggaagaaggaagggataagagatgatgacatgtgggacctacatgtcagtgggtcccacacattttttttgtgaatgacaaatgggcccgcatatatattttttatattaatgccacataagcgtcacgtcaatgccgcgtgggacaaacatcaggtcaacactaccacgtgtgcgccaccaagggagtcaaattgcaccggttttgcaagttcgggggtcaagatttctggtattgcgattgagggatacgatttagatgtggacagttgagggagtcaaagtgatcttattcctaaattaaatgtcccccattaacaacacgaaggcccacgagatgcaagacccacacctgtgcaagatccaaaggaaaaagtacaccgaaggtccctcaacttgacatcgagttacaaaaatatcctcaaaccgcaaaaccagatatccggcaccctttaactaatcaaaaccggttactttaggtcctccggtggttttgactccagttttgtccaacgtggcagctgagtcagcgtaggacctacgcgggccccacatgtcaggtgtccacgtcagcacctctctttttcccctcttctctttctctgtttctcctctcgtgccagatctcaccgagaac

SEQ ID NO: 13249 - DNA, 997 bp, Oryza sativa
  Intron number 1 from transcript LOC_Os12g27340.1 (locus LO C_Os12g27340) derived from phytozome v7.0 (chr-ID Chr12; p os 16072169 to 16073165)
gaaatcgtgctggcaagaagttaccagcatatcaggttgggctagaatttggcgccggcggcccatggttggtatataagcaattcttgctcaaattgttagttttatacactcgcttttgtatgcattcttcttttctagttgtaattcttctcctttactagcaattacataatgggaagagtttcactagaaatgaagttacacccaacctctacttctaccggtgggatgcacacggcctagaaaagaaaaataaaaacctaagacattgatgcatatcattctcttcccacaactcaaacccaaccaagacaaggacataaagtataatgccaatctctgggaactgtttgtcccatcatttttcattttctttatttgtcgtataaactacttggactgtttgagaggagaggaaaagagaagaattagaagatattaattaagtattaattattttaaatttcaaaaatagattaatctgatttttaaagcaaccttcatatagaagttttttacaaaaacgtaccgtttagtagtttgaaaaacgtgcgcgcggaacacgagactcaatctcccctatctcccctgaacagggaacgaacgatgttgtgtctcttaggacagaagacaaatatgtaaatcttttctattatataaaaaatatgatggacacgtaatcttccaagaaagatcaattttttggctgcatgtcagccactaaatcaccaatagagtaggttgtgcatttgctagtatgtcaacatagctccgtattccttcacactcgatgtttcaacagaaacataatgtggaacagggaagttactgtttgcaaggcacgaaagcttatgcaatgttgttcactgtgatgaacactatctgcaataatcagagcaagcatggagagcagcctgaccatgctatatacttattgagtgatcagtgatgcaatctagtgtattggaaattggagtaagtaccaaggattggg

SEQ ID NO: 13250 - DNA, 611 bp, Oryza sativa
  Intron number 1 from transcript LOC_Os08g03670.1 (locus LO C_Os08g03670) derived from phytozome v7.0 (chr-ID Chr8; po s 1744422 to 1745032)
ggtcgccgcccgaggacaacgacgataagggtatgatttgctcttctaaatctagcttggatcttaattttgatgtctggtgataacttactactactgatgttgtcgttggcatacatacatttatacctgtggaagttaggaatgaattgcttgtgttctcatgttaacagaacgagtagttaccagtccaacgcaatgcttatttaaggaacctataatgtatagtacggattaaccatcacaaacaaatgagtatgtagtgtttagtactccctccgtttcaggttataagactttctagcattgcccacattcgtatagatgttaatgaatcaaggcacatatatatgtctagattcattaacatatatacgaatatgaacaatgctagaaagtcttataacttgaaatggaggaagtagctcttaccgaattgaatcctcaaaatgcctaatgcaccaggaagttttaaggtgttgtaaattttcatacaatttcacttttgacatgaggtgagaatgttgtgtttagtgtaggtaacactatactttgaccctcaggttaacatatttggctaaagcatacaattttgtatttttggtcagttg

SEQ ID NO: 13251 - DNA, 983 bp, Oryza sativa
  Intron number 1 from transcript LOC_Os08g20230.1 (locus LO C_Os08g20230) derived from phytozome v7.0 (chr-ID Chr8; po s 12141356 to 12142338 reverse strand)
taattcaaattacgccgcaaggtacttgtgttttctttataaattatggtgtcttttcttttgttcaaatgtgatttatttatgaaatctttcgctatagattatatttgcactgaagaagatattcagatccttcgttatgtgagacaatttccagagagaaatggtcgtcgacgtcggcggtgcctttctttacaaatatgacatgaattgtctttttcatgacgatagttatgttaatggcgatgtaagtatagttatgttttgtacacatgccaaaacatagccaaaaatgatctaatgtttttttattggttctaaatgcttatattcattgtataagggaagaaaagcatcttattatcagagatggtcgaaacgtttttttggagagcactattatttttagcattcttaaatatgatggtgcctcaaacttaggtcacaaaaattataaggatgctactgttgtgacaagagtggccaattatctagctaacgacatggtaatctccataatccctcgtacatatcaacactattttagtaaataatactgacaaggaggcgtttgatgcagctattcatcccaattaacatagaagaatctcactggtacctagcagttgttaatgcccataaacgtgagatagatgtacccgactcgctagtaataatggaccgtcgtgatctccaaactaccttgagtaactattagacttttaattattgtttaattgcttattgttaagattaatgttattattgatcatttaatattatatgttcaacatggtagctaaaaggactgcatagacatatccaggttgtggctgaacataaagagcttagccaagaaacatggcagaagctttgatgttacaacatggccgtcatagaaaagtttccggagagaatacaaactgatggatatgtttcagcacatgcttgtacaaatgattaccatctctttaactaaatag

SEQ ID NO: 13252 - DNA, 871 bp, Oryza sativa
  Intron number 1 from transcript LOC_Os11g30400.1 (locus LO C_Os11g30400) derived from phytozome v7.0 (chr-ID Chr11; p os 17199343 to 17200213)
gacaaacaaactagtgcgtctgagttgaggaaaaaaaatactactactggtactacagtactactgcactagctttgcgttcttgctgctctcagcttctctctctctctcttctctctggctggctgagtgagtgagtgagtgatctggttaggacacacataatgcatctgatggtagtttgacggcgacagcagcgatgacgtggggttgagagcagccggaggaggagccaacaccagtgacatggagcggcaccccctggatcggccgcgccgccgtccatcagtagagtaggtaggatgcagggttgctgccaccgccacggcaacagatcggtcgtcggggaaagagaggacgaagagggaatagagagagggggagaggtgaggaagaagataggatggaggaagttgccaacataacgactcaggagacagttaataggatcaaagctatcacatcggttgaaaccgcctcccaaaccaacgaaggtctccatttgtaccagtttccaacataggaaagacgttatacccggttttgcgattggaatgtgcgattcaaccatgagcaagagttcattcagtgatattggaccggagtggagatccataaataacaggtgcaaaatgatctctctctctctctccagatacctgttaaactgaataatcactgaatggaccagcaataattatcatgcctgttctgtcttttggtttctacctaccagtactcactcaattaaccaagatattaatcgcctcagatattaatcacacggtggaaatcgaagggtcaaattaaaaatcgcctgcttctttcatatgtagccactcggttcaccgttcacaccatctcatttctc

SEQ ID NO: 13253 - DNA, 1015 bp, Oryza sativa
  Intron number 2 from transcript LOC_Os08g35310.1 (locus LO C_Os08g35310) derived from phytozome v7.0 (chr-ID Chr8; po s 22275430 to 22276444 reverse strand)
ttgtgttactcaaggtactataatttttgaagtgatttttttaggtttgcactacacatttttcctgtttctctaaacaaaaatgcacaagagtacaaaagaaaatgattgttgaaactgagcttggtcaatgcggcctatagtggagtccaagctcatggcggtaggaccgtgcggccatgggtggaagccatagtcgctgaacagaaccagacgccatcgctcctaaagtccaaaggttgcaggagggagaggggatgaaaaagggagaggccgacaagtgggtctgatgccacattggatgccaacataggcttaaaaccactcgtggttagcaaaggttagggaatgttaaatatccggttttatctagttgaagggggtaaatcgtacctttgtaatagttggggtaacttaataggcatgataaaggtcaaaagctatatacggttgtgtcatgtcttttgttagaaaaaatgaaataatggacttgtcttaaaaacaccttgcaactacgtaaccgtatattttacacccatcaactaacagaagttcaaagcttccaaaatagtacatcgtaagagcagtacaacccggtttaatggtgctttcttagttttgaaattcaaatatgctttttacttgtatgacacctaattaaaaagatatgtaaaagtagttaaatgtaagtgaaacaaacatatttttggatgtcaaaattgtgaaaaccactataaaaaaggctgggttgtactgcacttatttggaccggttttggtaataagagggtgcaaaatgttcggttcccaagatgcttccttttctttatcacctacaacacatgcgcacttgcacatctaaagtttgtgtcagatgacttgtatcttcacttaaaaagatgtaataattcataggttgtttttcctctattcccctaaccatgcctccagaacaaaaaaaaaatgatgaattgacctaattttgtactttggttgtggatggcagtttgtactac

SEQ ID NO: 13254 - DNA, 346 bp, Oryza sativa
  Intron number 1 from transcript LOC_Os08g06450.1 (locus LO C_Os08g06450) derived from phytozome v7.0 (chr-ID Chr8; po s 3620005 to 3620350 reverse strand)
cccgcgccctcgagcaggccaagaaatcgtaagcttggattatccaatttatttctaaattttttttcttgagttaccaagtatctggttgaataatcaaggaaaaaacatgatcaaattttagattcaaacagtgcattttcttgtgtgtttaatcaaccaagaagaaactttgtaggactttggtgcaatgcaatcggcagttgcagtttacatttttgatttctgaagatatttctttcagtttctgaattttgacatcgatttggcatccatttgcatcacatgatgttctgagttgctctgaacagattccccaacacatatttgctcgtgggctgctgca

SEQ ID NO: 13255 - DNA, 436 bp, Oryza sativa
  Intron number 3 from transcript LOC_Os09g36040.1 (locus LO C_Os09g36040) derived from phytozome v7.0 (chr-ID Chr9; po s 20752069 to 20752504)
tcaggccagtagcggactttaaagaggtaatgttgtaattgttctccacttatcttcggtttttgcaccataatgcagctcttaggtttaacacaataacttgaggttacgctttacattaatatgtaattataatcttttgtggcatttattcccttagaaatatcgtatattgaaccaaaggttctgactttacgcaattttagagtgtctgagaaataggagtaattttgtttggaagagaaaaaaaggtctgcagtcggtgaaaaatggatataattttgttaacaaaattatttccaatgatgtgcaagtgtatctcaaactttgttgctgtcatactatgtggtgtttgatacttagattcattagattttgttgcaaatgccatcatatgggttcattcttatgcaggctcatccacctggtgccgtta

SEQ ID NO: 13256 - DNA, 414 bp, Oryza sativa
  Intron number 1 from transcript LOC_Os10g12500.1 (locus LO C_Os10g12500) derived from phytozome v7.0 (chr-ID Chr10; p os 6962651 to 6963064)
gtcttcatcctcccctttgccctcatctttgagaggtttcttgtttcctactcttattcgcatgcaggccagaagaacattattgcactaaactagtgatggggggttaatttagggctcatctacggcatttagatggccatatatatagtagtttttaacttaaattggaagtattttagttttcgtgcaaccaaaaacagcgtttttctagtctagttgaaattgtgaatcattggatgctatggataacgccatgcgtaaacttgtggctcaatgatggataggtatcgccagcaggtatcattagcagtctgtaggatatgcatgcactgtaaaaaaacaggtgccgtgatgaaaatatagattctatttttgctaaactttgttttgtgtagagggaagtggagggac

SEQ ID NO: 13257 - DNA, 868 bp, Oryza sativa
  Intron number 1 from transcript LOC_Os11g11650.1 (locus LO C_Os11g11650) derived from phytozome v7.0 (chr-ID Chr11; p os 6472729 to 6473596)
acggggggtaggctagtgttggcagtggaggcaaagtgaggcgaaggggagggggagggggaggaggccagctgggtcacgctgacaagttgatgtttttggtgccggtgaggtggagtggtggtgccgccaaaaccccggtgccagcagtgggaggtaatccagtgtaggtggcggaggcaaagcggggcaaaggggaagggaaggagaccggttggcgtggccacgttagcacgttgacgccttttggtgttggcgaggccgagcagcggaacggtggaggagggggggtagaggaggagggaactcactggacggacatcgccgtcgctcaactacatcccctcttctccatggggccagtttgctggaagaggggggggggggggcgcgggcgtgtcgtcacccgctccactctaaccgcgtgtgctcgtgtgggaagagataaggaggaggctctctatgcagacttgtacatctcgcgcgtgccgattgacacctgtagaatgcatctcaagcaacataatttctctcagcgctgatcttggttattctatcttgctgaattgtttcaaaagttttcataattatttgagagtttagaataattccccatagttaactcaaagtataagatcataagttaaaaaatgtaacagtataatatcatatataaaagtcatgtaaaaagaaatattcatagctttacaacgggatgcacgcgcatgtgcatactaagatttacgaatacagtgtgtgatgcaatcgtctatactatgactttctctgggacgtgcatatcattaacattactctgtttgtccatcccacagcatcttcaacgagttgcagtcgcaggacatcctga

SEQ ID NO: 13258 - DNA, 902 bp, Oryza sativa
  Intron number 1 from transcript LOC_Os10g34180.1 (locus LO C_Os10g34180) derived from phytozome v7.0 (chr-ID Chr10; p os 18171001 to 18171902 reverse strand)
cgccgccgcggctccccctcctccccacagccaaggtgagctactccggcgtcactagctctcccgtcaagtagtatcaagtatgtttttcttcttgcgattttgtttggggttaggagagtgagtggttggatctgtgccttttcggctggtttaggtaggcgagcctctgcaagatttggcctggggcgacgcgtctccggcaatcgttcgaggtggttttcgtgaggggaatcgctatagaaggtaggaatgagtcgattgcgctgtggctgtttggtggatagtgttgatggtttttgctagatttgggtgccgtggcctagggtggcgtggtgcctagtttggtcgttgagtggtttggtgatggtgagatattgaggaactaatatggagatttactgggttgtagtggagttcttagacgaaatgagtgagcgcaacgtggaagctgtttaatgcgaaatggatagttttacagaatgtaatggagtggtcgcaatgagtaatctgcttaatggcaagtcggtagttttacagaatggaatgaacaagtagctttagccaggtagtaagatcagtgataatgtgctagtatctttgaccggtgttgctgcagacatgagcgtttagtaacttgcggtgtttctgttccatccatgtcagctaccttttgtattggcaaattattcattatgctatgtgtttgctttgttgaacctgctgttgttggccttttatggtgcatatgatgggttgtcttgttttgtggtcagaagttctttacttttttttccttttctgttacttattctgttgatatactttttgtaggattgtagctagttaagtttggcttgtctcgtactttactgaaagaactgatctattgtcttatgcag

SEQ ID NO: 13259 - DNA, 812 bp, Oryza sativa
  Intron number 3 from transcript LOC_Os09g36340.1 (locus LO C_Os09g36340) derived from phytozome v7.0 (chr-ID Chr9; po s 20973523 to 20974334 reverse strand)
cgctcgtgctctacctctggtacccaaagacacgagtaagcactcacctgattaactcaaatgtgctatatttgctttgatgcaatggtctaggttttgtaatgttactaatccattcgtgaataattgtctgctccgataatcaattatcagatttagtttcttgtagtacactcactcgacaaccgcaaaaattaaggtatttcactagcacttcaactacttgtagttgcataattttttctgggaaaaaggctatacaatcacttttttttcttataaacactcacagttttacaaatctgatcatatagaactctagaattaacgtgtgctcatctagtaaaaaaattcaaacggttgagaattatgtttgtatggttttttttcagtacactgtagcagtgctcttttttctactaatagtagaacccaggaattaatggttgagattattttcacagtagggccgagtttagttccaaaatttttcttcaaacttccaacttttcgatctatcacattaaaactttcctacacatataaacttccaacttttccgtcacatcgtttcaattttaaccaaacttctaattttggcgtgaactaaacacaccccaagatcgaatactaacagtagagacctaccataaaagtactgcaaaaagaaaattaaatctgaattcaaactgaagctgaagtccgaacattcagaaacgctcaaggagacatcgttctcaacattcagagacccattccatgtctgttcgttttcagggcgcgaagcacgtctacgagagctacctgcagcc

SEQ ID NO: 13260 - DNA, 737 bp, Oryza sativa
  Intron number 2 from transcript LOC_Os10g35470.1 (locus LO C_Os10g35470) derived from phytozome v7.0 (chr-ID Chr10; p os 18910482 to 18911218)
gggagccccgggcgttcttgtatcacaatttcctcgtgagttttttctttgccttgttccttgttctcttttggtttttggggggaacaaaccgcgcatgttggatgatatgttcattctacgacgccatttcactccattgcttgatgagatcttcagttttttttcaggttcaaataaccctctaattaggtgtttttcttttctttttttggttgatatgatcgatttccgtccgtcctttgggagattcgcttgttccttattggagtaaagaatctggatggggtgggtaaatttggaaattgtcttgctttagatgtaggaatgccaggtgagatttagtggtgttgtgaatcagagacgggcagagtgggattgctttccagatctgagcagctgcaccattggcattgcactttttacagagggagttgttgtacatggatgtgttgttcttgtctcgatgtttgagctgcgccgaataatttgtcgtcttctatttatttctttttgaggttagagagtattcttgtagcaatactcactggcattcttagtcagtttcaatctttgtttttttaagtttcaagcaataaaattgaagttcatgttgattgttgatgagcttgcgtggagcccaacttttgttttactgcaactactcatatactcttgtttggtttattactgatcaagaaatgactaacttctcttccttctcagtcgaaggaaga

SEQ ID NO: 13261 - DNA, 777 bp, Oryza sativa
  Intron number 2 from transcript LOC_Os12g09720.1 (locus LO C_Os12g09720) derived from phytozome v7.0 (chr-ID Chr12; p os 5132591 to 5133367 reverse strand)
tccagggattttgtcctgtcttgaaagggtcacaggtaattaaggacaaaataatctatttttagctttgttaaatgttatgaatcacttgacgtgcaatatcaatatatatggaatatgcaagatttacatatatgcagagccttgtcaccaagattgggccttgcggcggaattgatggagggagagctcaagacatcacagcaattccaaagcgtctagaatccattacaatacatagcagctggaatgttgattctgttaggaaacgataggcgaacaaacgataaagaataataaatcaatcacaaaagacacgagatttaacgtggaaaaccctcccaaaacaggagagaaaaaaccacgggcgccagccagcaaaatatcttcactatatctgaggtgaggttacatcgtcgcacggcggcttacaagaggtatatatatagtggaaccctaaaagggatgatgatccgtacggcagaagctggcctttattaagtgcaaatgaatttggatcacaactcaacaaactccaccttgagacaaattccttcttgtagcatgaatcaatcctttaccctgaacacaacaaagacaaaaaaaaacactttcggcgccaaatagcctctcgggctaaaccactataccaactaagcttgagcaaagctcaaacttagcaacaggaacaggttttgtcattatatcagcaggattatcatgagtacttatcttgcatacctttagcttaccttgcgcgactacatcgtgaacata

SEQ ID NO: 13262 - DNA, 446 bp, Oryza sativa
  Intron number 1 from transcript LOC_Os12g09720.1 (locus LO C_Os12g09720) derived from phytozome v7.0 (chr-ID Chr12; p os 5133498 to 5133943 reverse strand)
aaaggagcgtaatgtataccgttaactttttttaaacatatttgaccgtttgtctattcaaaatatttaattaattattaattcttttcctatcatttgattcatggttgaatatagttgtatgtatacatatagtttttgatagaagtttttgaataagacaaacagtcaaacatgtttaaaaaagtcaacggcgtccaatatttagggacggagggagtatattgatctgtatgtatatatgtgtatgcgtatgtatgcatgcatgcacgaggatggatacactactctagctcttttaatcacactataatgaaagctaagttctacacttgtattttggccattagtttttttctcaatcaattataacgtggcagtaacctattggtcgatgtggtgttttatgtatgtgctacacgttcaagggatccacacttgaggtg

SEQ ID NO: 13263 - DNA, 636 bp, Oryza sativa
  Intron number 1 from transcript LOC_Os09g18260.1 (locus LO C_Os09g18260) derived from phytozome v7.0 (chr-ID Chr9; po s 11211210 to 11211845 reverse strand)
aggtacaaatgttctttccatggttgtagcataaagagcatattagtggcgcatatgcggacctatacaacaatggtagttttccttactcgtaattttctaaaccaacctaaatttttctcactcctaattttgctagtattcatcatagtcaacttgttttaaaattgtctaatgagaaaaactatatatatgtttttttttcttacaaagtcttacaaaaggtgatgtggcccaccataattgaatcttgatgttctatactctcaactaaataaatcattaaattattgccaatttggtgaaaaatttgaaatctgatttgagcttgcatttaattaggctcaaggagaattatagatctttagtgcaatcatggattgatcaattgtaactgttttagagcgtagttcttttctgccctttgtttcttagtatatacactcttttccatttatataaaatttatataccgtggaggccttccccactgtttcttggtaaaaaaaaattaaagcattaaatcaaacgggtgagaactttgtttggaagagttctataagaatttttcttaagtacatatatatagcactgctcttgtgtaatccttgtacattcgggatcataggtatcctg

SEQ ID NO: 13264 - DNA, 553 bp, Oryza sativa
  Intron number 3 from transcript LOC_Os07g16150.1 (locus LO C_Os07g16150) derived from phytozome v7.0 (chr-ID Chr7; po s 9405234 to 9405786)
tggcgcggtcgctggtggacgtcgccgtgtcctcggtatacacccccatctcgatttcgtttggtagattttgggaagaggagggaggtggatttgttcgtcctgggtttatcttcaatttcagaggggggcagcatatggggatattttttagtctcacgtttgcaatgcctgggataatttgattgtgtggttcacagatggatttgccactagtttcctggtgaatcctgcaatttcgttattgtttgttgctacttgtttttacgcactaggattgtgattactcccattttttttggttggggtgtggggaattaatttgggttgagttcctggcttgagattctgtattgtgatgtttagctatatcgaacaattagctatgtgttgtttagctgtattgaacatatattgaagtttacaattagctatgttgtttacctataatgaacaattagctattctattctttcatttgcttcccagtagccatggttgaagcctatttgatcaatatctgaaggtagttgttttctttttcaggttacct

SEQ ID NO: 13265 - DNA, 1038 bp, Oryza sativa
  Intron number 1 from transcript LOC_Os12g22880.1 (locus LO C_Os12g22880) derived from phytozome v7.0 (chr-ID Chr12; p os 12909391 to 12910428)
ccccgccggagttcgtctcccgccggccaagacgggtacgtaatcagctgcgttttcacagcagcaaaaataattaatatcaactctttttttccctaatcaactgctttttcaactaaaagtacaactgttttctaataaacgtacactaattgttttttcttgcaaccatttttcagaagagggccatgagtagcttgtggatgggttgcttgggcctcaactgcgttgcatgagaatgcgatcgccatgaacaaaccaagctaactttatggactagtatttgtgtgtgactctgtttatctctctctctctacagtaagcttgtaggtgtagctaagctatagctaggagacagtttaagttgtaagggcagatcttgtcatagtagtttgctacttctactactataaatcttttataaagtatgagaccattttctatatctgtagaccaattttttgagttcttgatcactggtgcacaaattgctgatggggagtagtagcaaaatgcaaccaattttattgggagtgttgccatccgttgtttagtgcatgtcgttatcaaacaaactcttgcgatctgagcaaagctctgggctctaccggccggacttgggctctgttcgaaagagcaggttgggaacgtttgcctctggcacgaaaaatggaacgatctattagcgcgtgattaattaagtattagctaatttttttttcaaaaatgaaacaatatgatttttttaaacaactttcgtataaaattttttttaaaaaaacgcaccaaaatagtagtttgaaaaacgtgcgcgcgaaaatcgagaaggagaggttgggaaccatcacacacgaactgagccttgaatgtagtgctgccactatgtgtgacgtgctttaaatttacattacacttttgagcgacgcattaccatcatccatgacaagacttttcctgaacgccagtgaacctcgcagcagcagctgctgcgtcgatctgcgtttctctctgcgtttcttcagaaaggctctcaacttg

SEQ ID NO: 13266 - DNA, 920 bp, Oryza sativa
  Intron number 1 from transcript LOC_Os09g35750.1 (locus LO C_Os09g35750) derived from phytozome v7.0 (chr-ID Chr9; po s 20559880 to 20560799)
atattgtgaacccactaattggtacgtgatgtcatcatggttataatgtctgatattatctgccaaatatgctgctatcattgggctccattttactgctttgcagatgtttttactttctaaataacctgttttaggattttttttatgtcattgactgcctactttttttagtttgagtttttaagtgttaacacccaattatactttaattattctgaattctgaactaacttattgtcctcttgccacctgaaattgtcagctctcccttcaaataataatactatgatcctcaagtaatatcaactagtagtagcattctctgtacatatcagataatcgtgcttgtcatttttcttttggccttcttgtgtgatgggacttagttctgatttgtgtctcctatctagctttatgtccttttctgaaaatttatttgtttgatagtgtcattagatgcttatagtaaatggtctattcttgtaacatgtattgatgacagcatgggttaaaggatataggtctagtttagcaatcgagcataacctcatttatgatgttaagtgctgatgaagattgaaatgtataaaaacaatctatgttgtccacaatccaacagacatattaagcaggtctctctcgctctatttaattcaattgatagtaagcttttctatcagcttttgtacctctgctatcattttcgggtatatcttttgtcctctactttctgtctgccttgttgttgctacttcttatgggaaaaacatacaggattacttttgtgcgccaaacccatattccttttttttttctcaaaccattatgcagtgttttgctatttgtgctcttacatgggtgttttgaactgagctaactatttttcttgaatgatacagagcaaagagaggtgatat

SEQ ID NO: 13267 - DNA, 917 bp, Oryza sativa
  Intron number 1 from transcript LOC_Os09g31410.2 (locus LO C_Os09g31410) derived from phytozome v7.0 (chr-ID Chr9; po s 18891736 to 18892652 reverse strand)
atttcatcttcggcaccggctctgcagcgtatcaggtgatccatacagagataaatttgtccaaaactcttacatctgcaagaatggtttgaatcaagtgcaatgcacatggttcttggttagttcctgaacaaattcagagatgtatccttgcattgcttaattacttgcagtatgagggagctgctaaggaaggaggtaggggtcctagcgtcctagcgtgtgggacactttctcgcacatcccaggttattattattattaagtgttaacctcccactattatatatatagctggcatgtaaaatttaaaataggtgattaagggaaactattttcatgcctgcaggaaaaatcttaaatggtgacaccggcgatgtggcagatgacttctatcatcgctacaaggtagattctagtttttcttttaagtaaagcaggagttcttgctcttgaaatgcattcaaggaaacacattgttcggtattaacgcagtctttggaatatatatttacacactgtagaagccttttctacagtaatttccccaaaaaatcgcagtctttggaatgcaattttaatgactaatttttgttatagtatactccagcctctagtaaaaaaaatatttgacattggaagaactaaactcagttctcccaacgtcaaataaatttgaccgaagtgagcacattataaaaacctgattttactatgagattttacccatatgatttccatgtgtcagtctaattatttaaaaagatattaactcaaggttttaatctttgacttgttgtatgtcaaaaaataaatgttttcatgacttgatggaccgaataaaaagtttatcttggacaggaatcttcttgaactgatcattcatttcttttgttgaaccttgaaaatgcaggagg

SEQ ID NO: 13268 - DNA, 563 bp, Oryza sativa
  Intron number 1 from transcript LOC_Os10g21930.2 (locus LO C_Os10g21930) derived from phytozome v7.0 (chr-ID Chr10; p os 11230105 to 11230667)
actactgcagcaccatcttatcttgcaaggtagaagcatcactttggttggtaaatgcggcctcgcccggtgcgattttcttgggattttatggccaaaaattgcatctttattttttttttgttgggtgaggaggtggtgttctttgatgttcggaagattcttctgacgaaccgcctactggggtttgttcggaatcgaatcttggggtggtgattaggagcaaagagagagatctcgatgctaattcaattgcaattggatgttattgtttgatgcaaacgacgttaaacctggacgatattgtcgcatccagttgaacctgtagtacacttgggctgttcttgattaatccccatctccttcctcctcccaatctcgtctcctcttgtacccaatcatccatccattgccgccgctttcgtggataaagtgggatttttttttcgtggtatcttctgaatttgacgtacccagtttccctttcatattatcttgctattcatgttgcgaaatattgatttctccacaggttagagaaggaagttgtgagctttaacacc

SEQ ID NO: 13269 - DNA, 741 bp, Oryza sativa
  Intron number 1 from transcript LOC_Os11g04210.1 (locus LO C_Os11g04210) derived from phytozome v7.0 (chr-ID Chr11; p os 1714133 to 1714873)
gatcgggttggcttccaatttgtcgatcgatcgaggtgcgatggtttcttgtttcttcttgcacttttcccctttctgatctcttctgttccttgtactacttcttagctggtgacaatttggctgcttgatttggtttcttggagagtttcaagtgaggttttgtagctagattgaattgctatgagtgcttacagggaaaagagcggaattaacagcggcgttggtgtcgttccatttctgctagtattactaattactgtgcaatgggcatcattagttcattgaagcttaagcataccatttcatgattcaatgtttaaataaaccactttatggataattagggtgagtattttgtatatatgctgttctgttcaatgcgtaaagaagaagtttggtcaagatcgaggtccggtgtgcaggcattgcacattgaccatgccgggagaatggacattgtttctggagttccattggattagatttcaaactttcctttccatgcggattagtgtaccgtttctgactgttctagtggcttgttgcagcgatatatcccaactggtaaacggaaactaatgtttgttcagttggcatatgatcaatgagataatacgacccgatacattgttttttcctcctgttcttcatgtgttttgagattataactcaattcagtgacatatatcaagtgttcatatcaacagtcttcttcacattgtaacatctgattccaga

SEQ ID NO: 13270 - DNA, 656 bp, Oryza sativa
  Intron number 2 from transcript LOC_Os09g21750.1 (locus LO C_Os09g21750) derived from phytozome v7.0 (chr-ID Chr9; po s 13169341 to 13169996 reverse strand)
aggccactctttgcaattggggtatgtagcatgctacataagcatgctgtttcatttttgagaactgaaataatgcaagtattaatgagtaaatgtaaaatttgatcagtgctacaatcacaaatactccctccgtttcacaatataagtcattctagcatttcccacattcatattgatattaatgaattcaaacatatatatctatctagattcaataacattaatatgaatgtgggaaatactagaatgacttatattgtgaaatggaggaagtagttagtaaattgtagaacatatcgtcttagaacatttacaatgcaaatacacaaacacgcttctaaaaatacgtttttagctacttcaccagattattactatagatccacgcccataaagttacattttctaaaaaaccaacttttctgtcgtattacttggactacttatttctttattaagtttatttttaaactatttaatttatccttacaattaaatagatataatccgctctataaactacttcaaacaaggcctagttgtctaaaattttgaagagagggagatgcaacttgcaagttgcaacataaatatatgcatcagccatcctttttgcaggcgcttgaagtgtcacaatacacccagatcaatag

SEQ ID NO: 13271 - DNA, 763 bp, Oryza sativa
  Intron number 1 from transcript LOC_Os08g38190.1 (locus LO C_Os08g38190) derived from phytozome v7.0 (chr-ID Chr8; po s 24194984 to 24195746)
ggaagacgtcgacgtccagtagcacgaggtacgcaaaattatcttgtcgtctcaagctcagatgtttatgtgtactgtctcaagctattagatgttatacatcatgtggattgatttgccgtccaacttctattaagaattttctgtgtgcaatccgatttaggtcactatctacaataacagttgatgctattgctagtttgctactgcatatggcattgtttctgtgttattcaggcgcacctttaaattaatcatgctatgttgattctcaaataaatttgtgcctcaagttgccataagcatcttccagagtgtggatttcagatcaacaatggaaattttatttagattctgctttgtttgtgtttatgaatgtaccaataatttgagttagtcgtataaatagatacagtttattaggtgaaagagaatgatataatggctatatcatttatatgaccaatgttgttcactgtaaaagtgtttccagagttctcatcaaaattgtcttttaaaatggaaaagtgaatcaccctgttgtttttactagatattgaagtaaagttgtttttcaccattgatcattaaatccccaatgttgatgagcatggtctctctttttttcatcccaaatgcctagatactttattgtttctatttctgaaaatgcttatatgcttaggaaatgccatcaaaatgccatctagtattctgaccattaaaatatgtgtattcatgtaagaacctgcacaaaacgaat

SEQ ID NO: 13272 - DNA, 436 bp, Oryza sativa
  Intron number 1 from transcript LOC_Os11g41940.1 (locus LO C_Os11g41940) derived from phytozome v7.0 (chr-ID Chr11; p os 24759074 to 24759509)
gtgagtcgaaaccaggacctcaggtgctactaagactcttgtaaccactaggctatttttttaggttaactggacacatgccattacaaattgcctatttagaaaaacaccattactatccatcgaatcagtcggatgccactctgctcttctacaattggaaccgtaccactccgtcatgggttgacagaaaccgtgacggaatgacttggttccaattttagaatagtagagtagcatctaaccgattagtaatagtaatgatttgattttgcttttctccaatcctacaaaactgggaagcattgttctgcttagataatctacactgatgtgacaatttaacgccgtttgtgtaagttattaaaactggtcttttttttttcagttgggaaaagatggaaaggactgtagtcctgtgaaattcaaaaacagg

SEQ ID NO: 13273 - DNA, 740 bp, Oryza sativa
  Intron number 3 from transcript LOC_Os10g33774.1 (locus LO C_Os10g33774) derived from phytozome v7.0 (chr-ID Chr10; p os 17804616 to 17805355 reverse strand)
ctgcaccggtggtcgtcgactcagaaaatcttgaggtaattgaatattgatcgattcattacacaaaattaacatagatattagttttaacttaacttccagtaacaccactattttgttgctaacggttgatagtcaaatttagtagaaagctaaatttgggctaagttcagaaagctatgaaagccttcccgcaggggctggtctgactgagcacctagctgtctgactgacccttaggaacaggtctgaccgatggcgcgccctactgttatttgaccgaagaaatttggctgatctaaccagcaatcctaagtctaagttaattttgattccatattatgcttctttgcttgggaccggggtttgtttttattatagtcgtaatatacctctaaacctaatagaaatgaagagactttgtttcatgctaataaactatcaatcgatcatgaactgttcttttcctttaccctttacctaggagtagtttaataacataaatattcattagttcgcatggtaagacgtccatgctcgttccgagtgtgaaacccacggtaggtttttatatatatcgtcgccaagatcagaagctacatcgttgtttgatcataaagaggtgtcagcaccaactctgcatatatatatttcctgcatgctgcattttcttaattaagttttttttattattttttccatcaggaggacattactgaaaccaacgtccgaggcacttt

SEQ ID NO: 13274 - DNA, 624 bp, Oryza sativa
  Intron number 2 from transcript LOC_Os07g43330.1 (locus LO C_Os07g43330) derived from phytozome v7.0 (chr-ID Chr7; po s 25940353 to 25940976)
atacaggcgattggccaagttctatcaccctggtatgctctttacagttatttctacttttcctatcaagcaatcttctgttcctgtttattgctatcttgccaagttttggttgtaagcctgtaaaaaatccgatctcttgcctggcatactttgcgcagcataaagctatttctgcatgtgtaagtgtgcatatatctagcatgagattttagtggaatggacaattatacaaaattatggtagtgtagagttgcagaatatgtactctaacattatgattcatccattcataagcatcaaaattaagtggtcctcttcaagcctattaaaaagccaaaagggaatatgcaccgataaataaattcaagactaaccaaagtatgtctagcaaagcctggcaaaaaaaaatatgtctagcaaagagaagtgataggttggtagtttacctgctgataaataagtgaagtgtgcaataaactggtgcatggcaatacaggagggcactttttagttgattagtgctatttggtattcatggccaattaatgttatttggtatgcatggcccaatagtttttttttttctgttcattccatctgattattttgtcctcttagttt

SEQ ID NO: 13275 - DNA, 980 bp, Oryza sativa
  Intron number 1 from transcript LOC_Os08g42220.1 (locus LO C_Os08g42220) derived from phytozome v7.0 (chr-ID Chr8; po s 26664415 to 26665394 reverse strand)
agaagaaaaagaagatcaagaggtctaccctgtaggccgaaaaccgtcagaataatatgaattaccgtcagaaaatacttttctatgggtgcaccgtcagagtttgccgacagaaaaaagaccacggagaaaataaatttttctgtcgttttcctgacagaaatatcatttctgtcgggaattcctgtcggttggctcacaaaaaaaatcaactggcgtcaggtttgtgaaagcttatttttgacgtggacccgtcaggaaaaaccatcatccaccgtcagaaaaaatgagttccacgcccaaaaaaaaaacacatggtgatttggataaatatatgaacatcaatcacaatccatacatcaaaattcaagtctgcaaagcttacataaatagtccatctaagttcagtacatacaaattcattcaaactggatttagtaatatacaaagggtccatagaaaagataaatgtgttcagttacaattcatcaaacatatgtaaaagaacattgtcttccagcagcagtccgtgttccgcggtgcttcaaccttgggcaaaggaagctaaaaggttttaaaaaagaggttcaatttcataattttcttcattacaaaataaataacaatgattctgaataccccagttatagagaaacaaatagattagtacaggaaaaactgaagtgagcaacataaatttgtcaactacaaagcatgaaaatgaaatatggcaactgaaatgaaaagtgaccatgaaaatacttcctgtggtactctgccaattcagataagacataaatgctaggataataggatcaaactcattttctatggatgcttaaatgacaagtttcatggtgcaaatgctaggacatcttagactaagaaagatttcatccactgaatgagaagcataccttgattttcatcatgtgcaacgttctgtagatatttaactgcagcacttaaagattcaagct

SEQ ID NO: 13276 - DNA, 859 bp, Oryza sativa
  Intron number 2 from transcript LOC_Os10g37240.4 (locus LO C_Os10g37240) derived from phytozome v7.0 (chr-ID Chr10; p os 19861781 to 19862639 reverse strand)
gtgaggtaaaataaaaagggtaattttgaggataatttatgactaaatttccagtgtgaaaaatactcctccagcttagtacagtagatcatgaatcacagaatccaatatattcccccatggggattgaggtagaggagtttttgtagaggtatttgtgctcctctcccttttattacaagcctccacctttctctctcatcccacagtttcctacccctcctttcttcttcaccagtttgtctctctctctctctctctctctctctctctctctctctgtcctttcggttttaactagcattaggcaggtggttaggaggggaggtaaagctcaaagctccctcccctgacagcgcagcatcttgtttgttttatctcccacatcatctccctcatcatcatcatcatctcctcttcttgcaagcacccacaacaacacaaactctctttcttcatctttctctctcctcctcctctctttgttgtactctactcaacatttctcaactttcacttcttcttcttcttcttcctttctctcttcacagctatcatattctcctcctgcttgctgctgctgctgctggctgtttctctctcatccatccaccctattatttattcaaggctaagtgatggtatcttaattcttttttcctctctgcctcctcttcttcctcctcctctctctctcccttgctgttgcaggagtataatttttatttttgccaggcttcttcctgtactggtgtttccttgtttcctccctttcttgtgcttcttcttcttcctcatcttcttttttttttgggttttctctctcctgccatccttttcacctctactagctctcctg

SEQ ID NO: 13277 - DNA, 375 bp, Oryza sativa
  Intron number 3 from transcript LOC_Os08g37750.1 (locus LO C_Os08g37750) derived from phytozome v7.0 (chr-ID Chr8; po s 23911362 to 23911736)
ggagaccttcagggtttgttgtcttttctgtgtcaatgctaaagattttgacgattcataaatcgatattacgcgtatatttttttatcatatgcatatattactcagttcctacttggagattctgtgaaagctgcatgaaaaatggcattatcttcatcagtttttaggcccatagcttatttttctgttaatgcactacttatgttcctgaagttaggaaacagctagaaatcaaagtgttattaaaaaaatcaacaagaccatcaagtgcttgagtcactggttaataaatggccgagtttccatcctaattgcattttcttggtgctcctgtcagctttggagagtttcttaccgtgaatatcaattccg

SEQ ID NO: 13278 - DNA, 812 bp, Oryza sativa
  Intron number 1 from transcript LOC_Os07g46100.1 (locus LO C_Os07g46100) derived from phytozome v7.0 (chr-ID Chr7; po s 27514603 to 27515414 reverse strand)
gcggaggcaggagctcaaggtagcagtgacgtgcgaggttcatcgccatgggatcctcctcgggctcattgacaagcgtgaagcttcttgatggctagaggcccgctatcactaaccattgcttacgagcaccaccacccccgtgcttctcctgctagtgttaactatgccaaccaaggaaacaagggttgcattggtagcggctttgagctcaagaagagcataggacctttgggctccgggctcttctattcaccgtccttgccctctctggttctctctacgctaccgctcgttgccataggttccactacttgccgtcttcacaaagatcccgccacgttgggccacatcctctccccgccgacgaggtcactgccgcctcaactcttttttcgcgggggtgccatctttggggaccaccgagagagaaagagaaagaaagaaaggtaccacagagagagagggggaggagagagagtggatgataaaggaataaggctgcgttcgaatctgatgaaggttcagattaaatgcgggcacgcaaaacgagatagctattagcacataattagttgagttttaattattacaaacttgaaaaatggatatatttgataatttaaagcaactttcatatagattttttttttttgcatgaaacataccgttaagtagtttaaaaaacgtgctaacggaaaccgagttaaaatcttaatctttatgagaaaagagcgctacctaagtggtcattgacttgtggggtctaacataggtctcactgtatatttttatctttttagctgattgta

SEQ ID NO: 13279 - DNA, 775 bp, Oryza sativa
  Intron number 2 from transcript LOC_Os09g27090.1 (locus LO C_Os09g27090) derived from phytozome v7.0 (chr-ID Chr9; po s 16484218 to 16484992 reverse strand)
ttaggaagcttcacctctttgtgtcctatcaaccggtacattctgatgcctccaaatgtttcttgtttttctcttgccagttgataattagtttcctctaaaaaaaataggtgatcattttactttaaaatggttgatgtttaggttgaatcaaaatacttgctcgctgattaaactgcagagttgaatatgtgaaattatatgatttatcgacaacaattatatgatcatgactgttgttggttgcataacctcttgtggataggatattaggatcatgtttgctgggtgacataaacgtagcaaactttctgtgctgtctcctaatctgtaaatattactgtcatacaaagaattgtagatattactgtcatacaaagaattgtagatattactgtcatacaagggattatgtgattgtgcacatattcttatggtgaatatatattggcatccgtatgctttcagtaactcatttgtcttccaacttggtagtccgatggccttttacctttctgatttgctacattagactccttactttcgctctagaaaaaaggtttatcccctagttggatatgtgggctgtgggcctgtgttctccttgacaaattaacaatgtggaacatttccttcaataaagggatatgtgtttttggtcttgtttggacagaagggaaaaaaaacataatatgtcctttgattatttctatccatccagtttcaacttttaagttctgatggagtacctgttttcttcatatctttcagtcaa

SEQ ID NO: 13280 - DNA, 921 bp, Oryza sativa
  Intron number 3 from transcript LOC_Os08g01420.1 (locus LO C_Os08g01420) derived from phytozome v7.0 (chr-ID Chr8; po s 273922 to 274842 reverse strand)
atatccagcaggtaattgtttctctattgctcccatgaaagtaatttagctactgttgttggagggaaataatactagctagtgtttattcttatcttttatctaataaagatgatgcatattacctgtacttataagcgccctctgtatgctaaagcttaatgtgttctccatctattattgttcacaactccgtaaatcataagagcaaaatgttctacgtacggccagttgatagaatgatgctgatgctcaactgcttatctgagcttcttttgcgtttgctagttaagatcttcccaaattgtttgaaccatccaagcaacagactcctagggagtttatcacaactgaccttctagaactctggttgttagggttggaacgctagtcaacttaaatggtatactagccctgtttctacactatcatgtcttcgcaactttatatgctctatttctatctgtctgcttcatctgctgtccgcaacatgccaactcccttgcgcttcatggttgatgaagtggaccatggataatgtggttgagctggggtatgacacacacaaaattctggaacatctcatgcatgctgcatgtgtaaccactcaatgctgaggtttctgtctaagtcaactagggttttatcacttgttttcttaaatgggcacaacacaaaaaagaaaacttttataatatttagtgctagcacatctcaaagaccgaacaattactcttctatattgatttccttatcagttatcattgatatacttttttcatctgtgagtttttttgtttacattatattgttcatgctctaaacatagaagttgtgtagtaacatctaggaaaaattatacgatactgttgcctgctgagccttcctcttaatacaactctctatttgtttattttgtag

SEQ ID NO: 13281 - DNA, 893 bp, Oryza sativa
  Intron number 1 from transcript LOC_Os07g40810.1 (locus LO C_Os07g40810) derived from phytozome v7.0 (chr-ID Chr7; po s 24457625 to 24458517 reverse strand)
aatatcagtgcccgaaattcaaggtaacttctgtgctatttctgtccctttttcccgaatgatggttcaaattctggactattgccgttttgctttttgatagctttaggtgctagcaggacaccaacaatctggtacaaaaggcagcaaagtttctcttgtttatctatagttgtcccttctgtaaatagatttgcttatgaacttgaattctttccacaaattatatgttgaaaaatatgttgcaccgataagccaaaaacgtttggggagacccatatagcctagtagagcacatggttgtgaaggtggagatcatgggttcaagtatctactcttgaaatgacccatgtcgtcttctttttcttgaatgaaaaggcaggtgctctgcctattgcattagaggaggataaaatataactttaaggaggagcaacacaaaagcaaaaaacgtacaaactagctagaaaagctcttatagacgatgtcctgtgactgaaggctctggtcttgaaaagtttgcctgttccactccttccaagtgttccaacaaggcaacaactgtaaatcactagggcatttaatctacgcctccagtccttttgcatgtatgagcaagctttatgcaccaatctgcagttgtattttagtcttagaggtttggttgttgccacggttgtgcaatttgcccatgaatgacccatgtcatcaaaaagaaacctcttcttttagcaatttctccgtagtattactataaagtacagtttctgagcatatacagttttttttaatctcttttctacttctgtagtacgatttcatcacccagcaaacttacttagttgttcttgcatgcaggtatagtgccaatcatctcatctctggaactgctg

SEQ ID NO: 13282 - DNA, 676 bp, Oryza sativa
  Intron number 2 from transcript LOC_Os11g24680.1 (locus LO C_Os11g24680) derived from phytozome v7.0 (chr-ID Chr11; p os 13610246 to 13610921)
gtggctggccgtagaggatagggtggagtccaccggtgatggagattgtttgctatttttcttttgctcgttatctgtattgacatgaatgagaatgtttttgcattttttttatgcttgctagatgatggatggctgctattgcgcaacgtcgagctcatatctataccacaccgctacatccttccatgattccatgatggacttttggctgaattatttttttcttttctagtttgattcacctgtgagtaattttatcgcttgtgtgtgattgagcttgtaattttttcattcatacgactattttgtgaaacagatcaacaatactcttagtacaagtttttactcttatactgtatattgaacacatcagtaaacatattactacacggtggctacaagatcatggctatatcaagaggaaggtggtaattattttactcgcagaccacaaaatcttagtttttacttttactcttatattgtgtattgaacacatcactaaacatattactctacacggtggttattactacacggtggctatgacatcatgggctatatcgagaggaatgtagtaattgtttctcacagaccatgaaatctaaataatattggtaaaagaattactagcattgtaagctggtagtaattcttttatgaccatataggt

SEQ ID NO: 13283 - DNA, 590 bp, Oryza sativa
  Intron number 3 from transcript LOC_Os07g30300.1 (locus LO C_Os07g30300) derived from phytozome v7.0 (chr-ID Chr7; po s 17908158 to 17908747)
agaaagttgcagtgggaaaggtcaaagttgaagaggtgcgagatttttgataaaatctacttcgagttgcttttactcagttgttatcttgtaaatttgaagtttctgcttgtataacatattatttgaatcaagattcaagttcttgaaacaatgattagtacccttatcagttgatctgtagcacattctgattttccacacgaatcatgtgaacagaaagaatgccccagaggtagactgaactgtcatcagccaaatatagcagaataacaaataccttctgttttgacttttgaagaaaaagaaagaagtagtgcactttagttgttggcatttgagaacgtggttaggaatttcttgttggtggacatatcttctaatccatggtaatcttcaaaacacatgtacctaaattgagaacatgccatttgatatttgattggagattgcggcttgatctttgcattgtggttatagttttggttccttgtgttaaaatagcaatgttgcttagtgagattgaattttgtggtttgtttgtctttgttgcaggctgctaaaaaaactgctgacaaaagcaagactat

SEQ ID NO: 13284 - DNA, 778 bp, Oryza sativa
  Intron number 1 from transcript LOC_Os09g36680.1 (locus LO C_Os09g36680) derived from phytozome v7.0 (chr-ID Chr9; po s 21156550 to 21157327 reverse strand)
actcgccctttgatttttattatctcatcctcgtatgaactgcgaatcatcaaatatttaacttcttgcaatgatacgcattaagtttagttataaactatgactacctttttcttatttacactttcttattcaaattaatgaaaaagattctatgtttgtaattcttattagtattacataaaacttctgttcaaggatatgcatgttgtacatgatgtactattggcatctaaccttattattcacgtgaattaagaatttgtaaaattatgaaagtttcctcagaacaagtatatcatctttttttttacaaaatagaaatattaatatcacataaacagcctaaatggacaaattagctgtacgagattttgctactgtcctgtgttcttgctaaaacggaggtcaaagaatgaaagcacgacaaacgagcacatcaacatatttgaacatgcacagcaagcaggagctgcaagacaatatcgacaaaatctactgtgatatatatgacaaaagtctgatgaagtttcaacaatgttgatttagagcatactcatatcaatagtacgtaaaaccagtaaggaaattcaactagaagatatatatctcataggattcaggactcagccccaaacgagggggaaaatttcaaactgaaacgcagagcaaatataaatgatctctagctcaatagctcagcagtttccatggtgagtataaatcgattcgcattcgtgcctgcagtggcctggagcatactgcactgacagcgagt

SEQ ID NO: 13285 - DNA, 867 bp, Oryza sativa
  Intron number 1 from transcript LOC_Os08g12420.1 (locus LO C_Os08g12420) derived from phytozome v7.0 (chr-ID Chr8; po s 7329891 to 7330757)
agtcggggtagagcggtgtgtcgagcaggcctgttctcttagggagccggcggggtggtcaatagggtccgcgtggaagcctaggctgagccgaccgatggtgcggtttcaggagaaggcatcggccagaagaggaactgaggaggacgtacagcggagaagacggtgtcgtccttgatccagagaagcaacggcgcgaaggattgctgggtgtacgtagccgaggcgccatgcgggtgatggaggcggaggaagacgatgccgtgctaccaaggtcggcagctctgactgacgcagtgaagaggggtctgtcggaagcatgcagtgaatgggcaggaagaagaggactaatatgacaagtggggccagtggtatttttgacctttgatttttcatgttgtttctttctcctattcatatttcacttgcatgaatcttgaaaaaaaaatctaaattcaaaattatgtgaaagttatatacatgttacgtacattaaagtaatatgtaaattataatataattacactataattatatttacatttgataaatttttgtgagaaaatttgtcaataaatatatagaaaattgttacgtagcgacctcctactcagagcacataggggcttggctaactagtaatttgcatgtgctaaagctacgttgttattttgtgttgtaattcaaattatataattgatatgacaatatatgttttgacagtaagcatataatgaaatatatttatgaattgcatgggctatagtaaggcagttgaaaaggagatataatgaagggatcatttcaccggaaacaatttcctgttttgcaggaaacccacaatttaggcgattgtgccctcgaaga

SEQ ID NO: 13286 - DNA, 565 bp, Oryza sativa
  Intron number 1 from transcript LOC_Os11g46250.1 (locus LO C_Os11g46250) derived from phytozome v7.0 (chr-ID Chr11; p os 27534176 to 27534740)
gtgatccctaagcccatcgatctgccaagccaaaggtaaacccaccctgtttttaaaatctcagcacttgatcatggggtttagcggtggggtttaccgtgccattgtgttcatggatcatatcttcttgtattgcgggtcgatgtggtgatgaggctttgctcgcttttttttttgtgagaaggttggggaaattgctccaaagtaagctgcttccttttaccatgtttcaggtgttcttaggatatggagaaataaaatgcggtttttgttcttattacatgtttctacaatgtttgatttcatcagttagagaacgaaaatcatgccaatcagcgttaacgattttgtgaatcgataatagaatgggaatgctgtttgttttagatggacatatagttttgcttcactgttgcatcatcggttttactcgcatgccagtcatggggattccaatggtgtactgtccaggcaacactggtttaggcatttctctattattgttatctgatgggatttttgggatgaatatgtcaggggaacggccacacagggtgataaatcg

SEQ ID NO: 13287 - DNA, 601 bp, Oryza sativa
  Intron number 2 from transcript LOC_Os11g07840.1 (locus LO C_Os11g07840) derived from phytozome v7.0 (chr-ID Chr11; p os 3994876 to 3995476 reverse strand)
agaagacagcattgctcgacaagggcaaagagaaggtatgatatctataggttactactcatgttcgtcttcatcttcttgtttgaagagcagatgctactctttcttgatgcttgctaattttgtggttaaaaactggatttgatgcagtggttttatgcattgatttgatttctttgggatgaaagtttcagaaatggtggtgttccagggagaagaatatgctagggcatcatcatgcatatgctgggttgagataaaaagaaacatcataaatgtgggatttaggatctacgttttaaacatattcacattttttttttgcggggaagacacattcacagttttttaatttgtggggaagacatattcagctttgtgtgtgtgtgtgtgtgtggaagacatattaatagattttttttttatttgtggggaagacatattcacagtttggttatgtttttgcggatcattcatgaaaatgcaccatttccttttaaaaggaacctatctatttcaatatttgtgatgtggctaatcaagaacaatacatcgtgcatcaattagactaaatctttctttgatcatttaggtatcagaa

SEQ ID NO: 13288 - DNA, 670 bp, Oryza sativa
  Intron number 1 from transcript LOC_Os11g44340.1 (locus LO C_Os11g44340) derived from phytozome v7.0 (chr-ID Chr11; p os 26322887 to 26323556)
cctgcgaagcgactgcggaactcctgtgatttcgagtgagctcacttctacaatcttgcttcatttatgtttcacttttgcagtattttgtttgatctaatcacaacacactctcctttatgtgccatatgatgttcgttgatgtaaattccccacccccccccccctcctcctcctcagattaatctgcttggtaaagggaaagcggaccaggatttagtttctccagtttatcttcatccaaactcagcaacttgtgttggtggttcaatatgcaaaaaccacttttagccttgtgttcggaactctggtgagttccaagttgttttctagacaataaccatgtttgttggtcacgcctctctattcttaataaaattgaccatgcctgtctagtgaaaaagaagtaagtcagtaaatccctctcctgagaacagcatcgtagcctagcggcagggagttgccaggtgctcatgccaaccttgtgttcaagtgtgtctcaatccatattttctcactatcttattccctccctctataaataaacccttctctactaagaaaatcggttatttataatctatatgtgatttatgtaaatataataatttaagggaaaatggtacatattgcagtagatccacctttaggctgcggtcgaacatcctct

SEQ ID NO: 13289 - DNA, 455 bp, Oryza sativa
  Intron number 2 from transcript LOC_Os11g14040.1 (locus LO C_Os11g14040) derived from phytozome v7.0 (chr-ID Chr11; p os 7788321 to 7788775)
gatcaatctccttgcaaacgagcagtcacacccaggtaataataagtagtatatataattaaccaactaatcaagctctcagtttctccatcagctagcttatttcagattaactttttttttgtttagagattttcatatcagaattagtagttgtttcatttcttttcatattataagttgtttgactttttccatagccaaattttattacgtttgatcaagtttatagaaaaatttagcagcatctaaaatattaaatcatttttattaaatcttacattgaatgtgtttgtttgggttagaaatagtactatatttttctataaatttaatcaaacttaaaagaagtttgactagcgaaaaaaagtcaaatgacttacaatatgaaatggagggagtagcatgtaaaggaacggagctttgtgttggtagaatttgagaagctgaacccg

SEQ ID NO: 13290 - DNA, 1007 bp, Oryza sativa
  Intron number 2 from transcript LOC_Os09g15110.1 (locus LO C_Os09g15110) derived from phytozome v7.0 (chr-ID Chr9; po s 9156665 to 9157671)
tctttcttggcagggcttgtaagtcttttggggtttagctatctagcgcttgatgggtactggcagccccagttttttccttgtttttcctttaagtttctgtatttcagaccttgttatgtttggctttctcccaaaagccgggtaaataaattacctgttatcaaaaaaaaaagccaagggagaccagtgataaatgatgtccaagagttgttgataaaaatattaatgttcagctgagtgatgaagcactcgagatatcccctgcttagcttactcggagtgattaatttcgtgttactcagttagacaacctttgctcgtcgtgttaataatgaatccatgaattgctccatttagcttcatggaaattctttttcataggctaatcactgcagaaatcaaccaacgtcgttgactcatagtacaaaactcatgaattgtttactctatctatttatttctgatatatttcaacgtgataagtaactgcttatgttcatattattattcacgccatttagatttcaagttgatcctatgggtacgatgttattcttgttttaatattctggattctggttctgcttaaataattcaagttccctgcttgccatggatgtgtgatgtgtttcaatttggttatttgattccagtttcaattattctagtaccatgcgtagtcatgggagtgcaatttggttctttattcaagttcctgtggataagcgctgatcacgcttactcggctttgccggcaaatgctaggatgtattcactattgtccgggatggaaactactatttcaattcatgcctgcccgggatgggaactactatcttctttgacttggtgtttgaaaatatgtttcctatcaacgaaagaaagccttatgttcaagctttattgccaatgttgtgtacgtgtgttttctagttccatattgtacttgctgagtattttttatactcactcttgtgttttatttggttttaggtacgcattga

SEQ ID NO: 13291 - DNA, 395 bp, Oryza sativa
  Intron number 1 from transcript LOC_Os07g38664.1 (locus LO C_Os07g38664) derived from phytozome v7.0 (chr-ID Chr7; po s 23216626 to 23217020)
tctaatccctacctcaccacaggtaggcggcattgcttctgctaccatcttcctcttttgtgtttcaatcaacaaccgtttgatttatttctgaatcaaatttcctcttatgtttttcaatcagcaaccgtttcttgatttatttctgaatcaaattttcttcatgttaatcacttcacattcctgttaatcacttcactaatgagagttaaaaataagattctgagattaactctgagaacagcttaggaaagttgatattcacattaatttcagaacatcatgttccttgtgaataaatagtatgatcttcaagcacttcaagcaactattatgacttgtttgttttccgcattgtagtttcaacttgtggttccagctgaagcaattggaga

SEQ ID NO: 13292 - DNA, 563 bp, Oryza sativa
  Intron number 1 from transcript LOC_Os08g36994.2 (locus LO C_Os08g36994) derived from phytozome v7.0 (chr-ID Chr8; po s 23388107 to 23388669)
gccggcgacctgctgcttctgccgaattctctccggtgagcatccccgtacgtacgcgcatccccttcctcatccctctccacccacgccttctctctacgcggctatgccttaacccttagcttctccttctagatctagaagttgcttttctctttgccttttaaccttggtactaataatagcagtttgtttccgaagagaattttagggttcaactgaacccccatgcgttagctgtgtacatggatgcagaggccgggtttatcccattttctttttttttttaaaaaaaaactgaacacccatgccactcgttaggtcaggtcggcccctgttgttggtcttgtgatattttggaaaccaagatgctcatggtagtcacatacttggttctaatcagaacaaattggatcgcacatcatgattatatttgatttgcacttataaatgattgatgcttgctgttttttttttgtttttactgaagaaacacgttgttaattaattagttaattgttattgcagatttgcaggccaaaggcctgatacaattaccaaac

SEQ ID NO: 13293 - DNA, 922 bp, Oryza sativa
  Intron number 1 from transcript LOC_Os11g47330.1 (locus LO C_Os11g47330) derived from phytozome v7.0 (chr-ID Chr11; p os 27951473 to 27952394)
tcgccggtatcgacctccagatcctctccgcccaggttcgattctttcttcttcttcttcttgatctcaaagttttagcttttgtttccggtgatccctggctggtttggcgttttttcatttttggcctgatttgggcccgcgtgatttggcctggttgcgtgtaaagatctggtttttctttttttttgttcgctattcattactcaatgaggcattggcatctgtgaattcatgacaaaatagttctctgtttagggtaaaatgcgatgctttaagatgatagtatgaaatggggatctggctacaagtcgtatgaagatgcaatttttctgctgttgggcattgtggatgggctcacttacaggattttaattttagaatggaaatgttcttggttctgtatgcgagttatggcttgaactagtacgacttatggttgcttgcagtttggtacttgcagtagtattaggtgatactccatatagtgcaaaagcatcaattcctttgttagatctggagctttgtcttgcagcattgtttttgtttttttctatgtgtaaattgttagttaactctcgttactggtgtccgtatggtggtgaactggttatgatgttgacacttgaatgttgtcctgatgcaaagtgatttcctctgaaataaataacagtacatggactacgtacaagcagatatttccttttgttacattcacacatttggggtcactagggagccttcatacattttaaactgactgattttgaattatacaaactgtactatgtgtgaaattaatcgtaattacggttctcgtttgacatagcatatttttgtttgaagttaaaaatatcggtttggctgattctgggatttgtaaaaaggttacacaatcgacggacttcacagagctggtaaa

SEQ ID NO: 13294 - DNA, 1021 bp, Oryza sativa
  Intron number 1 from transcript LOC_Os10g03270.1 (locus LO C_Os10g03270) derived from phytozome v7.0 (chr-ID Chr10; p os 1383417 to 1384437 reverse strand)
ggaaaagaaaagaagagacagcaggggtattttggtacttacacaactctttctctctccattttgactagaaataataaaataatgtgagaagtgtccattagctaattaccacttttttatagtgtccacgagcaaacacacgatcttcgggtgtctcatagcaaagaccgtaatttttcggtgtcctgtagcaaattttgccaccttttttcatacctagaaagtagggaatagaagcacatagctgcgatatactaaaacaccgttaaatatcatctaataataaagtcatttaaatagtaccgtagaatatattctagggcacttacatgaaagatcgttttgacacacttggattatttgagcacattttagagaattcatgaagtaattggattgtttcctctaatgtgcagcacttcatttttcaatcaatcacaaataaagatataaaattataattgttgtggtatccaaagtcaaaagctgaccttaacaaaatatgtcattctagatatatattggaagtgagaacataaagtaaacatgaacggaatacataggaagaagagagaaaacgctttggaaacagaagtagtgcttatattgtaaaatcaaagtgtgtttgattcttctgttgtgatgaacaattggcatatgcgattattggttttgatatttggagattattggtgaagtggtttggagataattggatttacaggtgatggacaggtgctgctgactgttgggtctggttagaccgatggggtaaggcccgtcaggctagaggtatatgcgcggtcagaccggccagctcgcggtctgaccggccgactctgtgtcggttttggtttcgggttttgtcattggatatccgtggataatttatgtttataacttccagatggatactatgtggatgtaatactgttgtgtgctaacaatgagtcaagttggagatagcttgtgctcggatatgatttctttgtttgattcatgtgtgtaggtaatcttt

SEQ ID NO: 13295 - DNA, 666 bp, Oryza sativa
  Intron number 3 from transcript LOC_Os12g07700.1 (locus LO C_Os12g07700) derived from phytozome v7.0 (chr-ID Chr12; p os 3867719 to 3868384)
ttgagaaggtaaactgataatgaattgaattgaattgtcagttgtagcctttgttgcacatgcagaaacaaattgatgccttgaaaatttgttgaaaaaaaaagcttcaaagagagaactttgcatagctacctctttatgacaaattatttacaataacataattagtttgtgctgatcagcaaaattgttttggaatttttgttaaattttcattcaagtattggcatgtcttccttttccaggaactgcatcatctgttagatgatgtcacttgtcatttcctggggataaaaagaaccgcatactattactgtattatattgatctatattgattttattgtggttcacttgttcataacattccattttgaatttctattggtcgatgttgcttaccactaatgcatctagcagtattattcgaaatatacaaaaaaaaatgtgttcataatttaagtgagcaattcaatgacatggtagttttactcagcaaatatatcttaattctcatcacatgtggattcattagtctctatggttcacaccatcatatgtttgtaagttggaattgctctttccataatatggatcaaaatatataattggcagtaatagaaaagagatgtactgacaatgcatttaatttttcactaggttctca

SEQ ID NO: 13296 - DNA, 841 bp, Oryza sativa
  Intron number 1 from transcript LOC_Os10g33910.1 (locus LO C_Os10g33910) derived from phytozome v7.0 (chr-ID Chr10; p os 17935766 to 17936606)
acggccgccgccgccgccgccgcctgtccgccgtgagttcccctcgcatccctcaccccttcctcctcgcccccatcccgctcggcgcgcgcgcgatgctgctctgattttgttttttgtttttttgttttttttttgtgttgttttgggagaagtagagacccgtggatgggtggatgctgaggccggattcgattggcttgattcggggctcctcgatgggcgacacgccgcctgtgtaagatcacgggttaaatttcctcgtgtggttggtgtaatcgctcgattcgatacgcatgagggaatggatcgcggtttcgcggggtaggggagtggaagaacagcatgcgatcccgggggctcagtttgccagatttctccaggggaaaaataattttcgaatataaaccggcacagggatttgcctgtttttatacttggatcgcaccttgctttcgtttgttagatttggcagtacaaacgaagtcaaaccgcatcagcaaatgatttggtctgtgcaagctgccgaattacggcatcgcgttgtgataattagagacttcgctcttcaattattttgtggtaactagtttctgcgaccgctgtggcgtggtatcgtgcccgtaggtttgattggaatggattggctttgcttcatggttgatttggcattggatatgttgcgaaatgtcctcccccttccaaggaccagtgttgaaagcatacatatccaaaaaaaatccaaatgcatgaactactgctattttgagttgtgccacttatttacatagttttgctttttgatttacaggcagggaagcttattgcaaacttgattgtc

SEQ ID NO: 13297 - DNA, 1021 bp, Oryza sativa
  Intron number 1 from transcript LOC_Os08g12980.1 (locus LO C_Os08g12980) derived from phytozome v7.0 (chr-ID Chr8; po s 7701263 to 7702283 reverse strand)
accgtcaactctgcctgcaagatctggaggagaaggtgcaacgcatggagggaagtggtggcctgaggaggctcaatccattggttccgggagttggggtgattggatctagcactctgcaccggtaatcatgttttgtagcttaaaaagaaaagttatagctgtcatatttcaatatctttcttttggtattttttccaattaactcgaataagtggttgacatatcatcaaaacactgctgatgaccgtgtcggaaaaaacagagaagcaaaccatggaaattgttgataattctgtagatgctgcgatttacttaattgatttgctaagtttggtggtttaaaagatatgctcaaattaataatgggataccatgtttttgctagtttgttggagttctagatttcaggctttataatttacattgaggatttattagtggtatttatttactagtcttgggttattttttttcaggtttggatggttcaggtgccactgatttatttgctgagtttgttgcaattggttctttatttgtgttcttttgggcaagcattgcccccaatcggctcggctttaacagtaaatggtaaggacacattcaagattgtccacaatgggaattattattttggtgaatcatgtgatttcaaaataaatattcagttttattcattttagatggaaataattgtttaaattcaaatttatttgggatggaaactattatttcataaccgtcatgctttttttcaaagaaaaattgttcacgatcataccccttgttcattgcaaatctctatgtgttcttacaattccatattgtgcttttttagtatgttgtactcacagatgcgttggcatttcgtgcatggaagatattgcaatttaactttacatttgttattatatatacatgtttaaattatgcaccttagtttcatataagtagaaaatcaaacatagatatcatatgtggtttgtcctattgtggtagctcattggaattaatcgtg

SEQ ID NO: 13298 - DNA, 918 bp, Oryza sativa
  Intron number 1 from transcript LOC_Os09g29780.2 (locus LO C_Os09g29780) derived from phytozome v7.0 (chr-ID Chr9; po s 18098126 to 18099043 reverse strand)
cccgctgctcatcaccgccgccacaacccccctcggtgcgtatcattttgggtgataaatttgctctagcgtcgtgttcccctgacgcggacacgcattagtttaattattttgggtggaattggggggcaacaattcgctcgagcgccatgttcccctaacgtagaggcgggtactggtgcaatggaatgatctatggatgttgaactggattccctggcattttattctgtcgcgccacattagaatcttcaccgtagcatttaccagatgccagtatccttgcccttacttgtgatttactgcttggtaggtggtccgtccagtgaaacatcctggattggtattccctgaagattgtgcctacctgttgtctctttggtttgaagaatatgtgttgtcagattacgcatggtggcaaaggctatttctttaggggccttttgagctgttccgtgctgttaggtgggcatatttttgttgctcagggaaaaaaataagcaacagacgagaagtggagttgataatcagaaatctgattctcctgttagatggataatctaccgctcattaaaacgacaaaagctaggaatttcacatttggcaactttgtgtttatttaggcaactttgctatatgaaggcgtcgtgttcaaccatatgataaaggccactctattagagtattagtaaaaggggcacgaactagcaatctagcatttgccatgatattcaacattacagatttgttgtaagccctgcaaaactgtttttagttcccatacttgtctgagataattcagcaacctttttgattcaccttgtttattctcgtttgatcaagctctgccatgtagtaaatagtaatcaactaccattcccttgaaatgttgccaattcttccttttcattttcagga

SEQ ID NO: 13299 - DNA, 405 bp, Oryza sativa
  Intron number 4 from transcript LOC_Os08g01360.2 (locus LO C_Os08g01360) derived from phytozome v7.0 (chr-ID Chr8; po s 228772 to 229176)
aagacagtggtgtcctggtttcaagtaattctactcgaatctaccctatgtctcttatggtcctgaaatcaattttcttatgtctaacgatatgtcacccgtgattattacatataaaaaagtgtttctgtgctttgatctgatcgtttataatgtatcatgatactttcttagctacatgttagggatggctgaaaaagaattttcatcatgtctatgtcacaagatgtaaattgtaggaataattagcacccttttaaaaaaacaaaaagaagaagaagcaataatcagcatccttgtataaactggatatattacttgctctgtgcatatatatgcaatagccatttgagttttgactagaaattgttacagtggctgggagctcgtccgggatctacatat

SEQ ID NO: 13300 - DNA, 929 bp, Oryza sativa
  Intron number 1 from transcript LOC_Os08g09390.1 (locus LO C_Os08g09390) derived from phytozome v7.0 (chr-ID Chr8; po s 5446384 to 5447312 reverse strand)
gtcactggtgaactcttggattatattgtgagaaggtattgtttcccaaatactatattcggttctgggtttgaggggttgagcttttagcgatttacatggaccatgttgagatatcagaattaagtctcgtagcttaatatataaactgcttgcatatgtacagtatgatgttcaattaggctttatttatcactgtcaagttagttttgcatgttcatttcttgcaaaaagaaaaaaagggtttagtgtttatcagtggcggagccaggaatttaaacctgtgaggtcaattactagtgatttgtatttaagtgggataacttctctaaattcttttggatttatacttgaaaattgaggtttatagtacgtttttcaaaaagctgtggggtcggccgaccccacagaaatggcctaaatccgccactggtgtttatggctagccagctgctacaagtttcttagcccagtttcttggctttcaggaaaactaattgactggctgtagtgccgtactttgctacggataaaacaaaatatattatattattgactaaaataaataaataaatacgtattatttatcaaatgaattacccatcttttccctatggataatattcaccttaatttgattttatatgtcgttatccatttagatttgattgttttttaatattcagaaatttaaggggttatttgtaaattttattcacactgaaatttacaatggggtagttggggtggcagattcactgctgccaccactagagccttttaaaggagtacagaaaatgtgcactatgcaaaatgaaatattcaggacttattaattggcattgcttggtttagtttattgtcgtatctcattttctttcattgcctatgcagggccagtacattgaagagcattcgactcgttgcat

SEQ ID NO: 13301 - DNA, 649 bp, Oryza sativa
  Intron number 1 from transcript LOC_Os10g18070.1 (locus LO C_Os10g18070) derived from phytozome v7.0 (chr-ID Chr10; p os 9087501 to 9088149)
ggccgtgaatcccggtctggtttcttgtcctgttatgagtgagatagatctgcattttttttcttctgttggtcggtttcttcttctccgtgaatggatgtgcgagggccatgcgcgtcgtagtgggttttggattgggttcgtacgtagcgtacttctaatttggaggattttgttttaatcatgatccataaggctgttcgcattgttctgattttttggaggcaaattaagaaaatgatttaattccacacatgatcctaacaagaaggaactgaaattaaaccaattcaggtaaccaaatcatgatgtcgagttcaaatttaggtaaatgactgcgttttcatttgttgtatcttactccctccgtccttgtcaaactttgatcaagtttattgaaaaatttagcaacatctaacataccaaatagtttcattaaatctaacattgaatatattttgataatgtgtttctttgtgttggaaattctactatatttttctataaatttggtcaaacttaaacaagtttgacaagaaaaaaaaagtctaaacgacttataatatgaaatggagggaacagtatatatgatttggttgctttagactgaagagttagttacttctgctctctgttaatagatttcgtc

SEQ ID NO: 13302 - DNA, 974 bp, Oryza sativa
  Intron number 1 from transcript LOC_Os08g06360.2 (locus LO C_Os08g06360) derived from phytozome v7.0 (chr-ID Chr8; po s 3521864 to 3522837 reverse strand)
cagcgcttcaaagcttgattacccaaatactacaagtcagtctcctctctaatctatccttattttgcatttgatagcaggtagtcaattactcaattaggaattggttttgatttcctagatgaaagacaagtacaactttaaaatcattcacccaagtccagcccaatggtagtgagttcactccaaccccacaaaccgatgaatccatcccaaccccacaaacagcaggaacaggggctattaagtaacaatgggcagcttgctctaaatgtgattgttgctgaccctaggctttgaggacgcgcaatcactaccatgacctacatacttagtatgattcttcctttttcagattcagcttcaggttctctccctacggtagatgaagagtgaaaattatgtcccattaagtattctagtgattttttagttcagtgttgtatttttactgtatgcttagaaattttggttgaagcttgctttttcttttccctgtaatttcactgtgctttagtgtatgaattatcatggagagttttagccttcaatttgagccctaggcgtccagcgatcctggccccgctccgctatcctggatggtgaaacgcaaaagtacttatgtgggcatatcgtgggtgtgatgcaactatatatatatgactgggtgtgtgggaatgggatcatgaagtttgtttcagtcttcacccatcatattcttttagtcttgtgtacactactgctgtctgatttgtgcttcactactgagttgctctatgcccattcatctccattttcctgtagatgaatttattaacctctatatttgaggtcagtcaaaacagataaatttgatcgacttccaaatgatacggtttctttttattatagcactgtgctgatttcagtaattggatccctcaaattgtgaaatgcttgccaaagggaggaaagttgctggaaggggcggagac

SEQ ID NO: 13303 - DNA, 999 bp, Oryza sativa
  Intron number 3 from transcript LOC_Os12g03790.1 (locus LO C_Os12g03790) derived from phytozome v7.0 (chr-ID Chr12; p os 1543596 to 1544594 reverse strand)
atcgatatgtacgtcattacttcttaactttattgtaaattaagtcatttatatatcgcctgctaactatactttgcttggtatatatgcatgcgctttgatctttcctgtgtttaaggtcctcaattcattttttgttctaaactgaaaaggatgcatccatatgctactttaattagagtcatccaaaatcatcatctttgcgtgtgttcttattccacatttgtatatatgatctgactactgttcaatctcaatttatttctaatttataccacttttctacttggaatgtgcaaaataaatgtcagttagaaagttggataaactaatactctcgttctaactgaacaactgaagtaggtacataatctgaaagtcactaccagccagtgagcaggtacttgcctagcttgctgtagttaatagtgttcttgttttattgccttgatctgttacagctcataacataattaacaagatcaacctacccaataaccacaatataacagtactagttcgatttaacaccacttgaacatatagctaccagcctgttaattgtaatcaatattatttcttttgaaccacccatattcatatggattgaagaacttgccttcaggccagataacaaacaagctcttgttgtgagtaaaatatgagcaagcctttgcagttcatcactctgcaccgaaagatgcctcctaatagcaatagtaccaagagcaacctgtaactgtgacttcagttcttttctgataagcaaacggtgttaaacaccgtcagaaattactgcctaataaacagaggatatgtacaagagctcaaatgattttctttctggaaaacataatttcacagtaatgtaaaatagtatgcactgcaccttattacgggctacagctgaacgaattatgcttttctctcaaaaaggatgaactaaatgactgaattttcacaggctggatagtactgaattcaaggtagtatcctcaa

SEQ ID NO: 13304 - DNA, 972 bp, Oryza sativa
  Intron number 1 from transcript LOC_Os08g31814.1 (locus LO C_Os08g31814) derived from phytozome v7.0 (chr-ID Chr8; po s 19727936 to 19728907)
cgggccaccgggcgcaccacgtgggcgtcgtggaggtgagcagccggtagccggtttcttctgttgatctctcgatcgatcgccctcctgatttcgcgcgccttctgcatgatcaggagcgattagcgttaggtgtagcagtttcgcgcttcggggcggcataccgttaggtttgcttcgctctgctctgtgagtaccaaatcacaagttgaaactagctcgcgatctgtgttgcgtgagcgtgaccaagggtatttttgaaatgtaaaacagttatacggaaatatctagttaactttgtatatagataggctctggaaggtattctgttcagaaaattttgttgggaatatctatgtttcagcaacgttgacttaattgtttttttttgttttatctgttttgaagatagtagaaatgggctctcactgattgagcatcagagattcgtttgttacccagtagtacagatatgactcttattaatttatacaaaattttctagatgctggtgtcataatatgtgctaggcccgtcaccctgatttcaagaacagtaattatcatttattttaattctagcatggtttgtctaatctaagtatgaatcgcatgttgcacttgatgtttcctttgttatgttatacgaagagctagttgaccatcgaagaagccctttatttctcttttcgatactcacacaatcgaagtaaagaaaacatataattagtgtttgcttgctatccacagaactgccatgctgtttgtggatagtataagttcatctatcaattgttgggtagaaatataatgattcggtaattgattcagttattttttgggtagaaatataatgattcggtaattgattttgttatttttacgcacagactcaaatacattgagatttatgtgcgcatcatgattggcccactcaacgtggaattcattctccattttatgtgccaggggg

SEQ ID NO: 13305 - DNA, 826 bp, Oryza sativa
  Intron number 1 from transcript LOC_Os10g07040.1 (locus LO C_Os10g07040) derived from phytozome v7.0 (chr-ID Chr10; p os 3695960 to 3696785)
aagaggatatgtaagtagatcgataattgcacttatcatcattattattaatcattttttactaactctaatatgaaaaatttgcaaatgcttgcatatcgcggagtatcctgctatcattcgctataaaccatacataaataatatatttatggtatgtagagaaaaacaaggctataaaccttaacatttagatagggacctatagaaattaaatgtgtgattttaattttcttaagaaaagtgctttcattatatcatatattagttttttaattgttcgaacaaaaaaataattgttactgtcatggttttgttaaatatgatagctgttccacctattgtcgcgtcctcaccctaccatcacacatgcaagcaacagaactcgtgtacatataagtaaggaaacttacaaagattaatccatgcatcttactgaaatagcactcacatatgatttggaaattagtgggtagagttatggatgcacgactacgtcgtcagacaaatcatgtactgttcgaataaaactcatgtactatgacgctcttctgaaaatttaaacatgtatatcttcctaaatatttggatagggcatacagagaaatcaaatgtgtggttaagtttcttaaggaaagtgcttgcatgtaattattcaagcaaaaaataattggtattcatattttaatttgaagcatgtataaatgcccaataatatgttttattttttatgtaacctcacgattacaagtaataacaaatatacacgtgagtttctatttccatttcaggtcataaatctggtatagaaaagcgctacatccac

SEQ ID NO: 13306 - DNA, 1015 bp, Oryza sativa
  Intron number 1 from transcript LOC_Os08g18830.1 (locus LO C_Os08g18830) derived from phytozome v7.0 (chr-ID Chr8; po s 11240631 to 11241645 reverse strand)
attaaagtattcagggtataaatatattcaccaaggtatgtatataataggaatcaaaggtatgacaagaaagaaattaggagctaaagttctaataactctgttagataaaaggtgggacacaatagataaagcagcattaggatttttagaaggagacatgaatgagaatatgttgataacatatatagccccagatctaatgatgcctataaaagaatttatagataaaatgagttttggttttcaaacaaagggatacgaagaatttaaaggaacaaatttgctagtaagcatagaatttataggaagattaactaatagaagtgcctccaaatacaaaataaatgtaaatgacgtgattgaaaatatgcactctaagggaataactttcatgagccctctaaaaataagttctgaagaaagggcaggagaagaatggaaaattagtgatttaattgaaagcaaaactttgagtcagcctgaaaattttataagttatcaaaacagtaaaggaaatacaagcattagatttataaattacaaacccagaaccacagatgacttagaaacagaagcatctgatagaaatataatagataatagaagacatagtgtttcagagtttatggaaaaattagatcaagaaagtgagataaaatattacgaaaataaattaaaggaaataaatgaagaatataataactctatgaagtgtgagtggcctaaaataagagataaagaactttatttctatagagaattagctagagtaaagaaagtaaagaagaacgaagatatggcagtagaaatttttaaaaaccaagagcaagataagcatgacaaagaagagcaaaatcttggtaaaattttaagtgaagaagagcaatgggcagagaatgaaagattatttcttgaaagttatgaagaagaaattaatctaataaatgagatggagaatatagaaaatgaaatagacaatacagaacaatataatgatttataaacacattag

SEQ ID NO: 13307 - DNA, 525 bp, Oryza sativa
  Intron number 1 from transcript LOC_Os07g43810.1 (locus LO C_Os07g43810) derived from phytozome v7.0 (chr-ID Chr7; po s 26211143 to 26211667)
gtcgaggtataaattactcacacggcctctttttcgaatagattcatagtttcatctcggtaaattgggcgacgcaattttgctagagtggactaaacagtctatttatacatgaggaatccactagatgaggaattactgcaacgaattggttcagtgttctctaggatttatatttgagttttatatgttaatgctcaaatgttttttttaattggttcaatagtagttaaattacgcaacaaatagatgttctgaattcaattgtccagccaagcaaggcaactacagagtgtcatgcgtacaagtgagtgggttcttctcatgataataatactaaaaaaaactagaatattagggaaggacctaatatcaaataattaggagggatgaggctttaaacccaggtcgtctagcccaccaccttgtgaagctagccggaagacccctgggcatttctctcatgataataatactaggttctcgttttctttttttcttttttttttttgtgacaggttgtat

SEQ ID NO: 13308 - DNA, 632 bp, Oryza sativa
  Intron number 3 from transcript LOC_Os09g34130.1 (locus LO C_Os09g34130) derived from phytozome v7.0 (chr-ID Chr9; po s 20152434 to 20153065 reverse strand)
gcattgatcacttgcggcgaagagaagcgtttcaggtgatcatgttgatttagtaatgttcaccatttttaatttcgatcattttgacccgtatgttaggcattaactgtatatacgtgtatggctcatgtttctaactcatatgtgaatataagagtgtaatctgttcatcctttgccactttctacctttttcaatgagaaccataatgtacatggaggcaaaactaacgttaaatgaagaaaaatgagttttctataaaggagtgtttattgattgaattgaagggtaattggaggataggttgagtttgatttatgaatagcagacaggtaataggaaaggaggaaatacttgattttcccttaagattgtgccaaccaccaaatatctcaggaaatcagataaaagggggtgagggtttagtttttgctatatgagtctgaagtgtctgatccacatgccacctgaaaaggtttctgtgggaaaaggtggtggtgcaaaatggaatgatgaatgttctggtacaagacgatattattctcttttataaaattatagtgtgtaaagcagctactgtttgagttgtctatttatcctcctttttatccctctttatgccttacagttcc

SEQ ID NO: 13309 - DNA, 324 bp, Oryza sativa
  Intron number 1 from transcript LOC_Os08g09950.1 (locus LO C_Os08g09950) derived from phytozome v7.0 (chr-ID Chr8; po s 5752228 to 5752551 reverse strand)
atcagtagcagccgctggtatgtttttgtttttttttttactagacatacttccaatgttatatataaataacgttcattagttcatttttaactaaccaacgtcacattaaaaatgatgaagaaagtataaccctttagaaaatatattaaaactcgatctctgcatcgaagaacaaatgtgcactcccttacttgacatattgtttgcaaacttaccaaaaatttcatcgatttgatcaaagcataaatttattttcagctggttgagaaagaaataaattaccagttgcaacttgcaagttgtcgtgctcatgcatgcagg

SEQ ID NO: 13310 - DNA, 776 bp, Oryza sativa
  Intron number 1 from transcript LOC_Os08g42690.1 (locus LO C_Os08g42690) derived from phytozome v7.0 (chr-ID Chr8; po s 26980005 to 26980780)
gcggtcttcttcttcgtcggagtcgactggtagtaatgtcaatgtgaatctctctctctgtctctcgtaggttttgtagtgtgcccaagatgcgatggatcgtgctctcgttgattgttcgggatgcgtgattactggttcggttgttggtttatagggtttttgtttatgtgatctaggtgtaataaacccgcgaattagtgaaacgaaataagcccttcggtgtttgtttgattcggtttatttatgtttatgtagatctagccataaaaaaaaagaacttgtcagggcagatcataccatcatcacccacagctccttgtaaaggagtaaagaaactgaaattggaagtttatcatatcatgttagttttttttggttcatatcctcatcctgataagaaaaatatcaaccttgatttggtgttatagtagtagtttcttatgaccgacattatttttgtattttagaatttgtttatgtgattgtcagctgatgagctgataaaatcgaattgggaattatttggtgcgttggtcaaatccatcttcattcatagtagttgcgttctaatccactttgcaacctcaatttttcgcggaaaagatttattgcattgcagcttccctcatatattgtaagaagaaaaggtagaaaagaagcaaggaatcagttcttttattcagcttctttactagccagttttatgctttgttgtcaaagctggctacggtaccatgcgatgcatgtttctgatttgatcaattctcttgcag

SEQ ID NO: 13311 - DNA, 789 bp, Oryza sativa; identical to SEQ ID NO: 12966
  Intron number 1 from transcript LOC_Os10g20650.2 (locus LO C_Os10g20650) derived from phytozome v7.0 (chr-ID Chr10; p os 10359645 to 10360433 reverse strand)

SEQ ID NO: 13312 - DNA, 425 bp, Oryza sativa
  Intron number 2 from transcript LOC_Os11g11200.1 (locus LO C_Os11g11200) derived from phytozome v7.0 (chr-ID Chr11; p os 6192750 to 6193174 reverse strand)
gcggatcagctcgtgaggtggagtgatcgtgcacggtaagtaccccccccccccccattctacaggaaaatctaactgtacctctcgctgaatttatttgttctctcaaatttggattgcgttgcaaagtaagacctttccatttgcgtgatgttttgaggtgatatcatggaaaattagattagtgcttcttcatggaagaaatcgagtttaggatagacagaatatatcaagtatttattttggtaagtaaattgattctccaaaagatcatatccaagattaacgaattagtttcttccatttaaattttgatgtatttatctgatcaggatgacaggatttgagctcgccgagctgtttgactgatgattgatgcttttgctgtagggttttagctgatcgtgtgccatccaccgcaaagc

SEQ ID NO: 13313 - DNA, 651 bp, Oryza sativa
  Intron number 2 from transcript LOC_Os09g34300.1 (locus LO C_Os09g34300) derived from phytozome v7.0 (chr-ID Chr9; po s 20246540 to 20247190 reverse strand)
aggtgctctgtttacatcctttctgaacttattttgcttgcttcgtcaataattttactactttgacaggctagcttgatgaaatgaaattatgtaagagaaaatggtcaatgtttgtacggctacaatattgtgttctactgccatttttcttatcagatttacctttaaaacaatcttgttaaacttgtggttacacgcaaatactttcgtaatatatttcttaaaggcactaggacagtaagagtggtcttgttgtctccaacatctgtcctaataataccaaaggtgcaatttcataagattgaattgaattttattttaaagtaaccagatagaattgaacttttaaatgctctagtggcaccatctcttaatcttcagaaatgtagcgttcttctggaatctgcctttaaacagttaaaatatttgcattccgtgaattcaaaacaattgttaactattgtggtgcttatctctgtgtccttcccctgacataaaaacctctatggaaatattgcctttagacagttaatgtttttttttctgatataaagtgactgcagttgaagaaaaatagtttgtgcttacacaccccctctttgctttttattagtcaggttttcttgagaagactgcaaaattgtactc

SEQ ID NO: 13314 - DNA, 602 bp, Oryza sativa
  Intron number 1 from transcript LOC_Os09g34300.1 (locus LO C_Os09g34300) derived from phytozome v7.0 (chr-ID Chr9; po s 20247194 to 20247795 reverse strand)
tgctgcggcgcctgcgatactccaatctccgggtggtatgaagcgggttcttcacccctctcgatctctcccctgcgatttgcgattagtactagtgggatgtgggcagggtgttggttactggtgattttaggatgggattgctgcaaccttaggtttttgctgagatgatctgaacatctgtttcgggctgaatgtgaatgatctcgaaaaaaattggctaaagactcaaatctttttacattttgtttcagtgtttacacatgcttttgtgtttgtttagcttcatgaagtttttccctatggagattatttaggaggagggcatgttttggctgatcagatgtgttagctcttggctcagtagaatccatggccaattgcatgccactaactttatgattaacgcatattccccccccccccaaaaaaaaaaaaactatatgattaacgcgaacacatctcattgagatttttatgatgtctccttgtagattttatcaagttctttttttgaatgaaccggcacaaaatgattcacagctaattgtatcatccttctctttttcaggcaatttgccatccggagggcttgccaacta

SEQ ID NO: 13315 - DNA, 860 bp, Oryza sativa
  Intron number 2 from transcript LOC_Os08g37490.1 (locus LO C_Os08g37490) derived from phytozome v7.0 (chr-ID Chr8; po s 23748409 to 23749268)
actcgcccgaccgcgcgtgcacgctcgccaagcaggtgatttgcttaccttccgagttagtcagttcaaagaacagtgtgtagatctacaatttgttgcttgccaatggtaaggttccagctgatttattagtttctttgtccaattggtcctccaatatttagagtttttttcatgccaaggtagatcttgtagacttgtaatgcttgcttccgtatgattcatgcctcactgagcctacagtgttcagagagtgtgaaattcttcagttacagttgcattccgtagtgctttagctgctttggatatctggtcatggttgcttggcaagttggcatcctgtattagctgtgagaatctgtgatccatgccggctcaaattgccgcatgcatccaagatgtgaccgctgttatcttgcagagtggtggcccatatgcctgcttgctatgtgcaggcttaagtcatggcatgggttgcttagttaacaaaagaagtgtaccataccgctcatctgtctggcctgacaaacttgtttgctcatgaatgccaataattatgtagctgtatatgtttgttgcaatgagcttatgctcctcaagtgttcttttggagtcaattctataagggacatagtcccatgctgttgatgatatgcatgtattgatgtacaacattgtatcttctagtggtattattgctttgaattcctgccttcagaagtctagttgtccaaggtcatacatttctgtgaaacttttttgggtacaacagaaaaactaaattactgataataggcagctcatgttgtatttcactcattcactatgtgatcatactttctggtttatgtaggccttcg

SEQ ID NO: 13316 - DNA, 416 bp, Oryza sativa
  Intron number 2 from transcript LOC_Os11g05480.1 (locus LO C_Os11g05480) derived from phytozome v7.0 (chr-ID Chr11; p os 2463642 to 2464057 reverse strand)
cccaactccttgccttctgcaaacttgttgtaagagctctctctctctctctctctctctctctctctccatgagtcttcttttctctttttgtgattcaatttatgcaggtgcaccaagaaacatgatctgcaccatgcactttctttgcaagttttgcctagctaaccatacatatttactggctaaatcaaatttcttttacttgttttgacgtatgcttgtcaacttgacttcttttttttttactatatactgttcttcatgcttcgtagtacgtacacaagaatctttctgtagaccaattttgcacaattttcccccaataagctgttggtctaatgctaatacaaattaattacccctatgcatccctgacagcgagcagcaaggaggtgctaactattttggagaac

SEQ ID NO: 13317 - DNA, 980 bp, Oryza sativa
  Intron number 1 from transcript LOC_Os09g37900.1 (locus LO C_Os09g37900) derived from phytozome v7.0 (chr-ID Chr9; po s 21851822 to 21852801 reverse strand)
gatgtgagtgaaaattgctacatcctactttgaggggatagcatgaatgatattgatggtgatatttggctgtgtgaaatggttaatagacaaacatatgaatgttctgcatgattcaagagccgaagagactcatgtcaccttgcacactatttcaagaacttgctttgagggcttatcgtgtaactaggtgccaacgcgtcgataccactaattgcgactcatattgcctcatacatcaatgagatccttggttctattatttttcaagaagtattcgggattggagctaaagtttcaggcttcgagggttgaatgtatggatagtgatgtatacacttcctttatcacttttgtttgcatttagattatcagttttgcattcagattatcagttttgccaaaatcaaggaggagatcaaaacttgtgtcttggcgggagcgaaaaatcttcataattagctttcttatagctcaattttttcctttcgttttgtacagtttgctcatctattcaatgaaattggcggcttactgatttgttaaaaaaagattctcagcttttgtctgcaacacctttttcaaactagaacaggtatttagaagagcctaacttgaagtctctaagctaatatgatatggtcccctttctcttatattgttagagattttctccggtccaaccaaaaatacgtcgagatgctggtacttcacgataccaaatcgttggatctaacaatgcccatcctgcccagctagatccaacgattagaaacaatttgataccaatatctcgagatactttttgctagattggagcaaatcgcatattcttaaccccaccatgtacaagaccttgtaaacaagtttgcatgtctcaaatatttatgaacaaaaaaggaatcctaatcagcattttaattactgggattccaacttacacaggctaaaagagttaacaaacaacaaagttcatcgtt

SEQ ID NO: 13318 - DNA, 931 bp, Oryza sativa
  Intron number 1 from transcript LOC_Os07g39300.2 (locus LO C_Os07g39300) derived from phytozome v7.0 (chr-ID Chr7; po s 23526428 to 23527358)
gaatccggccaacccaactccgccgccgcaggtgcgtgctcgcctcgctgctctccccccccgcccgatcgaactggattgccgtccggaacagcggcccgatcgccccccaacccgggggtggaattggatcctcccgcccggatcatcctctgcccattttctccgcttgagctgctggcgcgtgctgccgagtgagcccgtgctgagcgggagcgctgctctccctcgggttgtgtaggggggcaggtgggggtataggtgcccgggagctccagttgagctcgcgttgtgcggttctcggggccaatgtggccagtctgctcgccatttgcttgtagggggttaatcggtcatcggtggaacccgagactgtcatttggcaatcggatagggttctgagattttttttggtctggccgttctgtgttgttaaacggtagagtgaccacaacttggatggagatgctcaagctcacccatggatggaattgattgagcccatctctagtttcagttctgagctaagtgaagagacttttctggtagtttctgcagtgattgcgtctgcctggaagtcatatctacatacacacgggatgatggattaggtatgagaaaatgcataataggaagacagttgcaaaataagaaatcggtcaggctagaagaaccaggactgttgtgaatccatcacatcacatggcttggaaaagccctctacatctttagaattgctggtcgataacaattaatatacatatttttttatgttccagagagatattttatttatttattaggattttgagtttttgacttacatgcatcagagataaatctttggagcttaagttccagtgacttaatccttttccttcctctgaccgcagcagataagacgcagaacagttctgtaccacctgtggaa

SEQ ID NO: 13319 - DNA, 504 bp, Oryza sativa
  Intron number 2 from transcript LOC_Os11g32500.1 (locus LO C_Os11g32500) derived from phytozome v7.0 (chr-ID Chr11; p os 18714962 to 18715465 reverse strand)
cttcgacaagcttcccgacaagtacttctgccccggtaagaacagctcgcaatttttttggtgaattcaacatgtgcaaaaatcagcgattttacaaggtttttcattcaaaagagaacagattttaagacatgatttctcacccaaaataaacagttttaactagaatatatgttggttttcgatgtgtgaggtgaggctttgtacagcttaaactgaaattaccagctgacattctgtatcagtctgtgttccataatcggaagagagagacccacccagagtttgcagctggcagcatatttaccctgttttaattaaggggaatcaaacaagaaaaatatagggaattttagtaaacaatttaattggatcattgagtggcatactggcatgatttcgggacaatcacattatgaggtttggtctgcattactgaatttcttctgtccctgcattgctgatgcagtttgtggagcaccaaagagaaggttcaagccgtac

SEQ ID NO: 13320 - DNA, 690 bp, Oryza sativa
  Intron number 2 from transcript LOC_Os09g26550.1 (locus LO C_Os09g26550) derived from phytozome v7.0 (chr-ID Chr9; po s 16048948 to 16049637)
tcatctcaagtaagcggtacaattacagcattctcatgggaattctgtagacagttggtacttataatgtagtaatatgagcataatatatgcaatcagtagcaagtattttgttattttcaagttcattcagtcggcacataagaactgtgctttattaaaagaaaggaaagctatgccatcatgtactatgggtataggagaatatgagagatgggattgagaggagttgctgcattactcctcaatttacagaaaagagattggctgtggattttaaactccaaacatacaacgatataccatagcttctattgcatctgatcattggatagtataagatgttatgatatcttcataagctatagtatatgatctaataaactcaaaaatgcaccaaattattaaacaggtcattactcattaccatgttaagtactatcaggtactactccctccgttccacattaaaagaggttttggcctctccatcccttgtctagattcaccaatatccacatgaatttggacacatatatgaagcacatacattgaatcatgcatgaatctattcaaaacccaaaatgttttttaaggtgaaacagaggaagtacactgtttagatggccttttataaattataacaacatctcgaattgttttggctcttatccatgaaaggttcggaag

SEQ ID NO: 13321 - DNA, 651 bp, Oryza sativa
  Intron number 1 from transcript LOC_Os09g37760.1 (locus LO C_Os09g37760) derived from phytozome v7.0 (chr-ID Chr9; po s 21756084 to 21756734 reverse strand)
ggcctccccgacggatcggccaaggtgggcatcgttttcgttccccttccctccccttacccgatctgagaccccccgctccgaatccgcgccaatttggccaattccgcgcggaatttggcctaattctggtgccgccaggggttcgccgtacggatctgcgcagccgcgcgccgcccgaggaattttctttgctattttgggcatgaaaaggtcgccctttatttatttatctttgtgacaaggtgcagtggtcaactcagctcagcggcgagctctcccaatcatttggcgggggataaaccaaaaaccctcgcatctcccgcatcgccttgcctgcggcgacaataattggcgcacaattctttttttttaaaatggctcagttcgaagcttttaaagtcgtgccctttttatggggggagggttttgtctgcttctcgcgccaaattttgctacatttcacggcatcgctagatctgtacttggttacaggcgctgtggtaaacgaaagccccacttttttcttgtgcttttatctcctccattattttggattcttaatctgagttttttttttctgtctgttttgattttctttttatcttttgctgttgctgccgcagggagaaaagacgaggaaagcgacgg

SEQ ID NO: 13322 - DNA, 924 bp, Oryza sativa
  Intron number 1 from transcript LOC_Os08g39500.1 (locus LO C_Os08g39500) derived from phytozome v7.0 (chr-ID Chr8; po s 24990748 to 24991671 reverse strand)
tacaccatcaacctccacaagcgcctccacagctggtacgtccttccgtttcctcccctcttctgttccccgctacgtcaactgtgagatctgatacgatggatggatcactcaattgttttttttttgttttttcctttattacatctgaattgcatgccctgaacagtagttttagatttgaatttacggtggtaaatgtgctcattgttgttctcgtgtgttttcttcctaagataagattggcttctatttgtgtactaccacgcccagtgctcgtcggaattgcaactagttgtcattgctcaccaacaacatcccaacaagttatctagttatcaagctatgcttaaggactgttcaatgagtcgttaactcgtttggccttccttgggaagatgtatatagctaattgatgggcacaatgcgagtcgcatttgcattttggatgcaactattgagtaccctgtaaacttgttaattgaattctagtggatgcactgactgggtttaccctaatatttgaaatgtggcacaaacttaataattgataatgaagaccaaggaaatgcttctttggtccttttaccaaattttcatactgaattttgtgtatttcgtagtgctcgcttttgaatttaatcagcactcaatgtatttatctgaacacgaaatgatcttaacttcgtgtcctgcatatttattttcttggcatggtgacctatttttactgccttaaccttgttttatgtagttatttaactgaacctctagaaatcaagtgctgtgatttctcatccaacacaacattatgccatcactacattatactgttcataaacatgaatatcacaacctgttctgatggataactctaatggttttctcttatgttgaatagtacattcaagaagaaggcgccca

SEQ ID NO: 13323 - DNA, 729 bp, Oryza sativa
  Intron number 3 from transcript LOC_Os10g36830.1 (locus LO C_Os10g36830) derived from phytozome v7.0 (chr-ID Chr10; p os 19647058 to 19647786 reverse strand)
gctcgacgtcaagtggatcaaggtaagatttgtccagagattccattgcttttcttacaagataagatcactaacactccctctgatcataggtagtccatccgtcccaaaatataaggtattggagtaggataggacacatctatgtccagattcgtactactagaatgtgtcacaaccagccaaaattatttatattttaggacggatggagtatttgatttgatgtttaggacaagattctaaacttgtaaaactatgaccatataatttttttgttagaatgagtttataaaatacaataagtttcaatgttacgatattactattcaagggaaatttgcttacaccattttttaactaggaatttcgaggaattattcatggtcaaagtttcaaaagaagtttgactaacttgtcctaagcatcaaatgttttatgaccatagtgtccagtagtctcattatctgtgatcactagattagttttttcatgaaaatgctagaagtctagaacacatgacagggtacatttagcacagcattctcttttttttttggataacagcacagcattctcgtccatgtgaaattaggatagaaagaaagcctagttgtacatgtaaatgcacacgctaagaacagtgatctctctaccagttttgtcatggacacaaactatatgtttttgtaatcgaacgttttggcattgtaggaagctatcgagata

SEQ ID NO: 13324 - DNA, 409 bp, Oryza sativa
  Intron number 5 from transcript LOC_Os10g42170.1 (locus LO C_Os10g42170) derived from phytozome v7.0 (chr-ID Chr10; p os 22609496 to 22609904)
atccaggagaaaccaaggacataagtggttacaaggtaatttgattcgatataatgcattgcttctgttcgacccagcagaatgagggaaataagaccatgctgcatgactgtcataacaccttagttttttagaggaaatggatagaggggtctttgtattccttatggacattgtaacaaattaattacctgggcaactctaaatcgcatagcacctatattttcttcataaagagacagcaatgctgagtgcggaaatagctctggtgcctgtattttgttgtgaacaccatcttttagaagctgttatcatcaccttgtatggctatctaattgccaagtgccattccaaatcttaacaagattcaaacttcttatttttcaggttgctagtcatccaaatatat

SEQ ID NO: 13325 - DNA, 619 bp, Oryza sativa
  Intron number 2 from transcript LOC_Os12g13230.1 (locus LO C_Os12g13230) derived from phytozome v7.0 (chr-ID Chr12; p os 7363307 to 7363925 reverse strand)
tggcaggaacatcagcgccaaccgcattggcggtatactcaacctcagcgccaacctcgttggcgccgaccttgtgcacttaagtccatcgagcaagcaataattctcctcttctctcctctctccctatctaggtttcatcccctcacagtcgccctctctactcccttccccaaatctcttcaaatccaccccaactcaaagggcatttcgttggcattgcgtgggggatcgatttgtaaggtaaaccccctcgaaaaaccctaattttgtcaaccggttggttatttccattgttcattttggttgaaaacgtggctcgagaaaagtggtgagagatgggatgtgatttaggggaagggagaggggtataatgttgtacttcaatattgatttagttatggacgattcatattgttgaactttaatttgataacctcgttaaaaccttagttttttgtaccatgttatgtttccctaaaccatagttggtgtgatttatggaatatacatgaagatgtattgtcatccgggagtatttatgtggtattattgttagctagagttattggttgattgcaattgatgtagctatttttttttcagttgtaattttagg

SEQ ID NO: 13326 - DNA, 945 bp, Oryza sativa
  Intron number 1 from transcript LOC_Os08g14660.1 (locus LO C_Os08g14660) derived from phytozome v7.0 (chr-ID Chr8; po s 8814585 to 8815529 reverse strand)
tttcccaggacgaccccctcttccaagacaagaaggtaccgtaccatacacacgagcgagcgcgaggaagagaatctctgccacgatagtttgttcttgtgttcatctaggatttggtttcaaagggatttctcttgttctgtgtttacttcactcgtggtaagaaggtaggagcagcagatggagaaaaaagaaataggcccccttttatccgctggtttggatcttgcgaaatgttttggttaagttagctttagtcgatgccatgcttgatatagtgtaaatcattactaccattgcaattatgaatgttcgaattagtgaattagggattttgacagggtatggagtttcttttgcgttgctcttcccgcataccccggtttgttgcgttcctacatgaagatgataagttcacttttagttgatttatttaagaggcagttaatctagaaaatttggaaaaatgttgatatattccacttgaagtgtttttagttttcattggttgagttaaatctttgaaagttgaacaaatacacaagtggcaaggaagaaaagcagatgctcttatcttttgtaataccatacaatatcttctactccctccgtttcaggttataagactttctagcgttgcctatattcatatagatgttaatgaatataggcacatatatatgtctagattcagtaacatatatatgaatatgggcaatgctagaaagtcttataatatgaaacggaggaagtagcttatattacagttctaaaatctcatgtggaaggtcaagtagatgaattaacacatgtttagtttctccgtttgtttgattctcatgcccgttggaatctgcagctgcagacatctcgaaaaattttagtaagttcatttcttatataaatgcagaggatattggacagtagaaacttatcctgtctatt

SEQ ID NO: 13327 - DNA, 902 bp, Oryza sativa
  Intron number 1 from transcript LOC_Os08g15149.1 (locus LO C_Os08g15149) derived from phytozome v7.0 (chr-ID Chr8; po s 9166457 to 9167358 reverse strand)
gggtgggaatgagtcatggggttaggttttgggtgtagttatttaggttaggattaatctggaccgtctattcgatcggacggctctagctgctcccgcgtcgggccgctggcctattgggccgccgaatgaaccgtgtggtcgatttcaggaggatgcaaaatggacttcaacagagaaaggaaacaagccagatacatagaatagacataagggagagaaaataaactttctatattcggctcaaacctgaaagggaggattttgattcctttttccaattaaataattgttaaatgaggtttgtattattaaaattagcaattaagctctgaaaattccaataaaattccaaagagcttaactaaacatggagaatttaataaaattaaatttaacctgtcattttatttctcatacttatttatttgtaagttgattttttacataagggagggaaactttctacgtaacgtaaatttttcttaacttttcctcaattttctggtctgtacactttccgttgcaacgcatggacacttttactagtactcataaagctataagctgcttctcaaaattttaagtcagaattgggggtggaataggagcgaattgaaaaataaaacaggaaaatagaagtaggaagtagaaacggaagagaaacagaaaaaaaaaaaggaaaaaaagggacgtgggaacgagatctgagactaagacgctcgaattaggctaccgataatttacgtacgagattcattctcatagaacaattttttagctgactctataatacgtacgagattcattctcatagaacaattttttagctgactctataattatttgcttgttttgtgcatgcgtgcagccacttgaaggaggtcgccgccggcgaggtc

SEQ ID NO: 13328 - DNA, 811 bp, Oryza sativa
  Intron number 5 from transcript LOC_Os07g20150.1 (locus LO C_Os07g20150) derived from phytozome v7.0 (chr-ID Chr7; po s 11633169 to 11633979 reverse strand)
caaagagcagggaagaaccttctcgatagtaagtgttactctttctcttctagtcatgatacaatgaatatttaataagattgattactaggtggatttagagtagcatctgagtcgcaacctgcaaatatgcaggaatatcatatttaatttctcagtttgatatcataaattcactagccaagagcctgtgcgttgcaacggaaaaaataagtttctagcttgttaagttgattaaacacatatttagtctaagtagtacttttatgattttcattgaacaagtaggttatttcaaaatttgggagagccagcagtgaaacagggagactcgttgaagggtggtggaatagtatagaccgtgggtgtccccaaatgtcagtagtaggggtggtgtggcagagcagacaccaccactactaacattttaagtagtatagataaccttatggcaatagagatactgactatgttaatttaaacctcgtgttttcatagcattggtactttgtgttagaagccttttgcttaccatgtccatgaatatgttgacactcctgatgtcaaacactaagaactggtgatgctctcagtgtacaggctgttctttttttctgtcgtcatgatttttttttgcttttattacgaattagttataagtatttctgattaatgcttactttaaaaaagtttgtagatttaaagggataccacatatctacaatcaacagaatttaccaaaaaatattcattatattgttttatttgcaaatgtttgtagatttgaaggggttaccacttattcatagct

SEQ ID NO: 13329 - DNA, 368 bp, Oryza sativa
  Intron number 2 from transcript LOC_Os07g38060.1 (locus LO C_Os07g38060) derived from phytozome v7.0 (chr-ID Chr7; po s 22819909 to 22820276 reverse strand)
cagtcgaaataccacgctttcctcaggttaatgttaattactgatcgattcattcccttctgatattagagagaatgttgtctctatggatccttccctttatattcttgttggtcgtttattctttactaagtcttgttgctgaaacgtacaagttaaccttttcccaagttcatcaatgtttttgttaacgcacgattcagcttttatctttgagtcgctataaatttagaaagtaatatataatgtttagcgtttcttcctacttccttgcactcatttgctgtttttaatctaccgcaatgttttctggtgtttgttttcttcatgcagaatatctgaggaggttgttgaggcagaacaagaat

SEQ ID NO: 13330 - DNA, 580 bp, Oryza sativa
  Intron number 1 from transcript LOC_Os11g15180.1 (locus LO C_Os11g15180) derived from phytozome v7.0 (chr-ID Chr11; p os 8556451 to 8557030)
ccaagaattctaggatacaagtttgtaccaaccctaactttcttctatttgtgtccttattagtttttgtttcattagtcattacaaactacacatatatatgttgttctgtgaaaaattgttaagcaatttatctccaacgctgtaggttgtactcactagtgatatataaagagaacatataggataactgctaataaacatttgtttgtacatatgtagtacatattgagttaattaactagagtcatgtgccaaatcggcaagaacaccacactttttttctcactttcaattaccttggatagtggtggcaatcggtcaaacttttaaagactacaaagtttgagttgtgcaaaaaaatggtggactgaatttttgtagattttttttatttaagaatatatgtcggctaagttggattgtgaaaggatcggtagattgtgatctgttactaccccttaccatggacctgcattagagttggaaagtccaagtgtattatttgtttgagcataattttgattttactttttgctccatatctttctagagaagagctattcttgctactaggcca

SEQ ID NO: 13331 - DNA, 491 bp, Oryza sativa
  Intron number 1 from transcript LOC_Os11g07270.1 (locus LO C_Os11g07270) derived from phytozome v7.0 (chr-ID Chr11; p os 3660021 to 3660511)
gcaaaccctgcactcaagtcattggcagtaacaaggtgaattccacactcccaaatcccaggcagtaaacaaacacacacatgcccagatagttttctttgtcatctcattctgcaagatttttttttctaaaaaaaggaccatctggatatgtttgtgttttctggatttctgaatatttaacattagataatggttgcatgcttgaggctacgcctatgtgccaaacttccaaatcaaagaaacatgatgcttttttgaaaggttttagttagttttcaaatggttttggtgcccatcacctcctccattgtttttgaatcttggtttaagaaattaaagcatatggaagaacaatgtaaaaagaataatctccacataacacaaatgaacacttgctaaaataaattcaatatatctaaatttcatctgctcttgtttatgcatgtaaccaaggtctaagatcaccaaagatagcttcagctagccag

SEQ ID NO: 13332 - DNA, 1038 bp, Oryza sativa
  Intron number 1 from transcript LOC_Os09g10960.1 (locus LO C_Os09g10960) derived from phytozome v7.0 (chr-ID Chr9; po s 6046618 to 6047655 reverse strand)
gtgccaacaggtccgtgtctcttcacattttatcttgttgcctccatttactgatgtactcctagtctgtaatggaatgtggataatcggatgggtgaattcctagccaagagacttcagtccccatctatccttgcacgcttttcacattacaaaggatgtccattttgattgattgattgattgatgcaaacggcttctattcagtagaaagatatcctggtgttaacaacattaatatttcagttaacttattttcctagtgtactgtactgtactttcacctaggccatctgtagtgaactttcaccaggtcaggtttattggttagtggttactgttgggtggttccagctgatccaccactctagatctcctttttaagggaagtacactgtcagcatatattgataaccagtaagttattgagtggatactgttgtcatgcttttgtacattttttcgaaatgttggtgcagataattttacatttttttaaacctagaaacatatatttttaagacttaagaacatcattttagtttttctgatattttggtttggtggtatgctctagcaatgcatttaagaacatagtctcatgtagtcaagaaacagtaactgaaatcacgattctatctacaaacaattgttgcgaactgatgtttggacaaattctgttaaacagaggatatatacctatcatctgtacaggttgagaatggaatctttaaggttgatataatattccataggttattctgtccatgtactttgcagtcttcttcttatacgtgtactcgtgtagattcaaagtgatttgcgtgattccgccgagctattgtcttgcactaggtacacccctccaattcttcattttgttgtttctcaattgaacctatctaatattttggtgcaaaagctttgtttttttggacagttactcttcaaaagattcattacttctatttaccaaataagattttccttttaatttgtgcaggttccattggttaattattgtcaacagcttggatc

SEQ ID NO: 13333 - DNA, 913 bp, Oryza sativa
  Intron number 1 from transcript LOC_Os09g02284.1 (locus LO C_Os09g02284) derived from phytozome v7.0 (chr-ID Chr9; po s 926665 to 927577)
gaacccttcgacaccgccgctgctgctgaccagaggtaaccccccctcccctattgccccattatggctattattgcaagtttatttcagttcaaaatgctgttaggaacaggttgactctatttttaacattatagactatcttgtttggcaactttagggaagaggattgggagtttagatgagggaattgttggtgagattaacatggaaatttgctttttagtcccaatctcttgtttggcagagatggtgggaatcgataaggagtttagctatagattagatcttaaatgaaaatggatggttgagatttgtttaggtaaagtaaaggagttccttcccaattaccaccctctacccaggtattagaaaggagggagttcctccctcaatttttctctatccccatcccacccaaactcatgtttcccaaccaaacagaacagttaataacctcatccctctaaactcccaatccccctaaaagctccgcccaaaccaaacggatccaggtctagcactgatctcttatccgaggcttttgttacaagtacaccatatgttcatttgcttccatttttcattcctatgtgaagcattgagcaaatgcccaaaattccaaattaacataactaatgtggcgaatattcctatatcagttccatgtttagaccgcaggtcatgttccagtcttatatttggatgatgccgacatacatgtattttctgttctcaaaattgtcctagttagattaggagcatctgctagtattttattatcttatattttcttttaaatgccataaaagctgtaagtgtactctctttctgaactaatacttacaaacaaccaacctataatattttaattccaggggcatactaattgtaaagctgcgtcggggccaag

SEQ ID NO: 13334 - DNA, 741 bp, Oryza sativa
  Intron number 1 from transcript LOC_Os08g10450.1 (locus LO C_Os08g10450) derived from phytozome v7.0 (chr-ID Chr8; po s 6142062 to 6142802 reverse strand)
caggctgtcgtcgctggaactgcaacatcaggtagtgctccgatttcttggatttggatagttctcctgaaatttttaacacatcatgttcacaaatcagtcattcggttcggttgacatttagagctgtcgaatgaattcatggcgattttaattttctgagcagaatccagtgaaagtggtcaattgtcttggtccagttgagttctctgatggttggattgttaccccttaaacttgttaacacgtccgttcacaaatcagtctctccgtttgacatttagacctgtcaaattcatggcggttttctgaaaattttctctggtactaatttagtcaaaatggtcagttgtcggttgtcaattggacaattgcaaatgtgtgagctgagaaattcgatcaggattatccattgtgccagtctattgttatgcataaacaaggtgatttgaagttagtgatcaagaaacaactactggccatctctttaaatccatcaaattaaagttagagtgacacgccaatggagtacttgcaaactttacacattcaagtgaagaaattgcaaatgcaggcatttcgagaaccaaaaggcaatgtggaaacataccagcaccttaccaatccgcgtacttgttgcaattcagattggtttgacaattgttgcaatacactgtaacattgtttcttatattgaattttgcaggtgtacttgtctcagtattgagggtaattaccaaa

SEQ ID NO: 13335 - DNA, 969 bp, Oryza sativa
  Intron number 2 from transcript LOC_Os09g21250.1 (locus LO C_Os09g21250) derived from phytozome v7.0 (chr-ID Chr9; po s 12825030 to 12825998)
cgcgggcgccggcggggaccgcgggttcagctacggtaaggaagggggagggagatgcccgaaccctagcgatgctctctcgatgtctcagctgatttgtgttgttctgcgtggtctctgggttgcagagtgataatgcctgtttagctgctgcgatgaactgatcgtattggctgtgtggtgatcccatttattggattaccgatttcataatttgtgccatgaacacaatggagatgcttggtagcacaggctgagcatgcctggttcatgcctagtggagaaatatacaggattagctagggaattaacgtgtctattaccatactttatgcttagaaatttctagtgaaatgatttcaggaaggagagatgcatatgccttatggtgatatagcggcatttctagaattatgatggcgcagatgctggcatggtgatttggtactaatgctaaatcttgtttgttgggttctctaagctgaaagagggaatgctcttctatgggtttggttagacaagatatcaagtggtgccaattagttttcttgtgtaaatctgaagttctgaaccgatgatatccattgtattgatgtttatcaacagtgtctcataaattacgatattatttttatgattatttaatcaatgtcaaacttgttctgtgcatgagtttcttgtccttgcactaggaataaaaggtaatagaaagataactttcgttcatttatcttgataacccatataggtttgcatctaggtttcccacttcccacagattatttgcttgctacttggggttgttattttttgtgattactaagaatactgacatagaacccaactttccattcttttgattgtttttggaaacaacgtgcagttgtagagcttatcttatgtgatcttaaccctagtttctgtgtctccacagagcacgttccagtgtttccaagataccggattcgt

SEQ ID NO: 13336 - DNA, 477 bp, Oryza sativa
  Intron number 1 from transcript LOC_Os09g11160.1 (locus LO C_Os09g11160) derived from phytozome v7.0 (chr-ID Chr9; po s 6184793 to 6185269 reverse strand)
cacgcgcccgtcgctcgtgaccccgcgcactgcaggtttggagccaagccgcacgcgccgcgcccgtgtctgtccgtcaatgcactgccctgccgctgccgaacgccgtgctgcacagccttcccgccggccgccggccaccagcgcttcaccgtcggcctccggtctccagtctccagctagggtttggggaattaggggaaaggggagaatcaaagaagcaaggagtcggaatgggctgagagggagagaagagagggggagcggagtgggaaatttgggcccaataacttgggccaatagatgagaaagggtgaggtaaggcctaaaatgagtggtttgtttacctattgggctgtataaggctttctttttattgttttgaatacatatatgaaatctataactaatataaatatttggatttttccgatcgtcacaggttggacgaagggcgtcttcgtccctcgcgggcgc

SEQ ID NO: 13337 - DNA, 747 bp, Oryza sativa
  Intron number 1 from transcript LOC_Os08g33479.1 (locus LO C_Os08g33479) derived from phytozome v7.0 (chr-ID Chr8; po s 20881308 to 20882054)
tggtgtgggtgtagagatctgatctatatatccaggtaattaattaaactaattacgttaagtttactttcgagccatctgtgatcttggcatgactgctggtttgcagctatggctttcaaaagcttgctgtgtcaatctcctagatctaatggttggcacagcaagtatataacacatattttggtttgttcacctagatctgctttcctttactgttccatgtcaatattgatccttgtggaacatagaatataaggggcagcacagatcttgttaaattacatagtgtgcttgatctgtggtaccagtttgattttttctgatacatgggaatctcatactaaatgccaacgttacttttcctttccaaaaatcttgctggttcaggtattatttacatatcaggtgcacttaacatgcatgtacgcttgatctaccaaagatgtcttcagcaagtttattaccatctatcataaaaaataagtatattacaagatgcaacaaagcaaaggtgccactatactgcatatggaaccttaagtgaagtcacctcactgggggttttagagttggagatgcctccattgtgtgtgatgcatattttccacttcggatggctaataaagtaataataacatagcaaaactatatttgttattgacaatacttgacacttgattgtgctaacatttactagttcttcttgtaggttttgtaaccaggggcaataagctagaggcagca

SEQ ID NO: 13338 - DNA, 378 bp, Oryza sativa
  Intron number 3 from transcript LOC_Os07g46580.1 (locus LO C_Os07g46580) derived from phytozome v7.0 (chr-ID Chr7; po s 27819377 to 27819754)
ttcagtggtatattgccgtatcgtctaatcactactaattttttagttcccgtagctaacccagcattgtaaatttatggatgctcttgcttctctgacttactagtgtttttttgacaacgtgtttaaatgttgtggaaaaaaaacacttagcgcagcagcaggttgtcttgctcagtaaaagttcaaagaatttcagttattagatgcattatatgatgttcctttggtgatcaacagacatgctagtgctgatcaaagagagtctcttactctcttcaaagagagtatctattacttcttgctataatcacttttctattgatgatttttctttcctcagctgattggtggaattcctcggacaagccaaaccat

SEQ ID NO: 13339 - DNA, 568 bp, Oryza sativa
  Intron number 1 from transcript LOC_Os11g46210.1 (locus LO C_Os11g46210) derived from phytozome v7.0 (chr-ID Chr11; p os 27513303 to 27513870)
gtgtctgctgccaagatcttccgtgctttgccaaggtgaacaatcttttcactcctgggcttttccttactgcaagcaatgaaggtataggcaccattatctttgaaccttggaggaggaaaaaagttgggagagaaacaaggatgtagtgttcatttgattgggaggggtgcagttggtaaaatttcagtggaaggaaagtaacgctttttactgcttggtacatttgcataggttagacaatttatttgcatgttcacaggaattggtcacactcgatttcagtttgtgtactgtaagttattatttcttacgaatatgcatgcatcaaagaggtattgcgtaatagaagaatattgatagagcatctataagttataaaattagaagaaaaaaaacatatttacatgaggtagcactggacaaaaagcgctcctgaaaataaaattacgttccaagtattattaataatgattattcattcactgtatggtttggttttcgttttcatttttctccttttccctgggcaggccaaggaaactctcagctggggttcagtgcttga

SEQ ID NO: 13340 - DNA, 1015 bp, Oryza sativa
  Intron number 1 from transcript LOC_Os07g33110.3 (locus LO C_Os07g33110) derived from phytozome v7.0 (chr-ID Chr7; po s 19772045 to 19773059 reverse strand)
gtttgggaaaggttaggcgccctcctttcgcttgggtacgcgtctctctgtttttcggttcttggtttgtttggttcgagaggcttgtagtctcgcggatttgtttttcgttgcagagattattaggagttaatctgttcttcttggaaggaggttcagtgattgaggatttgatccaactgtgagaaaaatcttggcccttttggatctgggagcggtgcaaagctactggagcgcctcacatgtccacaagtgctcgattttagcagtttcatgggttatgttcttggattcagtagatttctgatgcagacagtaattttttaccgaacaagtaatcggtgaatttacagttttttctttctttctttattacgagaggacgaagctctagttcactgtaccttgtttattatcgcttcctcctcgtgtaaaggatcaatttttacgatagcgatcgtgagtggtttagctccccctctctctctcttgccgctgggtgccttgctggtcccgttgctttcagatgctgctttatttgtctccttttgcccaatttgcgtgtacccttgtgcccttatctcctatggttgcttccactgtcaccaaagggggactcgccatctaccttgttcctcagttcatgcgaatttcatgcggtcctgggctgtgactgggagtagattgaggtcaatatgctgtcaaaggcatttcttttcttttccttttcgttgcttgttttccccttctgatgttgtgtgttgagtttattgtttggtttgctggtagatccagtatttggatcatttttccttttttttttctttcattgcttctgcggagggatgagtttgtgcatgaatcttttgttggttggattcgcttagttttcacactagtcctttgattcagcgcaaatctttgttaattggctcgcttaattctgacataaagtgttccttcttgggttctgcttgcagggttgatctcgtttgcggagtaacaaatttgcaag

SEQ ID NO: 13341 - DNA, 743 bp, Oryza sativa
  Intron number 1 from transcript LOC_Os08g37590.1 (locus LO C_Os08g37590) derived from phytozome v7.0 (chr-ID Chr8; po s 23805708 to 23806450)
ccctggtaaggtatgcagcccttttgcctcccttttttttccctttaaccctcctaatccttagctttacctgttcatcctgaagctcatagatccaatttatccagtccggactggtgctcactctgcagcatgaccctaaaccttcggtgaatccatggaatgatcctctaattcggtatatactgttttcccatgcttaaaccactaagctatataataaattttctactgttatatgcatacatacctgatctggatccttccctatccttatccctattattgatctcctgctcattcggttgcagaatcacccacggaaaagcaatggcatcagctcacgtgcaaactactgtggcttctatttgaaggtactaattctgtttttttgtcttctcccagtgatatatgtgacatgggattactcattctgttatttaattgtagttactggtaggtatggtgtttacgctatgagcaagtgctctcttccatccctttctaacaagtcatttttctttgttgatagaatgactgatgtatgcattgatcatgttctttatggaacatcttagatgtgcaatttagatgctttaacaataatcctggggtacttactacgtcaaatctttgaatttggcttcctagagtttcaatcatacctctttttttcttttttttttttacttatgcttgatgtgcaaacttattccaggtccatagactaccaattcccctag

SEQ ID NO: 13342 - DNA, 942 bp, Oryza sativa
  Intron number 2 from transcript LOC_Os07g22720.1 (locus LO C_Os07g22720) derived from phytozome v7.0 (chr-ID Chr7; po s 12816728 to 12817669 reverse strand)
cactgcttctggttcgttccccaccaagggaagtatgtgctacccatcttttatcattttattttgattgtgtgtatttgtcaactaattgaccacggtacgcaagcaacctgtttgtccaactcaactggagatgtccttccacatgactaattgctgtgatagttagcaaatacctttatttctttcataagtgtctgctgcttttaatcatgcagttctgttctgttccaataactttttatttctgtattatgggtttgtttgtttcctaccataccaaaatattagcaataccaaaacctaggtgaattttagccttttttttcttggcaacctatgtgtgttattggcatattttggtagcaaaccaaacactagccaaagtactattcgaagggtcaacaatttggtagggcacattttggcgtcaaaccaaaatggtcctgccatcataactgaaaccaatatagagccttacataggcaatttagttataaaacgtttggtttcacaggtgttggtaatcctggatcctccagaggcattcattgattgtgtgttggtggtctgtagtctaatatagacagattgtcaattgattacaaacatctgtacaaaaaaaatatgttgcaacagaagtacaatccaatatgttcattttttcatttcttgacacattacctctccactaatttttgtacctttggctaagcatgggttggcttcctgagctgatactataatttttaattaaggcgtgatttctcattgacatagtataggcacactcattttgtcttgagatagtagttatttggttcctttgggaatttatttgtacagtgagaattcaccttcttgattgaatgtcctcattaagcaattttcaccattgaagttttagtgcttttggtttccacaggtgctgagaaaagaatt

SEQ ID NO: 13343 - DNA, 621 bp, Oryza sativa
  Intron number 1 from transcript LOC_Os07g34430.1 (locus LO C_Os07g34430) derived from phytozome v7.0 (chr-ID Chr7; po s 20649326 to 20649946)
gctgtcgctagtcgtctcccttgaacgggtaacaggtgtgcaagccggcgtgggagcggaagagaagatgagacatgagtaaagaatcagcatagttgcattactccgatcgatcgagctgctactgttcgtttcctcctccttgatttacgtctgttgcaacaaaatacttcctctgtcactaaatatttgatgccgttaactttttaaaatatgtttaaccgttcgtcttatttaaaaacttttgtgaaatatgtaaaactatatatgcatacataaaagtatatttaacaatgaatcaaatgataaaaaaataattaataattacttaattttttttaataagatgaacggtcaaacatatttaaaaaaatcaatggcgtcaaatatttagagacggagggagtagctggcagaatgtgccagaggaaaaagaagaggcgagcatgcgcacaagttgaggaacgtgagattacttgctgaggttccaaagagttgccggtattgaggcattgagcatggcgcgggcgcggttggtccgcaaatttttgaagcccatcgacgcggacctcaacctccatgccagggcagcaaaaccgcgtgggcgaggacctgggagca

SEQ ID NO: 13344 - DNA, 743 bp, Oryza sativa
  Intron number 2 from transcript LOC_Os11g07570.1 (locus LO C_Os11g07570) derived from phytozome v7.0 (chr-ID Chr11; p os 3826374 to 3827116)
agtaacgcacggaggactcccgcaggactcgggaagtacgtcgacgcgtgtgtgaaaaaaccaaaaagtacgtcaccgagaaaccgatccaaattttgcctttttttcgatggcgttttattttttgcgtgacattttttctgccctcttttttattacggacgactgtaaaggctggattgcattcctattatccttttttttaatctagctgcatgcaaaattgtacagaaaaaaatgccttaataaattttactaaacttaagaaatcttgaatttttcagctaaaataaaagaaaaccacagtcgtagggaccgaaatctcaaaatgttaattcgttctgaaatatggaaacccttagaattgattaccgaatccatctctatttcaatctttactttactttggtgaagaaatcatcccgaaatattcgtggtaattattactaccttttttccggggtttaattttatccaccgattattaagaccctagtaaatcccagcaattaatttcatagtataattttacgtagccctagcttgttcgttctcgtcgccaagatgtcgcaccaaacaccaacgccaccacgcaagatggactccgccgcctacgacgccgtcgcggccaactccgacgacgagctggacgacgacagacgcgccgccgccgcggccgccaccgccgacgccggtggtgctgttcagggcgaacagccgggcacggcgccggggaggaggag

SEQ ID NO: 13345 - DNA, 808 bp, Oryza sativa
  Intron number 1 from transcript LOC_Os08g30790.2 (locus LO C_Os08g30790) derived from phytozome v7.0 (chr-ID Chr8; po s 19010215 to 19011022)
caggctatcagcactaagttgatcggcacgtataggttttcttttgcgtcattctttttcattactgcatttctatggtgaattgttttcttttcttttgtatggctacatctattaccctgttgacttctgtgagcctgtgatgtactccctccgggctgataatacttgtcattttggacaagcgcacggtcttcaaaaaacaactttgaccattatttcctattataatatgtaaaaaagtgttaacaaatatatgatcatattaaagtactttttaagaccaatctatatatgtagtcaccatatttgaaagacaaatattttaaaaatgatttatataatcaaatattctaaagtttgacctcacccttgtccaaaacgacaagtattatcagcccggagggagtagtaatcttaggcatttttcagggaatgattacacagtataagtttgagtaatgtgttatcatgatatgcttttcaacaagatatacatattttttgcaacactgtttggtctaagttatctgaaattgcaattgcttgacttttcatttgggatgcgttgggcaatctattgtcctgacatacattcatcttcatttgaagccatggctttatcttttttaattcatatcttttgtttctgtttgtatgtactaaaaacttgaaatatgaatttccattggagaagttaacaccaacggagtataagcaagattatggcaaaacattcagttgttagttgtttcgttagcatatggcaccatttgtaattctgcatttcttcctttctagataagcc

SEQ ID NO: 13346 - DNA, 801 bp, Oryza sativa
  Intron number 1 from transcript LOC_Os10g32820.1 (locus LO C_Os10g32820) derived from phytozome v7.0 (chr-ID Chr10; p os 17113530 to 17114330 reverse strand)
ccaagcgcgccatcggcgtcgagatcaacaagcaggtataacccccgatccccaaacaccccggcggcggcgccgcctctttgtcatagatctgtggttgtgtcgcttaagtgacttggtgtcatgtttttgccccaagtgactttggaatcatgtagtttagttgtgccaatatgaaatttcatttttgcagttgcaggaatgggaagccattgcatactcttgcatggttgtgtaagatctgataaatagtgtagtctagatggtttactggttatatttactggtaacatttgtgcgattttactttgtgctttagtatttggattttgttttctctttaaatgtattgagaatgttgtgtactgaagtagagctattgtgattgtggctttggttcatttcatttctaggtttccattcgtccaagtaggatagtggcaaatcaatcctcaagtttacgtcgattgtattgttatcggttatgtggaaagtttaaccgtttggttttatgatgtagttatgagaagtgcatttaaagatatacttctgattgttcatttaatcctgtgtgcatgtgtagttatatgtttcaatcatataacatgctaccgtctaaacacattctgttggtgtagataaattggatagatatgtagttagctgtcggcatgtgtaatgttcagtcatgtggatatgtagtcttcgggattatttaatttttgaaatcatgtatctgttttactgattgtttgttaatctcttggtaggttgggaaccgcattatcaggaagaggatcc

SEQ ID NO: 13347 - DNA, 928 bp, Oryza sativa
  Intron number 1 from transcript LOC_Os10g25730.1 (locus LO C_Os10g25730) derived from phytozome v7.0 (chr-ID Chr10; p os 13256026 to 13256953 reverse strand)
cggagggcaggaagccaaagacggctcctttgcaggtaatttctggaatatgttatctctaggctaggctcggtgcttgctatcatggcaaatccctcccttttgagtaatgaatgcaggtcattgccgaaatacgtgtctcttaccttgagagttttggcgacgagttgtatatttgtacgaaatatcagtcaggataaagacagtgagaacagtgagaacaacggactgaacacattatttaccactgcagctcaacagcataataagaatttctcataagcaagctatcgttttgtctgaattactactttcctacacacattccatagagatgctttgattttcagtggattttaacttttttttaatcgtcccaactacacttgtgggaaataacaaacttgcattatgtaaaagtttgacaatcggaatatactgaaaggcacccattctttggggtttcaagaaatccatgtcatcagacggatatagtaagaaacatccatactgaaatttgcagtcaaggggcatggtggataggttccatttgcgtgccaaaggtggtgatggcggcaatggctgcatcagtcttcctcgctccaggtcaggatcgccaaggcaagcctgatggtttaacgactcccctgctgcacagcccatggaattgtcacatggtgctagcagtaatctttttgtgtatttttttgtggtgtaataatgcctggtcgtgatcaacattagcctagatcttagtgaaaaggagtaagatctaggctaacttccttccccatctcacagattgttaattgcttacaaaataaaattcagcagcagcacctaagtagagtaaactatcagatgccctgtttttctacataatgcataacattaaatttatttctttctgaatagtctccagatcaca

SEQ ID NO: 13348 - DNA, 640 bp, Oryza sativa
  Intron number 3 from transcript LOC_Os09g25800.1 (locus LO C_Os09g25800) derived from phytozome v7.0 (chr-ID Chr9; po s 15456853 to 15457492 reverse strand)
gctgccgttcaccgagaggcgctgcacatcggaaggtatgagacaaaagcaatggaaaaggatactcccttcgtcccaaaatacaaatatttttaaaatagtgataagtcaaacattcataactttaactattaatagaaaaaaataaagaaaagatcaatcatgtaaaattgatgttactagatttatcattaaacaattatcataatatgtaacttttttatttaaaacatcatacttttgtagatattactccctccgtactcgtaaaggaagtcgttttggacagcgacacggtcttcaaatcacaactttgacttcttgtttctataaaaatatatattgaaaagtgatatatgtataattttatgaaagtatttttcaatacaaatctattcatataaattttgcattttcaaactcaacaacttgagaatgatttatgatttatattcctaaggtttgacttaaacattattctaaacaacttcctttataagtacggagagagcatactgtatcagaatcaaaaatacttatattttaaaacggatggagtatatgattctgtcgactgacacgagaacgatgttctttctgttcagcttgctgggggcagctgctgtgatcgccggcctgt

SEQ ID NO: 13349 - DNA, 875 bp, Oryza sativa
  Intron number 2 from transcript LOC_Os07g24050.1 (locus LO C_Os07g24050) derived from phytozome v7.0 (chr-ID Chr7; po s 13637815 to 13638689)
ctattggtaagtcattttctcattgcatttcgactatggaaatatatagatgaatatgtttattatataatcccaattaattgagttctgcatatcaaatgaaatggatagattttgtacattagtggaatagaagggaaatatcacaatatataaaattgtaataaatgagatattaaggattttctaataaatgaaatgtaaggcttccatgatatgctacacattaaatgtagggaatcatagtattgtggcttcaatctatatatagtacgtttcaggatgcctgataggaatatcaccaaagtcagtcaaaaacaatattctacacacacaatgggttttgttgctgttgccatcatactatgtttttcatatgcatcttgttatgccaatctggtacgatcagaagatgcccatgtcaatccagaaatgaacggaatggtaacaatacaacctcatgtcacttgattaatattgaattgttccaattttctgcattttctcttccgttcattatcatcatgaatgttttttatcagtcctctctccctgtattttgaaaagaaaaggaacctatatttggatgtgatgcgtgtaaaagagatcaacacagatatatttgttttactgtaccaatttaccttaaatccttctaatatatatttgagttacttatttgttgatgaggacataggctgatatcaataaagtttctattatctaaaatcatgggctgaggtagtaccccatcacaagttatgttgttaaaaaatcttgacaaatataatgtgggttcattaattgtactaaatttatttgattctatgtgttcataaaattcatataataatatttgtagtacttttttttgg

SEQ ID NO: 13350 - DNA, 582 bp, Oryza sativa
  Intron number 4 from transcript LOC_Os07g18850.1 (locus LO C_Os07g18850) derived from phytozome v7.0 (chr-ID Chr7; po s 11160341 to 11160922 reverse strand)
tcaattcttgtgacatcattgttcgagacaaagtaattccactttcaaaagaatctgttcatatagttttaggtcttcctgttggaggtttacctatcaattccaattctgaaattggcaagcagaaaattcttgacacttttggtctctcttctatgcctactgtcaaatttttgggagataagctgataaggaacgaatcaatgtctgatgattaagtgttgatatccttcatgatggtttctttgaattgttttctttgcccaaactcatcccttaaacctagcacaaaatatctcagtgcttttgcggatcttacttctattgataaattggattggagcaatcttgtttttgaatggttgatgaaacatcttagcaagcttgagaagtccaaaagttttagtggttgtccgtactaccttgtggttagtattattactctatcttttttcaattgctttgcttttttgtaaccagttaactttatatttttgctttttcttattaataggtcaattacttggattttcttaactttggtatgcgaaaaatgctgcaagatactccaagaatcaaagt

SEQ ID NO: 13351 - DNA, 996 bp, Oryza sativa
  Intron number 1 from transcript LOC_Os08g29110.2 (locus LO C_Os08g29110) derived from phytozome v7.0 (chr-ID Chr8; po s 17816240 to 17817235 reverse strand)
gcccaggacatcgaggtaatatgtgccctgcaaatcttacattccccgtttagtgtttgcttctctctaacgttgggcaacactctctgaccaattacaagtttgcgcacccttcccacgtagagttattactagcaatgaaagaggaaacacccataagaaaaagaaaaaaacaatcttcacatatgtttgaaaacatacattaaactgatttagggagtgtttaaagcttcacatgattttgaaaacatttgtatgatttagggtctctgaatgtctagctagcaccaaactgaactggggtgttagtaggtgtcatgtgccatgaatactctagtcttgttaattaagcacttacttatcaagattctaatccaaaatgagactacaacaattttaaccattctctacttagattagtaaagaaatggcagacccaacgtgtatgtctgtgcctaataacgaaagggaatgatatagccagtgcaagatgcctatgtccattccaaaatcttccctgaaatttgtggctgttacgctggtggtattctttgtatgctctgaatttgtcagagacaatattgcctttcctgcaagctccaccccagtgttcttgacaatctgaatttattgaagaaactttgatttaatatattcaacaatagtgtttccatcacatttgtatctagatcttccctaatattcttttatactccctccatttcacaatgtaagtcattctagcattttccacattcatattgatgttaatgaatctagacatatatatctatctagattcattaacatcaatatgaatgtgggaaatgctagaatgacttatattgtgaaacggaggaagtaatacttataggtttcaagtaacttcaccaagtgccatatatacttataatgcaaactcattttttgcatcctcttgtactatcaactgatttcaacatttctgccatataatgtgtcagcttgcagttgaat

SEQ ID NO: 13352 - DNA, 1004 bp, Oryza sativa
  Intron number 1 from transcript LOC_Os09g20630.2 (locus LO C_Os09g20630) derived from phytozome v7.0 (chr-ID Chr9; po s 12428451 to 12429454)
gtgaacagatctggcctgatcagaagacaaagtgagtggaaaaaaaataatctatacctgtgaaaaggtttctgtcacacagagtttttttttcctgttttctaccttattgcagactcaagcttaaggctgtctacatgtttgctgctggattttacacatattccatcttcgctcttttgttctgggaaacaaggcggtcagactttggagtctcaatgtctcaccatttggcaactgttgttttgatcgttctatcctatattttcaggtatattctgaacaatttcccagataaggtaattgtatgtatggcattccagctccacaagctatatttaaatattattgtgtttttcgaacagatttgctcgcgttggctcagttgttctagcccttcatgatgctagtgatatattcttagagattgggaagatgtccaagtacagtagttgcgaggggctagctgttgcagcatttcttctttttgtggcttcatggattcttctgcgtctaataattttcccgttctggatcctaaggagcacaaggtaaactcatgcctgcttatatgctgctctggcatctggtgttatctacgcatctctagccatttagcgctataatcgaaaagagcacaacggcacaactacactagaaagactttaagaaactttgttgatcaatgatctggtacctttttcagctatgaagtactgctgaccttggacaaagagaagcataaattttacggccccatatactactatgttttcaacagccttctgttctcacttctagttcttcacatatattggtgggtactaatataccggatgctagtcaagcaaattcaatctagaggccgtatcggcgatgatgttcgatctggtaattgattccttcatgttactgatttaaataagttttatttctaggactgtatatttatttgtctcataaaactgctcactatcaaacagattctgaaggtgaagaagatc

SEQ ID NO: 13353 - DNA, 374 bp, Oryza sativa
  Intron number 3 from transcript LOC_Os12g17920.1 (locus LO C_Os12g17920) derived from phytozome v7.0 (chr-ID Chr12; p os 10297707 to 10298080)
tcgtgaagattgggacaacatccgtatcaggattggtgagtagagcaccggatttgggtggtgatttgtcagctcgagttactgtaattatagattgtgtagcagttagtaaaatatcagtttgaggggtcaaacggtgtccgattgggttgttttttggacagcttggaagggactcatagaccatcatttctgctaagtttcgtgcaatttgcatatttggtttgggagatctcaacttaaaattgaagaggacaaaatctgccatttttctgcttttttgtcgatatacttcttgttagctttgatggttgatgtttgatgatgcctagtatgtaacttgatgttatacaactattgtgatgtgccttcag

SEQ ID NO: 13354 - DNA, 440 bp, Oryza sativa
  Intron number 1 from transcript LOC_Os07g30990.1 (locus LO C_Os07g30990) derived from phytozome v7.0 (chr-ID Chr7; po s 18354072 to 18354511)
cggcgacgtcaaggtcaagatccacgacaagaacggtatataattgattaactcgcttagctgagctcctccccttcgccctgctcgtcggtggccggcaaagccaactgcatttcctctcgcgcttatcggaatagtccagctccgccttttctttaaccgtcccgattcgaggatttcagggtatgaaaatcatagctttcctttctcttaaaaaaaaaattatccgattgggtagtgaacgatcgataaggttattggattagtttgcttccacttgtgtttcttcagagcaagaattgtatggggggattggtgtatttcttgccaaatcgctggacattccaatttgattaccatttaccagtttgtaccatgaatttgggggttaatttggtttgagttgtacggcaggcatcccggcggacgaccagcggctg

SEQ ID NO: 13355 - DNA, 914 bp, Oryza sativa
  Intron number 1 from transcript LOC_Os12g12860.1 (locus LO C_Os12g12860) derived from phytozome v7.0 (chr-ID Chr12; p os 7112010 to 7112923)
gacgtcgtccaggtctctctctctctctcttcaattcatccatctccattcttattgcatgcatttgatctgcaatcaaagattcaaagctgttcaatttcagataaagaatgaacattttgatctgatagaattaattacgagcagttcgttctggttcctaatgtataaaagactacgtacagaacagaatttacaatgcacttcacattgtacaatccaaagtttgaataaaacttacatgcatcattggagtggtttttgctggcccaaattaagttcaattgtagtagtacacacggaaagcttgtaaagtatcagcgtgcaccacccacatgctcatgctttgagcatgcctgatttaaggttaaaaattttcggagtctgcagtaacatgtaaaatatgtcaaagtacattatactccctccgttcctaaatatttgacgccgttgacttttttaaacatgtttgaccgttcgtcttattcaaaaaatttaactaattattaattattttcctatcatttgattcattgttaaatatatgtttatttatacatatagttttacatatttcacaaaagtttttaaataagataaatggtcaaacatgttttaaaaagtcaacgacgtcaaatatttagggtcagagggagtacatggttatggcatgcaaatgtgaaatgtgcaaataagccaatccttctaacttaacaccaaaatatttgtgctcaatttgcttccagtagcctttcaagaaatagtgtccattgaaacatgaaactgataaccaacaattaatatttactgcaaagtaaacaaatacctctttgaattgattgctcaatgtagagagtgaaaaatatttgatacattagtacaactttttgcagcactgtcacaagaacggcgtc

SEQ ID NO: 13356 - DNA, 953 bp, Oryza sativa
  Intron number 2 from transcript LOC_Os11g37780.1 (locus LO C_Os11g37780) derived from phytozome v7.0 (chr-ID Chr11; p os 21901635 to 21902587)
aactccgagaatatcttgacaataggaggtatgtatgcaatacccaccaaattaattgtttgtcttgatcaacctaaggtaatagagttctattagctactagaattatacagtaatttacttctttctggttgcggtagttgtacatttagtaaagtaggtgaaaccccggacgttgctgtgggagtttattatgataataataagtaattataacgtgtaagacaacttaaacaatataagcttacataaacataagttcatataagttgatgtgatttaaatttaaataggatgtggactgatgattcaaatgtaatagtaatgttatgtgcctttatgagagaacagaagaagaaagataatttagaccataaatctaagggctaaaaaaattgcgatgatatggcttaatgagagaagaaaaaaagagagatattttgaaccatagatgaatcatctaaggataaaaaataattgatgtgatatgacttaatgagagaaaagaaaaataacatgaactaagtgaggatgaattatataggtatataggatattaaaaaaatgatggaggtatattgaaatattatgtgaattatgtgggatgatttaacatgcttacattttaaatctctaaaagttaataaattattaaattattgataatatagtatatatttgcgtgatgcttaaatgtaataattgttagtggatgatgatgtggtatctttacatgttaagctttagaaattagagggttataactttatagtaagagatgatatgtattagttgtattagtggtcgattcaatttggtactgaaaatgggacacaagttaatttattcccctcatcaatcatcctgttgatgggtgcttatgtcactatgatctttgatgcttatacatttctatctacatggatatactaattccagccccttccattccc

SEQ ID NO: 13357 - DNA, 575 bp, Oryza sativa
  Intron number 1 from transcript LOC_Os10g05370.1 (locus LO C_Os10g05370) derived from phytozome v7.0 (chr-ID Chr10; p os 2647129 to 2647703 reverse strand)
ggggccaagggcaaggggacttaacctccccgggggtaactctttcttaccccttcagtcatttgtctcagtcgtttctctctccatccctcttctccactccaaaccctagttctaggccacaaaaatcttcgtttcggagtctccgattgctattccttcgcttttgggtggtttccctccctcaactccttccaaatcactagttccccagtgattctcttggtggttcttgaggtatttccttgtttttcctcgatctccctcatggtgtattatttcaagatttccttcggtgaatcttcttgttttagtgcctagatctagtacctagaagatcctttgattccattggatatttttgtgtgaatcgagatttgttggtctagggcaaaaggccgtcggattgtttgatatgccgccggatagtccaatgtacatcggatagtccgacgtcaaatcagactatccgacctccttttggcccagtccaaatttctccttgcttcacatttaaatattcttcttccacttcttcttaatcattatcctctgttctgaatcagtgtatcctc

SEQ ID NO: 13358 - DNA, 695 bp, Oryza sativa
  Intron number 1 from transcript LOC_Os08g38170.4 (locus LO C_Os08g38170) derived from phytozome v7.0 (chr-ID Chr8; po s 24184585 to 24185279)
aacaatcatctcagcctacttaacaacagtaggcagttaaaaagaatatgtacttgtcacctaaggcaagcatcagtttattgttaggaaaagtgaaggatgtcggataagtgaacatgcaagataaaaaaaacaaattagttaattagtgttggaccaacttatgagtgcaattagtaattaagtatgattcttcttttaaaaaaaagtaggtaacattaccctcagcagaacacaagtttgggactttggatatagcaaaagtcgacatcgacatcactggctgatgaagctctgattttgactaagtttcagtcatcacttgatgatgccttcacgaaaaatattcagttgacaatttcatcagaaagggacttctctccatattcttgtagtagcttttctttttggcacctgcttgcagtttgttgagcaaacataaatccaaaaggggagaaaagaagtacaagagctgaaaactgatcactaactgaaagtctgaaacccgtcaattgtgcagatgaggcgtacgttcagtttcacgacgagtgctggggtgtcccagtgtacaacgacaagtatgtactgcgtataaaataccattatttactgtccatttctacttaatttctgtatcttgatctatctttattgcaatttgcagccgtctgttcgagctgcttgcgttgtcaggc

SEQ ID NO: 13359 - DNA, 697 bp, Oryza sativa
  Intron number 4 from transcript LOC_Os11g28430.1 (locus LO C_Os11g28430) derived from phytozome v7.0 (chr-ID Chr11; p os 15905935 to 15906631)
ttcctcttccattgctacaggtatgattcctactaattttcataaagatttcttttgatatgtttgctacccgtacaatcagcctaaagtgcaaacaacaatcaggttttcctttttcgttcataatacatgatttcgcattgtttcagggatgcatgatagttttatatatcttactgatattccattcatttagcagccatatgtggttacaacacatattttcattttttacacacagcaaaattgcttgtatagagggatattggcctgattatttcccttatgtaattgtaccatgtgcccatatacctatggttagtgcaggatgccacaaaacaatgcaccatgaaaggtgaacttataaaaaaaatcattgtgctaattgtccgttactgcttctgtgcacataagatgattgttttttgctacctgcttcagtgtccctaattggcttcatagcgataccaattagaagaatgaagtgctcattcaagctggaagataatttactatttcatagataatcttgatatttagtacaaaaggcattgaacctgattgtaaccgcttgctgtagtatgatgccatgattgcttacattacgaggcctatgtatggactgtcaggttcatggtttccagtgagtgatatatttgttgaactgcatgcgtaacaccttgcttttgtaggatcc

SEQ ID NO: 13360 - DNA, 629 bp, Oryza sativa
  Intron number 1 from transcript LOC_Os11g09310.1 (locus LO C_Os11g09310) derived from phytozome v7.0 (chr-ID Chr11; p os 4988004 to 4988632 reverse strand)
gctgcctccttccgccgcaagcatcctcgccgccggtgagcaccaacccacacgcaccttcctacccccgcaccatctgtcttcgcctaaaccctagcttctcttctcctagatctggaagcttttctcttaatttgccctaaccctagcactaatagcagcagtttgttacggaataaagttttgggggggggggggggttcgagtgaatccccatgcccccacgttaagatccgcccggcctggggaggtgtattcgttggatttatttgcttgcttttgggttgtagctcgcaatttctttcttaccacggtttactgtagaatctcttagctctaagggtttgtccatttttttatttttgggcgtagcaatgattgaccacagaggcacagaccgagcgtatgacaaattgataagtagatgttgttcttatagcaacgaaaaatattatgtgccagattttttttcctgcatcaatgtgttgattttggtatagcagaaagcttatttattgtttgcgttatttttcattacccaaattactctattgatgtattttggtttccttacaggatcataatattgctgattttgtatgatttgattcttgttgggtgagcccaag

SEQ ID NO: 13361 - DNA, 661 bp, Oryza sativa
  Intron number 2 from transcript LOC_Os11g06670.1 (locus LO C_Os11g06670) derived from phytozome v7.0 (chr-ID Chr11; p os 3242888 to 3243548)
aacttcgctttggagctctctcgattcatccctaggtgcgtggactaattccttgcaggaacaagtttgtgagttacagaagaaaacgagatgatgaacaactaaacagtattttctttgattttcagtggttgatgaaacataaataatctgttttagatttttgtttgccgacaaatatgctttatgggatgattcgagtatgaaaaagcaagtagcttttgtatggaggaaagaaaaggaaggaacaaaatctagtgtatccttactacaatctttgcacacacaaatggcacaatgatgagaacatttcatgaagtctgttgattatgttttgagttttttagtgcctatgtaactgagaagttgctttaggcaccctttgaccattatacctgtgtatgttagtagtagtatttactggagttactaactaattttacacaccaaagttacttatatatgataatatttccagtcatgacaatgtccccctgaaatttctttttttcttacactgaaattcttttgttgaagaaacttttgatgatcagaagtataatttatgagagcttatgaacaatccagtgcttgaatatatccttctgacattgcaatttatgcagtgtaatcgcatttgatcaccggcgaagtacactag

SEQ ID NO: 13362 - DNA, 578 bp, Oryza sativa
  Intron number 2 from transcript LOC_Os11g47930.1 (locus LO C_Os11g47930) derived from phytozome v7.0 (chr-ID Chr11; p os 28379830 to 28380407 reverse strand)
aaggttagtctaatggtaactggagattggcaaattgtaggagcggtcaaatgttttattttacagtttttttattcttgagtgaaatttcttatacccaggctcagatcttgaggtggttataaacttttgatgtatcttacatgagggactactatttcaattcttttttttaataagtagaagtatttatgtcctttctaggctgtacattgcacaccacatttactttcaaggtacaatagtgtgtctaagttttgagctttcacacactgcgaatggctgtgcataatgcctgcaaaatgtgctgcagaagttcataatgagtcatcacagaactcagtttagcaaaatgtacataggctacatggaatattatggcgcaaatttcccaatccatgtatctcgtacttaagtaaaggactaagtctaagcaattcattgtgggattaggagattgcagattgggctttattttaatggaagacaaacttgtgtttttttttctgagtaaaactatagaactgatcgatatgagtgcattttgtgctttatttgattttaagaagaggaagtca

SEQ ID NO: 13363 - DNA, 894 bp, Oryza sativa
  Intron number 1 from transcript LOC_Os11g47930.1 (locus LO C_Os11g47930) derived from phytozome v7.0 (chr-ID Chr11; p os 28380442 to 28381335 reverse strand)
tctctcgcctgtgcggcctctcgccggaaccacacgtgagtctccctccccctctcgctcctagccgactcggggaggaatgcatcgatcactgggtgtggcgccggcgtgggctggggcttgtggtagtcgaggttgcgtagggtccggggagatatggggcagcacggggaggcggcgggtctgtagggaggcgcgggggtactggagttggcgggcggcataggcgggagcagctgccttcttctgatttctgaacaagtagctagagatcaaactagatccatccatccggcgagccagccaacgcatgcatatgtatgataacttggtctttgatctagtaatatccatgttgtctaattagctatccactactccatatttaaccaactgacaatggaattagcttgtagtacaagatgatgcatgggaagaacagaagaattcagtgagcgagctaattgttatatctaccggactacccctatatactcgtctttgctaccttattggccaattgtgtctagcagtatgcacacacatgcacgttgctgattaatttggtttattactttgtgaagcaacactgacaatccgtcagttgcaatagatgcctgtaaacattaattgggacgttgctgacctgcttatatatatgtaggaaattgtagttgatgatctatctagtgccatataatttcactgtgtttaaacaactttgtgtgttctttcatcattatgcctcatcttttttgttctcctccgctaccctctctgtttgtgtaatcctgcattccttgcatcaacagactggagttctcccacctctttatttttcttggtttttcatttatagtttccttcggtgttccctaccaaaacaagagaagg

SEQ ID NO: 13364 - DNA, 571 bp, Oryza sativa
  Intron number 1 from transcript LOC_Os08g39350.1 (locus LO C_Os08g39350) derived from phytozome v7.0 (chr-ID Chr8; po s 24863487 to 24864057)
cgcgcagaggcccccggcctacaagaccctctccggtaagctctgctgcctccttccccggtggcgtgcggggagaggaggagggggaaggggagggggaggaaggttctggcaatcggcctttgaacctttcctcttgtttttgttctgtttcccttttctccacggcattcaacgactctggtttgaatgggttggggttggggtttttgcttttgagttgattcgtattatataggatttctaaggagcaattcctttttccatggctggaaatcatgtgagcagagcagcaactgagcatatgacctggaaattgttaggagtttcataataagttgagaaatcgctgcaccgcgccgggttaattaattgtttcttgtcctttttatctgcttaattaccgatcattacttacagctctgtaactgataattattaccaattaaaattatagttcttggtgtgtttatgggttcttgctattgatgtgtatagcctgaattgagcaaaccattgggcatttgctattgcaggtaacgcgcccatcgtcatagctgaaggtggcttt

SEQ ID NO: 13365 - DNA, 627 bp, Oryza sativa
  Intron number 1 from transcript LOC_Os08g07880.1 (locus LO C_Os08g07880) derived from phytozome v7.0 (chr-ID Chr8; po s 4429318 to 4429944)
ctgcaacaacggagcaaagtgtgaacccggactgggtacctgtctatctttgctatttttctttactgatgtataataattaacattgcaaataatttattttattttacactgatattagggcaccaagagcagcatgattcttggttcttagtttttttaatgcatgaatcggactttttttttcgcccttctttactggttttttgttttcttatcgcctttttacgacttttttttctttgtgtcaaatcggactttcttttttcttgtttttatgttttttcgcagagatagtgatgcataagagatacaaatagatatttcatgatctcttcatgatcagagattctatctttttttctgttttttaatttttttctctattttcatattattttcgaactcttctcctcttacgagtgtatcaaaattttattcttccagatcagaggttttcaaatctacttgttttctgatatcctcatagtcaaagattctatttgtattttcagattttttttcccgatctcttcacttcttttaaattcagaggttctcatttttagttcatttcgtatttgctccacagaatcttcgtctacctgcagtcccgtcgctctctca

SEQ ID NO: 13366 - DNA, 875 bp, Oryza sativa
  Intron number 1 from transcript LOC_Os07g15860.1 (locus LO C_Os07g15860) derived from phytozome v7.0 (chr-ID Chr7; po s 9214201 to 9215075)
cggcgccggattgggtggaggattggaggaagaaggtgaaacttacggctggatcccatatgtagattaggtattttttttccatataaaaatacagtagcaaaaattattcaaaagataatcctatgcgtataaaatggtatgatctaattttgcagttattgcaatgacatggttacgaacacacgaatagtagtggtatttatctgaaatgacataaatcaacttaaccctttctaaaaagaagtcggtaagtgtatgtggaagtgtggaactatctatatggccttgatcatgtgcaatgaaaaccatctatcaaccaaagttcttttgctttcttttgaaaagaaccaacggaagatctttcagtcggcattatggatttatatttatcttactttctatatcaactattagttcatattactttaaaggaacaattaagctctgtagatagtattgtttggctgcaaatactgtgcaaaatgtatgagtgaagcacacaccaccaactagacggcaggaaaagagatatgtaattggctggacagacatgctgctcatggtagaccatatctcctaatgtacggttgctcctctgctttgtttgtggaatttttgccgactaaagcactaaccaaaataactacaccctctgataaaccttgagctccactcgatacgctcacagcttcgattgacccgatctttcgatgagttgatgataacaatcatttgggagaaacgttgatgacccaactataatcgtacaagatattgttgtgttgtgtcttagcgatcgatacacctctctgtgggttattgatcttgccggtgcagatcaatcttattccggcaagcaaatcggagaaaca

SEQ ID NO: 13367 - DNA, 630 bp, Oryza sativa
  Intron number 3 from transcript LOC_Os12g16200.1 (locus LO C_Os12g16200) derived from phytozome v7.0 (chr-ID Chr12; p os 9263068 to 9263697 reverse strand)
tgaacttcacaggttagacaagctaaaacacagatggacaccaaatgtatttgattcttcttattaaccatgcattcacacatttttcagacaagctaaaacattgaaatataagtttgctgccctgaacagaatctggacacatcgttaagattggaagttcagagtcatgaaaaagtagcttcctcatttcttatgcacccatgggttatatggaaaatatatagtataaaccatatatttagggaaaacctagaaactcctgtagcattcaaaaatgaacatttgagatttgtgatggataaatctcagaagtccatttttgtaatcttatggtagtttttaagtttccaatacatattttcccagattattctatgatttttaggcgtcatgacttcaaatatgtatatatagaccagccagtttgctcgattttgcatgcagaaagaaatttaatttaatatatcgaagtagtttaataagtttggcaacttaagttgtattcttggcatgctatttatccttttgcccacttttattgtattattgtataataaattactgacaccaaaatttatataacaaagaacaacctggatgtaatgtgcagaaacctgattaggcagc

SEQ ID NO: 13368 - DNA, 657 bp, Oryza sativa
  Intron number 1 from transcript LOC_Os08g26620.1 (locus LO C_Os08g26620) derived from phytozome v7.0 (chr-ID Chr8; po s 16190158 to 16190814 reverse strand)
accagacgaaggtttgaacattagcatgaaaattctgtcaaaatcatggacatgtatgaaacagctagagatccgatggtcactagtcaccacgtacgcgaaatttccaagctctcatcactctaatcgttttttaggacgacatttgatcgcgagtctaaaaatacctagattacacaacagcagaacttatgtatatgtacgttttcttaaacacaaatatgtgggatagtactaaaaaaatggcttgtaattaacacgaaattattaggtacaaattaaaacatttacagcttacatgactagctactgctttgtagtttcccatcacatcgaccgtaattaccttagtgcaaattctacatatctatataagcaacataaacatacaaagctagccaaaaataattgtccgagctcaaaaggcaatatagatagccaagcttacaaaagcaccagcacaacaaattcgatctcttgaagctagctttctcaacaagatccctgcgaagaatgtccagctctaagggtatgatttttccgaacttgtgtggatgtatttgtgatattcactaatattattccactctaaccattcgtggatgtattactaattaattagtgcaggacttagtagctctgtgcctccccaaggtg

SEQ ID NO: 13369 - DNA, 904 bp, Oryza sativa
  Intron number 1 from transcript LOC_Os11g37470.1 (locus LO C_Os11g37470) derived from phytozome v7.0 (chr-ID Chr11; p os 21657409 to 21658312 reverse strand)
accaggtactaattaaggtcctcttggattatcatacattctgttcgtggggacgtccttggatggttctgttgatgttccactcaaataattgggacatgtgttgcaaacatcgctgtccctgtgtttttatcttaggccttgtttagttcacgaaaataaattttttttgtcacatcggacgtttgaccggatatcggaaggggttttcggacacgaataaaaaaaattgatttcataattcgcatggaaaccgcgagacgaatttattaagcctaattaatctgtcattggcacatgtagggttactgtaacacttatggctaatcatggactaaatagactcaaaagattcatctcgcgattttcatgcaaaccgtgcaattagtttttcattttatttatatttaatgctccatgcatatgtttagagattttaggagtgctaataaatactatgcttgcatgttgagctctagatgtttaggctattcccaaccaaatgactaggatagtgtccatatcattaaataagctgtcacttagtatgaaaaatgatgtggcaagtgaataaatgaggaaggagaaggccggaaccattggtttctacaccatccaaaacatcacgtgagatactaagcagcattaaatttaagtatgtaatagtggtgtttgcattgaaaacgtagtgcctagtactagtttcttgatgatgtgtggtttgtcaaaactatgtctagtgtcttgggttgggaatggccattagtgatcattagctttatagaaagaagatatgtgttactccctaaaccttttctttatccacccctagatgaaattgaccatttatttttgccatattattttaggttttggataatccttaccagaaaaagaagaaata

SEQ ID NO: 13370 - DNA, 1017 bp, Oryza sativa
  Intron number 1 from transcript LOC_Os11g38380.1 (locus LO C_Os11g38380) derived from phytozome v7.0 (chr-ID Chr11; p os 22263354 to 22264370)
actcgtccagggatctccgccacgtcagcaaaacctattcctggcatgatttttataacatgagcaacctctcaccaagtaagttaattagttctctctctctctttgttagagtaaggttaatataatcttaattttgccgaaagtctatgatcaattttaaaacatgcactacctccgtcccatttaggatggatgtaatttattactcgtgccgtttcatattataaagcattttggatttatctaagttaaacttcttcaaatttgtaaagaaaatatagcgatgtttgtaacattaaattaattttactaaatccattatattacatatatatgctatttatgttatactccatctgccccaaaatataagtattttaaaacttcgacatagttttcgagatgctacttcgaacaacaatatttataaaagtatgatgttttaaataaaaagagttacatattatgatagtttttataatgataaatctagtaacatcaattttatatggttgatttttttattttttctattaatagttaaatttaaaaatatttgatttgtcactattctgaaaatgcttatattttggaatagagggggtatttgttttgagttaaaaattgtttttattttctatacacttataaccaaactatacaaacggaagatgacttgtgggaacggagcgagactaagtcaaaatctgtacgtttgacgaaaaaaatggcgtatgttttttgacaagtggatattgcacatagatcgagtcactttacttatagcttgtaccacttatgatggagaaattgttttcgtcccttctttttttaatgttacctaaataattataaataaaaaaacagaaaaaaattgacgatatagattaaaaactttacataaattaacctaagagatgacttggtcgctcatcattgattttttttcccttgtgctatagctcctctaggacctatggatcattggaataattgtagttataagggtgacgg

SEQ ID NO: 13371 - DNA, 703 bp, Oryza sativa
  Intron number 1 from transcript LOC_Os10g28610.1 (locus LO C_Os10g28610) derived from phytozome v7.0 (chr-ID Chr10; p os 14839762 to 14840464 reverse strand)
gctccaagaaaatctcagtgggtcttcttctgtgtttagctcatttagtcatgtttatgcatttctttgatccatatcatgaaattgtaattagcactgcactttatatttgctcaccaaaccgtcagtagtatgctattctttaattgtttctatttagcaatacatttccaaggcacatggtgtgcatgcaaaacactttttcttttttttatccccgtcctgattagccttgatgccaggttcaacacagtctgtatctaatttagcaatttgagtatgcatatgattttttaaatagtattaggtaaatcttgtaaaatataagctaaatcctgacatatttatgctgcaagtaaatgaagtaatattttaatctctcagttttgattcatgaacttatattgtatgattctgtgacttgtgccatcttctgttgtccctcgaacttttgaaagcaatttaagactatgccttgagctatctgtagtatatgtgcatgccttttcttggataaataatgattggggttccgggttttcttcttagggcctcattttccatttaactgttttcccatggggttgaaacacttagatgattttgtagttgaatttcagtttgatgcctgcatattcactcatatcatttagcaacaagtcaataaccaaggttgaagctaatcttgttttatgcaacagac

SEQ ID NO: 13372 - DNA, 846 bp, Oryza sativa
  Intron number 1 from transcript LOC_Os09g17680.1 (locus LO C_Os09g17680) derived from phytozome v7.0 (chr-ID Chr9; po s 10810433 to 10811278 reverse strand)
ccccgccgccgccgctgcgtgtatccaatcccaaggtcacagctctctctctctctctctctctctccgtttcgagtaccgggtggggtgcctccccccatgttctcactgctccggcggggtaaacggtagaggagttcgtcgcgcaggaaatgcgagctcccgtgacggtgttagcgaaatgaatggcgggatgcaacgcttgttgttttcaggaatcgtgctttgctctgatccatggtgggtgcgcgcgtttctgatcaaaactgaaagagtcaagaggtgtccgtttgattttctttttctcttcttcttttgtcatcgttttggttcaaatggaccatgttgcatgttctttgaggtgatggagcagcagaaatagtctaagatgggggagttctggttttgttccttcttctgtgggtggctatcttcatcttaatcgcacttcttttgaactttcgtggtgctatcatgaagcacaccatctgtttgttgaaatgcgtgtgtctgaactatggttattgtctctgcccagtgttcctgatatgatacaggtggaaccaggaagtcttattggtcttgtctatttagatgttagtcagtaaagggactacttctggttgtttagtaattctaattaagtataatcaagggtgtggctttccttattgtgaactgaatagtagacaatgtggctgggaggtattgcatatctagctgagtgtaggagttctctaccctgcttttcttgcttgcacaactagttattatgatatgaattttgcggtactcatgcctctcatgatcattttgcaatattcttacaggtcttgaattatctgg

SEQ ID NO: 13373 - DNA, 381 bp, Oryza sativa
  Intron number 1 from transcript LOC_Os11g29840.1 (locus LO C_Os11g29840) derived from phytozome v7.0 (chr-ID Chr11; p os 16852801 to 16853181)
aaggttagtgtttcatctattgaacatatccatgcttattagtttcgtaatgtagatactaagtttatgtatatgtagttctcttttggaacttgagttgttaatttctttttgtaaatattttttgtttggtttggttacgttgctggcctagctgatcatgctttctgggttgaataaatgtagctacaactattaatcctttattttgtttttccatcattgccgttgtcatcatctttcattgtcatcatcatcttctccttttgacgatcttcatcagatcttgatcaaaagtaatagaccatgcattttcatgattgatgaagttcataaaaatttctgatcctcatatgtgtatatgatcagctcttaggttgg

SEQ ID NO: 13374 - DNA, 578 bp, Oryza sativa
  Intron number 2 from transcript LOC_Os12g26380.1 (locus LO C_Os12g26380) derived from phytozome v7.0 (chr-ID Chr12; p os 15410403 to 15410980)
ttcaggtgttctacactccgaacactccatcagatgtaagtttcttatcaagtacagctgttgcaactcttttacaggttgtttggttggaacagtgggatatatgatggcctacaaagttattgttatatgcatatttcatatatatttgtactagctatagataaagttcacaagacaaaagaaaatacatgcatggatgttaggaagaaaaactatattttctgaaagctgatcacccaagttgagctgatagctaggccagtaccgggccatgaaactttttgaataatggtaactcgatcaactgagaaacctcagtacatgtaccataagaattttgctttctttcaggacgatcaatttaagttaaaatttcaaaactcctaccaccaatcttgtttttgcatgaacacatatcacataaagcaaagctttcatttagtgattgtttactttcacttaatctgttggtgaaaagctgttactgtcctgatatttatattaaccattatacactaacacctttttttcattttaaaggttcaagttgcaaagaatattacgaaggggaacta

SEQ ID NO: 13375 - DNA, 722 bp, Oryza sativa
  Intron number 1 from transcript LOC_Os08g16650.1 (locus LO C_Os08g16650) derived from phytozome v7.0 (chr-ID Chr8; po s 10187101 to 10187822)
gcctacacggtatgaaagtgttgtgctttttgtgaaccaactgcaatttatgttgagacttggagtctattatttatgttccccacaaagaaatgagagtctctttctagaaaaagttctgctagaggttcatttgcggaaactatttttagaaatcactaaattcaaaaaagaaacttgctcatctgcacacaagatcctcctttattgatcaatctctagcatttaacccattaataagtttgtctccaataataaatttgctgaatttgcaaccggtttttagagctagcggatttatttttttgcataagattctcgttatgatctccaaatatacttttctatccattccaaaaacaaaacaaaaaagcatcaacgtcagatgctttcatcgtcattttatttttgtaattgctttaaaattataatctgtcattctgaatttggacagcccaatcacactggtataatttcctttgttatttgtggtccttttttaatcctcattattcatttggcatgaagagagtgtgtgtgtgtgtgtgtgagtgtgtgtgtgagtgtgtgtcctctatcctacctgtaggcagattcaatttcagctcagctataggagtatgatactccaattactcatacactgtttgcaagcaagtagatcaagttgcattgatgatcatatatcagtctaacttaaatttgtcatgattttcaggtcg

SEQ ID NO: 13376 - DNA, 771 bp, Oryza sativa
  Intron number 2 from transcript LOC_Os11g34470.1 (locus LO C_Os11g34470) derived from phytozome v7.0 (chr-ID Chr11; p os 19727396 to 19728166 reverse strand)
attggtcagtgctgtaattctcgtgcaaaataccttcgtttcctacagaaaattccatcgtgttaactcagacaaagtgacaaactaccgcaatgccatgatagtaggattatgataacaaccatgccttaggccttgtttctttcagcttgggattattataattagtttattataatctggagtccaacatattataatctgataagctcatttaggtaagctttttccagattattggatgaaaaattacccaccatgccaccccactccttttttagacatgcaaacccaataatctaggctctaataatctagaaaagaaacaactaaccacttattctaatacagattataacaatctagtttatagtaatctgactcaataatctgaattataataatcccaagctgaaagaaacagggccttaattatggcatcgacatgtagaattcggacctgagagagatagaggggggcagtacgtagtacgagactaatctctgtaacaaaatactccctccttccttaaatgtttgacaccgttgattttttaaaacatgtttgaccgttcgtcttattcaaaaactttagtgaaatatgtaaaattatatgcatacataaaagtatatttaacaataaatcaaatgataggaaaaaaattaataattacttaaattttttaaataagacataaggtcaaagatttttaaaaaaaagtcaacggcgttaaatattttgggatagagggagtagcattttcatattag

SEQ ID NO: 13377 - DNA, 793 bp, Oryza sativa
  Intron number 2 from transcript LOC_Os11g23770.1 (locus LO C_Os11g23770) derived from phytozome v7.0 (chr-ID Chr11; p os 12979886 to 12980678)
attatctgtcagaaaaggttttcccgacagataaggtctgtcaggacaagtgctgccgggaaaagtcttttccgacagatacttttttaccaacagattgatagacagtactacaaaagaattgccgactgatactttttaccgacggatggccctttaccggcagttaatggaatgccgacagatcagttattagcaaaaatcacttttgccggcaaatattctgtcagtgtgcctttcatggggtaaaaaaaaaagaattagattcatggaagaatcctaatggccaacaccaaatggtcaatagttcccacaaaacgcatactcaccagtagtggatgcactatttacatttaattgaaaacaccatgtacacagaataattatacaatccatctccaaatctaactatacaatctacctactgtcacaaagagacaacaaatctagaatagcatcttaagcatcaaaatttaagcacacacaaatccgaattactgtcaacaagaaacagtgctattgtttaacagcaagaaccaaggttgggaaaatgtgtgtctgcattagctcccaacaaacaagtatctagcacaagtccctggatttcattgtaggaaaatatatcatctaggactccctgataaagtagtttcactggccccttactgtggattaacattcggcattacctcattcaaaattgttcatgtttcctgatattttatcagctaacagcttgatcactatgtggattttagtttcgagcacgacgacccaacatattcaaaataag

SEQ ID NO: 13378 - DNA, 953 bp, Oryza sativa
  Intron number 1 from transcript LOC_Os10g05220.2 (locus LO C_Os10g05220) derived from phytozome v7.0 (chr-ID Chr10; p os 2557876 to 2558828)
gcggcggcggcggtggcgtggcggctctttgtcaagttagtcgccgtcgtctccctcctccttcttctctcccttccccgatttgtttccgccatagctgttgctgatggggcagtgagggtctgagggagagggcagagaggcagaatggggatggcaaattttgtgctcgctgaatatgttcgtaggttgcaattgagcttcctaccaaacgatggattcagggggttgggttttgggaggtggattgaccgacccaatccctatttggattgttcttcccccacttgtcaaataaaacccttgattagtttttgagtacatttatgttcaagtgagaatgcacagtcaagctaaatgcatggaccaggatggctgctctggttatgaattgcaatcccccgcaaaatatgcttaagtactattagaaaatgggttcagtagtatttacaagcttaacaatggttacggacgaacatttgagttgatggatattatgactgaaaatcgaccaacctaggaggaattaggttgcctgttgttttgattaggaagaaacatgcacccaaattcgcctcgacgagggcttgaacttgggtggtctgggcgtacatccacgccctcgaccaacttatgtcaggtcaatttttgtgtgtgaaaacataacctttgtattttattgtttattcacatatctttgctattgtaatttgttgtactgaagcgatgtcagggaaagtttatatctacggttgttatgggcatcgaagtacattattgctcagttcactagggcttactgaaacagaattaagatgaatattatatctttctttagctaggcatgtcaaattgctgaagaaaacgtgctcccaaactgtcattacccatttgagcatgttgccttatcatgttttcgccctgctttccactaactgatgagtgcagaattt

SEQ ID NO: 13379 - DNA, 950 bp, Oryza sativa
  Intron number 1 from transcript LOC_Os10g31180.1 (locus LO C_Os10g31180) derived from phytozome v7.0 (chr-ID Chr10; p os 16268533 to 16269482 reverse strand)
gagggactgcaattgtcgagggcggtaggtggaggtggaggtggagctcaagctcgcttgaggagccgaggagggcggcatccagcctcagaggatctcgagctcgcctggggaggacgctagcggcggagtcgtggagctccagatctgctcccacctctctctgacccccaagctgctccgatccgccttctcctcctccataaactcgcagagggaatctcgagctcaagcaccacattcgctacctcgatcgagctctctgacttactcgatcatgcagtcaccagggttcacaattctgacaaaaatcggtggaattttacgaaatttcgatgtttcaacatagctcgaaattaagtttcgattggaatttcgaaggttaaccagtaaatttggtcgaaattcagtcaaaatttatcaaaaaccgatcgaaatttattgaaaactgtgatatcgatggggctcaaaatttagtggtcaaccggtaatgtaaaccctggcagtcactctacaaaattttccacaaggtcgagaaggaaatgcggtgatggtggggttagctatctgatcaagatgattagctaggtaaaaacaaaaagagacggtaaaaatctgtaaacgtgttcccgaccctgatttaggctgcattctttttctcgagttgaagggagattttaaacacacacgaaacaaaacgagaaaactcattaacacataattgattaagtattaattattataaatttacaaatttatttaattgattgtttaaacgacttttatgtagatttttttaaaaaagagaacatttaacagcttaaaaaaatgagataatagaagacgagaaagttaaaaatcaaagttagaagaaaagaacatatatagtcttacttttatttgaatggtctgcaggcggtggtggcagtgacgcgcaaggctcggcaaca

SEQ ID NO: 13380 - DNA, 840 bp, Oryza sativa
  Intron number 1 from transcript LOC_Os11g38030.1 (locus LO C_Os11g38030) derived from phytozome v7.0 (chr-ID Chr11; p os 22098156 to 22098995 reverse strand)
tccgccgccacggccgtgtccgaggcgcagacagagtaatgtgcccgtttcttttttgcaccccctctcacttcctcctcctcctcctgctgttgttgtggttgtaggtttgctcgggtagtacagtgggcactgtagtgttaaaagtagaggtgttttactagaattgtggcctgatgaacatggtgatcgttattattcgaagtggaaacatcgattgagcacattgtgggtgcagtgaagattagcaagcggcgcgagttgctaggtggaattattccaaggttttggtggtgtaatgatcagtggtgtgtgtgaatcttctggtgcctaattgaaatggttgagtcagtgctaaaatttgcgtttagtgcggtaaagatattgcatggaaattagaacagtaaaaagccatgtgttatgtggaaaaatgtaaatcctaggaattgttttgttgtgtcttatagttaataccctaggtaatccatgttgagtgggtgcctaggtatggatatattctgattttcttaccttgggaatttttctgatcgcgctgaaatatttcacctctgttttggaaaaaaaagatttgaattagttcattggcaataactacaattaattcattgtagtaggtagttatctttcttgtgacactgaaccttgaaggattgaaagacttgttcttttgctttacacaaatattttcgttgttccaatttactatgcttacttcatacttctcttttctgattttgactgcaagctttgctgaccccatgctttgtttttttggtttgtctagtttagagtctggtccggtgacagcaagcaagggtc

SEQ ID NO: 13381 - DNA, 785 bp, Oryza sativa
  Intron number 1 from transcript LOC_Os09g32690.3 (locus LO C_Os09g32690) derived from phytozome v7.0 (chr-ID Chr9; po s 19505684 to 19506468 reverse strand)
atcgagccgcgcggctggatcgaggattcgagcaggtgcggaatctccaatccctcccgcttctgttcgtttcgatttcgcgtgggtgggattggctcgggtttgggaggcgttagcgatttcgcgtgcggatcgacggggagtttaggtttgatggttccgattcgtgggggggggggggggggtgttaggtttggatttgatcggggaattttggtttgggtggattgattcggtggagatctcttcttcttcttgggggaggttaggatttgggagcccgtgaactacgtgttctagtttacttcttcagtttctggattgttcgtgtggattaaccggggttgatggctacttgtacgattggtggtagggggttggtgggttggtaggttttttggtgataaggctattggatttggcaagtcgagaggttaatttcccaattctgttaaactgttcgcgattttcatttcctagtaagtgtgtatgttgtttcaagattcgtaaatttgtgttctgaattttagaagtatgaaatcctaataaattcaacagttagtttgaattgaaagacgcgaatattagggaaggacctaatatcaaataattagatatttagatggggcgaggcttcgaacacaggtcatttagcccaccaccttgtggagctagccggaagacccctaggtgtttctcaacagttagtttgaattgaatcatataagttcgtaaccccttgaatttcaggttgatttcagagttgagtgccactgattcagctc

SEQ ID NO: 13382 - DNA, 808 bp, Oryza sativa
  Intron number 3 from transcript LOC_Os08g25290.1 (locus LO C_Os08g25290) derived from phytozome v7.0 (chr-ID Chr8; po s 15357580 to 15358387)
agaggggcatactccggactcaagtaccttattctgacaaatgctactttctttgcaccggaaaaatttagcatcgccgtaattctatataattagcttacaattgcagaaatggacgtgtgctttacatattaagtgagatatcaggtatcataaggtcataccgtacgaagtgttatgatgttatcttaacagaacaacagacatgggcaataatgacctatagttgagagaaaaatgcatatcttgcgacaagtcctaactcattataattaaaagaaaaggaaaggaaactgttgactcacaatggaattagtattcctgtcacatcgttttatgtttatgtaagcaagacagctgggctgttaaaattcagagatgagctatgcaatggaacacaatgtgaatcacattagaagtttatgataccagttatgtttatttttccatgaattaaatagcaatatcttttgtcatcttctggggacacatggactgcatccatccagaatatgactgaactgcatgcaagttatgtgagatttaatgacatgctactatgaaactttttaggctgaaagctccaggaaatcccaaatggccatggagaaaatggtggaaggccgactaagaaagtattttgaagaagttgtgcatttggagcaaaaatgttgacaacgatagcacaaacatcaaggtgaactgataaaaccttttccttttttataattatgtactagtttgaattgtgaattcatggtacataatggttttgcttcttgatgtcaatattttcagagcgtcctga

SEQ ID NO: 13383 - DNA, 898 bp, Oryza sativa
  Intron number 1 from transcript LOC_Os11g41610.1 (locus LO C_Os11g41610) derived from phytozome v7.0 (chr-ID Chr11; p os 24507626 to 24508523)
caccccaagaactacgggcccggctcccgcgtctggtacgttgttctcgcctcctgtgtccgcatggtttgtttgtgttaggttcttgattttgtcttgtgaagggaatatcatgtgtggtgatggtcggtagtgtgcttgttctgcgtggataggctgatttagatgctgtggtaggtgttaatctgtatgtttatgttcttcctgtgatatgaactgtggtttgattgtcccaaatcgtcccatactgtggttgctagtgtttggtctgtgtggatgggctgattcagatgttctggttttgtatccagttggtaattactaattagagttgcaaatttggattagacgctgtagtaagagttgatttatctgtttctgtgttcctgtgatgtgaggtttggttgtcctaattggggaaaaagaagttgtatcttttgtgggtttgctttgaattgataatcagatgtagcgagtttgctgttgtcagacatgtaccctcatgataggatagtgagcggtgttgtttgctaaaatggtataccagttttgttgcaattgagatatttgaattgtgattctgtggtttgtgatatgatgtagtgaacggtaggattttggtggaaatagatcattgtagtttaactagtgaatctgtttatacagttttaattggacgagaactgcatgatttcaaagataacatgagatgaaatgccaaatggaactacatgttaggaaataactgcattatttgaaagatatcgttgcttaactatcaagttaaattatgtttgaatgatgtttgtgggctgaaaagtaatgtgacatttgcgctgaattgttttagtaacagcaagcttgttcatttttggcagccgggtctgcgggaaccctc

SEQ ID NO: 13384 - DNA, 836 bp, Oryza sativa
  Intron number 2 from transcript LOC_Os11g31090.1 (locus LO C_Os11g31090) derived from phytozome v7.0 (chr-ID Chr11; p os 17627533 to 17628368)
acggcgcaggtaaacacctcgtgccgccattactcctctcctttcctagctttaacctttctggcgccattgccctgagcttggcgttaatggcgccatggcggcctcgctctctcttccccttttggtgaaaggagattaaaaaaaaaaacgataaaagccatgcagctgcgtggtctcagtgatgacgtggcaggtcacgagtcgatgtcttaattgggtttctggttaggggatgggcgttgcaaaaaaaaaaattgaatttaatgttgctaggagtaccatagatggaaattccagaaaaaacattttgaaaattagttgtacttcgttttttattccgggttttagattggagagtttttaaatgtgtttgttctttcttccaaagttaggttacccacctcgacctataaatcaactaaccatatcaatcattttttgtttttgtaatggctaggtaccagctcatgacatttataattatattgtcacaatccaaccttatcacccaagttccaatatgtatggggggcacatcttcaacgaaatacgcactagattaaatattaaatattaattaattgtacccccttgctgatgtgccaaatcatgcactaaatcgttcttggcttaaacaatccatctactaaacattgttccaattttaactaactcaaatcaaactcgtagttcaatatatgactcattaagcaataaactagtaatgcgaatttgaaaagtttagtatctttgtttgccattaattcatcagtttaataatttttttttcttttgcaggtgacacggttcaagtgcggcggcttcgcgctggg

SEQ ID NO: 13385 - DNA, 757 bp, Oryza sativa
  Intron number 2 from transcript LOC_Os11g47480.1 (locus LO C_Os11g47480) derived from phytozome v7.0 (chr-ID Chr11; p os 28190893 to 28191649)
gttgccacaacaaggacatattctgtggtttgttgctgatataatataattttacatgcagtggtgtttttagcttggtgttgacaggaatatgatttgtactaccattctaaggccctctttatttaggtttagggttaatggtttagtcttttaagtcggctttttgccttatatgttttataagacggtagatttgaagtcctaagtttaatggtggagtcatacctccacctcatataagcttaaaaaagcttcttcaacctagttttttgcttaataatgtaagagtagcttatggctttaaaaaagaaaaacgaaaaagttgcttggttgtttagacttcgacttttcagcataagcctaaacaaagagatcctaagtcagcagttttattcatttgcggtggtaactagtatctccgtcccaaaataagttcatttttcaaccttcccacacatatcaatacaaacactaaaagactagaatacccctaatttatgtaatccaatgctactattactcactttatctattcataatacaattattctctacttttacaaactttgatgtaatcattactcaaaaataaacttattttagaacaaatgatgggagctaaaaatgaacttaatatgggaaagaggtagtaggcacgttaatgtactgcaagtgatgcctagtcttctgcatcctatgttacccatatcatttggaagtgaaagctgtttcattgcctcaggtaaataattca

SEQ ID NO: 13386 - DNA, 783 bp, Oryza sativa
  Intron number 2 from transcript LOC_Os09g31120.1 (locus LO C_Os09g31120) derived from phytozome v7.0 (chr-ID Chr9; po s 18707480 to 18708262)
ctcgaggtaggcagagtcttttaccacagttcacattctgttcgtcggtagtagaacatccaactgcatatagagcggccatgaaaattccttgcttaatccccagtgatacgtacagacagcagcgtcttttgacaaccacatcacacggatcagcagaaacgaattaaacgcgtttcatttgtcaacaacgcaaacctgataggctgatacggagtagtagtttttagcaaattcagaacgtttctttccgtcaaattgaagaatctaacccatccaaacgggccctgttgccttgctctgcctttggttggtagccttcctacgtcaaccacctcgcgtcgcatatacttttccgcgctcaaaactctgcttcacaccttgaactcatcattggcagatcgattagtaatatatatcttcgcctaaacccaacatcagtcaagccaagccgtgtaaaatgaaatagaaagaaacaatttctacaggaagacgtacgatggccttgatagtttggttttgcattgaccgtgttcttttttttttaaaaaaaaagagaggagtatttttaatccggtctttacatccaacagaaaatatgaaaccatttaaattgggaacttagcctaaacaacttaatctgaaattcactcctataaaaatttaaactcagaatctacgtgctacttaggccagtgcattgaccgtgttcttattggaactgacgtgaatggtgggtgtttttcagggagccgtgacgcacgaggacttcgagggccaccg

SEQ ID NO: 13387 - DNA, 739 bp, Oryza sativa
  Intron number 2 from transcript LOC_Os07g38390.1 (locus LO C_Os07g38390) derived from phytozome v7.0 (chr-ID Chr7; po s 23076334 to 23077072 reverse strand)
agttgcttcagaggtaattgtgattctggcagtggtttctgctgtttatctttccatcagacaaacaatgaaagcttccttgccactgattcattgttgcagacaagctcacaacaatgcttcctttgttccacatttgacttgctatatttcttaccagttaccttaggttcaatttagtgtcagtttaagtgaggtttggcggccgaatgcatgagcctttctgcagtccttttgaaagggtggtaccaaattacaattcggctagttgttaagagaactccaagttcattgtgcaaaatgtatgtagtttcatcttggagctagaaagaagtcagaatgcacattgaatgattcttgatgtaatgctgttgtgcttttcatcagataaacaagaaagaaaggattcctggatctagagagctttaattctcacatgcaacaatagttagttgatagcaattattttgtactacttccttcgtcctaaaatgtagctacctagtacgggatgtgacattacttagtactacgaatctggacaggaggctgttgagctgttgagttactcatattatagtttcaagtctgtcagtgtcagtttaattaaataatgttgctctatttattgtgttgacgggtatgttccaatcttagttcatcatgctaaatgattactatacaagtttcttctctctttgacaccttgatttccacagtttcgtttcacttttcaagg

SEQ ID NO: 13388 - DNA, 701 bp, Oryza sativa
  Intron number 3 from transcript LOC_Os11g06430.1 (locus LO C_Os11g06430) derived from phytozome v7.0 (chr-ID Chr11; p os 3101496 to 3102196 reverse strand)
gcccggtaaccgcagtaaccgcgcagttatcggcggtaaggtaacccctgcttccatggctatgtttcgagtagattttaactttttttcttcaaacttctaactttttcgtcacatcaaatgtttgaacacatgtatggagcatcaaatgtggacgaaaaaaaaaccaattgcacagtccgattgtaaattgcgagacgaatcttttgagcctaattacaccattatttgataatgtgatgctatagtaaacatttgctaatgacggattaattaggcttaataaattcatctcgcagtttacaagaggaatctgtaatttgttttgttattaatctacgtttaatacttcaaatgtgtgtttgtatactttaaaaaaaaattggcacacgaactaaacacagtctatgtacattgtttagtgtcccttctaccggccaattttgacatgcttagagcaaggtcaataacatagcccgctgttggcttcaaaaaaatagccatgacatctatagtaagcagtgtagctaatgtctacaatagaaatactataacacgaatattttattgttttgtgggacccaccatcttctcctacctcacattctctttctccctcctatccccttagttcatgtcttcatgtcttcttctttcttgagctagcttcgattcgctgtcaccgacaacggaagacggca

SEQ ID NO: 13389 - DNA, 927 bp, Oryza sativa
  Intron number 1 from transcript LOC_Os10g28665.1 (locus LO C_Os10g28665) derived from phytozome v7.0 (chr-ID Chr10; p os 14887443 to 14888369 reverse strand)
cggtttactctcaattcccatcgtactttcagccatttattttccggtggtaatctgcagctaattaattagctgttgtctcactgttgtggagtatctgtcaatatgtgtgtacattttttaatttgtttggcgcagattgtattgtgtaaaatcaatctttgttgagtcgttgtgacacgcactcaatgaaaatttcatggctcctctactgctgtgtggtgctagaatgctggaatcgcttagggcgctggtggtggtggaggttttatgttgaggaaaagggaattagatgggaactaatataatagaatgctgggtagtgagaaacagaagagtttaggagtgctgttagagcaaatttgcggtttgtagagtagcattgtttgcaagcttgttctagaggaacactatgagagaaactttatgacattttcttttagattttcttctctatgtacattgcaattgagcttctctgcgaaatgtcactcaattatctagtctgagtggcattccgccctgcttagcggacagcactggggctggtttatcaggctgaaggacaatcttccctaattagtggacatgcactggggtggtttgattaacccagactgatgattctggctgtggttattgtacccttgcaagctccctttagttgcaacaatgttccacaataacagatctttatagtttgcattgcatatctcttttgggttctgttgtgattgccttgttgtaattgggcagaggatgggaggagtaacactgaataatgcatcaaccatgtgtccaatacattatttgcttgctagttattttgttgaatccagctaacacgatgcagaattctaacatttgctatattagtctgagttctttttgttctgttgtgtgatcctccttgtccatggcaggcaa

SEQ ID NO: 13390 - DNA, 605 bp, Oryza sativa
  Intron number 3 from transcript LOC_Os07g31540.1 (locus LO C_Os07g31540) derived from phytozome v7.0 (chr-ID Chr7; po s 18722798 to 18723402 reverse strand)
agtcttaaaggacgatcacctgctatcagaatatcgtatcctttttgttcatgcttcttcttttgaatgcttgaagacaatcaaaccatctagagactcacctcgcttgttgctgttgagaacttgagctatatacactatttacctgcattttgtttcccatctttagttgcttagttataaataggccgggaagatacacaactcttttgggccagtaagggtgatttcgttactgctagaagagtagagtgcctgatgcttttgttgggattagggctgcttgctttggtagtgatttcataatggccttccaatgagacaaaataaagtagtaaaatgtcaaattgaagtatctaagcattaattctttgcaaatatgggcaagaacctcaaatcattgtagaccttgatgatatttgttaagttgaggtggttgaacaccagtatttaactgcatcgttggtggtaatgaggggttccttggatcaacgattttcatcaccacatgatgtaatttatcattttcggttttcttgtgatatttcgtttgtaaacacgacagttgtgatagttatatctttgacaacctcaagatttggaag

SEQ ID NO: 13391 - DNA, 996 bp, Oryza sativa
  Intron number 1 from transcript LOC_Os07g45060.1 (locus LO C_Os07g45060) derived from phytozome v7.0 (chr-ID Chr7; po s 26881887 to 26882882 reverse strand)
cgcttcctccttgctgcattgcgccagatctggtaaaaatggcttattggctctcgctgctcttcctgcaatctgattcgggcttcgatggttagaattgttgtagttttgttttgattatttgtttgttgtagtgtgtctggatctgattcgctggagtgcgtgttcttggctgctgtgtagtagtgcaatgatttagctgccctgttgctcaaattcaattgagaattactctgggagttttaattggttcatgggatctgggagtctgcagaagatgattcttgtttcaatccgtacgaattagtttgtctctgttcgatcgcttagaaaacgctcaagcggttgcactgggcatttgtgctggtcagagatctggtcactggtgttctatacattttgatgtaactagtcacatggtcatgatttgtgagccactttcgaggtttgcttggtcctcttttttgagttaaaatcttgtttgggaagctgttttcgtacaaatccagcttttgatgtgcaagatctgatgtttaggactcagtggtagattttttattttattttattttattttttgcggggaggactcagtggtagtctgctaaggagaaaatttttcagtaacttaagtcacaattgctatgtattggagttgatgtgtttaggtacatatggcacagtttttatgcatatggtttcgaatgaaaattctttcaagtgaaaatttttggtgacatatgaagtatcatagtttattgagatgcatttattcatacacttgtcatttgttaacagtacttattacgattatcatttgctgaagatcgaacgataaaattctaccttttgctggtcgagatctgatatgcatgcaaactattccactgttaaatcaggaaaacttggagatacaatcattgttttacattgtttgtttgacactgcttcccatttccaggaagtgattcacagcttctcaagggcatcaacagc

SEQ ID NO: 13392 - DNA, 1037 bp, Oryza sativa
  Intron number 3 from transcript LOC_Os12g20410.3 (locus LO C_Os12g20410) derived from phytozome v7.0 (chr-ID Chr12; p os 11913578 to 11914614)
gggcaaactttggcgtggactatagggtatccaaagttagtcatttcttcttattgttattccttttttttttgcgttgttggttgccagtttgaattgggtattgaccaccacatttactttacattttcctttttatttgcattgagagaagaaatgcaagcacaagctcagtattcatttttttgtttgctgatcaactgattgaaaatgcattttttccataatgctctgttgaaagttgttcgttatagtttaaagaatggattgttgcaggctaaaacctttgctatacaaccaattttattttctaactgtgggatagggatgattgagctctaacatgctccgaaagccagggttaccgggataatgaacaccacagcctaaccgaaagaacatcactttgtttgtttttaaaatgcgttgtatattaccttagcacaacaacttattctcaatcacattgcaagaacttaaggaattgaaaaaggctagatctttcgattgtgattaaatattccagctgttcttggcagcacatcttgagaagtaccgcttttcaaaattcaaaattagtaactgggctaactagtaactgggcccagctgcccctctttcatagcacctaggattgcatctagttgttttcctgcctagtgttgtttcgggtctgcacagagaagtggggcaaattagagatgaagattttacatcattgatgtcatggatgtatgatatgccagtttctatgatttaatatgccaggtttgctctatgtaatatgatagtacatactctatgtagtaaaatttacatgtgcctaatcatgcctaggtttgcttggtggaactagctgcttagcgtccactgtttttgaaccactgattgcggtgtacctactgaattgcatgcgtcatgattgggagacattgcatgattatttactggatttatttattttttgccccttaacattcttctctttcgtttatctatcagttcatttggctgaaggaatttcgagaaatcaagga

SEQ ID NO: 13393 - DNA, 937 bp, Oryza sativa
  Intron number 2 from transcript LOC_Os07g42160.1 (locus LO C_Os07g42160) derived from phytozome v7.0 (chr-ID Chr7; po s 25226821 to 25227757 reverse strand)
aatttggcgctggtgtcgccgaccttgtgaagggggtaattatttcgatgattcgatctctcgatgattcgatctccttagctactactaactgttatttggatgacatgagcatatgcactagaaaattatttgctgggagctattttctcttgcaaaacttactgaatgtaccaaattgattccagcatgtcaacaacattagtaattagcagatcagatattttattccttgctcaactatttttgtaccatcatatgatctgcataaatttccctatgtttgagcatagtataatctgagctgaagtgcaagattagatgacaaacggctgtacttctatgataagtctttgtatgggccccctcttctttcatttttgatatttattggacttgtcaatttcctgactaggaagtggccactgctagatcattgatagcgaccgatagaactttctgattgttactttgttcattggggcttctagattatagttttttatgcctttctgaggtgggtactgagtttccgtcatctctttattatattgagcagagggaacctgcttgtattgacttgtacttcagtattgtagaatctcaacagattcctggttggttatcagatccaatcagcgtggtacagtttggtgatttttgttgcctgctcttttcattttccctgtttgtggatgggctattaaatgtatgatgctttactattttgttgtaacttggggcactttttttttcttttttctttagataatggaagctttattaagacttagtcaaatacaccaagttcttggggcacttatatatgtttagtaagcatggctgttgtctgagaacattgcgaattggctgcaatttaagttctgctgccttttctgtaggtttcaaatctaagtcatttgagcaaactggctcg

SEQ ID NO: 13394 - DNA, 407 bp, Oryza sativa
  Intron number 1 from transcript LOC_Os10g09110.1 (locus LO C_Os10g09110) derived from phytozome v7.0 (chr-ID Chr10; p os 4946411 to 4946817 reverse strand)
ccatccgtggactttttacagtgagtacttgtacaacttgcggacggatattaatttgtgaataaaacaaacttttatatacgtgttcttagcgatctaaaaccatcagctgaaaaataaacttcgattaaaaacctcaaaatcagatccaaatttaaggttgaaattcaaattttgactgataaatataagcataagcgaaaagataagacccttgttatcatgcatgactaatttatttaatttagctaaaattattgaaccagctttctaatttaaatttggattacaatttttcgttttgattaaattttgtaatttaaccaagtaaatttcattgataattctaaactcaagtttcatttgctgtaggatttgttcactggtggagagacgacttctcacac

SEQ ID NO: 13395 - DNA, 601 bp, Oryza sativa
  Intron number 2 from transcript LOC_Os09g33830.1 (locus LO C_Os09g33830) derived from phytozome v7.0 (chr-ID Chr9; po s 19973442 to 19974042 reverse strand)
gtgggatactgatctacagaaggcaacacctgacggtatgtctgcctgctgcgttttgccctgaaaagaaatgtttggatgcaattttggctattttttagatcaaaattcggttatgattttgatatctggagactggaaatggtgaaaccaaaggtcaataagctattatggtgtttaacaacacatgtcctgtgccctggcctgaccttcagattattattccctaggaccattattttgagttgtgctgttcctctttttttcgtatgattgatgcatgtacgttgcgtatttagcgtatcttatccccaagccaggaccaatgacaagtcactttgttaccaaacatatttatgcttattctgattatgttcttcgcaagttgctgaggctgtttgataggctaagttcctaatttaaaaaggctgcatatatccgattggttgtagaggccgggtaaaaaatacccttctctaaaaaaaaaagtttctgaggctgtttcgttgtcaccacggtattatattgcaatgcagcaatctgaatatttttatcagcatggagcttgaaatgttttctgcattttgtttctgcagattaa

SEQ ID NO: 13396 - DNA, 1021 bp, Oryza sativa
  Intron number 2 from transcript LOC_Os09g11890.1 (locus LO C_Os09g11890) derived from phytozome v7.0 (chr-ID Chr9; po s 6672920 to 6673940)
accactagagcaatttcctcaaagaaattgtggaggtaaacgtcgtttcatacatagcttgtttgataagtatagttggcttgaatatagtgaggaaaaggatgctgcattctgttttgtttgctacttgttcaaagatagaactaattatgttggtggggatagttttgtgaatgagggctttagacaatggaaccatcatgaaactaatcttgccatatgcaatttaatttttgtttactggatatgttatttaaattttgctttgagatagatttgaatttttgcctgacgtacacaattatggaattaatttctgctggttcacaaaaaatatatgggctgcacatgcctaaaatttgctttgagattgatttcaaatctttccttgcatacatatatttatggaactaatcttttttgtcaattatggaactataatcttcgttggttcaagtttcacgataaatccatgtattgcacgcgcgggccataggaagtcctcaacttctctcgttgtgccacgtggcaacatgagagcgttttgagggagccacgtggctgttagtagtgcacttaatctagctcaatagaaatatgatatgttcattagacctaatacagcaattggtgagaatttaaggaagagaagcaaacatgataaggttgtttatatggcccgcttaacttactcacttaagtgcctgagatttcttttacggcaatggttggcttgtcgtgggcataatgaaagtaaagaatcactcaatagagaaaattttcttgagcttctaaattggttggctagaaatttcaaagaggtcaacgaggttgttctaaagaatgctccaaagaattgtaaaatgacatcccctaggatacaaaaacagcttattagatgttgtgctacagagactactaaacttctcatggaagatcttggggatgagttttttttcaattcttgctgatgagtctagcgatgtgtatcaaaatgagcagttggcactttgcttgcgtt

SEQ ID NO: 13397 - DNA, 829 bp, Oryza sativa
  Intron number 1 from transcript LOC_Os12g24870.1 (locus LO C_Os12g24870) derived from phytozome v7.0 (chr-ID Chr12; p os 14256678 to 14257506)
tccgattttaccttcgatttcagaggattgacgatgtatgcgacgaattttgaagttcaatcaatggtgccggtattagggtttctgggaattttcctccgctgacgacgattgagttagttggagtaggggcagacttgagaaggtgaaagaggtcgaaattgcggttctttcgcctccattcttcagccttctagttgaggaacgaaggagttacggaagcgggaagctggaggtgtcgtccaggcattcgttcgtcgttcgtcctcgtgtgcgcacgtgcgggcgtgtggcgtgcgcgggtcggcacgagcttggcgcgagcatggtgagggatcggcgcaaggcaacacgggcgctggctcggcctgggttggtctagccaagtagagaaagaaagaaaaggaaaaacagagagaggaagaagaaagagaaaaaacagagaaagggaaggagggggaagaaaaacagagaaaggaaaaaaatatagaaaaggaaaattagggtggaaatagagaaaagaaaaatgtggggaagattaaaatagataggatttgaattggtgtggaatttagacagtccgacattcgggatagaattaaatcggattcaaaggaattgtttgagggatgatatgcactttgtgacaaaaaattaaacgagaaaagaaacaccggaaacaaacttggaaaataaaattttaaataaatgtctaactcgacggttatatttttagagaatcaaagcaaactaaatcggttttaaaaagttgtcaaattttagggctgttacagctattcaaattatttgtacacccgcaagattcggt

SEQ ID NO: 13398 - DNA, 903 bp, Oryza sativa
  Intron number 2 from transcript LOC_Os09g21300.1 (locus LO C_Os09g21300) derived from phytozome v7.0 (chr-ID Chr9; po s 12850202 to 12851104 reverse strand)
tgttaatcaagaataggttagtccgttcgtatttcatcattttgtttttttattttattatcttcttacgtatcttactctaattacagctaattttccctattttctactcccattagataatatactccctccgtctaaaaaaaattaatctacgaggagatgtaactctcctagattgatgtatgtggacataggttgattttattttttaatggagggagtatatgtttgcatggtttttcttttctctttatgatgtcactgacactatgatgtgcccgatggccgattaacttacatattctctctaaaggatatacatttgaggttgatagatggacaaaatttatcaacatattatcatcactttctcctttgttagtttatatatgtaaaattttctaaatagaaatcaaagttatgcattactgcttagtatagtactccttcttataccagtttatatttttttacatgattttcgatgatatattttgaccagtaatttatttcattgtatgttcccaatgaatataaacatcacatgaaaatattttcaaaatataaatctagtgtataacatacataatacttagcatatatgttgttagtattattattaatcaaaaactagtgagtttgattttcctaaaaaagtgatacctataatttgggatggtgggagtaccattcttatatatatccaatgccacaaatttttgtcacatcaaatttgcttatgtaattttatacatatccccacaacaatgcgcgggaaaggaagcagctagtatttgatatttttttacaactgaagttgattttgacattgcatgtttatgaagtgatatatcttatgttaatatctatcttacctattttttataattatttaggtga

SEQ ID NO: 13399 - DNA, 960 bp, Oryza sativa
  Intron number 2 from transcript LOC_Os08g43680.1 (locus LO C_Os08g43680) derived from phytozome v7.0 (chr-ID Chr8; po s 27606960 to 27607919)
gacccacatttctacaaggtaacaatgtttgttgcacaatctagcctgtcttaatttggcaaggtgtgtgatgtatccatggtttaggtaagcttgcatggctaaaggaacatagctttttttttggttaatcacaaatcctagaatgagatgcttgttacctgtatcagcatgcgtgccttgtagatgagacatttttgaaccgaatcaaataagttgaattcaatttatgtcttgtgcatccaccctgcaaatgattggtgcaggaattttaaacctgtagatgaaatgaaattgacatgtcaatcaatagccatgtgatctcagaagattgacattattcattatttcaggatgaaaataattaatataacagtagacttaaaatgaaacaaagaaagaatgattctcagcattctggttttcagaaacttaggtgctacaccatatcatgtcccctttcatttcaaaattccatttaaagtggaaatagttggcagaccctgttcatcaaaatgtagtgccattgtgcaaccactgtgtaccatgtcgtgcattcatcattagcggcaatttgtttcatgattacggtttgaacatgaaatgaaatgctgaatgtatgtctaaaaactggttcgaaaataaaaacctcatgaagcactcaagtggaaagagaggtacatttcacattctagcaagtatatcatggttgtactagcaggattcatggtgccaaaataaacaaatgcttcttagcatgtattaatcatgtgaattggcaactgaaatcacactatctaaaactatctcaattttctcaactgaggttatgtaggacatacactgtccacagaaaccagaaatatagtaatggtgcatcttcagtcttcaatcagaatatggtactgacccttcttacctgcagaatcaagagcaatttgccgctacatagcagaaacc

SEQ ID NO: 13400 - DNA, 277 bp, Oryza sativa
  Intron number 2 from transcript LOC_Os10g30080.1 (locus LO C_Os10g30080) derived from phytozome v7.0 (chr-ID Chr10; p os 15551028 to 15551304)
ttcatacagcataccagccaccttggctggaagatgtaagaactccaatcgtcactaacttgaattgtttcatcagttttcaagattagtttttgattgcttcttcttggtttcaattattcgcatcaattggaataacttagtggcaaattatcaagtgcaaacccccgatttcaaatctctcaaattttaaaagaaggccttgattttgatgaggggattgaaatatgctagctctgcagaaagaagagggcgcggccggtgatcctcgacacgg

SEQ ID NO: 13401 - DNA, 613 bp, Oryza sativa
  Intron number 2 from transcript LOC_Os12g16680.1 (locus LO C_Os12g16680) derived from phytozome v7.0 (chr-ID Chr12; p os 9553372 to 9553984)
aacattacaagggggtttgtttttcagcacaaaaggtagaagcttgtgacataataagatatatgtggaacaattgtatagtgtataggcaccaagtacagggcttgcgatgctttaatttgattccgttgttatagatcagaagcagcctgctatagattaaaagcagtcctactgtccacaaggatcactagaagataatatgccctttgaatgctaaaacggtcacagtgtgacaacatgctttgaatgatggctttcaaggctaaacatttctttttcagattttcagggcaatggtggtcactggattgaagacaatggaattgtattctgatctgtgaatgcaactgaggtaccacacttcttatgcagcaaaagtatggtgtgattcgtgaaccttccatgaacggctgaactcgcaggtctaaacttcatttgtcctgaacctgaagttctgaacttctacttaagtcaagtagtactgaacttcttaatgaccgcttgttttttaagaaaaaaaacttggtttaatctgtaaactaaccgtacttgtatggttattttgatgattgcagggaggtcaggatcttcaatctctctggtttcaggt

SEQ ID NO: 13402 - DNA, 892 bp, Oryza sativa
  Intron number 1 from transcript LOC_Os09g30411.1 (locus LO C_Os09g30411) derived from phytozome v7.0 (chr-ID Chr9; po s 18511843 to 18512734 reverse strand)
ccgtctccgacgagagcatcgtcatcctgcaacaggtagtacaaaaccccataatattacagaagcaacagaatccaaagcgttccctaaatgtttgacgccgttgatctttttaaacatgtttgaccgttcgtcttatttaaaaacttttatgaaatatgtaaaactatatgtatacataaaagtatatttaacaatgaatcaaatggtaggaaaagaattaataattgcttaaattttttgaataagacgaacggtcaaacatatttaaaaaagtcaacggtgtcaaacatttagagatggagggagtattttgctccatcgtttcttcttcatcttatcagatacaacgaaaatttgaatttcagaacttagagtttaatttagagttgattttgatgtttcttttatttggtttaatttttcagcattgacttataaatatttaaatcgcaaataaaaatttgcccacaaactattttttgtcgttaataaacatcacagcttataatcaagtatcgtctctagtggtttcatccataaccatcataactgagcgaaaaccagtgaaatcgaattcttttgcgccaaaattttgaattttaggattttttttaatttggccggtttatcgaacggtttctaaatgcagaccagcaagacaaggccaacgaaaccgtgataactgagcggttatcgtcgcattttgaaacgctaaagcaagtagcaacaatactaacaattatgtcaacctatttgcacactaaactctacagcatattggttgcatcgatctatcttggcattttaagtttttgtattgattaagagatgacacaaactgtatcttctttcaggtagaaggcccggtttcgccttcagagctggtgga

SEQ ID NO: 13403 - DNA, 956 bp, Oryza sativa
  Intron number 1 from transcript LOC_Os12g18850.1 (locus LO C_Os12g18850) derived from phytozome v7.0 (chr-ID Chr12; p os 10928038 to 10928993 reverse strand)
gttggacacttcgggcgggtggctcgaactttccagtgagctactttcagcagggagcggctggccagacgctcggggttgattgaagttggaggcgatcggcgttctcgatcggtggaatcaaacactctgggcggggtggcccgggcctttcgatgagctgcgttcgatagggagatggctagacgtagcgttcgggttgttcggtggttgagaagacggcatggtaatttgtcggcttcggctcgtggctagattggcaggtggtcaatcggaggtcggagcggatttgtttgcgacgaactctgggcggtaggaacacggcttggtgtggtcgtcgtgtaggtgcggacggaattcgacgcgggccggttccggtgtttggaggcggcagctttctacgcggctgcacacaggagtcatgagcaagatgtgcaaatattggtcagatgcatgtagcattaaggaagacaaagatgcgagattgctgaagcattggactatgggctatgtttctggaagctatgcatggacgctgtgtatgtgcatatgcatgggaattatggtggccattaatgcaaagcaggatatctgttattttttgttgacttgggagctacatggtggccgggcaagcacggagccgagtctgatcaagcatcaggattgatagccgaacgtgtgcgggcctagttggaggcatggcacaatacgcatcagccctagctaggcgaggaatggtcggacgttggcggagtggtgcggtttttagttgtcgttgattacggtgtgatcgaggagttgttttcaagtcggagtcgatgagcccgtacggaggccgggtggcagaagacggagacagagtcaattttggactcaggttgtctacctaaaccggaaagtgggaccgtgaattaacaacaacattaattgagcaccaggtttaggagttcacc

SEQ ID NO: 13404 - DNA, 521 bp, Oryza sativa
  Intron number 1 from transcript LOC_Os08g34030.1 (locus LO C_Os08g34030) derived from phytozome v7.0 (chr-ID Chr8; po s 21314949 to 21315469 reverse strand)
agggttcggaggggttcagatccaatacacaacaggtattgatgcttcatcatgtagggaggatcagagacaacaagaacatcatccaagatatgatggatcagttgatgcgaggcgctaaaggttttttggtgctttctacttgtttttaaacttgtctgtttgatgcttcttttctatttcatttgtgtttcttaattatttcgtaatggatatatctgtaaaaagtttttagtggtaaagaatgacgacgtactgcagtaatcaagtgtggttttgaatgaaaaagtgtatgcgaaatctccatatgttcatgttttagcttagcttcccaaaatatattgctgtcaccaacatgtatcctgcgtttgcttcttttccgttggctggttcacaataaggttaacatcaaaagcgatcggtgcaatttgaacatttataaccttatcacatcttattatcgccatgtttgtttgaatcatgtagattactgtatttcctcaaatcattatttctttctt

SEQ ID NO: 13405 - DNA, 867 bp, Oryza sativa
  Intron number 1 from transcript LOC_Os09g02810.1 (locus LO C_Os09g02810) derived from phytozome v7.0 (chr-ID Chr9; po s 1298832 to 1299698)
agggcactcgattctctccttggtgagtttcagtattcaaaatgctactagtaattcttttttttccccataacacgaaaatgctattctgtaaagtataagtgataggcagtaaacaaaatatgcaggtgtaaccgtgtaagtataattgatgataattatggtaactgtggattagggacatgtacaaccagttcctctaaatgttgtggcagctgctctttcagatgactgcgctacctaggaaaatgaagtgattccctgacaaactttggaactaatatggacataagattcatcatcttctttttattttattttttactgaagaaagactaccaaagtgatatcataccatctgagatcactcactttgatgattcttcattctgtgttctaaaggtcatataaccctctttgtttgtcgagtttaactatagatagaatagtgcaatgttaggtaaaaattatcatcattgagaagcttgaaattctttcatgaatctaaatatcactcaaataataggctccggcatcttggtaactttaattggtatacagttaatgatctaaatagatcaactcagtagtagacattgaaaatttatctatatatatatgttgatgcatcatacaatatacatacaggtaatgcaattatatgtctacaagattcatattacttggatttattgtccattgatctgtcatattgaaatatattttgctccagccgttgacagtttgttatgcacgttttgcctttggaatcatgttatttgcagttaccttttctttttgtttcttttgtccataagtgtgctaagaaaatatttcttgtgttgaatacaattaatcataacaggt

SEQ ID NO: 13406 - DNA, 608 bp, Oryza sativa
  Intron number 1 from transcript LOC_Os09g33570.1 (locus LO C_Os09g33570) derived from phytozome v7.0 (chr-ID Chr9; po s 19799023 to 19799630)
ctcctcgcagttgacgagctacctccggatcgagggtgcgatcctctactctcttttttttgttctactttcgcgagctgatgaaactcgagatgaatccgcgtatacggcactcttttacgtttttggagaaaatttcacccgatttgattgggttagcgattctccgtggggttttgagcgcaactagggcttggggttgggaggacagttcagggatgatgcacagcccctagaattttaagttaggtgcaatggttaggtcatgttttctgaatttagattttcgtgacgtttttaatgtgagccgatgatagttgtatgtttgagagcttttctgattgtttgatggggaattagaggagagatgctaaatagaagaggggctgcgattatattgttttattcaaaatttggattgtttgatgcaatgaattgcctgcctgttaatttatgaaagatagaaaatgctaggggatgagcagaacgaaagtgctccactgtactgctgcgatttatagtgttcatgcatttggatgttcctagctgacacagacaaactttgaattgcagagaggtgttctcatttgtttggacttggaaactct

SEQ ID NO: 13407 - DNA, 709 bp, Oryza sativa
  Intron number 1 from transcript LOC_Os12g23610.1 (locus LO C_Os12g23610) derived from phytozome v7.0 (chr-ID Chr12; p os 13404935 to 13405643 reverse strand)
gacacgggttaccaatacattgacaggtacaagcacataaaagtttgctacaagaaaccaacgtttttgaaccctccactttcctatttgaaaaaaaggaattgctctatcctttacttaatagtctctatgattttcgatgaatgagcctgtggtaatgcttttatctctattctatggaccagtcgactgtatcggttccggttctttggttggcttttggtttaatgaaaatctctcctttcctcctttattagaggaagtagttttgtgaattctccccggaactggaagatcatttcgagatcttcgagcatattcgagggttcaatgtgactattgtcacttcggccaatacaaaagatgagactttactactgtggagtggctttttgctaaaagatgagggggaaactaagtaagatgtcggagaagcgaaatatacgagatcacaaacgtgaccaaatgatcaatgcctctggggtttcccttctcttcagctctccccggtttcaccgatgtgttgggcactgaacacttttcaagatccggttttggtaggacgaagatttttcactttcgtgaaggtcgttctgaggtggaatcgaacccatttttccataaaaagtcaacttgagaggacttttcaatctcgaactcaaactgatgcctagctattatttagagataaaagctgctggtctttcac

SEQ ID NO: 13408 - DNA, 796 bp, Oryza sativa
  Intron number 1 from transcript LOC_Os10g25100.1 (locus LO C_Os10g25100) derived from phytozome v7.0 (chr-ID Chr10; p os 12867702 to 12868497 reverse strand)
aactacaaaggtactactgtcctcatgccctacatacattgtagtactgtccaagatgttttgtctcattggccatatgatttccaaaccccaagtgaaggatagacttttcagctttttttttgtttgtttgttaaatttagcttctataatagaatgtgttgctgcaattttgtgctattgatattgtactccaaaatgaggtttaagttcaagctaggcccaaacactcaaacaccagcattgaacactgtgggggacaaaaatacaaccttcaaattgttgatatgacctacccctccataccaaactataaggatttcttgagttttgcacgataattaagaaattagataggattatacaagggatggttgtgatctgttcagaggcggaagtagatgaagaaattagatgagagacggttgtgatcagttgagacgagagagtaagtggagaagttgctactatattcttagataaagtaccataatacaagtgcaaagggtattttgtagcatcctatttaatcagtgccttcaccctactgcagctgctgtttttatgcatcctgctgccttggtgctttactattacctgccaactgccactgacagcgtgaggcattgctttctgcaaaaaaagtactaagtgctaatagtacactttctgatgcattgtaccttgagttttaggatgtctcagaagtcacatgtagtccatgaactagaaattttcttctgatagcttgtgagggtttcattcatcctctgctagtgatctttggctgctgaag

SEQ ID NO: 13409 - DNA, 915 bp, Oryza sativa
  Intron number 3 from transcript LOC_Os09g23760.1 (locus LO C_Os09g23760) derived from phytozome v7.0 (chr-ID Chr9; po s 14141914 to 14142828 reverse strand)
tgtctcaggtatttttgccttctgctattgtgccagtctttggttgagatagcccatgatggagaaatggcttcattatactatgtatatactccctcattttctaaatgtttaacgccgttgacttttttaaacatatttgaccgttcgtcttattcaaattttttttaaatgtgtaaaaccatatgtatacataaaagtatattcaacaataaatcaaatgataggaaaagaattaataattacttaattttttttaataagacgaacggttaaatattttttaaaaaagttaatggcgataaatattttggaatggagggagtatatatattgcactaacgtcttattgataccgtcgatatctaatcacacatcaggtagcagaattgggtttgaagtccatgactataaacagtatatcaataatctcgtactccctccgtcccataatataagggattttgagttttcgcttgcaacgtttggccactcgtcgtatttaaaatttttttaaattattatttattttatttgtgacttaagcacaacttttcgttttttatatttgcaaaaaaaaattgaataagacgagtggtcaaacgttacaaataaaaactcaaaatccttatattatgggacggagggagtatgtcagactaatttctctgtttatactttatagcaccttatgacatcagccatttgtatttaatttctctcatcaaacagaagagtttaattcattgttacttgaaggatgatttggcatgtattgataattaattatcatcgaactgttctagctagctacgaccatgagacattggtatctaatgcgttatgaactcagattacacctatttttaagtttgtaatgttggctgcacaggtcatactcgtgaggatttttga

SEQ ID NO: 13410 - DNA, 803 bp, Oryza sativa
  Intron number 1 from transcript LOC_Os12g10710.1 (locus LO C_Os12g10710) derived from phytozome v7.0 (chr-ID Chr12; p os 5751031 to 5751833 reverse strand)
agaggacgccatttatcttcacaagaatataaagagtaaacaaagccctcaaaaaaatatatataaagagtaaagaaaaattggactattgatcgaagtgagaattttaacagtgaggttgctccctttgtagttgtgaggatgaaaaaggtgatatctgacgactggtgattttgatttagggttgggttcattgtgttatttcaattgtagaacccaaattagtcagggtgtaatcaatagtttggtttcgtagctctctctcttaaaaaaatcttgtcaggtaatactactgtgctaaaaatcttgttagaaattaatgtactagcatatactgtcgatcttgggaacaagccatggtaagtgcaattgtgaatttcggaattggaatttttaggagttaaatttgggttcccaggaaggatatcaaactgagatctttagcactgacactagaaaaccaaatattcatgaattggttttcattaaaatatttttttaatgcctcgtgaaaattggggcattacagaagaagaggcacaaaaggagttgctggcatgtttgtgcgcccatgcgagctcgagttggcaatttcaggtatgatgtatagaagtgattgagattccagttataatgcgtaaagcttttgcatctactgattgagttcggcgagtgtagttgcactgacctaaccttgacgttgagcagtttggtccatacatatggtatctttattactggaagttgtattgcaatttcatgatgtagataaggagaagcctggcaggttagaagaccaaatt

SEQ ID NO: 13411 - DNA, 926 bp, Oryza sativa
  Intron number 1 from transcript LOC_Os09g23460.1 (locus LO C_Os09g23460) derived from phytozome v7.0 (chr-ID Chr9; po s 13944267 to 13945192)
gagtaactgcaccaataaccccaacaatccttccggttgtgtttgcccagcaccgccggcataacgagctgagaaatccacctacgtacacaacaaattgctgcagaatgtaccaagtcgcttcgatcgagttgttaattaattaatttgttttacagaagtagccgagaccgcgagacgagtgtatatatgcacacgttactaataaattgtttgtcatgagattctcatgcatgaataatgtagaaacctagctccgattctagctaggattaagccaatataattaaagttgcatttctgattgttttaggaataaaggctattatagagtatctgcagtttgtatatctttaatttcatttgtgtagctttgtcgctggagtggtttcttcgtttgtacacatactgcttacagagctatatatattttcaaaaagtctgtcacgaggtgtactaattctgcgtggttaattcgttcatcttaccatctagagaccccgagtttattattctgtcaccgagaaaagtaattccaatatgtaccacccactactactaggatgaaaacggatcgaatacggtcggaaactagctctatcatatttgttttcatattttttttcggaatcggtatcggaattggaaacccggatatgaaaacggaatcgaatattatcgaatacaaatacggagcaaatacgaagcgaaacaaatacggtgacggatattaatcggaatataaaaaaccctcaaactaagcatcacaagtcaacgaacaaatataactcgttatttttttaataggacatcagccatgttagtcgttcacccttaaacgacagtcacaactcaaaattgccctccagaaaattaatcctatgacctccatttcctgcgcttgtgtttgttcagaccggatcgag

SEQ ID NO: 13412 - DNA, 611 bp, Oryza sativa
  Intron number 1 from transcript LOC_Os11g39254.1 (locus LO C_Os11g39254) derived from phytozome v7.0 (chr-ID Chr11; p os 22909168 to 22909778)
ctccgtccccggccgccaccgtaggtgcggattgaggcggctccctccctggacgccatcgcaggcgtagatcgaggctgctccttccccagccgccgacggcgggcgtccatggccgcgtcgggtcctgatcttctatggagcttatgcacgcgctagcatcgacgcatcctcccccaacagcctctcaactcctctccggatggtgagcgcttcagtgattattttttttatttttttaatgatttttgcatttctggaatgtcggcttaatctaatcctgttggacttagataggatgtgccagtccgtttttcttttttttatttttttaatgatttttgcatttctggaatgtcggcttaatctaatcctgttggacttagataggatgtgccagtccattttatttcgcggaccttgttctgcatgtacggacttcatccattaatagcatatcaaaactcataatctcatctgttgcaaaatttaccgattcctacattctcaatatcgctttgattctccatgtttgaccttttgttgtcaactcactaatcttcttgtatgccatagtgattccagcaagaacaattcctgggtgccttttt

SEQ ID NO: 13413 - DNA, 321 bp, Oryza sativa
  Intron number 1 from transcript LOC_Os10g35770.2 (locus LO C_Os10g35770) derived from phytozome v7.0 (chr-ID Chr10; p os 19059024 to 19059344)
tcctcggcaagaccgtcttcctcaggcccgaggtacgatccacccccccatctcatcagcttcaaatccaccaccttaatttaatgccgcttgcttgatccgtctcttctcccaattttgttctagtttttttttttttgattttgcagttagcatgtcatgagagaaatacacgctggtttctcgtatcttttctctctccttgcagttattttttttcttttttttttgtttccgggtgaccgggttgagaattcagaagtgtcgagatctgatgagattttccgcgtgtttctttgtatgtttcccaacaggaaaaga

SEQ ID NO: 13414 - DNA, 695 bp, Oryza sativa
  Intron number 2 from transcript LOC_Os10g38954.1 (locus LO C_Os10g38954) derived from phytozome v7.0 (chr-ID Chr10; p os 20688100 to 20688794 reverse strand)
gattgggtatatttttgcaaattaatcacagccaggtatataaacgcacaatatgaaaaaataaagtatattttcaaatttctttcttataaagagtatctactatgggggtgtttagattcagaggtgtaaagttttagcgtgtccccactggggggtgtttagattcaaaggtgtaaagttttgacgtttccctactgcaccggatccttgtccatgcctctacattgggacagcctagtagcactgtaccaatgagcagaatcagtgttaacttaagatattagtccgaaatggaaataacatggatgggataatatcagagagaagatgtcaactcagatatacacgggcagttcaagccattgtgaagacaattacaggcttagatacataagaacagttatgcaatcaaccggtataatacaggcccaagttcaggctatctgataaggaatacaaatgttgtttctttagacaggccttaagaaaaattgtcactataacaataatccatgctcattcgcccaacaagtgggcataaaattaatagatgcacaaagcaaggggatttggcttttctagagctaccgatcttcagatgccagcattgataaattgctctgcactcaaggcaaaagaaatgcaaaaggttagagattaaatgaggaatttcatttttgaaatgtgcaggt

SEQ ID NO: 13415 - DNA, 871 bp, Oryza sativa
  Intron number 1 from transcript LOC_Os12g03400.1 (locus LO C_Os12g03400) derived from phytozome v7.0 (chr-ID Chr12; p os 1316916 to 1317786)
gcacagattttacaaggtcgccgatacccgagagagtaagttttaacttttaacttcttgcaaaccctagctttttcccctctccaccatgcatcacctaccatcctctcatctccttaattagttccttttcaattttaactttgcatcatctacaatcctctcatctgcccttaattagttccctttcaatttagcttcacttggtagcacctcagatcgatgctatttaattcatgctcttttaacttcaattttatactatattgctgtgtcacctaatttgttccccaggaggcgggcagcctcttgggtgcaatcaaagaagaggtcgcaatctggaaggaagcaggagtctttaaagaatagagatgcaatcccttttattttggttttgggagggcgctccggcatactccattcagtttcgacatcttcttgttggaattctaaacttgtaaatttgtacatcgtaaggaaatttggactgaggggtctttggtcagcacggcaaaataataataataataataaaatctaatttgttcttgtgtatgctcagtactatggaactgatgtcaaattaaaccctttttttcataacatatctgtctagcttgatgtcaaatttagacctttcataacataatctagttctaagtaacactagatattccttaagtactacttcaaaaaactcttaaaggcaccatctaggatatggtatatcttgctttgggtccatgatagtgtggagtttgctgttttaaaccttattcgtatctatttgtttctttcctgctcatttcaatattggggttaacaatctaacttctaatcatccactgatgtgtatggctgttcagctcgt

SEQ ID NO: 13416 - DNA, 961 bp, Oryza sativa
  Intron number 4 from transcript LOC_Os10g40050.1 (locus LO C_Os10g40050) derived from phytozome v7.0 (chr-ID Chr10; p os 21380298 to 21381258 reverse strand)
cattttgggcgttccggaggttggggtacttacaggtatctatctatccttggttggagttgcttgacagcttgagtatattgttgattgaagtaatcatgtccgtaatacttgtgatcaactctggctccacctaaaggggcaaatttgcaaaatattatggcttcattcgatggaatagatccatatggactggttttcaatcacaccatctcagacacacccaaacaaagcctacaggtattagttactgtgatcccaagtcccaacactgttgagataattaaattctgacccaatctagggctagtccaagcttaagtccccatatgcatgcctttcgatttaccaaaatgtaataccattcatatgccattaatatatccagtgccagtttctttcacgccatgaccaccagggtattcaccttccttcacgtcctttagcctcatactagcagatagtattggcgtattggcatgttcctgtcattttggattagttgatagagaatatgtggaaatctataggacaacatggctagtttaggcttgacatttcgcatctctgcaatacctagttttggagccttatctctaatcaaagctgtgactatatcagcctgtcaggcctgctttgatagggagaataggatccaaatccttaggatttgtatcatcccaaaggaaaaagaacaccccgttcttcttcaaaacaaaccctaaattaacaatgtccattgcccagctataatctccaacttttgcttgcttaggaaaatgtaggttttttcctggagcaaggaacaagtagactatgtgctttgcttaaagctaaagttatgcggttaacatctctagatttttcttcatagttttcttgtttatgcatgctaaattatgcactgatgtattttcaataagtattgacaattatggggcatttaggttcatcagaagaa

SEQ ID NO: 13417 - DNA, 862 bp, Oryza sativa
  Intron number 1 from transcript LOC_Os10g26620.1 (locus LO C_Os10g26620) derived from phytozome v7.0 (chr-ID Chr10; p os 13812879 to 13813740 reverse strand)
ccaaggttggttttgttcctgccctgcttcgatcgatcaggatcgtcgtttgtcgttgttgttgttgtttttgttttttttgttttagtttttgattcttggctctgcgtctcttggggaattttcggtttgggtctctgctctgtaattcttgtatgtctcttctcatcttaaactgcaaaaaatcttttgtttttcttttatgtgaaggcataggaggccttccaaaggtgcagtagtgagtgctagtttgaagagtttgatgaagctgaaatttctattaggaaaagtataaagatttttttttatttacagttcataaggaagggtgatggaagtcattttttctcttaaataaatatatgctaatttaagttggtgtggtatggggggcttgatttggtgcaaatctagagtttctgaagatggacctgacctgtttggttggtctcttcagagtttttaggagttgagacaaagccttgtcttttagcctcctaggatccatctatgttggtccaaatttcctttcttataagctgtgaaagaaaaaactagtaattttccaaccttcagatagagttcagaaacaggaaccaattcccaatacagcaaaagtacctagtactgtaaccctgaaacaacaaaatggaaataaatattttctctctctaaatttgcactcatggatagtatcagataattacaaatatgtggtgatgttaaccatagcctgtacagttgtatcctcctgatttatacccaaaaaaaggctaaaaaatttacagtgtttatcaagaactatagtaattatcacttcttcagaactgatcaactaatttgactgttgctaatttgcagg

SEQ ID NO: 13418 - DNA, 618 bp, Oryza sativa
  Intron number 2 from transcript LOC_Os11g17730.1 (locus LO C_Os11g17730) derived from phytozome v7.0 (chr-ID Chr11; p os 9898898 to 9899515 reverse strand)
tttgatcattgcttcattaattaagaaggtacccgtcgatttgctccaactaattccgtttgccgttaagaagatcccttctgttttacataggtatttatcgatttgtatagtctaactaatccataggtactctaactaacttatatgtctatcgatattcctatatactacctccgtcccatattacttgtctttttgagtttttgtttatcaatatttgatcattcgtcttattaaaaaaaaattaaaattattatttattttgtttatcatttgatttattatcaaaagtactttacatatgacttatctttttttatatttgcactaatttttcaaataaaacgaatagtcaaacgttgcaaataaaaagtcaaaacgtcacctattataggacggagggagtacatatgtttagttttaggatgtgtttctagcatagttttctaaattatttgtgctttaacaaaaatatagctgcatttatttgtttaaagatttcaaattgagttctcaaatatgtatgtgatgcattgtaaactttgcagtatagggggaatggcattagaaaacgtaattgaactattaatttgtatttttttttattttttttag

SEQ ID NO: 13419 - DNA, 986 bp, Oryza sativa
  Intron number 1 from transcript LOC_Os07g28930.1 (locus LO C_Os07g28930) derived from phytozome v7.0 (chr-ID Chr7; po s 16966281 to 16967266)
aggtatgtatcacattcttcacgaacccagctcatgatgtttgttcttgaacgttaaatttccgcaatcatatagtgcatttatgccacagaaaagcgattgaatgaaatgaagttaaagggaggtagcaaaggtagataaatataaataaaccttaagattgacacatactttttatcatctgtagcacgagaatgattttgtcagaaggtagtcatcactcatctgtagcatgagaatgattatgtcacaaggtaatcatctgtaggaaagaatataacgtgaactatcctgtttatactgaatagctccagcacaccgtatgggaaattatgtcgatagtccaaaaaggtggaagatctttgatgccacaccttaatgtttgctattattaatagtacctgtcaaaataaccaaacaaatagtagtaagtactaaaggctgcacttctaatagatgaggctaatgtccaattgtttaaaataccatggcatagaggtagacagttgaaatttcattacacttggcgtgctagcattttcatgaactataggagaatggtttttatttgtttttgcgaaacagcctcacatggaaatgaaaagaaagaaaaagaaaatgaagaaatacacccccctgaaacaaccccttttcgcttatgtgtgatttactgaattctcattgtttatctaatcatgttagattgtaatgctatagctagtgcaatttcaggaattaatctatgcaaatccagtatagcttagctgtcctttatgcaggacaatctgcagaatgtaaagaataaatatttggaactacttgtgtgatgtggatgtgtattgattgtctctctggttaatacttacagagttcaacctcattttggaactaggcagcttggcctggcagttgaaccatctattttacaataatttgccttccaattaaggactaaaggtctgttttttcaggatcacttggctttg

SEQ ID NO: 13420 - DNA, 504 bp, Oryza sativa
  Intron number 2 from transcript LOC_Os11g34960.1 (locus LO C_Os11g34960) derived from phytozome v7.0 (chr-ID Chr11; p os 20023403 to 20023906)
acaagtgggccccatctgaggaagggagagaaaaggtaaaagatagatgacgtggcatgctgacatgtggggcccacgctgactcagccaccatgtagaccaaaaccggggtcaaaaccatcgaaggacctcgggtgaccggttttgtatagtcgagggacctcgcatatctggttttgtggttcgaggacgttttttatcccgatgataagttgagggaccttcggtgtactttttccttttgaggaagatgaattcgtgccgaagagtgaattgctggagccaagcgaaacggcaagcgaaaagaaattcgtgaataaaacttttatatacgtattcttagcaatctaaaagcaaaggctgaaaaataaactttgatgaaaaaatctcaaaatcaactccaaatttaagattaaaaatttaaattttggctgataagcataagcataggcatatgctaatctagttgttttaacaaactctcaatttatcatcctttaggtg

SEQ ID NO: 13421 - DNA, 806 bp, Oryza sativa
  Intron number 1 from transcript LOC_Os11g22404.1 (locus LO C_Os11g22404) derived from phytozome v7.0 (chr-ID Chr11; p os 12391837 to 12392642)
gtcgcgtgggaggtatctggaccccaagatctcgaatccctttcttcttttgttcactgctcgtccacttttcagttgtaaacgtgagcttttttctttgtttaattggcaaacggatctaacttgcatggattacttgtaagttcagcagatttcttctttccttatctttttttttgcggggaaaggttcagcagatttcgtagtattacctatgtgtagtggcaattgagttgattctttctaacgaaaaagaaaatttctgatgcctcaataatttacaagaaaatttaaactgttgtttgcctttgtaatttttcaaatgaacattttttatgttaccaagcgatgaaggtaaatctacattatctttgtttgctgtagtttatcgatttgtttctgttattttacgttgttcactaatacaaatagcttgtttataatatttttggccctcaacttatatttctgatgtaatggtctatgcctgataaaatgctcgcagaaagggcagcaacaaaatgttacttatctggtaccattggtgagctgtatatataaatcaaatgaatggcgttattttgaattctaccttttctttctaacaactccaagtcccaacttttgctctctaacctttaaatggattaattacatgttctctaagtatcatgaatgagtgtctccttcaacacttctgttacatctttcttatgtcttctcattatgtgtactattaacaccctgtgaacactatggaacaatggacagaactataacggaagatcagacacggtattttgtgg

SEQ ID NO: 13422 - DNA, 361 bp, Oryza sativa
  Intron number 1 from transcript LOC_Os11g09270.1 (locus LO C_Os11g09270) derived from phytozome v7.0 (chr-ID Chr11; p os 4964852 to 4965212 reverse strand)
aactgccctgcacgctgctgtcctacgcggcgcaggtacgtgcctacaagtgaagattgatttttttttcatttctcgatgggatatatttcttatatatcatctaaatagttattatttttcttaaaaaaattaacagcatatattaacatagattgatatgaactatgtcactcgtaatatcaaattggactcttacaactaataccaaaagaaacaaattcaacttaaatagttaacacacattcctggttatatttgtttctttataattttcaaaagttgatttttttatttacatatttgtaaagtaatatatttcatacttggctatcttattgttttttataactatttaggg

SEQ ID NO: 13423 - DNA, 741 bp, Oryza sativa
  Intron number 2 from transcript LOC_Os08g39070.1 (locus LO C_Os08g39070) derived from phytozome v7.0 (chr-ID Chr8; po s 24680476 to 24681216 reverse strand)
caaatccacaaggctgtaagttcttgttctgttcttagggcaagctagcagaaagaagtaatctatctggtcagcaagtgcccaacctgtctcattatgacaatgtgcttggttgtttgctctttttacagaaatagaatatgggggcttggtgtaatgttgtttagttggcatggttggcagtgctagcatctaatatctgtggggtttctggttgaattctgaaagggatggtagaagaggacatggttttcctagttttgtggctacaccaaattatattgttatgaacatatactgtttattgttatgttatagcatcatattgggtggtggagcagatggtaggcgcataccgtgctatttatggaccaaagaatgttactatgtattcaaatattcaaattgtgcgatgcaattattctggccatataaattgatgctacaattttctaaaatatctgctgtagtcatgtgtcatgtattccaaaatgttttatgccttctttcattgccaatttgccagcagtagcagatagtagtgcttatgttgacattgcgtacatatattctctatgttgtgtttttactcaagtttctgttagcaaatgaaataggcatgactgttaactcttttataacctcattgcttataaacatatatattcttttgagatctgctctgtacattgtttttgttcctctttgtgttacttacttcttttttttattatccagctg

SEQ ID NO: 13424 - DNA, 529 bp, Oryza sativa
  Intron number 3 from transcript LOC_Os09g31410.1 (locus LO C_Os09g31410) derived from phytozome v7.0 (chr-ID Chr9; po s 18891736 to 18892264 reverse strand)
acttctatcatcgctacaaggtagattctagtttttcttttaagtaaagcaggagttcttgctcttgaaatgcattcaaggaaacacattgttcggtattaacgcagtctttggaatatatatttacacactgtagaagccttttctacagtaatttccccaaaaaatcgcagtctttggaatgcaattttaatgactaatttttgttatagtatactccagcctctagtaaaaaaaatatttgacattggaagaactaaactcagttctcccaacgtcaaataaatttgaccgaagtgagcacattataaaaacctgattttactatgagattttacccatatgatttccatgtgtcagtctaattatttaaaaagatattaactcaaggttttaatctttgacttgttgtatgtcaaaaaataaatgttttcatgacttgatggaccgaataaaaagtttatcttggacaggaatcttcttgaactgatcattcatttcttttgttgaaccttgaaaatgcaggagg

SEQ ID NO: 13425 - DNA, 913 bp, Oryza sativa
  Intron number 2 from transcript LOC_Os07g31194.1 (locus LO C_Os07g31194) derived from phytozome v7.0 (chr-ID Chr7; po s 18464228 to 18465140)
ttttgctctgcagtttatcacaccaaaagctgtaggtactgatgttattctgttctctatttttttttcatcagtcgattgccttgtttgattttccaagacagatcaatcagatttggtattttagtattaatggtagtaggcattttcccagtgtatagagtagacctgttcttaatttttttttcatcagtcgattgcctttatagattttccaatatagatcaattcgatttcatattttagtattaatggtagtaggcatttaatctgctatagaatgacacatagtgtattcgtcaatttcatacgtgatacatacagaatggagggggatatgatcagtatcaaaattcatcatgggggatctttttcaaaggagggtcaactttgctatgttggaggccaagtctctatttttcgcaattgtgacagcgaaaggatgtcatacttttgtctagtagacatggctaaagatgtaggtttcaagggtggagatgaactattctatgctatccctggttatagtcttgaaaatggaatcgacaaacttcatgatgatcattcagttcgtaaaatgttgaattttgcaaagaaaggcaagtcaatggaaatttatattaagcatcttgaataaggtgtaagtgctactccaatatttggacaggatgttgaagataatcatgtggaggaggtactgtacttagaaacaacttttcttttccttccgtattttttttctgatgtgctgacgtgtgatactgtgtcatttcgctatgtttttttttgttgtttgtgctgcttgtgcattttttttcctcatgagcatggtaccttgataaagtatagttagtacttgatcttgacctatttaaaatcctaataaatttgcaatataattttgttgacagac

SEQ ID NO: 13426 - DNA, 884 bp, Oryza sativa
  Intron number 1 from transcript LOC_Os10g35630.1 (locus LO C_Os10g35630) derived from phytozome v7.0 (chr-ID Chr10; p os 18982693 to 18983576)
gccggcgaggtccgccgcgtcgacccccgcgccaggtaaaaagaaaaaaaatcccccgcttcacttttcgccctgttccgatttgtttttagatttttgggacacgacgcgtctttgatgattttgttgttgtttaggttgcaaagaacgcgatttaggccaaaatccccgctaaaatcttcgattaaaaaatggttgagatgcttaaaggatacgcaaatgctttcctatttgctctaataaaatgaataaacgatgtagatctttatggtatttttctagtacgagttagtggtaaaaattaaaattctataatagtttggggaataaaacgattattaaatgatgacattttactttttcgagttaagaaaactgtgatctttgactattgaggcgatttgtgagaaaaagacgagacattcagttgatcccggatattccttgatcaaagtgactagcacttgaaattttgatccccgattggaatatgcgaacacgaaggcgtttggaacaagtggctgtaatcttggtttagaaaaaggcgcccgatccgggtcaaatcgtccgactcatcgggacaatcttgtggtggcgatctgcgtggcgcaccagagattgagacctgcatccatgtcgttttgctccattcctgataggattcagctgcctccagctcgcctcgtaccaagtccaggagatcttttccctgttctttcgtcgttgtgtggttcaaagatggcgcaataatacttggatcttagaaattttatttggggataatagtaggatcttgatgaactaaatctttgactagtataattactgtgattttttaattaatcaatgtggtgttgttctttgcagtgtgttggaggcgcttg

SEQ ID NO: 13427 - DNA, 673 bp, Oryza sativa
  Intron number 2 from transcript LOC_Os10g19334.1 (locus LO C_Os10g19334) derived from phytozome v7.0 (chr-ID Chr10; p os 9795620 to 9796292 reverse strand)
aggctgcctctggccttttcggtggtccaacagaggtatgtgtttgtgtatgctagccttggtattctgatttatgagttgcaaatgagaatatatttttcattttcttcttctggttgatgtgctagttgcatagaggatagatcctttattagttaacgaatatgcatattttagcccttacatgatctagccttaaatataaatgttctatatgactgtacctcaccaaaatactcctgctctatgaatttatacaacggaaagatttgccttcgtttgaaagaaaaataaaactcaccaaaacaatgttgaagaaagccataattttgtttcccttgttgcttatgcattaagtagaactccagaaattattttgtttgatctactttcttgaatgtggaatgatggcatgcttattcaagaaaacatatgatagttttgaagagctcataccacaactgccattaaattaaatttttgaatagatggttattttatcacgccactagggataatgggttccataagtttataaggatggcatgaatcactgtatgtgcaacattacaatcaagtgcaaagaaattcatttaaatgtgaatgaaaagctatttttacctttattttctatgaaggtttaccaacctcttggagacataaatctggagtt

SEQ ID NO: 13428 - DNA, 613 bp, Oryza sativa
  Intron number 3 from transcript LOC_Os08g41500.1 (locus LO C_Os08g41500) derived from phytozome v7.0 (chr-ID Chr8; po s 26212368 to 26212980)
aggtcagctcttatttcttaaatggtttcagatgagagctgataaaatatcagagtattatttcagggaaaaggcatttttttccttccctgttacatagctacgtaatcaatcaagaaatctgcactctacatatccactgtatttttcatatggcaacagccagatatgtcctagtaatgctgtaggttcagaatctgatatacctcaagaaacaagtgtcttattggggatgccttacaagagcaattgcacatttgacctttggtactgctattataattgtaaaatgattgctatatggacctgtcctttagcctgtgcatttgataaatccgaacagttctgatgttatccattagttctcctaactggtacaagtacactgtatgtgttgatttcaccatgcatttttatcatgccatatgccattgtcaaatactttatgttacaaaatacaaacaagtggagacaaaaggcaccatctgttaatccatatagatttgtgaaacttgtatactcaagtaactcaaagaatgtatgatcgcattcttttcttcgatatgtgctgcactgtaaaatgtgtaataggcatggttgttttgtagggctg

SEQ ID NO: 13429 - DNA, 567 bp, Oryza sativa
  Intron number 2 from transcript LOC_Os07g30960.1 (locus LO C_Os07g30960) derived from phytozome v7.0 (chr-ID Chr7; po s 18331448 to 18332014 reverse strand)
ctactggttcatctgcttcaatcgaccaagcccaggttcgcgaaatttgcttagtttataaaaacaaataaatatcatatgtagatttgctttcgaaagtattatcataataccatgaaattaaaacacgaatgttagggaagaactaatatcaaataattagaaagggcaaggcttcgaatccagatcatctagcccaccaccttgtgaagttagccggaagactcctaggagtttcatgaaattaattattagattttatgaacttattttgatataaaatcgattaacatcattgacttaggattcaagtttcaaaagtttaaccaaatgttatcctaaacatcgcgcatttacgaccaaacagattaacaagggaaacaagtgaaattttacatttgaaagttttttttaagaaaaaaactgttcaatgttgtatagcactctctaaatttgttagttattcttgcttgaaatcttagcatttttcgtagctgatgtgtttgaataatctttgactctactaacttagggccaaagatcacggacccggcggcgctcaagagg

SEQ ID NO: 13430 - DNA, 464 bp, Oryza sativa
  Intron number 2 from transcript LOC_Os09g25220.1 (locus LO C_Os09g25220) derived from phytozome v7.0 (chr-ID Chr9; po s 15111060 to 15111523)
aggtgcaggtaaaataatataaatattatattatatatatactagaaaaaatgtccgtgcgttacaactggtgacggctatatatttttataatcttattattgttatattgtttagttaaggtggaattcaccggggaaattcgcttgaatatatatttttttaagaaaatcatgagctgtagatagaaattctttcgtctcaaattggtaagtgattttttaaagagatttcttatacgactccttttgtattttcaaaagtgaacggaattaaaaaccgacttataaattagtagtagtaatcttgcttcctttatgaaatgcttgccgttccatttcttgtttaaatctccgtgaagatgcttttctttacatgaatttgattgtgtgaagttcttaattttcgctgtttgatttggatttgcaggtgtggatttttcttctgctacaactgcgcagctc

SEQ ID NO: 13431 - DNA, 429 bp, Oryza sativa
  Intron number 2 from transcript LOC_Os11g29630.1 (locus LO C_Os11g29630) derived from phytozome v7.0 (chr-ID Chr11; p os 16715450 to 16715878 reverse strand)
gtcatcaaggtacccaatttccactactttttgccttgtaagaattactccaattgttctacatatacatggtcttctttggaacacgagggttgacactttcagaaaaaaactgaaatttcgttaatatcggtacttttttgcaaaattattttttaacagaagatcgaaatttcgtgaattttgttacttttttacgaaattattcaaaattttaacaaattttgattgaatttaaacaaaatttgaccaattcttttataaaaacaaacttgaaaaatcctaaaattacggatgagatagttgcttgccgggttccgaaatcaccggaatttctatcatccctgggtgtgtgcattcttaatggtcgggcatccatggcgtggtggtgcagaaggtttgccggcgggagttcatcccgccgcacat

SEQ ID NO: 13432 - DNA, 311 bp, Oryza sativa
  Intron number 1 from transcript LOC_Os09g23300.1 (locus LO C_Os09g23300) derived from phytozome v7.0 (chr-ID Chr9; po s 13831261 to 13831571)
ggcctcggagggtaagcccaaaaccaaaaataaataaaaataaaacaaaataaaactttcctcctcttcttcttcctctgcaaatctctttctgttttttctttgatttctcaactattttgcttggcaaaatggcaagcatatgaatgcatgcgttttcacagccaaattaattaattaattacccttttttaccatgttttttcgctgcatttttctctcttggaattaaagttaattttgattgttattggattattttgattttaattataggtatctggcggcgaagagcgacgccgaccactacc

SEQ ID NO: 13433 - DNA, 742 bp, Oryza sativa
  Intron number 1 from transcript LOC_Os08g29124.1 (locus LO C_Os08g29124) derived from phytozome v7.0 (chr-ID Chr8; po s 17834507 to 17835248 reverse strand)
cgcgccggcgccggagcccttgccgtcgcagctaggtgagcccagtcgctgggggtgtggggggtttttgtccgaggggttaggattagttcaaaatcgttgtgagctccagttggttgtgagtttttttttcctcagcaagattttttccgaattcgtgaaccgcgtgccctgcgatctaggctagcttggaggagccatccgaatccaaacctacggggggttgatgtgagtttttgttttagctgaggagcagggcgctcttcgttcctgtttatgaagctgagagaatgtggagttgtgcggatgcttgtgggcttggcttcagcagtcgacacttcaagccctatgagttggtttttttagggctttgttgttggcatgtttcactgcatagccactgcgtacaatttcttggttcaaaccatcaaaattttatccttatatttaggttgtgcccagatcaagtcatacgaataacattgtgggccatgtctggtgacagaggagttgaaaatttggaatatgattatacaccaaggatttctagtcccgtaggatttaggataatgttacactatcatttactttatgatatgaattcaggaaagcttcctatatcttgtctttcagttagttgacagtaattgatggttgatttgcatttcaagaatgcactggacttagagtattcttttacataccagatattttgaagaacaccattcagtcattacgtgat

SEQ ID NO: 13434 - DNA, 840 bp, Oryza sativa
  Intron number 2 from transcript LOC_Os09g29420.1 (locus LO C_Os09g29420) derived from phytozome v7.0 (chr-ID Chr9; po s 17873817 to 17874656)
gcgcttcggttcgaggtttgttgaagttccaaatgggtgcatgttctttcttcgattctagatgatttttccctagtttgcttgtgcgtttgattgctgagatgcgaagcaaactcaacggtttctctggtttgcgcatacgcaaactaggcgtccggctgaagtttgtggtgattaagtggataagatttgtacttctgtctgtagttttagtcgacaagccattacatgtgattttcactctaatcatttttgtctcatacgatcttctgggagtacagattcccaattaagctgatactgttttattttaagattgcgtttagtactctggattagtaactatttagttaaagaaggtagttgaccaatgctgccataggcacgtgccttctcagtgttgtaatttgtcattgcctagctctacactctacagttggtgctacatactgtattcctgttaatcctgtactttgtttgattaaatctcttgagttttctttgtttattacccttcactaaggttaagctaatatacctatagtcctattagtggtccatgtaataggaaaataatagaaaagcatgaatgtgggcatatgtaattgccacgtggcacgtcctgttagagtggcctagtacctctagcactgtcactctgtcagctcatcatggtctttctgtccagcctcatcgtcggtattgtccaactgatggaaggtggctggctgacatagcggtagatcttatatgaggcattgagcataatgacgaaacctgaagtaaaaattattcttgcttgcaggtattaggaagattcaatcgtgctcgtgcagctcg

SEQ ID NO: 13435 - DNA, 679 bp, Oryza sativa
  Intron number 3 from transcript LOC_Os12g03530.1 (locus LO C_Os12g03530) derived from phytozome v7.0 (chr-ID Chr12; p os 1397800 to 1398478)
gaagctgtgagaagtgaatggatgcacttgactaagttgaagatttgttatttacacaaaaatagataaatcagtccaaatatcaagcagtgaatcagtttcttgcactgcgcacatgtcaaaaagacacattgcaggttttgctgtataagaaatattcttatgttcacatacatccaatagtcaatgaaggaaattaaagtgtaaagtgacatttttgtgcaagtgatacacaatgctattttacaagaacaatatagaactccttgtcaacattcgcaactgcagccctttgcaatgctcaagtttattcatgagaaaaaaaatcaacccttgtcaaatgcatttactatatttatcctcattcatattaataactgacatcaggttgcttaatttctattccatattttggcttctaagttgctacagaacagaaaagattacagttctgaattaaaaccaaatgaaacaaaagcatctgtgttttataatttgtcatcaacattgaagtcttgctttaactgactaatgcatggattatactccaggatttgaatctggagggccccacaccccttctaacatcgatccatggtctatcattggagatgaatcctctatatacatcacaactgatcgctcatcttgtttcagcaaaaatagtgtcgctctaagg

SEQ ID NO: 13436 - DNA, 1006 bp, Oryza sativa
  Intron number 2 from transcript LOC_Os07g42950.1 (locus LO C_Os07g42950) derived from phytozome v7.0 (chr-ID Chr7; po s 25722158 to 25723163)
acgaccagaagctgtgagtattctcgccgccgctcccccgtttgtttcgtttccccaatattagagagagtggtgttggtagtggcaagccgaatcagcgcgaacccttgtgttgatgtggtccgttgatttacataacaaatcgcatttctctttttgtggttggacttgtgttgatgtacttaggtctaatttttcttagccttgggggatttggatgccgtttaatgtttgtagtagacggataccattttttgtgattgggctctgtgcttatgtacgtaggtctaacatgtctcccctttggggatttggacgccatttgtggctgttctactgctaatgtttgtagtagactggattcattggattgcgtgcctctgcacagaccaactgtggaatggtgatcgttcctgtgtgaatcaggtgtacatggcttaagattgtgaggttgtttgacattttatcattatgtggacctctttgcttatatttgtgaggacatggagttatactataatatttgacttacaggttgcaagagtaactaacgtatatattgtgccacttttcacttagagcatggacatgcaaatctagatagcattttaagttaacatgtttcggtattcttattgattaaattgtggtgattggatagtttcatcagtacttgcaatcctttgcatgagtatagagaaatacaaagatccattctttacaaagccgtatgatttctagttggacttgtttttgtatcttacttcagtgcatgttgggggcacaattaaactgatttctgtgatatgtttttagtcaacttccgcaactaaaatgcggcagggagttagttttcatgacctgtaacaatgtgggtgcctttcaatgtctaccttgttagctgatgactgaacattagtttgagtttgttctgtaaaattggatatctgatgcctttgtatgtactgcaggcgtgcattttttgacaagaggatctctcaggagg

SEQ ID NO: 13437 - DNA, 774 bp, Oryza sativa
  Intron number 2 from transcript LOC_Os08g33830.2 (locus LO C_Os08g33830) derived from phytozome v7.0 (chr-ID Chr8; po s 21173510 to 21174283 reverse strand)
aaacagacaagaaattaccaacaataaaggaactggtgattcctctggcaatgttcttcttgtcacttttgaaggtgtccagcctaatgatattagcatagatgtcattcatttggtaagtatgcatgttttacatgtgatgcacttcacttagctaacagcttggttggaataaacttatattgcctatatttcaaaattgacttgggcctctgttgctatgatacagtgatcttttttttatcgggacatatctttatcaaaataaaaccggcttgatgtaaactaattactaaatgcacactattattgatttgttatgcttgctagacaatgttaatccatggactttaggacatgcatactgattcctggcgaaaaacttaatgattcacgtagtctttaaaagcactgcagactgcctatttcacatacattgtatggcagttaagatacttaaatggcacctccatgtcaagggaaattcaaaatctcctctttcttctaccaggtttattacttcttcaatttgtcatcctgcatcatatgacttgtcagcatagcatgttcactaatataataatagcatccaagttcattacttcagtacaattcagttctatgctccatgtccttctctttctgcataatcttgcatgtgctcttcgactgattagtcgaaactcgaaagtggacttgtatcctcatcttttgtcgcaatggtttgtgaatgttttaggtattttccgcatttgggtttgtccacaagatagc

SEQ ID NO: 13438 - DNA, 426 bp, Oryza sativa
  Intron number 1 from transcript LOC_Os07g41350.1 (locus LO C_Os07g41350) derived from phytozome v7.0 (chr-ID Chr7; po s 24767215 to 24767640)
ggccgttgggtgaagccagatgtacgtatcaattattcgatgatatatactccctccatctttaaatgtttgacgccgttaattttttaaacatgtttgatcgttcgtcttatttaaaaaatttaagtaatcattaatttttttcttatcatttgtttcatcgataaatatacttttatgtgtacatatagttttacatattttacaaaagtttttggataagatggatgatcaaacatatttaaaaaaattaacgttgtcaaatatttagagacgaagggagtaactaattacatacatttcctcttgattaactattcgatttgtagatagacagatgcagcagaatcaaagggtgttagttttaaagtttgatacgatgtttttttttttttgatgatgcaggtatacccgctgatcgtggcg

SEQ ID NO: 13439 - DNA, 913 bp, Oryza sativa
  Intron number 1 from transcript LOC_Os08g39120.1 (locus LO C_Os08g39120) derived from phytozome v7.0 (chr-ID Chr8; po s 24709957 to 24710869)
tcctcgccgccgatccgccgccgccgccgcagccggtgagtgatcccctttccttcctctgttgccttaccgaattccgcgccgtgggacgattcgatcgacggatcgatcggtggttgggtgggtactgggtactagggttggggtcagcgccgaggggttgcggattggttggggtacatgtatgttggtggtggtggtacccgtggtttacctcgtgcttggctccggcgcgtggagcggcggcgctgactttcggtgaatcgcgatgccccccgattcggtggggtggtgtggtttgtatggggattttgagtttttttgtttttgttttgggggtttggtttggcgtgaaattggggcgaataggtgtgtgattctcgcggagtagccgctcctgggtaagaaatgggcgagtttttgtggtgatccgtgatcgtgagaatttgttgataaatttgcggtgtgttttactgttgaaaaacccttgctttgagaatgcctagcatttttagcttgtctcagactgtcagacatgatgtctatatggtggtgctattcgcaagcggaagcatttctgatttatgtgtaatcagtttggttactggactagacaatgctgccctcccagttataagttgtaacatactagtgcttaccaacaaccagtatatctctgtgctgctaaatggaaattgagatgacacccaatgttttaaacaaataaaggccagtatagcattctatttccaggaattatttaggcttggctctgcaatgtatttccttccagcctacttggtgcatgaggtcatgaaatatggtcttcaaattgaattatagatgaattgtgatgctgatattccttgtttttcttttcctttttcttcacagggatcttccgtcggatagt

SEQ ID NO: 13440 - DNA, 719 bp, Oryza sativa
  Intron number 1 from transcript LOC_Os12g04030.1 (locus LO C_Os12g04030) derived from phytozome v7.0 (chr-ID Chr12; p os 1680871 to 1681589 reverse strand)
atccaaagatccttgaactacttccacaaattcaggtctgccaatcaataataacatatatttatcattgtacaagtactatatcttaggatgattatgtctggagcactccaaagtttacattagaattgatacaccataggttgtgtgaattattaatctgtcctaaaattaaaacaatgccagtatgctggacagggcacagaagccaacaactgttaataattgtgtacctttcatctaaaacatgtgcttgcttatagtataattcagagttcctcagaggtttcagctgtcaagctgtcactgaaaaatattaatttcagtactgatacaatcacctatgtttagacttgatccatgtccaagtgcacttctttttaggttttatcctcaatggtgtttacgcatttcagttgaagaaaaccagaaactttgagtatttgattctacaaattgtgcatgcatatactgatgtagtgtagtgttttcagttagtggggtccctgtcttggggtgaaagagtgtcctttaatgttgagctattctcatattcaaactttgtcttttgctgtcattatatgtttctcttctaaatgtcttctatcttgtatcattatgttcattccagcgtataacagtttgctctaggtttctgcttaccttttgaagttcattccttttataggaagcccttacccaccttcttggtgatcaga

SEQ ID NO: 13441 - DNA, 846 bp, Oryza sativa
  Intron number 1 from transcript LOC_Os11g11240.1 (locus LO C_Os11g11240) derived from phytozome v7.0 (chr-ID Chr11; p os 6214581 to 6215426)
ctgacgctgcttcctacttcgaggcaaaggagcgggtaggtacccagattatcccttctccgtatggatcgatcgatcgatcgaccgaattgcaatatcttcccttcagacattcatttggctcactggttatgcaatcattttgcgactaactataaatatggcgacatgttttttggggaaaaaatactagtctgttgctgataacaggtcggcaacacagcaaagagacatatttggttggcaaaacagttagattaaatttcctgcaacatataatatttagcaagaatataacctagactagatcggtggtaagaattcatatgaacaagctccaatcaaatttcaaatttttattatctatctatataaaagttacatcagagttacagtgcaattacaatgtaactttgttgtaattatatataattatggtgtcattgtgctgtaattttaaccaaacaaaaagcaagctagtgctagctgtctgttcccggtgtaaaatgttgatttagctacctgtttcacactgctacatgcagggcccttatggagtgtagaaaactagtgttgtcttctttagttggatagaagcatgaatcataacacagatcaaacggtcaaacaacttactgtgattaagcaaaaaatctgttgacacaactatagcaactccaatgatttttggcttcctttgtagaatttgttgggtcagtatattgattacgcaatgtttctttttgggcttcctttgtagaatttttgggtctgtactgattatgcactgttttcttggcttcctttgtagaatttgttggctcagtactcgcgtcaggtattccc

SEQ ID NO: 13442 - DNA, 646 bp, Oryza sativa
  Intron number 1 from transcript LOC_Os08g04170.1 (locus LO C_Os08g04170) derived from phytozome v7.0 (chr-ID Chr8; po s 2018301 to 2018946)
agtcaggcggcctctccggcatccgctccgtcgaggtgagcccctcccaccctcttcccctttcccctcccgtacggatcccgcgcctagggtttcctccctcccgtaggtgaacccttgcgattgggcgtgatttgggcggctgcttgctcgctcgcgagcttggttggtggctgctttggccgggatttgggtgcgttgggactctcgggtgtgggtctgcgacagattagcaccggttgattttgttagattaggggatttggaggggtttgggattgcatccccaaagctgagatcttttatggctgggtctaaggatggattgcaatctgttgggtctgtattctccattcttcgagttgactatgtggagttgctttctggttagattaggtatagctgcgtacgagttagatcttcatgttgctaggacagtttctcgtgtctggattggaaatttctgtcttgatgtgtatgttctctatacgggagccgcgttgggtttagggttcttttcacatttttttttcttcatgagattaatggataaatacctgggttgtgcctattattaatactaatcaaacacgatttattatgtggcgtactggcgaatgatgacaaacttcgttctttttttcag

SEQ ID NO: 13443 - DNA, 884 bp, Oryza sativa
  Intron number 2 from transcript LOC_Os07g47320.1 (locus LO C_Os07g47320) derived from phytozome v7.0 (chr-ID Chr7; po s 28289554 to 28290437)
agcccggcctagaggagggtggtgatccccatcaggtatatatatcaaaactaaccgcttccttaatctgtcattagtaattagattagatctaaattgacagcacattaagggcccctttgaatcttagggcccctttgaataaatgatttatttaggaatttcgtaggattcaaatcctatacgaaattttcctatttggccctttgattcaaaggattgaagttttccaaatcctataaaattcctatggaatggcacattgcatgtggattttggaggaaatttggcaagagctccaacctcttggaaaatttcctttgagtctatctctctcatccgattcctgcgtttttcctgcgctctaatcaaacgaccattcctatatttttcctgtgtttttcaatcctttgtttgtcaaaatcctgtgttttcctattcctctgttttttctaccctgcgattcaaaagggcccttagtaatgagaaaacataggaataggaaaaacgcgggattttgataggaatgtaagtgtaaaacagaggattgcaaaacataggaaaaacacagtaatgatcatttgattggaccgcaggaaaaacacaggaattagaggagagataaagactcaaaggaaagtttctaagaggttttaccgcatgttagaattcctccaaaacttgcatggcattagacaatctataggaattttataggattccataagatccatttctttgattcaaatggctacgtaggaaaaatttctataggaataaaatcctttaaaattcctataaatttcctttaaatcacagggggcctaattgttttttcttctattttagtctccatcgtaccagcaatatcgtaagtttcaaga

SEQ ID NO: 13444 - DNA, 1013 bp, Oryza sativa
  Intron number 1 from transcript LOC_Os09g37140.1 (locus LO C_Os09g37140) derived from phytozome v7.0 (chr-ID Chr9; po s 21424032 to 21425044 reverse strand)
gcaacagataataataccaaggtattctcagataagattttgatctcaacagatcctgcttcgagcatggttgctttccacataaatatcaataacctattgcaatcttttccacataataaaccatcatcatccacaaaaaggcatgataccattccccaaacaccatacatactgcataatcatcccaattcattccttccacaatatatactccggacccagccaaaagcaccatgtagatcttgtgcctacaaagattcttgccaaaagaaacttaaaagccaaaatcccatgagtaccacatacgaaaatctccaacctagattaagcttcaagacggagcaaactttatcttgctttgggcaagacatcctcgatcttgtttggcaaaagtttaaggagagacaaatgaaaatattccttggactccaagattatttctttgatctcttagaaggaagacaaagaaacccagccatacgagtaatcatatatatgctccctctcttaaggctagatgatcaggtaatctctgacccatcctatagattcctggttctcaaagctgagataaatctccaaagattccggaacctacccacatacaaccatgaagaaatatctctccaaaccattatagatcatggtcttatgaattccatctatgcaaccctcgatcagatccttcaatctgatttaggaagcgctgtgaaagatgtctgcaggagacttggacatggaagatacaggattatcttctcctccataccaccaaaattcacaccacctgttcgtccagcaattcattatatatatatatatatatatatatatatatatatatatatatatatatatatatatatatatatatatcatgaatggacaatttaattttcaagaagacggtcctagcaaactatcggatgaagaggaagaaatatatacaacaattgctaatcatgaaaattggagattattttctgaagctgcagaaattgaagaagcta

SEQ ID NO: 13445 - DNA, 544 bp, Oryza sativa
  Intron number 1 from transcript LOC_Os11g06810.1 (locus LO C_Os11g06810) derived from phytozome v7.0 (chr-ID Chr11; p os 3328577 to 3329120)
atctgatcgccgcctgcctcgactccatccgccaggtcggatctcttcgcgacttctctctcttaccttgcctgctcggattcctcattgtttgttcgatttctttttattatcatgtaagagattaattttgtccgggttaaactgaatgtgtaagaagattcccagaattttcagtttctaattatctgaattttgcactttggagatgaatatgagactactgcgtttaattggactattggagcgatgaaattgttctttaaaaaaaaacccatctttacagcttcctgaccgtatttctttctcgttccaaaacgataaattacaggagctgcttaacttggtaaagatttatccttttagcttctgagctgacaagtcgctgttattcgttcgtgattaacttaagctgtggataactttgagaaaacaaattcctatttgatgatttgcatgtaaaactaatggactttatcttcgtggctttcactatagaaatttatgttctttttttggtctgttgctgctttgcagattggag

SEQ ID NO: 13446 - DNA, 766 bp, Oryza sativa
  Intron number 2 from transcript LOC_Os11g06810.1 (locus LO C_Os11g06810) derived from phytozome v7.0 (chr-ID Chr11; p os 3329256 to 3330021)
ctgtgagattacttaaatcccttgccataaaagtcaattaattatactagtaataaagaatagatatggtaataatgcatactacctcccaaggtagttagccagtaagctaatagcaatgcctcccaaaagttgcaatgttgtctgctcagtagtaatttatgtgtcaaactgaatgcagcatgttgagtgcaccaaagctcaagcatttttagtgtgtgtctggcacatgagtggcaaagtttaggaagaaaccatagttgcaagtggcatttgtttcttgatttgtgtcaacttagagctaaggactactccctctatcccaaaatataaggcatggtcaaactcgtcacggtctccaaaactaatctttgactcataatttctcatatactataaagtttgtaggaacaaaattatagccatttgaaagtgtattcaaatgtcaatccaatgatactattagcaaataaaattcaatttatattatggtatggagggactacctttttggtcctatgacatcttgaatttctgtacttcatatttctttttcattctgaacttcttatagatgagaagcagtgcacctaacagccttcatgttaaccttagtgtcaaactcatattttcttatataaaaccataattttctttgttcatgtacaaaaagtaagaaaaaattatgcttttttttaatgacaaatgtgccatcctgttctttacatgatcaaaatgccgtaacttgtgtttggcaggctgctga

SEQ ID NO: 13447 - DNA, 501 bp, Oryza sativa
  Intron number 1 from transcript LOC_Os11g13390.1 (locus LO C_Os11g13390) derived from phytozome v7.0 (chr-ID Chr11; p os 7327636 to 7328136 reverse strand)
ctccgcgcaggtgtgtcgacgccggcgtcgccgatgccaaacagcccggacccgggagtcattcatcactgatctatagactccagtgatcgtccggcgggaagccggccgccatgcaaacagccaccacgtccatgactctccagtgatgatcatgagtgtctcaccatcgttgctaaattttaaaacttaagagtttgattttggggtttcttttcatcctagtgtgtttttgggtattggcttttaaactcctaatgatataagtagatgtcagtgtgtgtctgtgtcactaattttcacgtatattttctttactaatgatctattttaaatgagatcttcttttacatgcatgtactgtattaccaagaggggaaataatagatcaggttgtgggctgtgtcatatgcttgaaatcgcgtagctaaaatattcgacaatacaattgtataattgttatggcgtactctgtttattaccacaggcttcctttcatcc

SEQ ID NO: 13448 - DNA, 903 bp, Oryza sativa
  Intron number 1 from transcript LOC_Os12g14070.1 (locus LO C_Os12g14070) derived from phytozome v7.0 (chr-ID Chr12; p os 7984143 to 7985045)
gcaagcagttcgccgccgaggagatttccgcgcaggtgatttcttctgcttctttattttttttagctctcaacttcgatttctatgtcagtgagactttttgtttgttggccatacattcaatctgtcactcattttgtacccaaaggtgtgtttcagtttcactcaattgggggcacttggaatgattaaacaatgaatttgaatataatgattaatcatataaatgtgattgtttaggcgaattcaaaatacgaaattggacttggaggtatcgcctcggaatagatgttgctatttttagttatatgggcgagctcaagttataatggtttatatgttttcctgtattttttgttagttttgtacaaaaaccaatcctacctggattttttttttttgggatggagggagtattgatttacctgttagtatgttggtagcttggaaacctaagttctataattatgctcaaatgtgtgtaatgcctaatcagcttaagatggtcatgtattcatcttgaacttctatcggcagtgaggcagtctgagtgatgggaaggaatcaactagtaaatctttttcttatagtgcaccattctaaacttgaaatggttttgtgttaccatacttagcacttatccactgttgattaagataaagttttctggcatcaccaattgctaatttgagtcaggtttaacatatcctcactcacctatgcatgtgtagggacataataaatacatggtttgtcacagagacaggacctaagttaaacaacacctgaatgctcagggtccataatggcataatgtagcttacattttatttacatagtaaatggattactaaatttcacttttcgggtcaatgcaacaggtcttgaggaagttggtggacg

SEQ ID NO: 13449 - DNA, 899 bp, Oryza sativa
  Intron number 1 from transcript LOC_Os08g14930.1 (locus LO C_Os08g14930) derived from phytozome v7.0 (chr-ID Chr8; po s 8991657 to 8992555)
aagtgtaagcctcaaactgtaagttcttgttttggaattgttaacttcaaatatagtacatttgaaaaatatgaaaacttctgtttgttcagtagttgttaagttcaatctagaggagttgatattaaaggctccattacacaacaactatatgtttattttgcataagaatattaaaatatattctgaacagatgtttataggtgaaaaacaaaaaagacacatcgatgtttaaaaatttcaattgaatattaggatgcaatgaggcatatagatcaataactcctatgtatgtgtgaggccatctactgttcatttttaattttcatactccctctatttcaaaatatagggcgtattttgttttgtcaggttaaggctttgactaaaggttccttccttaatatatcatttatgtgacacagcagtataactatacgaaagaacttttaaaaagaatccaacaatatcaatttttcatcataaaagttatattatatagagtaattgtcggttgaagtccttaacaaaacaaaatacgccctatatttcaaaacgaaggaagtaataatttgctatacacccttttcattcgaaaattcttgtagtcagaatttttgaaatcttttggcactaatagacaaaaaataattatattttcttgtaaaaatgggataaacgaatttagcattagaaattctttcatatcatcattttttttaagtttttgtgaacttacgattagtaaaagtattggccaaagagaatgttggagttcatgttgatgtcataagtaacatgcacaaaaagaagataggaaataatattttcagatatcgtaatagagttctcatgtgttttcagtcggcaagtgtggtcgcagattttcagtggcttgg

SEQ ID NO: 13450 - DNA, 984 bp, Oryza sativa
  Intron number 1 from transcript LOC_Os11g37990.1 (locus LO C_Os11g37990) derived from phytozome v7.0 (chr-ID Chr11; p os 22061785 to 22062768 reverse strand)
cgcctcttccacgagatactcgaggtgcattgccgatttcgcaattattgtgttccttgaagttgtttaatgcagcactatagattattgcaagcgggaaaatgctgaattgctggaacatttctcagaagttaaactaattgctagacgctcacgctgcatcataaatttagaattggtgaccttttcagtttttcttagtggagttgtaactagtattgatgccctatgtgaactacaggagttttaggatttgattactggtagaattctttgtgatttggtacttgggaagcttaagcacaaaatgtgaggttgagcacggtttacttcaccgctttgtttcataaattgcttatgaagttatccctgagcaataccatttagcctgtaaagagattcggttgttgtgatgaactggagagtgaaggtcgggtgtgtttacagtggttataactattggtctctatgataattattgatactgttgtttgctcactccagttcttcccagctgttgaatttgttcaactgagcacctgacatccaagtgctattatttagctttgttgtaaaaaggttctgacgaaaaacgtttaaatgccaagcaaatatttcagcaaatttcatgcttataaaatcaaattttggaactaaactgaattgaggactaatgtcgaaagcaagatgttgtatgctgcataaatattccatttttgctgctgtaatgtagctcccatgataaataacagagaaattgacttaccggctaagtggaaattatacaaccgaaggttactgtggatctgttaacatgtacactgaatgtataaatttcttaatatggtatttcatttcttcattctgcaaccaacctgtcagatatttttggatatatgtgttatgtgcctggtaactctagttaatctgatctctgtttcttttgattgatggcggttagagaaaaacagggggtttggtaat

SEQ ID NO: 13451 - DNA, 353 bp, Oryza sativa
  Intron number 1 from transcript LOC_Os09g03620.1 (locus LO C_Os09g03620) derived from phytozome v7.0 (chr-ID Chr9; po s 1803761 to 1804113)
gcactactgccgtgaagggagtgaatcaagcaacggtgagtttcatcctgttgattagcttttggtaacgagcttcaattgtgctaagaataatgcccgggttttgaatttgtgtactttcttggtatcatgttgtattgtatagaattaaagttgagagagccaatatagatctgctcatggtaaattattgatatgatgttgtgagagagcacctttatttgtgtactttcttggtatgatgttgtacacacaaagattttctttccttctaaattgtgtgtactcatggtttcatgggaattattgtaactgcagcacaaaatataccaaggaagcttttaaggcagccc

SEQ ID NO: 13452 - DNA, 1016 bp, Oryza sativa
  Intron number 1 from transcript LOC_Os09g19274.1 (locus LO C_Os09g19274) derived from phytozome v7.0 (chr-ID Chr9; po s 11538051 to 11539066)
accaggtctcctatacattgtagatatcattttgtgaaagattaaaaccatcttgttatggtagtccccgaattgtaaagttatacatgaaatcatccaaactgaatgaggtttgttttgcttcgattgtattttattttttttataactctcagctgatttgatttcatttcatttaggtggatattaaatgaaaggtttattccagatcaaaattctaccgacatatatgctctcaacgcattactatagaagggattgagattctgttcatgaccattgctttcagtttcaggcaagtatatcatatgatctggaatatttgaattaacacatcactcttggttgtcccaagagtccatacaacctggaggtcatcaacaaaattaatatgatttggaattctttcacatgcatgtcaatttttcttagttgttaattaagcctcaagtgggtcaaaacgaccaaaaatcaacatatcaattctctactgttttcttctgtacatactagcacagtgctgcatcacactttctcaggtaaaatataatatgccagtatctcccttgctttctaggatccgttgattttaaatatcagatatacttttttctggttgatttgctaagtgctggcagtactacatgtctatcagagaggggtgccttgtctaatgtacctcaagttgcattgagatttgagagggccacaaaaacattcaaggataggaaggtagctgtgcaggggaaaaaaaagcattgatcaaatggttaccaggtttgtctcttgaaaactaatctttttatatgttctgttttgtagtagtagaggtttatgcttccatgactccatgagacacgctcttgccattatagtacagaagtgcacaacattttatagcgctgtttgattcagaactttttctgtgagattcaaactattttgcacaacatttaattcatctttgttttctaatttcagtaagtacgcacaatatattactacagagggaaagg

SEQ ID NO: 13453 - DNA, 817 bp, Oryza sativa
  Intron number 1 from transcript LOC_Os10g33830.1 (locus LO C_Os10g33830) derived from phytozome v7.0 (chr-ID Chr10; p os 17884800 to 17885616 reverse strand)
cgaggaagaggcgctgctgtgattgcgagtgcgaggtatgtgcattccccccacaaatctcggcccccctctcctcccttcgcttctcccgatccgtagaaaagcttcgtgcctttgagggatggagtatgcgtgctctgtttgatggtcagaggctgagaaaggagcgaatttttccaatcgttttgtgagcccagcggttacggtgtttcggggttgtttcaacagtggaggggatttcgattcatgcaggttcttggctttctggatgggattttccttttctcgtttagttgattttttcaataaaagttcctggctttctttgagtatatttgtttcatctgcctgctcgagtggaagtggggtttctaccgcttgatatttcttctctcttttttttccagtgtatttcttgtactccccggttattacttgcttataagataaaattctaaaaaaaaataacttggttataagatttgcagttttgatttggtctgccgttgaggattcttgtgttctatggctcgtctctgttttttatagtgtgcaagattcttcgatcaattattagctcttgatttctattggaggttattggcttgtggtttgtgtgtgcaatgtgcaatgcaagttcttggctttgttgacgttccagagtgtagtgtggttctttgatctgactgcttaagaataaagcacctgccttttgtaacatgaggatcctcaatttttcgtgtttgtgtattcttgtttcttgtggtggttacttggtcaagattattaagaatcctatagaattaggattcttaat

SEQ ID NO: 13454 - DNA, 807 bp, Oryza sativa
  Intron number 2 from transcript LOC_Os10g30580.1 (locus LO C_Os10g30580) derived from phytozome v7.0 (chr-ID Chr10; p os 15840585 to 15841391)
tgcagctcttccgcggcgacaccgtcctcctcaaggtacgatgccgcggggccgatctgtgagctgtttagcttttgggattcggagatatttacttgtttagtcgttgatggtgatatcatgggtgtttgggttatcgtagagccgatctgatctgctgccgctggccacgaaattataattagttacagatctgttgagaacaaaatcgtaaatttgtcagtatacatgtctgatgtctaggataacacgaaattcactgttttgttggaattttgagtagaatgatatggtttgtaggtgttagattgcagcctttggttaaaagtgttgcattgcggccttccttcagtttgaaggagtgatcgaaatattagtcagtgatgtaccgcatgttgtagtttgtgttcttcatagtcacccacctttaactctgttgtgcaagataccactctattttataccatacatgatgtttgaacttgtgttaaatgtggttattggtgtggaaatgatcaagaataatatttgcatatgtaaacatgtgcacattaatattggttgaaatttcatacaagagtctcaatgagatacatgtaattctctctaacatgtacatataaaggtcatctttttgtaaggttgttttttgatgatcagtctaatctatacatattaacagacaatggagttttcacctaaatgtgtggactgttgttgctgttggcatctgatttttgttctaacctttcctatgttttgcactatatagggcaagaagaggaaagatactatttgcattgtcct

SEQ ID NO: 13455 - DNA, 426 bp, Oryza sativa
  Intron number 1 from transcript LOC_Os09g23640.1 (locus LO C_Os09g23640) derived from phytozome v7.0 (chr-ID Chr9; po s 14046240 to 14046665)
gcctcgagggctccgtccgcatcgacggccgagctgtaagatgaatcgatgatcatcaaacacccataaaattaacctacttcctctgtttccgtttcatgttacaagatgttttaactttggttaaaaccaaactactttaaatttaactaagtttaaagaaaaaataataacattttcaaccttagacaaatttattatgaaaatatatttaattattgatttaatgaaactaattcggtattataaatattactatatttgtttataaacttagttaaaaattagtttaactttgacctaagtcaaatcgtcttgtaacttgaaacgaagagagtatacagttctctcgttcttctgcataatcaagtacacaattaagatgatctcttgttcttgttgttaatttaggtcacgacgagctac

SEQ ID NO: 13456 - DNA, 961 bp, Oryza sativa
  Intron number 2 from transcript LOC_Os07g39680.1 (locus LO C_Os07g39680) derived from phytozome v7.0 (chr-ID Chr7; po s 23781588 to 23782548)
gaggggtgagcacttcgtctcgtctcgcctctttttttttaatcaacaattcagcatcttcttcgttgctcttgtgcactactagtagattttgaatttgaagtagtactagattgtttgattagatcaaaattttagtgctatttaggcggttagggagtagtagtagtaattaccggacgctggtctcagatctgtccacgccgacgggtgcggtggccggcgcgtccgccgcggcggcggcggcggcggcggcgcacgttcgctgtggtggggccctgaatagacgcgtgaactaccaccccttgaaacgtgggtttcgttgacgtgtcggtccttccaagcaaggcgacgacgaggttgcacttgcatgccacgagggggtctggctgtcttctccttgcaccagtgatggccgtctgatcttggatggacggctgtgatgcagtcacattcccttggtgcttaccatttgttgtttccttgtgaattttggttggttgctggagttttggctagaggaaagataagttcaaaagcctgtaggagaataaaaatgtgcttttcacagattcctttggggagaggtcacctaggataatactactatactccgtagtaagtatatctttcttggttttttatagagagatattatattttcgttgacgcgctaataccaaagaacggttctcttcttccccccgagatgattatgattagtcttggcgggtgttccatcactaattgtgttgctaacctagttgcaatttgaataatgcagtttgtcaatggacggctggacatatttagggacttattttagattgagcatatgcctttgttcaaatggcaatactatacttacctgctgcctttatcagtttcaattttggtgtcatgattctaatgatgtgttgtaacagcttggctgccctctgctgctgctgtctcctggacg

SEQ ID NO: 13457 - DNA, 748 bp, Oryza sativa
  Intron number 1 from transcript LOC_Os12g26040.1 (locus LO C_Os12g26040) derived from phytozome v7.0 (chr-ID Chr12; p os 15124361 to 15125108)
gcgggctgctagggtttctcccccgagccgccctcgtgagagcgacacaagggacctctactaatgctacacgtaaagtgcaaaattcaaacacataatatgggcgtaagagaaatacaatatctttgcctaatgtgtggtacaaaagaaagtatgaacaagaagaacgtcacacaagtgaaaacggcgcatcatctccttgtcatatactacaaaggatgtgcaccatggtggcggccttgggtgcaatagagccagcctcaaccccctgcagaatgggaacacaagtgtggtgggaaagaaaaacaaaagaatcttccaccttgaaagagacaaaactttaattgtaaattcttccaatattttcctacaagtaaattattttttgtgaaattcgcacacattaccccctgttgtttagcaaccacagttgcaaattatcgattccccaaataagattagccactgtcagttattatagcaaagctgcttgtggtcacacatattgactgcagacaactcaatttctctcatagtaagatttgccagcatgagtttttagttaggaacaactgcttttggtcacagattaacaagggaaatatttacatctccagtgagtaaaatcgttggtttctgtctgttctattattacctaaattattctgtacaatatgatactgttcatgacaatggcttgacatctttgacagaacgaccacatagggggttatcttctatcccaacg

SEQ ID NO: 13458 - DNA, 748 bp, Oryza sativa
  Intron number 2 from transcript LOC_Os10g33690.1 (locus LO C_Os10g33690) derived from phytozome v7.0 (chr-ID Chr10; p os 17696012 to 17696759)
ggggcgccgccctcgccgacacctactcccgcaaggtggagtagtacatgatatgtttcctctctttagtttttttttttggggtgcatttgcaaatttgcaatcggttttttcaattttgcaaggataccactcgaatgacagttctagtagtatttttgcaattttctagtggcagttttgcaataataatttaaagcagtggtaaatttgcaattgtcttttttttttttttgatttgatcttctttgtatggaacgataatatgcgcagagaactgggaatgtttcgatcccattgtttgatttctaaggaattgggccactgaccagtttgagatagctgaaaaattgatcgattgatggataatcttatttttgtgataggtgtttgagggtagaaaggaatgaattatgaactatgaagttggaaagttgctttagaaaagtattccgagaaaaatgcatatagaacattttttttgcacgaaacgcaatgtttaggaccttggaagcgtgcgaatggaaatctgaaatccagaatcagaaaagttgctttaggaaagtattccaataaattatccagattttcggatgcttgggaacatttctgctttgcttaatccttccaatctcacatttctttgtcagttctatgacattgtagaaatgactgacttctttctcctccttgtatcatatgacattgtagaaatgactaacttctttctcctccttgtatcaggctg

SEQ ID NO: 13459 - DNA, 892 bp, Oryza sativa
  Intron number 1 from transcript LOC_Os10g34360.1 (locus LO C_Os10g34360) derived from phytozome v7.0 (chr-ID Chr10; p os 18245120 to 18246011)
cgatcctgcaacaagggcaaagctggaaagactttgtgagttttgttcatgtcacttggtattttacatcctgctttctaggtttgagaattttcagaagccaacatagttggcttagctctcctgaaaaatataactggaccctgagttatcaaaagattgttgtttgttggcttggctgcatcactgtgtgtagaatctagctttatttttatgcatctgagactattaatcatcataggttgataatggaactagtagaatgagaaagataaatagatcatcgtttagtgaaaatgggcacatgatcatcagtactactaaattttagtagcacttctgcttaacaaaaatcagtagggtgtggaaaatgaaattattacagtgaaaaaggcaacagattgtaattagtaaacaacatgtgcacatgataagtactccctaacttacaggagcacttggctctaggaaaatcactacaatgctgcttggcaagtctttggattatagtccaaatatgatattgaattttagatattcattgtatgggttttcttcatcacttttattggtcagctttcttttcatgattgctaaggggacatgtaaaaattcaacctagaattattcttaatcaaagttcaaaatcattttggattatagtctgcagtacaaataagcacaacacaaatttagttgccatttttctggcttggccaagggctgacaaaataagagttataggagataatcacaatatatataccttgaatttgttctgtcatgacttgcacagtccctccaatgcacaaaattgtgggtacttattttcctacaatttgattttttttttacaggcaagaccaccacagtgaggacaaggtacactgtc

SEQ ID NO: 13460 - DNA, 502 bp, Oryza sativa
  Intron number 1 from transcript LOC_Os10g27170.1 (locus LO C_Os10g27170) derived from phytozome v7.0 (chr-ID Chr10; p os 14248299 to 14248800)
ggacttgttgcagggatcaggaggaaaacaacaaggtagagctctctgttcttgattcttgttgtcttttgtttttctgttcatatgttgtgcagattataacattctatatgttgagggggaaaaaagaagggaaagagatgattggtgcattttgggaacaggtttggtgctttcatgaagaaacaagaaattggatgtgtgaatgtgttcttgcttagtttttttatgctctctttcccttgattttcttcagttcttgcatgattgcatcttgttatgttgctcatttgtcctatcatgggatgttttcttgaacaaatatatactatcaagaaagaatgaaaaggtgttcttcaaaaaaaaaatgaatgaacaaggaacatgaaatttgttctgaaaatgtcaaattctttccctggaacttacatttgatgcccattaaaaattagctttgatctgcacaggataacttaaattttggattaacaacaagaggaag

SEQ ID NO: 13461 - DNA, 882 bp, Oryza sativa
  Intron number 2 from transcript LOC_Os12g06800.1 (locus LO C_Os12g06800) derived from phytozome v7.0 (chr-ID Chr12; p os 3299724 to 3300605 reverse strand)
aaggtgcgtccatcatttctgatgttgaatatgaaggcttcatcatctacttctactactttcatgatttcaagatgctttgtgatggaaatgtatggtgaaacttggacctttacaaccgatgtgcttgatgagtagtaacagccactgccatattgataaaagtgaaccgcttgatcactgccaataattgactgtgtgtatcatataccatatgatggtgaaaagagaataattctaactggtaaaacgggggagggtatttgttacaattttcagtgctatctcgttggtattaaattaccaagcctgttttgttaccattgaatcatgcttaatataacatcaaagaggttgttgagctgtatacggaaagttaccatacagacttgtcatacatcatttttcttgtttctattaattacgatgtcatgcagaatgtctgtagagaaatacatatagtccttatggatgagctcattggtcaaattgtgtttggcacctagctttatgataattgccctttttggtgcaaaacaatgatgggcaatgagggtacaactaaaggatgatcgttagcccctgaccatgacaaactgtgtgctacagtgtttaacacggtataatactgtaaaatatgtgttctcactcaacaaaaattgtctatgcttttttttttgaagtaaattactgtcaggcatttgcccaacagtgtgattttatagaattaaagaaatatttacagattacaaagggaataaaacacactcaaaagctgaagaaatttttagtccaaaaaaagtacatacatattttaaagtgtaaaatttccaatcattagctgataggtaatgacatgctaggtggattgtgcagcttctg

SEQ ID NO: 13462 - DNA, 917 bp, Oryza sativa
  Intron number 1 from transcript LOC_Os10g19190.1 (locus LO C_Os10g19190) derived from phytozome v7.0 (chr-ID Chr10; p os 9709392 to 9710308 reverse strand)
tcacactaggggttgcggctccgcgaatcttgggggtgagtttcttttcttgtgtgcaagaacttttgggatttatatgcttttgaatccacactgagatgtgtagaccactcgatatagtcgctgctggattctgattgaggtaagtttgtgcaatggggggcaagagcgtttttttttttttttggatatgattggagcgtccttttccagttaggttttggattagtgctctggtgtgttgttggtgaaacgaactctgtagaatcctacaaccttggacactgtaaatcagctcgcctgtaatcctgttagaatgcacgcacgagtaggtatgtgtgatgtgtcggtattgtgtttgatattcttagctggcatttgctaattagaaacaccagtatgtgctgattagaagcaccagtatgccaatttaagagagattgttgtgagagcatggcagcatgagttatacaacattagcacatatttttgtaccgcatgtttaattaccttcaatctgatttagaattacaaaattgtacagagtttgcgtccctatataatttccagttcttagagtttttctttttttggtgttgcttgttgatatcaaagttcctcactaggctgcattgagttctaatgcaataggtgcatcagaaaccggagggttttacattaacttctgcccttttacatgttattaatgaatattgagttgaactggacttttttttcttctaaaacactaaaacaatgctaaccggtagtccggtatttctaatgcatttgtaatggtttattgctcttccgatttttgtttgaactattagatttggtttgctggtttgcatctaatgcaggtgatgttctgtatttcaggcttttcatatcttcctaacagaagttgtccttgt

SEQ ID NO: 13463 - DNA, 929 bp, Oryza sativa
  Intron number 1 from transcript LOC_Os08g25850.1 (locus LO C_Os08g25850) derived from phytozome v7.0 (chr-ID Chr8; po s 15742122 to 15743050 reverse strand)
tgatcgaagagctgaacataacgcggctcaaagtagctgcgcccttgaattaaatcaggaggaataacgcaggaaaatgcctcatcatcatctcccgcatgcagtcgagagatcgttgagcaaaaccgacttaaggctagctagctaggtgaacaacgcgcgcgaaacctgcaaaagtgatcatttctgtggcatttaatttaatttgtcagtctagaaattttgttgtcatttccatggcaggttgtagacatagttcttctagagaaatactccatatatcattcttccacactcaaatttctgcgtcagtaaatttctctccaagccagctgctatgaaattcctgattgtcccgagtgctatctaacacaaaataaaccacacgtcgatctgtttacaatggcattaattaataacaacgcggctactcccgatcacaagaaaatgcaacttataccagttctcctaaacatgttaatgaaaattaagaaagatggcaaacacagaagaacacaagcatttgcatcttccatgactattccagtgtattttcccatgcacattgatcgtaattacttaggattaaggttatacgtactcacctctcgcctatatatattgcacatacataaacgaaaacaaaactgtcacagctccaaggcaatccttctagcaaaaagttttcctttatttttcaatcaatcgattgagttttttttttctcaaggagatcccagctgcaagaggaacaagatgcccgcccaggcaacgggtatacatatgaagctatacacatgagcttccaagcttatgcgcatagactcattttgttcttcagtagtttctttcagcatttggtttaattaaccatagtatgtattattcatgcaggaagtagtaagcgcgtgccttctgtaggtgggggc

SEQ ID NO: 13464 - DNA, 796 bp, Oryza sativa
  Intron number 3 from transcript LOC_Os11g12510.1 (locus LO C_Os11g12510) derived from phytozome v7.0 (chr-ID Chr11; p os 6989224 to 6990019 reverse strand)
aaatctgcttttggttcacttctaaactttcaaaggtgtgctataccactatcttttgtcaaatggatagctagtcacactgacgtcagctgcttagatatagttgtcaatgggagatccataccaatcaatccaaacaccaccaacttcatacttggtatcccaaatggaggtttagagatcaagcatgacaatgatgcaagaaaacatttttttcatcagcattatgggagcacaaaacccttaatttccttctttggcactaagttgcttagcgacaagggtgtgaacaaactatcagaagatgatgtcctacgttgtttcatggtggttgcactatcaacctttctttgacccaacttagacactcaccccagcccaaaatacctcgaacctctgattgatgtcaagtccagctcaaagtggaactggtcaaagtttgtttatgaatggcttatgacatacatagccaagttccaaaaggagagtaaatcaaaggaacaaacatcaaaaacccttggcggctgcggacacttacttgctgtatgcatctcttttttattacttaagtcattttttatacccataatatttctaaacattgacttattctttttcttttgtgttgtttccttagattaattatcttgatttcaaagattttggaattagaaatattccaattggtccaccaccaagaatctctgtttggaaaggcggaatgataaaagagtattcaaaaatggatgaatgcaaaacaggagattttggaaagtgaccagtaagtaaaaacaac

SEQ ID NO: 13465 - DNA, 893 bp, Oryza sativa
  Intron number 3 from transcript LOC_Os12g17810.1 (locus LO C_Os12g17810) derived from phytozome v7.0 (chr-ID Chr12; p os 10198282 to 10199174 reverse strand)
ttctggaggaggccgtttttgcggaagaaggtacaaaagattttgaagaagcgcaaggcaagtcacacagatcctaaaaacccctttgagcatattgatcctgtttaaagctgttgtttttattcaacttatgcattgttttcgaatgtcaccgagaggttatcctatgtcctttgttaagcccgtttgatattgattacttattctttttaaatgggttaataatttgattagctggaacaccattggttttagctaaagtaataggatacttagccatgcttagaaacattaaacattagctcattaatgagataattcatgcttcactatcatttatggttatatttaatggtagctcacaatggtcaatcgtgattggttaattaattaattgtgaactaaaaactgattaatggtgggttgtgagcgcacggttttgatggtcgtgctcatgacaattaaggaccgattcgcgagctactgttgtgaaacattaaccgtgccaaccacaagccagcatgggcaacggctttaccttttgtatagcatagttcattgcggggcatcagactgtgaagcggtgataagttcgtacctcgggcttttgagggggtgattatgaatcaggaatagtgcactgttgtgaattgcgttatgcggatggtaatgtcacagctcctttctgaggtaccgtggtggtattaaggcgcatggcaacgtgttgtggggttgtgtcttgtgggtacagtgatacatctctagctagagtaaaactattcgaataaccgtgtccgcggttatgggcgggtcgaacaatgtttttcgtgattagtctcacactattgaataataatgaataatgtgataattaatttgactcctagattgga

SEQ ID NO: 13466 - DNA, 687 bp, Oryza sativa
  Intron number 1 from transcript LOC_Os08g06250.1 (locus LO C_Os08g06250) derived from phytozome v7.0 (chr-ID Chr8; po s 3442974 to 3443660)
ggacggcggagaggctctccgctgcgtgcgtcatttcttgatctaatttgtcttgatagagctttgatttttggtgtgattatggcaatttgaggagatacggcgcctctattaaaaggggagaaattattagattcttagcatcaattcacatgccgtacgaagctaattgtagaaacatatcaattgtagaaacatgcatgtcaggtggcactgaagaatgacttaattgcttagttagcactgaaataataatctgcagaatggaataatgtacctgaaatacatatctcctttgctctgtttgagaataatttgagagatcaaatttgtgagttggttctgtgttttttttttctttttcaaccttgtggaacgatgtttggtgagaggggaagagggtggtaatcccatttaagagctgccaatctagatgctttattatggtgcccacagtaacctcagaggctttatgtgattagcaaggagtaatgaatcctcactttgcagcatatgactagtgtgctaccttttctgctgtatgttaaagttctgcttgaagtgccatacatgcaaactcccgtggtttaggaagcctggcttgtgaatcctgtgcatatatttttctttacatcttttttgtttgttgcaggtttatttacgcgtttattggtgttggtgtaatac

SEQ ID NO: 13467 - DNA, 767 bp, Oryza sativa
  Intron number 1 from transcript LOC_Os10g36050.1 (locus LO C_Os10g36050) derived from phytozome v7.0 (chr-ID Chr10; p os 19191071 to 19191837)
tagctttggctaaccttgattttaacatcttactggtaagttataggtgccgcatcatattatcacaaagtacatccatggcactttccaacaagagggaaaattcagaaaaaaaaagtgcatgtgaaggaaaagggagagaaaccaccctatcaaagtatatatcagaccaaccaaccaatgctagatctctatgtgagatgatcagcgatgaaagcaacaataacatgtcaccttctgaggcataaaaaagaaaggggaccaattaatgtgtttcactgtcagcttttgtgaaagaactgtgtggggtagtaaaagtatcatgcacctgctttacctgaaagagatcattatgcagcgataggacaactaatctatgaataatagtcttgacagagaaacaaaatgtacgcgttaatcgccttaattttcactgccactattcatgaaatcaaaaagatgctttcaggatcaccatctatctgttgttctagtactacaaagtacaaaccctcagtaagattcaggcattcagtaagccattttgatacttatttttcttaagataaagcaagcttttacatcaagctgatagaaccacactaatcctgatatttttcttcatgtagaacaaattcagcctatgtagaacaacagttataagaaaaaaatcaactaaaagagttagttatacaaaaagtgtagcagaaaatgttagttattcagaaatcgaatatttaatttgctcgaatcctaccagcagggag

SEQ ID NO: 13468 - DNA, 659 bp, Oryza sativa
  Intron number 2 from transcript LOC_Os10g19960.1 (locus LO C_Os10g19960) derived from phytozome v7.0 (chr-ID Chr10; p os 9945014 to 9945672 reverse strand)
agccgcgccgtcgtgaggttagttcgtttgcagaaagacgaagctttttatgcttcttttactcctgatgatggacaatagatgcaggacgctacatgttaatttctagtttacaattcgttgttgtttcaatgtagatttgtactgctcatcagtttcttaatttaatggtcaattgtgcacagattcgtattacgtttgcttagcttaattccaaaccatatgtttggcatgcattcacagtcccagatgtattttgcagccttataattagcatggtggtttgaactaatacgatttcctctttcttattacctcaactctcgatgatttatggttttttctaactagcatgtgtagattatacatagtcgctccatcaggccattatgacttttttttttggttattgtgagaaaacatctgtcgttttttatttaatatcacaattcaaagaagacgtactattcttagacctaagaaaggggattctaggaaagccttcagttaataacataaaagtgaatcaccaccttgcataatgcatatgcatatacgacatccgcatatgtataaccacgtaggtgttctgctactattatattattgcttaagccataattctctcgatctgcagttcaactttgaggggaactacg

SEQ ID NO: 13469 - DNA, 391 bp, Oryza sativa
  Intron number 4 from transcript LOC_Os09g36180.1 (locus LO C_Os09g36180) derived from phytozome v7.0 (chr-ID Chr9; po s 20859167 to 20859557 reverse strand)
caacgaacaacctgaaatctattttgtccaaggaggtcagaattgtctcgcgacttagtaatataatttcttatctttcttttttggtttcatggaaatgtacaagggtacataacaacgtgctcatctttgctatgctactaatttcgcaacgtcatcctctctgatttgtccttgcaactgattgccttttctctaaataccatgctactctctgttgttccaagtagatttgcatgctgtgtcccctatctgctctgtaattctgttgcggacattttgatttttcaattaccatctactgttatttgcataagaaactgtcttcttgttcagaagtatcctcaatttttctgttcttttagtcttatacatgccttctggtctccag

SEQ ID NO: 13470 - DNA, 988 bp, Oryza sativa
  Intron number 1 from transcript LOC_Os08g39490.2 (locus LO C_Os08g39490) derived from phytozome v7.0 (chr-ID Chr8; po s 24983580 to 24984567)
gcttgctcggcgcgcgggtcgccacgccagaaccggtgggtgaccccggctgctactccttgcgtttctgctaccctggagtctttgcagcccttccacggccggatctctcctctctcgttggggggggggggggggggggcgtgggggatcaggattggtgagcttctcgattcgcggggattcgatcttgtttaagcatgctttcttgatttgctgggaggtttttcgattggagcttcgttactgtgtctgtgtgtgtgtgagagagagaccaggatctctgccttctgggcggcagcattgatgattagcttgtctccgttgattggtggtagcttgtgtgatccacatttctgaatttccggcgacacgcacggttgccatcaccgttcgacctgctgattcattcctgcgactgcgagtgctgtttccttgtcgtttaaatgggcaattcggttgcggattaggattctccgggggtagatgtgtggtgccatctgcatttatgacggaatatcgtccaggcaactagtaatgatttcttcttttaagatgctctttgccatgctactactagtagttgcttttgctgatgattggtttcttggccaatggtttggttgttgttttttttaaaaaaaactttcagggggctctgatttcttgtttcagttaaccgcccatacgaaggagtctactggcaaaattttgctctctattttttttttctgcggaatgatttcattttgatgtatgatagcacttcatagtatgataagtctggattttgattcactgcataatcttctgaatcataaagttggtgttttcctcggtgtcgatagtgctcgatcttaattgggcatgctttggttttaattagttgatcgcctagcaaaagttgctacaaattataatgattaatcatttggactttattatttttccaggtaccacaattctagcagagattataaatattcag

SEQ ID NO: 13471 - DNA, 893 bp, Oryza sativa
  Intron number 1 from transcript LOC_Os08g02390.1 (locus LO C_Os08g02390) derived from phytozome v7.0 (chr-ID Chr8; po s 953198 to 954090)
tcttcaagccctacggcaccgtcctctccgttgaggtatacgcatatcattcatttctttctttctttgcctcattgctactgcaattccaacacctggtggtaaatctggtgatatactatgttactgctactgctaagaaagtaagaatcaccgaccagctcaacccaaaattttactgaccaattgaatggggtggacactgtcaacaagtgaattggggagctcatcatatatccaatgcaaacggtgactaaggctgtgtttttctcccagttttcccaactcacctcactcattttcagcgtgcacgcttttcaaactgctaaacggtgtgttttttgcaaaaagaatctatatgaaagttattttaataaaatcgtattaatccatttttcaaaaaaaaaagttaatacttaactaatgatgcaataataacgtgcttcgttttacgtgccggggacccctcctcccgaacgcagcctaagactcccctttaagttttgaatgattgtcaagttgttgagtaggcctggaggcacaaactgcaagttagttctttgatgtttcagacttatatgatctctttgcaaaacacctgctcttgcattttgatgctaaatatatgtatttactagagaactataagattaatacatcaagcaaagtttggaacttatattagatgctactacttgcttggaatggatgaatgacccctacttgattccacttagctagcatgtttaaattcttcaattcccatatcacaccggtttgcatatcatgatgttagaaagcgcttcagattgattttagaggtgcgctgtgatgttcatatctgatgacaacccgcagatttcccgtgaccctgagactggacttagccgagg

SEQ ID NO: 13472 - DNA, 956 bp, Oryza sativa
  Intron number 1 from transcript LOC_Os11g20384.1 (locus LO C_Os11g20384) derived from phytozome v7.0 (chr-ID Chr11; p os 11795032 to 11795987 reverse strand)
ctctcctccgacccctaccgctgccggagtgctaggtgcgtcaggatctaatccctctttgtgtgcttcgtttcctacggcaattttgaattgtttatacaaaattttggggcgcatgatttgacagtgagaccgtgatggatcgatcttgaggcgctgaacgtactgcttgccaaaatttctcggttttgcgtcgtggtgcgggtgtgtgaggagcgttttgcattttaattttagggtatgaatattgacttgtcagtgcataattatatgaaatcatggaatagcattttgtagaaaaaaagaaaatgtgagtcctaggcactgttggcatgattgatagaaaactgtgtacattttttatgatgcaaggtcaggatcatgtgatgagtattaaaatcaggttatggattttcttttcacattatattatctgtgcattcttatgtaatagctttcttgtttatttgacatttatagttatccggtttgatttccctatctatctattgtgataaaaaggatacatggcagggtaccttccctggcccttttcgtcatacttgtttggcttcttgtctcatatgctctttttgtcttgctatatgcgatatgatatgatcatcggaccatggctatctaacagttctagatgctgaaggatgttggttccatggcccacaaatcccaattagttttttaaggatgttagtttaatgtgcatgtgtttgtattctatgattacaataggcttatccttactaggaaaatcctgacacttgtactgttattggttattttaagagcacgataacattattcaggtattcatctgttactattgttccagtatattatgggcatcacatgtcttgactggttatatctgtggcccatatttatcattctgatgatttaacatttactcatgtattcctctatcagggcatcacacg

SEQ ID NO: 13473 - DNA, 524 bp, Oryza sativa
  Intron number 1 from transcript LOC_Os11g30320.1 (locus LO C_Os11g30320) derived from phytozome v7.0 (chr-ID Chr11; p os 17138635 to 17139158 reverse strand)
atcagcagccagggagcttctccgccatcagagtaggttctcagtaaggtcaatgtatctagctttaattaacaatggttatgttgagaggaacaagtatatttggaaacttaagatgtcgcttaagattaagatctttatgtggtacttactaaagggggttgtgttaaccaaagataatttggcgagaaggaattggaatggtagcttaaggtgttgcttttgtatgaaaaatgagtctattcaacatctcttcatggattgtcattatgcaaagttcatatggagagcagttcagttttcttttggttttaaccttccaactagtatatctcatatttttgatgggtggcttttgggggttgacaagaaaaagagtaaactgatacttgttggagcttttgccatttgttgggctctatggttgagtagaaatgatttggtttttgacaaaacaccatctattacatatatgaaggtaattttcagggtaacgcactggctacggttttgggcacagctac

SEQ ID NO: 13474 - DNA, 828 bp, Oryza sativa
  Intron number 1 from transcript LOC_Os07g33690.1 (locus LO C_Os07g33690) derived from phytozome v7.0 (chr-ID Chr7; po s 20133128 to 20133955 reverse strand)
ggaagacccgtctcgcctagcgctccaagacccaagtgagtcaactcttgtgctctgtaaatttccggtacacgttcgttggttgtccaggcctgggaattgcttgtatctgaagaaaagttgctcgtctgatccacgaatttctgtccttatctttgtggtatagtttcacacacgggtgaggtgataggactccaagaagaactggagaatggattatcataatttctggtatacgtttactcgaatgcgtgactacaatttggaaatttccttgtttcacactaaggtctggtttagttcccaactttttcttcaaacttccaactttttcatcgcatcaaaactttcctacacacacaaacttccaacttttccatcacatcgttccaatttcaatcaaacttctaattttggcgtgaactaaacacaccctaaggtatggaatacccccaaactttttataagaaaatgaacatctaacagcacacgcttttgttttggatgaaagctcatgtgaagtttctaatcaagacaccagacacatctaaagtgtgcctggaaggtttgatcttatttaagaaccattagttacatagggtccagtgacttggacttatgtcacccaaataatcttatcttatgttccagtggtggttagtgccatataccaaaaacacaatttccccgccactacctccagtcctccaccagtccaaccctccaactatattgtcatctacatcatacgttttcacagttttgcagtctgacttgctcttagttgttgcagagaattggatttacaaactgagcatagcctagaag

SEQ ID NO: 13475 - DNA, 1002 bp, Oryza sativa
  Intron number 2 from transcript LOC_Os08g31830.1 (locus LO C_Os08g31830) derived from phytozome v7.0 (chr-ID Chr8; po s 19734962 to 19735963 reverse strand)
ggggtcccgtcgctaactggggcttcgtcctcgcggtacgaacatactaccgtctaataataatcggtcaatgtcattttgcgatttgggtgctgtgattttgatatcatattttggtcaagtagaacgtggcgcattttgttgagaggattgaagttttccccttcgatcactgaggttgtgtgtagtatacctgtagcttgaacacgattaggcatgaggatatcagattgtttggtgcaaaaggtccgtttcatagccatcttgggcggtagtgatctttaggaagtagagagttaatcctggttgacaacctttggggcgtaactgtctaactgacattttgtaggtgatttggaagttgtaaagagagtactactgatgattgttgagagttgactaacgagatgaggggttgattttgttgcatagcaatcatgcgggtgtttcatccagtcatgtaggcacacaagtctacaatcctagaaactgttacatcgttaatcttgataatcatgtgacgtgctgtgcaaaattggttgacaattatatccataggtattcagtattttgttgcgtcatggaatattttctgatgactgattgtgtatcagtgcgtgcagtctagctgcgcaacatgtcatgccttaatgtgtgtgtagctcacatgtcatgcctttttaatgtgtgtgtagctcacagttaacaggctgttgtgaaaatgtcaattgcagataactcttgcaccattcatcatacttaattatttaattatgatctatcaccgtggatgttgatgaccctataaatttgctgtccattaaataaaccgcatctgaaattctgaataatttaattcttctaatacaacatttctagacttctagttgaatttcctgtggaaattcatgctgtattatatacttacttgtccttgcactataattgagtagcaccttactcccttctttatgttttgttttcttccagggcttagttgac

SEQ ID NO: 13476 - DNA, 662 bp, Oryza sativa
  Intron number 3 from transcript LOC_Os12g06020.1 (locus LO C_Os12g06020) derived from phytozome v7.0 (chr-ID Chr12; p os 2780149 to 2780810)
aacaggcgtaacaccggtatgtagttgatgagtttttttttcctgttgcccgtatttcgtagcacgcttgttgtttagaactttggatattggactgattgagctgatctgtagtaccactatgacctgtgatctctgatctgtagttctgacacatatccagatattagcaggctagttcttcttaggattttaatttactataggcttttggaaagaataatctgaaattctgcacccaaatggcatatatacgtaaatcagctatgatcaaggtatatctacatctatgagtagcagagcattttatgattttgtagaaggtgtttttttttataaccacagtatttaacacagttacgcagatatcagctcaatacatcatagtctagacaatgaactgcaacattcaatattaattaatttgatttgtatgctttttaatgaatttgatttgtatgctggattcctcatgaaaagatctgtttctgttgttgtagcctgtaacagataatccaagatctgggctgtgtatatccccttgcagatatagaggccggatttctatccattttctaaaaaaacagataatctaagatctgtttttcttgtcgtaactcgtaacagataatctcgtggaggatctattgagtgactttgaa

SEQ ID NO: 13477 - DNA, 775 bp, Oryza sativa
  Intron number 1 from transcript LOC_Os09g11270.1 (locus LO C_Os09g11270) derived from phytozome v7.0 (chr-ID Chr9; po s 6258507 to 6259281 reverse strand)
agctcactgctgctactactgccacggagggcgaggtaatttgattcatagtgctggattactggattgtgccacgattctttgaaatgttgcctgggtgcattttgctagctttcttaagttgctgggttctgttctacatcctattagcaagttgaattgaattcagctcaattatgtacatgaatgaatagtcatttgattcatttcacaatctcaggtttgcagtcatatgtgttacgaataagaaaacggctatttggagcagtgaaattagctcttttcattttcctgtattagtactcactttgcatttcttaggttttgtacttcgacctgtatttggctagcaacatttaactgtgcaactagccaatataaccttttcttgaacctgcaataatgatcctattagatatgtgcgctgtttggctttaattgtgtctcagatagcttgcaaccctacaacaacaatacacttcattctatcaatatttaaatttatctttctatataaatgaaacagtagggttacttttgccttactttttgaaaagaaaatcaaaattgttgaaactgctaagattctgaaaaaaactatttatgccacacattgtgttgttgctgtactcgtttcttttagtagagtagtggacagagcaaccactatttcagagggccatatatttttttagttggcatcatgctattcaaaagggtgatcttacttctctttgcagggaaatccaacacccactaagaagaacattcaaga

SEQ ID NO: 13478 - DNA, 732 bp, Oryza sativa
  Intron number 1 from transcript LOC_Os11g12570.1 (locus LO C_Os11g12570) derived from phytozome v7.0 (chr-ID Chr11; p os 7061231 to 7061962)
cgaggtttgtagggccatcagaggcggcgtggaggctctaccactttgatctgtttgatgtctctcctcccgtgctgcagctctagctacatttgcccaacatgcaaacggtttttttaggggagcaaataacctggaagatgtggtggcacgtgagtcagcatcacggaccatgctaacagagttttttaggatgaaccgggagaatagtgaggcaagaaagtatctttacagcgagttccctgaatactttgtgtggcggagacatctaaagatatggaccaagcgggatcaaagaacatagattgggaggcttgtgtcagcgaatccttctgaaggggaacgtactcctaagggtgctactcaaccatgtccgtgggccacaatcatttgaggatctatgtacttttggtgggatgatgtacccttcatttaggattgcagcagaaaaagggaacttattgaggctgacagggccatcgatgattgcatgacataggcaacgtttttccggatgccatgtacacttagaaggttttttgcaataattatagtgttctgtgaagccaccaacatccgtgatatgtgggacaagcatcttggttcaatgtctgaggattaccaaagacaatatccaaactgtcacgcaattgagcagcttgtgcttagagacataagggacttggtcatatggtcttcctgagtatgttgaaccatttgattcaaatagtc

SEQ ID NO: 13479 - DNA, 556 bp, Oryza sativa
  Intron number 4 from transcript LOC_Os11g33330.1 (locus LO C_Os11g33330) derived from phytozome v7.0 (chr-ID Chr11; p os 19250694 to 19251249 reverse strand)
tacaaggtaccgactagtgactaattgaaggtacatatgattagttggaattatatggataatttggtattcgcattaatatgaacttgtttaatttttaaaatgcaaagatttgagcatgtttgattgctatctagtttcagattgtttataaatttattgctgaaatacttatatttgaagtattctcttatcaaatatgtaacttagcttcctgaataccaaacataagttgattggaaatcaacaggagagattagtgatatacagtgatgagaggacaaagcctattcactgctgtgaaggctaattgcctaattgtaggttggtgcatatgcatagtcggtcggttacatggctgtacggagtcacttttaccacactacgttaaatagataaataaataggctaagaaaagagaggactacctctctaaatgatagttatagagggagttgatttcttttgttttctcccaattgtggtaatcatatttgcattagtttctcagatagaactatctttctgttgctatacaggtttggcgcttataact

SEQ ID NO: 13480 - DNA, 1012 bp, Oryza sativa
  Intron number 1 from transcript LOC_Os07g37250.1 (locus LO C_Os07g37250) derived from phytozome v7.0 (chr-ID Chr7; po s 22320919 to 22321930 reverse strand)
gcgctcggtggtgcgctgcgtcgccacggcgggcggtgagcttgctcgctcgcgctctctctgttttttttctctcactcactggtgcttctggcgtcggtgatgaacacgtagtggtagtgcgttcgattgcgacagaagagcttctctttttgcgtgggggtttcactagcaaaatctggatcctggttcttcttggggatgctgcaagattgtttgtggcggggactacaagccaatctagcgtcctatgtttggaggaagaactggcaactgtgatttttgggtgaacaattagcatttgtagttgtgtatccatgcggttttgatgcttggttattctttctagcagggaattcatgtctgttttagatgcgagcttgggaatttttttagaatttcgtatcactagtttagccatatgtgattttcaacaatctagctgattttgatccacaaatagcgaagggtaggactattcagttgtgtatttgttttttgccgggtcggcgaaggagccgaccaaatttcattaagaatgaaaggagagtttacaagtttacacgacattaaactgtcgagccggggagaccccggagcagagaaacaggatcagttgtgtatttgcgccaatcatcttatgttagccaaacctcacaagccctggttagctgttcaggcctatgattcctgcttttctgttgaattgtggcagtaaactgccaaatgcttccttgtagaacgatttgatgcgtttacatatttccgctcatttcgttccacagtttcttcatggtgttctgttgcttctgccccctttcctgtcaactttcttcaattcatcgagcaagtgccgattacttgtcaagtatttgatactggatcattgtatgtccaaatgttttcagttattatgatcacaaaggcagcaactaacttataacatattgtacacagcatgatgaacaagttatcgccacagcgtttttcacttgttctgaatattgtgcag

SEQ ID NO: 13481 - DNA, 746 bp, Oryza sativa
  Intron number 1 from transcript LOC_Os12g18920.1 (locus LO C_Os12g18920) derived from phytozome v7.0 (chr-ID Chr12; p os 10979217 to 10979962 reverse strand)
aggatagagccgtgaagcacgttgcgcttgttgaggtcagccacactctattctttgccacaaaccctaaccctttattccatatgtttggttgctgtccatttatttctgcatgtgtggttgtcgtcttgtatgattgggattgatgtaaggaccatggtacttccaaatctttctatttttgtccttttcataaatctgacaagagctttgtgttctgtgacccaccatattttttcccccacttgatctgaatcatggtaatgcttttcatacaattaagagttaggattaaaggtaagagggataatgcatgcttacgatttagagctgtcacttggtttgtgggaattcatttacccaacccactagccaaatagggcaatagtgtaagaacatactcagtgttagtaaatgcctccctttcaccagaaatgtatcatttattacagtaattgcttaccagacgtgagatctgaatactaaaacatctagattttgaaatcaaatcagggtactcacacatgttcctaacaatctagtagtgagacgcaaaactatagcaaaaaatgattacagatgatcccattgttgatgatatagaggctcttccattcgcttagttatcatgtgaagtaaaattcatcattataaccactttaattattcaattctatgtcctaaatgctaaaaaccatatttgcattgtagccgccagcgacaaagcattctgtctttacacgctg

SEQ ID NO: 13482 - DNA, 879 bp, Oryza sativa
  Intron number 1 from transcript LOC_Os07g38100.1 (locus LO C_Os07g38100) derived from phytozome v7.0 (chr-ID Chr7; po s 22847718 to 22848596 reverse strand)
gcgcttctggcccccgccatctccggcgaggtacgatccctttggctggctcgtacggaaaccctagatcgcttgagacgttgctgtcggcggcgcgttcggtttgaggatcggggggacgatcggggtggattgggggagggcgcgcctcggattacgctttcttcttcattgtacgggaagagcacggtagattgtgggttagcatgggggtttcttcgttcggtggattttgtgttccggagccatgcgattttgctcccattgccttgggatggtattgggggtggagctgattgagttgtaatttctcgtgggttccgatttgtgctgaacgctttctagttcatccaccaaaccacccgttgacgtgaggattcatctcacgggaatttggcagacacgactcaaccttatcgtttttcagcgcgttcaaatttatttgggcttgcttttagggaaaaattaactttgagttaacttattttcgttttgcaatgagcatcactcttgatcaaatctatatatccagtctgccaacagaaacagatagataccctttttatcagtacattaacgttttcctgatagcccattttttatggccttttgtaattttttgcactttgcaacgcctctaaatatggcacttcaaatttctttcttttttatttggggcagttcggctaatcaatctgtttgtatgaggtagagattacatttatattacgcatattatctcataatgtgttttctgatggattcctggaagttccatgacccccatacttgtcttacagagatttattgaaactttgtattgaaattgcatttgttatgacaggtgggtttacggctcttactggcaccactaagctc

SEQ ID NO: 13483 - DNA, 922 bp, Oryza sativa
  Intron number 2 from transcript LOC_Os11g03290.1 (locus LO C_Os11g03290) derived from phytozome v7.0 (chr-ID Chr11; p os 1222585 to 1223506)
aataaaactccccttgaacttggggtatcgtacttaacaaaatttaatttgctctccatctaatttaacaaaacctagtgcatcactaatttaactatgtcaattaaattgttttttttctaaaattatagatatttttttagataatgaaaaaaagtatagatatagtagacgtttatgactttaatcaaatatttaagttggcctctggttttgagatcggtgcaactacttgagaacgacatcaatacagacaagaaaaaattattggaccatgtgacgaagtagtctcttgtatccagggttcccaatttcaacgaaatatggtttagttctcgcgaaatctgaacttgttgaccaagtcataaacacaaaccacttgatttttttatcaattttttgaaaagtttaaagttaattttattttgttgataaaatttatccagatttcattggtttttatcagttttttgacggattacatgaaatctgatgatgtcgctcgtgagcatattagattcggcattaggattatgaacctgcttgtatcctttacccataagttaggatacttccaccgttcagttttataagactagatctggatttcaaagagcttttcatatactactataatattggtttcatgcctatcatgaatatatattatcagaaattaatggtcaaatttagtcttaaagtcatttctagagttagagttagaatatgcatgccttgtaagagcgaacggagggagtatcactcgagttgaaaccattttcctaccgtaacgttgtaaaaatatgtttcctcctagaacaaattaaaatagaaaaattgaaacaaatattactcaccaaaaaaagccttttaacttgccaatcaaacatgtaggcaactgctggactcagacttattggag

SEQ ID NO: 13484 - DNA, 929 bp, Oryza sativa
  Intron number 1 from transcript LOC_Os08g31340.1 (locus LO C_Os08g31340) derived from phytozome v7.0 (chr-ID Chr8; po s 19380732 to 19381660)
tcgccgccgcgtcgcccggcgaccaagtcctccaggtacgtctactctgctcgttgctctcctctctgttctgcacacaaaattcttaccacttactaccactgatcttaccaccattttgcacctgcaatgaatccttgcaagtactaactacgctcaattcaccttttctccttttaaaaagaaaacaaccatttgaaattcttatagtacatcttttcaagagaattttgaggtctttgaccattaaaaattttaggatttgaagaacgttgagccgtagtaactctaggaagtaatgataataactctctgcttgcctcgtttacggtgaagtgaaaactgaaggtgccgcgagcgttacagtaacaccatttacgcccaaataaagaaacagaaaggactatgccgctgggagaacagtggagcagcggccacaaggtgcgctcttcttcttctgcagaagcagcaggcagcagccaccaccaccaatacgcccatggcgccagtgccttctgaaatctgcagaagagataatggagactttgtgcctcctttgcagattcagactagccactgatgcatcgccatctctctctgtttctctctactccattgttgctgttgctgttacgagttacgactgttagtctgttactgccattgcttctgttctcgtattgaaaaagaaggataaaaaccactgtgtaaaaaaaattatatatatatgcagggatagaatcactgtgtaactgtgtaagtcagagtttacttggagtgagatcgatgatgctgtttctttggttgctctcacagctactcactcacgcactctcacactgttcttgctgggaatcttcttgatttgatattgggctttgcttggcggttgacagcgtgcattatgtatgtatttgcaggtggtggtc

SEQ ID NO: 13485 - DNA, 479 bp, Oryza sativa
  Intron number 1 from transcript LOC_Os09g38160.1 (locus LO C_Os09g38160) derived from phytozome v7.0 (chr-ID Chr9; po s 21980835 to 21981313 reverse strand)
caactccgggttcattcaaggtatgaattacttcgttctgtgctatactttggacttgtttagttgaattttttttttagtttgattgtcatcggatatacggacacacatttgaaatattaaaagtagtctaataacaaaaacaattagagattctgccaggaaactgcacgataaatttattaagcctaattaatccatcattagcaaatatttattgtagcaccacactgtcaaatcatggcgtaattaggcttaaatgattcgtttcgcaatttacacgtaaactatgtaattggttttttttctatatttaatactccatacatgtgtccaaacattcgatgtgatgggtgaaaagtttttattttggaaactagacaaggcctttctcagtttctcctctctcttgttttgcctttcatctatatattctaaaatgaaatttcttcttgttttattttttcttgtcagattag

SEQ ID NO: 13486 - DNA, 765 bp, Oryza sativa
  Intron number 1 from transcript LOC_Os11g32610.1 (locus LO C_Os11g32610) derived from phytozome v7.0 (chr-ID Chr11; p os 18770265 to 18771029)
tgtaagattatctcttatatctcttcttatattgctatttttcttacccttatttattactacctacgttttaggctataaaacgttttgatttttagtcaaaattaaattactctaacttcgactaactctataaaaaaaatagtataaatagtatagtttcattaaatctataattgaataaattttcataatatatttgtcttgggttaaaaatattagtacatttttttgtacaaaattagttaaatttagagtagtttgaatttgacaaaagttaaaatgtattgtaacctaaaacagagggattaccaaactagtgcacacagtctttttgttttcttttcgattacacggtagacgcataggcacacataacactacacatgtaataccatactcatatcattcgtgaatgtatctgctaatacatactctaagagacagaaagcaaagatacatatctaatctgactaaatttgtgttgaaaatttatatgtatgtgtgtaatattcgtgagatgctctagttttttttatcttgagtaatttgcaaagatgattaaggtggtgtttgaatgtcctgaagatgaacatgaagatttaagtgttttacgtaaaatgaggttgtaataacgtgtgattaattgagttttaattattctaaacttgaaaaatagaggatgtttctgctgacgttgaaaccgtgatttaatttgcttcatttccaggtgacaaatcagccatcaagaaacgccatttctac

SEQ ID NO: 13487 - DNA, 765 bp, Oryza sativa
  Intron number 2 from transcript LOC_Os07g31380.1 (locus LO C_Os07g31380) derived from phytozome v7.0 (chr-ID Chr7; po s 18586997 to 18587761)
cgtcgtctcctcccagcagcagatcgaccgattcagtacgcggcacccgcgccccccccccctctctctctctcttccatccttaaatttgttttggatttttcgttgctgcttgaatcgtcatgggtcgaatcgaattgggattgtttttttttttcttttttcagctaggaattgtgcctgattggccacgtccaaactgtaaattgactaggtgcctaattgagctttagaatgagttagcttacctacctataattgacagcaggcactggagtaagtgagtgagtgaatgactgtgtgtctgactgtctgtatgtgcgcatgcatcaattgtagaaccgtcagatagaatttctgtttgatctgtgcgattggacatggtataatccagcttctaggagaaagtttcaatcgtcatttatttagtcacgtttgatctggactaaaaaaagtcccttcacaaaaggtggatcgtcctttctgggccaaccaacttgagtagacaactgcacatttagaattatgctcacaaacttcaatcggaaaaagactgcccaaacatccacacacttgcacagcaccaactctgaagtatcagtacaagttccactcagagatacagcatatagatgcaaagggtttagcactaaattacctgaacatttcaccagctatctgtgaatcatcacaatactgcgtgaatgctgatgtgagcggttcatttacttctttttttgtttcacttttataacagtgcttgac

SEQ ID NO: 13488 - DNA, 442 bp, Oryza sativa
  Intron number 1 from transcript LOC_Os08g05600.1 (locus LO C_Os08g05600) derived from phytozome v7.0 (chr-ID Chr8; po s 2996206 to 2996647)
agataataccatcatctgttcctctcctcaagaaggtacacactttttttaccccatattttcacctctcatcgtctgttttttgtcttatcagttgtgaccaaaatttgaattttaaaatataattttagagtaaattttgaggtttatttttcagtactgacttttaaactgctaaaaacataggtattataaaagttttgcccataaataatgtttggttaaacgttgttataaaagtttatttttccacactttattggccatagattaaacaataagagcaaaattcttgaacttcctcatcctctttctcttcttcttcagaaaatgtacagatatctgacagacaacaacctttttcccccgtaatctttttcttcagatgaatctctgaaatgtttcaggtcagtgctgagttctttggcacattcatactgat

SEQ ID NO: 13489 - DNA, 617 bp, Oryza sativa
  Intron number 2 from transcript LOC_Os09g02820.1 (locus LO C_Os09g02820) derived from phytozome v7.0 (chr-ID Chr9; po s 1319935 to 1320551)
catcggtatgctagcacccaaatttggttgccaaacacattctcgttaacctgggcactaatcatgtagatctaatttaattagtaacataatcttgccgttaatcacattctacgtaaatgatcatttcattttacagagatggcggtgtatttcaacatctctcatttcgtatgtgtacaagtctttgcttttgtggatttgggcaattcgatcccagtcaactactattgaggtgatttgccactgctcgtgtgactattatatggaaattgtataatgcatatgattttgtgatcaaagttgttttctttaagtagtaaagacttaggcaaaactattcatagatattttggttggctaaagttattcatagacacagattgtgagttcctgttcatatttatagtaggatttgcactaaaccatataaaggatatatatgacttaacaaagaagaaaaaaaaacaaagatgagaatttgttatgaagggtaaattttccatttatcaacttgagatatgaagatttgtatgttctcattttggcattttaattgatatgcaacggttttgttattaataacgttctaatccatttttttaaatatagtgcaa

SEQ ID NO: 13490 - DNA, 894 bp, Oryza sativa
  Intron number 1 from transcript LOC_Os08g35670.1 (locus LO C_Os08g35670) derived from phytozome v7.0 (chr-ID Chr8; po s 22493994 to 22494887 reverse strand)
ggcaacggcgacgttgtcccaactgcagtacgcaggtagattaatttggatgattttctgtatgagatttttttttaatcttgtttgtgtaatgtttcttcttgccgggattcttgtttgttcaatctgtgtatttttacggggatttcttgaggatgaaactcttttgctgttttctgtaggattattttcaagatcgacgaaatttttggttctctcggtgtctacgatactgtatctcttgcttctaaatgcttttattccctgatttgagatgaacaaaacatgtactagtatattgtctgatttttatgtacgtgggtcaagtatagtctgggaataaattaagtggcagtcagtaactcatctttatcaattcctaaataaaactgaccatgttgtttgatgttttgccatggtgattctttgtatattttttgtttgaaccactggttttagccctcttttatacaaaccatggatgtatgttcttgcttgtttcaactaaattcaaattagtcggttgcgcacttttgcttcgcgccataatagttttttttttaataaaagcttgctgtttatgtatgaagaattttgttgtagtattgcacctgatacttcactattgtttgagtttgctcaattagtacacacctattgagatttctccccctcacttttcataaaaaaagaggaaaaaaagaacagtttttggaagaatgtctcccactagcttttgagttgtagtcataacatgcatgaaactgcttacacagtcaattatttaaagctgtaaaatgtcttttcccacataaaacaaaacaaaactcttactgcatttactccttgtcttttccagtggtggcgacgcactccaccgcaagcgctggtctg

SEQ ID NO: 13491 - DNA, 1036 bp, Oryza sativa
  Intron number 2 from transcript LOC_Os08g20200.1 (locus LO C_Os08g20200) derived from phytozome v7.0 (chr-ID Chr8; po s 12114972 to 12116007)
acgtcgaatccgcgacgcgccgggttcaggacgaggtggggtagttcttctggctgttttttcgccacccctgttgtagcttgtaggtttttgtacagtctgaaatggctgactaaccatcacaatgtgtttccatgcatgggcgccaaatgttgacatattgaaagaaagctcacaaaaacatctatgattttcttcacaagttagactgcagtccttagagcatatctaattgttaccgagtatctagttcaaatattacatgacgtctgaaaccaccatggcataaacaggagaaaaaggtggctgtaaaagttattttttagtatcaaacaacaaagggcttttgctaaaatttgttcaatatgatagagcatttgtttggtagctacatctagaaatccatttactctcatcacgcattcatcaaaactacctctacaatttttgtcagaccagttactaaccaaatgaagtaattatgtttatagagaagtatacataatttgcaaagtgacaagaagtttactccaggactgtccattgagcaattctgccttggaaactacagggcaccaggggtacttcaaatagataaagacattgacatgtcggaagcaatgggaaattaccaaaaatgcttaccggaaataatacacacttgcacagtggacagtagtggaacacaaactagagacggtaaatagtagttgaggtgtacccaaatagtagttgagatgcatccaatgctattgtcaagtcgaaagaaataaatgaatggaaacttgcactgtgccagatctggaggttctctcaatcctggtggtcctattggactagtagcattcgttctgagaaatacattctcccaagtcccaagaaagtattcataatagatgtattaaactgatcatacatagaacagtttgtaacgctctgacaaaagctattatattcttttatggtgttctttccctccaaatgctatttgatttcttcaggtgacagggaaggagatctttcaagttctgaaaga

SEQ ID NO: 13492 - DNA, 803 bp, Oryza sativa
  Intron number 1 from transcript LOC_Os10g20880.1 (locus LO C_Os10g20880) derived from phytozome v7.0 (chr-ID Chr10; p os 10506707 to 10507509 reverse strand)
ctgccgtctgcctctgcaccgccgtgaaggccaacgtacttggtattagggtcaacctaccagtcgacctcagcctcatccttaacaagtgtggcaagacatgcccgtccgatttcacctgctaagctacacagttataatgttccagagtttaatttggtgtggttgttggttattgtggccgtttgtacgattcctcgtgaataagtctcctgtctgttttgcagattgatatgcggttgttttatcatccacatgaatcactttaatttgattgttgtaagttgattactttttcagagattgtaatatgtaaaacacgttatatattgttaccctgagatattttaatggcttacatgttcgttttctctcacacatgcaagcataaaaattgatcgatcttcaaattaaactgcattacgcacattgatatggaccatgcacctgatcacagtatcagaaactagatttgccctgacgaccgctgcttttagtgacatggatacagctatctagcgaggtgtggtgtcttattttcctgatggtcgtacccataaaaaaatattccaatatctctgaccgccaaacctatcagtgatatgcaactatcgcagactgtccattccacgtcaggacaattatttccttgacgtgtacgcaccaggcaaatttccttttctccgacgagctagttatgatggaaatttcctatcgttgacacattaggagccatttttctgactgtatttcatttattccatacagtttttagctggcagggctaatccagttactggtac

SEQ ID NO: 13493 - DNA, 822 bp, Oryza sativa
  Intron number 3 from transcript LOC_Os11g32390.1 (locus LO C_Os11g32390) derived from phytozome v7.0 (chr-ID Chr11; p os 18662437 to 18663258 reverse strand)
caccaggtaatttctaatcatggtggctacccagctcctaacgcctaaggcgacttttagaatacgatatgtgtcaaagttacagttgttggagccatcagttcctttgtgctatgtcctcaactgaataatatcattccaccaaacaacaatggcaagggatgtacttatgcattattactggtacctttaattagctagtaagtgtttttgtcagttgctaatagttttccccattcatgttttgaagctcagggtgctcagtaaagaaaggcaaagtttcttttgctgatctaaaacagttctgacgacttagttcctgaatttgatttgtgttttcatttctgggaaatcacatgctaatatttttatgatacatgggtatactttccaactgaagttacaccatacaatgcatttgctaggggaaaagtgggctacatttttcatccagctttgacaagcatacttctgctatttaacattttgtaacatatttatttcaagaatccattattatcctatgcacatttcatggagattacatgaaaatttcagatgttgtatacattatcatgatgagttcttctagtgaccttttttaagtacacccataggtaaagatgtattatcttgctgcatttgctacatgattgtcatgtatacttaatattgggagattatgctaagatgtgtgacaatatttagaaatatgcttcagtacaatctgtttgttgtctgtactctgtagggaaaaaatgtttttctttagctctcaagagttccttgtgtttttgttttcacagattacatttttactac

SEQ ID NO: 13494 - DNA, 762 bp, Oryza sativa
  Intron number 1 from transcript LOC_Os11g10690.1 (locus LO C_Os11g10690) derived from phytozome v7.0 (chr-ID Chr11; p os 5863132 to 5863893 reverse strand)
gaaagctaggtcgatcttcagttatctctctccaggttagtgctaattaattaattaattactgcttccaattcctgtgcaggcagtactgtttgttcaattgctccttaattagcttgggcttttacatttgattcatgattcacattggtctgatggaatgttggttactgatggtgtgtctctgttgatggataagcaagcttggcctgctggtctttctttttctttccttttttttcccttttaatacaaggctaggattttctccactagtactcactcaaattcttacacattgccgtggctatgagttccgaagtgagttgttgggagtaagaaaactagtcgaaattcacttgatttttctccaaatgatgcatatctcggggctcattttgaactttctttaatcccttcattcacatttagtcaatgccataaaccaggctttgagaaatttcagttcaagatttagagtgctactgttaactccagtctttctcttctcataaaacgagtaaattattaggaaaattttacggtatttaagaaagtatttgtaagtatcaaaattttattattttgagatatatggtagctggaggtatcaagtttgacactagaaaatataacatctcccagtaccttatcaagcatagtaaaattacccaaattattactctttattctcagaaacttattactctttattctcatcacacagagaggagatattggtaaaacggacaagttacaaat

SEQ ID NO: 13495 - DNA, 776 bp, Oryza sativa; identical to SEQ ID NO: 12124
  Intron number 1 from transcript LOC_Os10g21254.1 (locus LO C_Os10g21254) derived from phytozome v7.0 (chr-ID Chr10; p os 10778931 to 10779706 reverse strand)

SEQ ID NO: 13496 - DNA, 745 bp, Oryza sativa
  Intron number 1 from transcript LOC_Os07g33330.1 (locus LO C_Os07g33330) derived from phytozome v7.0 (chr-ID Chr7; po s 19919796 to 19920540)
ggacagcaggtgatcttctttctctgatgttagatttgtgctgaggatgtcgtggattaggcgcttttgattttgattttttatgtgtgtggatgcattgtaggaagttattcagtgctagtgaagtctagcatatgttatagctctattttaatcatcatgttagagctagaagtgctcatatgctgtaattctttttttttttttgttataagtcattagagctcatcatgttagggctagaagtgctaatatgctgtaattcttttttatataagtcattagagctaaaagcctttatggcttcaaccttttgaagcaatcatgctttttaaataccatttgatataatatattacagcaaaacaacctgaagaccaaaaaaaggcctttagacccgaattattcaaggcctaatgaaaacagcaaaaatgtccattgtgtttttaaatgcgatactatgcccttaagagttaaaattaagtcaataacttcctttacgattttgattttgtgagagtttatcgttgcacatgtcattttttaagttgatacaaccgatataagcagttctgacattttcatttgtgttatggcattttttgcatttctgttcgtatgctcttcttgtcttgctgaacaattttgtgcttccccttttatacaattattattactgctattggtaataatgcttttgatacatgcaggttacctctgtgaaagtcatccgcaacaagcagag

SEQ ID NO: 13497 - DNA, 900 bp, Oryza sativa
  Intron number 1 from transcript LOC_Os09g32410.1 (locus LO C_Os09g32410) derived from phytozome v7.0 (chr-ID Chr9; po s 19354509 to 19355408 reverse strand)
cccaagcccaagcccgaagtaagccccccctcgatcacctccgcaacctaaaccgattcatgtatctaggttgagaattgagattgatctaagtcggctaggtccttaagatcttcaatttagtgagattgatctgcaagcatcctggctccttttttttccctgattgatttgagcagggtagtgtagtgctcaagtattccttcctgttccaatgtggatttgtttgcaaaaaaaaaagtagtactagtttcatcgttcagggaaaaaacaatagtttgatctgtaaaaaaaaaaagagtaggtatatttgtggcgccatattttccaatagtcgacttgtatttacattgtaagtcctagattacatatgcaattttagtgcatttataatgtaggtcccaaaattacatatgtaaatcaaaaaattacatagtaattatatatgtaagtggtgtgtaactactatgtaaatttataaatttaaatcttacattggaaaagttaaaaagcaaaagcatatgcagtccttactttctaggagatgatcaggagaagaaatcgaacggtccgaacaggcacaaccgaagacgtgtagcgatcagacggatagcaaagccgactgagatcagccccaaaaaatgtcgacatctttttagcaagtctgaagaaaaagtggttcgggagaagattttaagagatacttgaacaacggatggttccagaggaggcatccagtatccaataaaaccacgagtgtaacagtgcttatgtgcagttccaggaaaaaatagaacattttttttctgtttgtgcttatgtgctttgactttgttgtttccttctgttagtatctttattaattaggagtaaccattaccatacataatattgttgcag

SEQ ID NO: 13498 - DNA, 878 bp, Oryza sativa
  Intron number 1 from transcript LOC_Os07g40940.1 (locus LO C_Os07g40940) derived from phytozome v7.0 (chr-ID Chr7; po s 24504433 to 24505310)
tcgtccagtctcgtcgcttcaggtgagcgagcttaagctcagctctccccgggggagggtctttttctaacctttctctttccgtctcgtttagatttctgtcctgagtgagtttgtgcctcttaaataatggctgggaactgcaaaggctgctgctttttgtttctgaaggttgattttgttggagttttggggggatttgttcaggtgttgttctattctacacttctacttgtcggtggttctttttctttttttgttctttgatgtttctcagtttctgcttggttcatccattggtatgtttggaacttggaagaagagatctttctgtttggttcttccattttctaggaaagatcagcattgcatgtaggagtacacgctacttttgttatggtttgtgaactactttttttttttcagattcccctttcctaccttgctatgtcaaacagtactagccatgtactgcttagctcttgctgttcatctattgctgaagaaaataactcaacaaggaccaaggacaagaaatctcttgttctcccctctgagacagttggagatgtgttcttctcaagttgatttattttttttacatttttactttctaaaacaagcaaaaccgttactacgccgattttctcctagttttctgctctttctgcgcagacgctactctctcttcttgattgctttcgtcacattccgcatcccatctcttcatcaagaaactggcataaaaactgccgccttttaatgaaacgcacgagttaattaatctctctcattgaatctcttctttttttttgtgtgtgtggtgtttcttggcgaatgcagattggtgcgtgtgcaggtcggatcagccacaggcg

SEQ ID NO: 13499 - DNA, 776 bp, Oryza sativa
  Intron number 1 from transcript LOC_Os07g48270.1 (locus LO C_Os07g48270) derived from phytozome v7.0 (chr-ID Chr7; po s 28832626 to 28833401 reverse strand)
aaaggaggaaggtgagatactcgtaaccaaggctgagttttctcactatgctgagctgagtaatgatattgtatatctgtttatacacattttttgaaggtagcgcaaagtgcatacaagattatactcctctccattcaaaaatataaattgtattttgttcctttgttttgttaggacaaggatttgatcaacaattactctattaggatataatttttgtgacaaaattgatgttgttagattcgtattcagacttacttatgattatgcttttgtgtcgcataaataatgttcccttccgtcccataagaacttttagggttgggcacatatattaagaaataggtggaattaaatgggagaatgccgtgattagttaagaagatggagtaagtggagaaattcaatggggagggttttgattggttgagaagaagtaggtggaggagttgttttattttgggacaaattttgaatgctagaagttaatatattttgggatggagggagtatattagtaaagcaattgttagtcaaagccttatcctgatgaaacataatatgccttatatttctgaacggagggagtatttctttaagttaaaacttgattttttccccctactctgcttctagtcctattgctagatgattatcaccaaggagggtcctcttctatatgcttgaatcttgtggacaatgacaatggggttactgaaagtgtgttacttttcacagaaaatcgcaaacagcgcttgcccagttcaaaggtc

SEQ ID NO: 13500 - DNA, 854 bp, Oryza sativa
  Intron number 2 from transcript LOC_Os10g03870.1 (locus LO C_Os10g03870) derived from phytozome v7.0 (chr-ID Chr10; p os 1755132 to 1755985 reverse strand)
agggtgcagaggtatgcttattgctaataattacatagtataccaatgcatgtttatttaggtaccaatgtgaaaactgaaacttaagaatgctggttcttcttgacacttcattattgctatactttaactacctgtacctgcagaactaccgttcatagctaattcttatgccgtgaaataattatgtatcgacaagataactgatgttaatgttatcaaccacaaggcaatacaattcatgtactctggtcattttttgaacataaatcgacccactgtcttgaaagtttattagttggtagtttgatctcgaaaggaaactagatcatttctcatgcaaggactcaaatgttctagtctgggtgcaatatcagggttgccaaccaaatatgcatcttctccgatatctggttgattgtttaagttgaaatcagtacaaataatcttatcttactttttgaaagaggggattgggggtgattgtaggttgtacactcaccccgagtccagacattttgtagctgcaaacatgcatgttgttttgtaagatgtttatagagaaaattttcatttgtgcccggcgaatatatttcatttgtataggtgatcatttggtcttgtatattcatgcatattttagatttcaggattaattgtttattgcatttatattttatagtatagttaattgggatgtgttacaatgcacggacactatgctagcattaatttgaaaattaagagacattccaaggcaatgtacaaacagaaaattaagagacattagtgctcttagttgggcaagtttggtgattatggaagtgtataatcatttaaatcttttgcagctg

SEQ ID NO: 13501 - DNA, 1017 bp, Oryza sativa
  Intron number 1 from transcript LOC_Os08g33710.1 (locus LO C_Os08g33710) derived from phytozome v7.0 (chr-ID Chr8; po s 21048307 to 21049323)
actgcgaccctgacagcgagttcgacccctccaaggttcatcctcttcttcctctcggttcatttgtgtcatggtgtctctgttgatgatgatgatgatgttgttgttgttgtttttggtttgttgctgtctgtctgatgaagcctctggttttcttctgttgggattctatgtgatcgactgatcctgttaatttggagtttttgttcttctgaaaccttattgtctcttttcatttgatgattttgttttttatttatttgatgatcttttgtttgaaagaactaagtcaatccaagacatcattgaaaagatttttaattcaagattgatttcagagtaaagcaaggaagcagacgaaacagaggtcatccttgccttggtttctactcaactgcacttacctcttactttaattgctcttccaatcaaacagcaacattacctattttgggtgtgatttcgtaatctgcaaataaatccctgtctgatttctccaccccacaataaaacaatgataaaaaaaaccccattatcctcacaaaagactatctttttttttatttgcaaagatagaaacttaaaaccgagattaaaatgctcccccccccctacttgtaaagatatgtccagtatgatttactaatctccaagtcattgctaaaaaaccctttttcccctaaaaagctcctttttttttcttgagagactcagaaataagagaaattgaaaaactttttcctacttgtaaagagttttttcccagtgttcaccaagcaattttcccaagtaaaaaactgtgatttatttttttgtaccttacaactaaaaagcctttttttttctctttataagaaaatatgctttccctacttgtaaagaattttttccccagtgtttatcaaccaatttccccaattaaagaagtgaattttgcaggtaaaaaggtaaaaaactaaaacaaaaccttttgtttcttgtggacttgtggttcaggtgagcgacctgctggggagc

SEQ ID NO: 13502 - DNA, 772 bp, Oryza sativa
  Intron number 2 from transcript LOC_Os08g13930.1 (locus LO C_Os08g13930) derived from phytozome v7.0 (chr-ID Chr8; po s 8343188 to 8343959 reverse strand)
ggctgctccacaaacaaggttttctctttttatttttcttttctcctttatttgcaggcgtaagagatcgtggccacgctttcggatcatggattagcgacgaattatcgtgtgggcccactcttaatgacggacgaaaagattaaccggaagccttacttattttttaattaggtatatagatatctatatctaataaaaaaattcgtaaggcttccattagtccgcttcgtccgtcgtttctatatagatatatagatatccaataacttgatgagtttaacgtatcataccttacccataaaccaaacacaagattgtggagatgatgggatttgctttgagatttgtgatggaacacgtgtcacctgtggtcgcgaattttctttcgcgagagcgagacacacacaagtacacaaccgcatctctactgtgggcccccttcccctcctcgcgtcgcctctccacttcgcctctataaagtcccatccaattctcgattcccaatctagcacagcacaaaggctcctccttcgaccgcagctgtgctacctacctccaatggggctggtcgtggagaaggaagagagatcttccaggctgatcccttctattggtacgaaagcagctcactggagctttgccacgaccgcgagcaatcaaatcgaaatctttctttcttttttattgatgctccaacctagtttcacatttgattttgtctgttgcaatggcaggttccccttcccaagccttgcttgaggatccctcc

SEQ ID NO: 13503 - DNA, 939 bp, Oryza sativa
  Intron number 2 from transcript LOC_Os07g38620.1 (locus LO C_Os07g38620) derived from phytozome v7.0 (chr-ID Chr7; po s 23196602 to 23197540 reverse strand)
ccgcggacgcgttcgaggtgatccgcgctcaccaggtgcggcccttagcatcgtgatcgcccttttattccttggacacctcactccttgtttgtgatgtccccgaggagcgaggaacctaaccaggcagtagcttatgcaactaggggtgaaaacgattggaaacggttggaatcgctagcatctcttcggaaacgatgcttgatcggccggtaattgaccatatttatcatttaaactacacagtatcgacattaatatgatgcagaaagaaattaggaaaaaataaaatttaaaaatagccaaaaacggtacggtcggaaacagtacccttaaacggaaacggcgcccggtcgatcggtaatttctgtgaccgttttcacccctatatgcaacatacaaaaaacacaaattgacttgttctgggtcagtagtgtcccggagattccacaaatttaggacaacgtgcctggtaaatgtacaaatgtaatacagtcagtttctttttaagaagtcaaacgtcaaatatattcccaggaaggattagttatggtattgtgaaacagggttggaggctgtctgctactctgctgtgtgtgaatgtttcaacaaattaatgttgcaacaagtaggcatcgcatcaataattaacaattacatgaagaagtttccataacaagaattagacctacagagaaccaattgtttactagccacaacaccaccaactgagcttttgcaaacctttcccttgtcaattcctgcaagagtctgagcaatcaacttgcggaacaagtgtggaactgtcagaagggaaaccttcaacttcaatgatctatcttttagtttttatcattatcatttctcgatggtccatactcaaacaagatttttgttatcgtaggaaaaagctgctcgacttcctccggttgaagaaat

SEQ ID NO: 13504 - DNA, 388 bp, Oryza sativa
  Intron number 1 from transcript LOC_Os11g35370.1 (locus LO C_Os11g35370) derived from phytozome v7.0 (chr-ID Chr11; p os 20266111 to 20266498)
cttccaagcttgccgccgtgctcgcaggtgtgcccgttgtggccttttacatgaagactacgacctcatagcaaggttttttgcataacatggaaaagtttgattgtgagttatacattcctaatgtggagaaacttcaaatggatggtgaaaccatacttcttcctgagcacgttatcaaaaagttggacgagatctacagtatgaaggagttggaagatgcaaagatgaagcaagaacaataagttacatgtctcattcaatcgacctaacatgcaagcaaaaactaatttgctgctaatattcttgcttcggctagcatctgcaaagactaacatgcttgcatcatctaatattctacttctaatttgctgcaaggagactagca

SEQ ID NO: 13505 - DNA, 611 bp, Oryza sativa
  Intron number 2 from transcript LOC_Os10g08590.1 (locus LO C_Os10g08590) derived from phytozome v7.0 (chr-ID Chr10; p os 4685591 to 4686201 reverse strand)
gttcccttaatcaattccattcatttttcgttaaggtactaaaaatatattgatttttctattcatcacataaatttacatgtgtcaccttctatgcaaaaggagacgcattaatttgttcaccactcgatcctcgccattaccatcaggcccacacacgtaagaagcgtcatccacatcgtgcaaatataaagaattaattatcaaaaacaaacataatctttttataattgttcatatcgccgatgcttataatcatctcgtgtgctttggataaatcgtaaatatcaaacttcagccacccttcaatacccggtgcaacgcacgggtattttgctagtttttatagataaatatattaatatttacaacaccaaattagttcatttaaatctataattgaatatattttcataatatatttttcttgggttaaaaatattattattattttctacaaacttagttaaacttagagcagtttaactttgaccaaagtcaaaatgacttatagtctgaaagggagggagtagtaatcttcaaatggttctttctcctagttaattattcatatgttgagattcaattacaccattatatttattgcacac

SEQ ID NO: 13506 - DNA, 466 bp, Oryza sativa
  Intron number 2 from transcript LOC_Os10g28180.1 (locus LO C_Os10g28180) derived from phytozome v7.0 (chr-ID Chr10; p os 14560062 to 14560527)
ttaaggttgaaattatgaagaaaataaagagcgcaaaatatttctcggtcatactagattgtactccagatgcaagccaccgagaacaaatgtctttaattataatatatgttgatttatcttaaggtaatgtttccattgaggaatccttcctaggttttttgaatataaatgatacaattgggcaaggaatttttgatgtgctagagagataactaaaggatcttgatctagatattgatgatatgagaggacaaggctatgacaatgggtcaaatatgaaaggaaaacatcaaggggtacaaaagaatcttttggatataaatcctagagctttctattcttcttgcggttgccatagcctcaacttggcactctgtgatatgtcaaagactcgtggtaaggctaaagacctttttgcaatcatataatggatctatactacttttgctaattctactaagaa

SEQ ID NO: 13507 - DNA, 1000 bp, Oryza sativa
  Intron number 1 from transcript LOC_Os08g34290.1 (locus LO C_Os08g34290) derived from phytozome v7.0 (chr-ID Chr8; po s 21521078 to 21522077)
tgttcgtgcgcgagtccgaggcggttcaggccaaggtgcggccgtttttgatatctcaactctggactctagcttgctcctcttctttcttgctcctgtgtgttcttgttaggattcgaacttgcaatgcctgaactctgaagcagtatttgagttcatctcgtttttgtatctttttttatgctctttgttttgcttgcattgtcaaatgtcaacggtctgctatgtcatctggcggttgggagattaattgtcgagatgttgatgaccagaagttgttgtctaaatgttttgacttgagcgtatgaaaatcggagttggacaatttaattaattatctaggtgatggcctgaagttgttgctgtctaagtgttttgactagttgagcatatgaaaatcctagtcaaatgtttcatgctctcatcaaaattgtttgaataaaactaataatctctttcattttactctctccattctaaaatatagtagtaaggcttattagtttttggcttgttctccaacattttgctttgattattattttattttataatataattatacatcattaacaactactgaaattaacatcatacaaaaatattttcaaatatgaatacagtagtaccacttatattagcactaaaatatttgtattgttagtttcattattaatgaaaaaagttacaaatgttgattttctaataaatatacacgctttattaatcaaatcatgcatgcatgtctgatctgaaggagtgaagaactagagtagccatgccataaatgtgatatgtttactttaagcaaagataaagaataagcatcttgcagtggattcaaaaagcacacgtcaacattaaacggcacgttaccaatatgatgcgtgaattgtgacaaaagacatcaactaaacgttatttcagcatcactaatccacattttctgttggacttgtctacaggcaggaaggtaccaaagcctgcaggagattccttt

SEQ ID NO: 13508 - DNA, 735 bp, Oryza sativa
  Intron number 3 from transcript LOC_Os10g32600.1 (locus LO C_Os10g32600) derived from phytozome v7.0 (chr-ID Chr10; p os 17005146 to 17005880 reverse strand)
tatcaggtacacattgtaagtttatatatttgcatcactctaatgtactccctagctctgtccatgaatacaagggattatacccaattaagaagaaactaagaaagtgggtaaagtacgcactgctgctcatgatggagtattactagtagtacattctctctatttttttgggtagggatgatggggagtagtgctagtagattttttttctcttttttttatagaaccgatggggtaaataaatggaagctgctgatatatgaattactgactattgttctctttgctttcccaatacttatattcttgataaactagaggcagggtttgaaatttcgaaattggattttatgtcgggggtgaacgaaattaccgaaaatttctggccggaattatttgaaaatttgactaaattcacaaaaaaattgcaaaaaaactgaaaattttaggcgagatttgagcatgccggtggagggcaaaattaccaaaatttcggaaaattcgaaccgaaatttcaaaccctaactagaggatcataatcatatttatggacagagggagcatgaatgaatatgaccgatgcttctagggtttccttctacaagcatcctaattagcttattcaagttagagtgcatccactgcataacttctttcgctgcttcttcagctaattcagttgaacatatataaccataaaacctaacatttgaactgatgcagaaatacagg

SEQ ID NO: 13509 - DNA, 407 bp, Oryza sativa
  Intron number 1 from transcript LOC_Os11g38870.1 (locus LO C_Os11g38870) derived from phytozome v7.0 (chr-ID Chr11; p os 22670779 to 22671185 reverse strand)
ccccaagtgaggtcagcccccctcctggttaactaatcatgctggcttcttgttcttgatgtgggggaaaagaaagagaagaaaacggtttcttggtgggattatgtgcagatctttagtactactgtttcttgcaagaagaattcgggctaagctagctttgtctcctagtacacatggttagttcttgtgtatttgtagtttggtttcttgtgtaggtataaaaaagtgtagcttctggtgatttctgtgttatcattgttgggttttttgaatggactgagcctgatcttctaatagtttgatgatgtttggaggaggaggagttgttttcgatttggttttgagccttgtttcttttggtgctccagtagacctttgtgtgatgcaggaaccagaatctgggc

SEQ ID NO: 13510 - DNA, 794 bp, Oryza sativa
  Intron number 1 from transcript LOC_Os11g41320.1 (locus LO C_Os11g41320) derived from phytozome v7.0 (chr-ID Chr11; p os 24314335 to 24315128)
ttctgtaacgcctggtttcctcgtctcttcgtcaggtgatgctgcattgctgctagcggaggctgatcgaagctgtgggtgccttttccgcaagcttctatggatcttcagttgatatgctttattagttctctggcttgtcagagcagtctgtagtttcagttctttcagattacactggcaatggaatgatatcgcggttatgttaattatcttttgtcccgctgttatatgctacttcctccgtttaataatgtaaatcatttctagcatttcccacattaatattgatgttaatgaatcttgatagatatatatctctagatttattaatatcaatatgaatgtgggaaatactagaatgatttacattgtgaaacggagggagtagtttccttctgttgtgtgcagctgtgggggggggggggctactgggcgatcgataaccagggctatcgcccagctatcggatccaccccctctccccctatactcctccctcttctccccctttctcctccccttctcctctttctactacagtagaccacacaattttttttgaaaaacaaaagttagaaaaatttatgtatagaaatactatatatataaaatttgaattcaaattcaaatttgaatcgggtatgtaaacttttgacttataaactttgggtctataaactttaggtgtataaactttagatgtatagaaatactatatatagaaaatatttgaattcaaattcaaatttgaatcagatataattcaaattcaaatttgaatcaggtatata

SEQ ID NO: 13511 - DNA, 840 bp, Oryza sativa
  Intron number 2 from transcript LOC_Os09g10820.1 (locus LO C_Os09g10820) derived from phytozome v7.0 (chr-ID Chr9; po s 5900026 to 5900865)
ccgccgtcgccgtcgttcttgctggccaagtgcaggtccggggtcctccaacaattcattccccatggattcacattcactttgcttgctgccttcatttcatagctacattacgagttagctatgcatagtttgatcctacatatggactagcttttctttcatgggtgatttcagatgaaaccgtattgcttttggttctgaatgcaagctgttaagcaaggtcaattgatcatacattgagattgagttatcacttattagcatgccaaggaagaaaagagaatgtgcacaagctttgctatgtttccagctactgtactatatcccttttcagcagtttaccaattacttcagaagagctcggactgaaaagaaagaaacatgatctactagtatatatcactaatttgactgaagaaagaagtataatatatttataacacaaatgtacctaaaaagaagagactgtctttataagagttccaagtcttcaggttcaatcgaataattgaaccttgtagcctttgagttactagccgttgtgtcaaactgttgttgagtttatgtctttgccatttactccagatcaccattataagacaagagttgccatgcattatgttcatgaccctcacatagtcacttgtacatgcacttcaattttattttcgctgattgttttccttttaacaacccatagttcagtgtttcaccaaatgttaggttgtcttaactattttgacatctatgattatgcttctagaaaattacatttactctatgcacaggaatttctcacaagttgtttgaaatatgcaggttgacctctccttaaaa

SEQ ID NO: 13512 - DNA, 788 bp, Oryza sativa
  Intron number 1 from transcript LOC_Os08g24800.1 (locus LO C_Os08g24800) derived from phytozome v7.0 (chr-ID Chr8; po s 15009007 to 15009794 reverse strand)
aaggtaagatgatcttttggcaggtcatcatgcattaacatcttctagaaaaagacataaaatctgtcttcttagactatatcagcaaaggcacacagcttccactttgtacccttgtttttttacataatgatctagactgataattttatgatactaccagtctcgtgtccaagtttatcataatatgtccacgcacaataccacatcccactggaaatacataattacactcaaatcaaattataactgcatatatcattagctggtgagcttacctggagaaaagaacagtatcgtgtcactttcctggtgagcttagctggtgaacattaaatcatgcaaacaatctatgttgttctcagaaacaagaactgaccgagttccgagtgacagaaactgcaaggatgaagccaaccaattatgcaacaaatggtggcacgagcgataaatttcataagtaacaggttaaaaaaggtaccacaaagaaagttatttaataaaatgaacgcacttttcaataagtagttagacaatgtggcattctgagaggacaatttcagatttcccaagctggtgcacccaaaaccaacaaatctagccatggtgggtatagaaaggcatgaaaagggaccaaagcaaaggtcaacttgttagcctcattgtacttaatcagctccgtgccgaagggtggttttctgatgtcctcttaagtgcagagcatctgcagaaacaaattgtgcatcgtgatcatgccaatgcatgtttgaatgtttagctacagagca

SEQ ID NO: 13513 - DNA, 1040 bp, Oryza sativa
  Intron number 1 from transcript LOC_Os08g35010.1 (locus LO C_Os08g35010) derived from phytozome v7.0 (chr-ID Chr8; po s 22054782 to 22055821 reverse strand)
tttcttcactcatttgtccgccttttcctaccatagtaagcaccaaactatgctggttttctatgtactacatcatattatcatgtctaacttaaaccggcaaatgatagacaatacaagagccctagagggtctgcagagctggtgcctaggaaattagcaagcatattacataaaaattacacaatacaacactaaaatagcagcataagagcaccaaaggatggttagccgcctaatacaccatgtaatgcataatcgcaggtggctaacaggcgcctagcgccgatttttgggtagtgatgtttggctgcttggcgcttcagctcccatagcacctggactatgcttcttttagcgctgcagtttatagttatatctatatgctcccttacatgtttggtttactgatccactttagttattagtgtttgctgatgaagtttgccaatttgtataatttgggtgctagagcgcttgctaaagtagttatcaccactcttagcatacggtattgatcttttatttgagtgatcaatagtatgattaattcatgcatgcatgcagctgggattagagccaggcagcgatagcattaatactcttatggagctataaatatgggcatttaggttatctaattggatatcatggtttaatgcgatgaaaatatatgccttatatagttctgcagaggtagtagttcataattgcatgcatctaggctccctttgttactgaggtttattgtgatttaagggccaatttagagattaacagattggcccttaaaattacatattttaatttttgttttttaacccttggaagcttgtttatatattccaggtatatttttctgacttgtagctactaacaattaaatttcttcttcagcttcctctgcccattttcctgtttagtttaataaaagttgttctttccaatttttccttagtcttcttccttgtagctacttatcttaccttttaagctctaatacaggtttatttggaagttccaagtggagaaaagattgc

SEQ ID NO: 13514 - DNA, 936 bp, Oryza sativa
  Intron number 1 from transcript LOC_Os08g05820.1 (locus LO C_Os08g05820) derived from phytozome v7.0 (chr-ID Chr8; po s 3123408 to 3124343 reverse strand)
acggtggcgccgctcggcgtctcgcagaaggtttggtggcgcgccatggcgtgcgctctgttcttgatttcttccgagaaatttgggccgccttgtctgatattttcttcttctttttttttgttttctctccgacatgttcttcttcttctctgtctccgttgattctgcgcgagtttctcgggtggtttcaaatcgaaaaacgtctctctctctctctctctctctctctctctcttgcgtggttttgaggtttgtttgatgatgaatctggggctaaaaaatgcttcctaatttttttttcgccggtttgcgtgggcggtttcgatcgcaccgatctcgtctcgtcgtggcggtttctgttccatgttcttgcaggggttgtaaatacgcgttgatcgatctgtcctaataaaagacgacgtaacctcatttcctccgaaaaaaataaatcggatcccgcaaactttgcaattttatcgttgataaaaggaaaaaagatcaacattgcgtacaaaagagaggggaataatgatatcatcttttctgggttggatttctgactctgtttctcgttgattttgatccttttgagtttttgttcatctgcgaaacaggtttgttgttgaaaattgatccatttcgagataaaacagaacacatttacacacaccagatttgagatttacagatagaaaatctggaaaaggatttgcggacacaattcttgtgcaagaatttaggggtgtcatgctcttgtttagttacagtcttatatttttttcttaccatatcaatatgaaacattgcgctatcttatgcgtattgttttaaaaaaatctagtgtaagaattgttttctgatggcatgaatgcaaatacttgtttttttttttttgcaggtgatcgcgataaacaaccagttcccgggcccact

SEQ ID NO: 13515 - DNA, 860 bp, Oryza sativa
  Intron number 1 from transcript LOC_Os10g30420.1 (locus LO C_Os10g30420) derived from phytozome v7.0 (chr-ID Chr10; p os 15745507 to 15746366 reverse strand)
ggcgacgacgcgccctcgtcgcagcccgccacgaggtccgtgaagaaatctgccgatgcatcgtttcaggctctcagttgctcggggttgactcgccccttggggctggtctggtcaggatttcctggcgggggtggggattgggatcctccgtggtctgtgatggggtttatggttgcgaggatcggcagtgtaccgagctgcatttgctcggcaactaagattcggttctgagtataatgctgtagcttgtttgttgttgaaaattgatgcgatggtaatgaatgagagtgctgctaagatatgatgctgaacttgagcaaagtgttatgattgctttgtattgagcatgtttacacaagccatgggaaattgttgtttcatattctcaagttaacttttggatttaggtatcaaactagtataacaggaattccaccagttatttgactatggtgccttccgctgtctgtcgtacatggtggttgctagttgtgttctctacagaatgtgctgaccaatataattaacatcaatgtgcatagcacttccatagtccacagaagtatttgctatttctcgtttatctttgatcaaagccacttccatgctggtttacttagaactacatatttatatgttgtttgttgtactgttgttgcttgctagcttaagctgattcacatctagcaacatttaaagaacataaattggttctgttttccgtcatcgtgaaatttttattttttgtttctttgtgtatcactgttaataaatttcatagtacacttgtgatgaaaagatgcctctccttttgtgatgcagcaagaagaaaaaaagggggcctggaacacgtgcaa

SEQ ID NO: 13516 - DNA, 577 bp, Oryza sativa
  Intron number 2 from transcript LOC_Os10g32880.1 (locus LO C_Os10g32880) derived from phytozome v7.0 (chr-ID Chr10; p os 17138022 to 17138598 reverse strand)
ttccaaaatgtaagtggttccactaacttcatagttatctgtgttatagacagtgaagatctgattctttttctttgataatagttctcacattgttttgtttattaaatgtatagtttgttaatttaaaactgtacctgaaagtactttttatctgatgtttgaattaaagataaacacgttgcataataattgggaatgattcagtgttaagtgtctttctccattgcacaccagccagtttgacagaacttaatgcgctgtttccaagcatagtcaggttactagagggagtaaactaatcttcataattggagcttggcaaactgcctgctcattggttatgtttaaagcagattcagagattctgtggtagagttaaatttctggtctttgtttcctaaaatttgcatcgccctcagtttaaatgatctcatgtaactattaggaagagtaatatagtacagtgccttgattttgccacaaataatcatggaactaaaaatgtcttgtgagaacccatcatgattcaccctagctctcactagaacaataccatggcttttacaggagtggg

SEQ ID NO: 13517 - DNA, 705 bp, Oryza sativa
  Intron number 1 from transcript LOC_Os09g15070.1 (locus LO C_Os09g15070) derived from phytozome v7.0 (chr-ID Chr9; po s 9120397 to 9121101 reverse strand)
agattgtttaatagtcctacattggttaaggaagggtaaatgacctaatatataagtgggggagcccctcacctcgttggctaggttttggggtgggaaatgtcctttactatccttaaaaaaccacttcgtcaataatttctgaatatcaaaaccaataatttcatatgccaattattcatcacaaaataacaatcaaacattttgatgttacagctgacaatgtgggaagctcttggccatggttagaacgcaatgttgcctttcagcagccatctgacaaccattcactagttgacatacagtgtcttaagaatttgccgtcacttcttaacaccagggttacatttggtcttggcacagtactacctatgctttcctaatgcctcgtacgcccagagagaggatacattcagcctcctcccttcgtctgtaaaaaaactgtattttcagctagtcaaaggcagattaaggaggtaaaacactactatgctcttcattaatgtccaaggagaggatgtattgccgttttgatatagcccctcgtcacattccctagtttgttttcttggacggagtgggatgtagacagaggtaatgagcagtactgttggaggagatgaatgatataaagactgagaggtggaaactcctaacattcatgaatgatcaacgattcgttatttaatgtagcaacaggtgtga

SEQ ID NO: 13518 - DNA, 551 bp, Oryza sativa
  Intron number 2 from transcript LOC_Os09g23170.1 (locus LO C_Os09g23170) derived from phytozome v7.0 (chr-ID Chr9; po s 13711194 to 13711744 reverse strand)
ggcggcgactgtcgtcgccatcacgatcgccactggtacattacattacatctcgtcgaccttgagttgccggctactactcctctccttcctcatgcaattttcttcttattttcactacattttccagtgatatttcttttgaaattgcaaatggtgagccaagcaggaagaacagctagcgctttttgtctcaagatttcgtcaacttggatatgaaataatgttatagattattagatattttttaaaatgtatgatgttattgacatttgacgtgactttgaaccattaaaaaaattatataaatattatttatataattttgatttattttatcataaagaaactataattttaatttatacgtttacataagttaaatgttatgcctatcgtatataaaaaaaacaaaaaacaaaggtagtataaagggaggggaggttcttaacttaagcactgtgatattcagtcgtgctcaaccaatgcatatttgaccgtgctgtttaactgcaggttgggctgcattattttggattatttggtttgct

SEQ ID NO: 13519 - DNA, 992 bp, Oryza sativa
  Intron number 1 from transcript LOC_Os09g24980.1 (locus LO C_Os09g24980) derived from phytozome v7.0 (chr-ID Chr9; po s 14924112 to 14925103 reverse strand)
tggaggcgtcttcttgggacgcccttcgcaagcaggtgatgacccccatatcccgcgctccctttctttcttctccccgacggactcctgagatccggccctgtcctccgccaccgcccgcgtgacggaagcgacgatgggtttatgtgggggatcctgtgaattgattgggaggaggcgtctcctgtgaatgagattggggcaattgtctgcgccgttggtgggtggtggagtccgtagcctgcccgctcttggagaaaacagcgtatcttcttgcgttttcgttgttgtaacaagatattgtttgccattggataggtggtagactggtagtaaagaagatgtgccttcggacatccatagctccatgaacggtttaccattccattttctattgaaagggtgaacttggagcaatgtgacatactgacatggacccactagctagatcttcatgatcctaccaaactgtccccaaaagggacagtttcagatggaattctgtaccttcagcatatttcttagcaatgcagttgtcgagaacagagcgaatggacctatcacaattgttttcaaactttatgttctttgttactactgtctgattgtctctatactgatccttgaattggtctgggctttgagccttagtctaaccatctttcatggatcgagcttgtttagctgttcttccagaccatcagagtgtacgactattacatattttgttttcgtattgtctgacaaagtggttccaagttgtctatgccaatgtcgtcattaccctagtacatcctattgctgcaatcggaaaatatacctttaatggtttcttggtaattctttgagtaggttaattcataatttaagcagaaaatccaggtctcattttttttgcaataccctagtgcctgcaccagttttgaatggctgtgataccttgtttgtattcaattgactctttcaggcaaggaggttggaagctcagttag

SEQ ID NO: 13520 - DNA, 416 bp, Oryza sativa
  Intron number 2 from transcript LOC_Os12g03480.1 (locus LO C_Os12g03480) derived from phytozome v7.0 (chr-ID Chr12; p os 1368723 to 1369138)
gtgttggaatttacaatccaggattttggggcgtatgagttctatccatttttataagtgcattcctatatgaataatatgcaaaatagagcttgtaattgaaagtagtatcctttttttttacgacagtttacaataaacagtgctgccacagaaagaaactatagcaaagttatttattctgttcgaaatggtgaagaaaacaaataattaagctaacctattttttgtttgatttcaatttgcatttatcttttccttgcataatgctggttttttatcagattgttgtgcattgctcttggaaaagtgtaatctatagcttttcttcgaaccgttttcattttaccttctcatattttaatgggattttaccttctggttttgtgacgaatatgatcatttcaattttcaga

SEQ ID NO: 13521 - DNA, 909 bp, Oryza sativa
  Intron number 2 from transcript LOC_Os10g22460.1 (locus LO C_Os10g22460) derived from phytozome v7.0 (chr-ID Chr10; p os 11561657 to 11562565 reverse strand)
agcccgccgagttcgccgtcccgccgccaccggcggtatgcctctccccttccctcacctgctcaattttactcctctgatttcgatacgccctgattgatattcctcacccgatttcacccgtaccttcatcaagaaaaatatatttgtagtaattttttttctgaaaatggatgctgtgaattgtgaaacatggttaatttctgaaaaaaggatgctgtcaattgtgaatgattgaagatggtaattttttcttgacaaggttgggtgactcggttaatgcttcaatcgatttgtaatttgtttactagtatctgtttacaaggagtaaattgaagagttcatgttgttggtacctgcactagtaaatcatttactaagttcatggacacacacaaagtcagaaacttgaagcattttggtggaccctcggtttcctctttttttttttttataaccgcagctcactgatgtctgtaacaattttgtttggatgagggccagttgttatgtggtcgctttccccatctgttcatactcgggatcaatgttgtatatcatctgttgttgtcacgatatttttgttttgtctgctcctgccttatactatgacagtatcttgtaagggatcataccttatactaaaacacactgcctctgtttcaaatcaacacttcataaaaactgggtccagacatacaccttgagagtttggtatatgcctctagaaatttagtcgcacaatggtaatattgttgtgaatatgatctgtacttgggggcatagatcttgtgctatcagatatttaccgcatggtggtatttagtttgatttgtgcaagtgagggcctaatgttctctctttttccctataggaagaagtttgtaacaaggtagattgggaaaagga

SEQ ID NO: 13522 - DNA, 1046 bp, Oryza sativa
  Intron number 1 from transcript LOC_Os09g04450.1 (locus LO C_Os09g04450) derived from phytozome v7.0 (chr-ID Chr9; po s 2362833 to 2363878)
tcgtccagggagcagaggagattgcgacggtgagaagcagcagcgaggaggcgaatagcaccgcggcggcgtatctcctcgagtgtgagagaaaaaggagctggcggtgacgtctggatcgatctgtaaccctaaatccccttctattgctgccgctggacccatgtgcctgagccagcgcgattggatttcgcggccgcgccatcacctccaattttcacagcaaccccatcgcgaagtcgccgcctagtcgcgccctggcccatctcacctagaccgcctatgaccatccttgaccgtttagcggctctcctgcctagccaagagaataacccctaaacgagacgggttgatggaaactagcgcctaatcgccatctaagcggcctggacggctgtccaggcaaaaactgaccattatatcaaaatgggttgaacaacccatggatactattccatactacacaatagcctcattgttccgtagactagctcaatgggcaacgatgctctcaacctcgctggcctgctcaccttccttgtcctctaattcgtctgcttcatcgaccataacgtatcataggaatatactcgtccatgcgtgaagaattatgacactttcgctgggtaaaaagttaaccaaattagacatacattattatttcacccatcaaccaatggaatctgtacacgatccctatcacatatctcccctataaatatattgccaatgtcataaatcaccaccaattcacgacaaacaggacattgcctttttctttcctgttcacttccttttgaaagcatcataaaaaatcatgatatatatatgcgtaggacagattatattttaaaacgaaaattatctccagagattatgaatgaatgctacaattttaaatcgacggatagagactgaatttacatgatcaaatacaatccattaaagacatgtatcaaacatctgtcaatttttgccgcataatttgcaccatcaatctttctttctcagataccacgcaatttgcaccatcaatctttctttct

SEQ ID NO: 13523 - DNA, 567 bp, Oryza sativa
  Intron number 2 from transcript LOC_Os07g34540.1 (locus LO C_Os07g34540) derived from phytozome v7.0 (chr-ID Chr7; po s 20707019 to 20707585 reverse strand)
tgtgagtttacaagtgtgagtatacacggtatatgaatgtctatgtctatactatgtttcacaataaaaataatatagcacacgattggtgttacttaccgatgttccaaaataaatgaattcctagcataaaaaagtaaaatttgaggaaaaaaaaaaccaaaatgctccgaattaattggaaagtagttgtaaacttatcggttcacaagaaaatttcacttctattctttccattatatagaaattcaggtattttcctcgtttgaagtgaaccttatctgaagatttttaattgtcctaacgcaatccttgctgccacttttttttcatttgatttaactatttatttattttattcccttgaaacacatgatattaacatgaagtgactttccctcattccgagtaacatgtagtaaattacatttgttagtaaaatattattatggaaaggctaaaatcctattatttttatccttttctttttattcatactattttcctgtaaactggctctgtatatgcgcagcagcgcaggtacatagcggagaaaagccgtgcggc

SEQ ID NO: 13524 - DNA, 534 bp, Oryza sativa
  Intron number 3 from transcript LOC_Os09g18159.1 (locus LO C_Os09g18159) derived from phytozome v7.0 (chr-ID Chr9; po s 11131118 to 11131651 reverse strand)
agatcaggtgctgacgtcgatataataaggttggagcactactactgtatttcctaatttccggccgtcgtagtaattaaggagcagctcatttaatttgcaccttaatataatgtacaaatggattggagaagaacctgtatattctctgattttactaactcctaattttctatatcaacctgtccttttgttccttgtggtgaaaaatatttacattaaggataaagtttgatcagactttaatttttataccctaactattaattttacagtaattaatggaagtgctcttggattcgtacgtacactattttttggaaagcatagaacccttcttatataagtattatttttcaacataactcatttcctttttgatggttgatggtcaaagttttatattgtcacaaacatcaaattttaggactagtcaaatatttacgaccagaggaagtaagtattcatcgtcaatttgtttttcaattgcatgtttcctttcatattcaggatttcataaatacaggtttcctg

SEQ ID NO: 13525 - DNA, 356 bp, Oryza sativa
  Intron number 5 from transcript LOC_Os11g34310.1 (locus LO C_Os11g34310) derived from phytozome v7.0 (chr-ID Chr11; p os 19644421 to 19644776 reverse strand)
aatcagcaaaattcagtattgagcaggtatgtttcattgcaaagatgtcagttacttggaccttgtagaaatagtagtgaataacctagaccggttactgtacttttggagtggtcaacagtagaatagaatttgttcttaacatcttatccatgtcctgcaatggaatcacaattatcttctttatctagcgcaaaatcatcaatcacaaccaattcaatctgtcaactaaatgtcttgatttttcttcaaatttgagttacaaaatataggtcatacttctgcacattgatgcattattatggtatatattgacttccattcaggttgtgttcattttagaaaaaatacacatt

SEQ ID NO: 13526 - DNA, 910 bp, Oryza sativa
  Intron number 1 from transcript LOC_Os11g17610.1 (locus LO C_Os11g17610) derived from phytozome v7.0 (chr-ID Chr11; p os 9813643 to 9814552 reverse strand)
gccgctcgaccgcgcgcgccacaagggccaggcaggtgagccagcgcgacccctatccctctcgtgcgcgctccggggtggtggatttcgggttgtggtgttgctgatgatgcgctctctgtgtttgcgggattgcctccgtagggagccattggtgggatatatagataatactcgaagaagagggattttattcggattgttggggctagagaggccgtgcgggggacttcttgagactggggttgctaactaaggcgaactcgagcactacacagtcattgcttcacaatgaaccgtgtactgaaacaggacagaaattggtggatattcagggttagcattgctgttctgtctgataggacagtgttttgcataagggtgttttgatcggcgacgagtttggtgatacgttcgcagtgttcgttgtttctccgtatgatttgaagttcctgtatgttatgtgaaactataaataaaggaatattttacaatggcgtgaaaggattttgctgaggtgtagaattcacttataaaaaggtttgcgctcttgtagagttaagatttttctgtgatatgatttgctacgaaagaccatccagtaagattgcacagatacaagaattttgatccaacctctaagcatgtgtcgtcttcatatttctagtgcataatctacaagaaaaatgtaatactgtccgtgtctaggaacttttctactggtgtatacagtcagaaacatatcaaatcctgtatggacatacacatgttgttatgaagatgtgagctgtattttccagtttgttattgtttcatgttcccaaaaaattagtttcctgttgattccttaagtttacttacatatcaaattatcgatacatttcccagggaaaattgctgtaattggtgg

SEQ ID NO: 13527 - DNA, 898 bp, Oryza sativa
  Intron number 1 from transcript LOC_Os07g43420.1 (locus LO C_Os07g43420) derived from phytozome v7.0 (chr-ID Chr7; po s 25998103 to 25999000)
agaaggaccgccacatcgtgagttggagcaccgaggtgcgtacgagttgtcgtggtctatcgagtcgtgtgtttctggattttgggagttttttttttgggtgcgtttgcgctttcctgctcgatttggttgcctgaaattttggggttccactcctgtagcaatcattccccttctttatttttttgggggctaatatgcagtggatttttcacgtaattaggcatgacctatcgaaatggactttggttgggctcctcgcgcctaatttttgtggttttaggcgatattcgtgaggattgagaataattggagtttgaatttgtgtctacttttcaagattttggttgggttcctctcacctaattctatggtttaaggcaatattcttcgtgagcattgaggataattgaaatttgaatctgtgtaccttttagataatggaaaagtgcatcacacttcctggaatttgtgcctttcccgctcgatttcgatgcctagaacatgggggtcgaattagttctcgacgcctctagcaattattccccttctttttgcctaacgaacagtagatttttcacatagttaggcataatctatctaaatggactttggtttgattcgactcctgcctattttttttggtctaaggtgatatttgtgagcatcgagaatagtcgaagtttgaatatgtgtccctttcttctttttgaaaagtgtattgcatttccaagaacttgtgcctacataattataattaattataattataatataattataattgttagcttcagatgctgtcgaacctttccttgggagtgcgtctgcgattttttgtttaacttttagaccaaattgtttttctgatgtttgcacctttcttcctgttaggagg

SEQ ID NO: 13528 - DNA, 873 bp, Oryza sativa
  Intron number 1 from transcript LOC_Os07g33880.1 (locus LO C_Os07g33880) derived from phytozome v7.0 (chr-ID Chr7; po s 20266834 to 20267706)
gtacgcttctccctcctcctcctcctcctcctcctcccctccgccgcacgacgggaagatcgcacgcgtgcttgtcctcgtgccagtccacggctccgcgcgccgtctttctcatggtgtttcacaatttgtaggatgcgttctttattcatgttgatctgccgtagatggggggatcttgagccggaggagaggagtagctagtttctttgattatgcgttttggggtctagcggattttaacatgagatggtttctctttagcgacattttttttgttcatgttgatgtccacggtgattgttctagttatgtcatttttatcttcaagacttcaatgctttgaatcgtgggtatagaccagattattgtcgtgaagatcgacgtattttccgagctgaccctctgcatgctgaaaattttgtagtgggttatatctagattatatgtgtattgttgtcatttaattagcacttaaacttctgtagtatgaacattttcatcattttcctgtgaggacatgggatgagttcctttttttttctcttgttctaaaattgttcggtaatcttgtctggctttgactaatgggctccgatgatggcatgaaatctttgagacctgacattcttgtgatgacaaacataagcatatttcctgagacccaattgaggttttaaccattggtttgctgaatgtgtcttcactgttgaaaaatttgtacacacatttgcttcaaattatgcacatttgattattgtttataggcctgcgatgtccattccacattcagtatttgttaagctgagtgcttttgtttcaaatttgttttgtataggtgaacgttcccaagaccaagaagacctactgcaa

SEQ ID NO: 13529 - DNA, 783 bp, Oryza sativa
  Intron number 3 from transcript LOC_Os07g23200.1 (locus LO C_Os07g23200) derived from phytozome v7.0 (chr-ID Chr7; po s 13075835 to 13076617 reverse strand)
ctgctcaagttgctacagtggaccatattaaacaggtaatgctgcagactttacatctgcttatcctggatttagttcttaagccagctatgcatatttaacatagaatcttttaaagtaagagaacatatataactactaaacaatggatggtcatcttaacttatggtctatgaactatatgaagcagtttcacgtctgtaatttaatatgcacagtatcttgagcttgatggtttgactattcttattcatttgatgaatattaattgagaaatggatccaatcacaggatattgatactgaactatctttcttgaagaacatgttacattgaatatagtccacatagattagtattgtaactgaactctgcatgtaaaagtttgatcccacaagtttctactttttttatttacagtgttaactgaggaataaattatgaccataattatgaattttctggacatagattaagttacctattttcaatggaatagcatagatgtaggtaaaagagcttttcattatacctcaaatagtacatccagcagcagctgtattaagcttcagtaactagtattacaggtttctgcccaatccattttgtattaacttgtgttacctctagacaatggctttcattctctaacaccgggttagattgagatgtttggttaagtatttgtttttgaaatgtctatagttttctttgttcatttgaaacatgatgtgtctgctttaatttaagtcaccatgttttttgttttacatgttaaaagaa

SEQ ID NO: 13530 - DNA, 929 bp, Oryza sativa
  Intron number 4 from transcript LOC_Os10g36870.1 (locus LO C_Os10g36870) derived from phytozome v7.0 (chr-ID Chr10; p os 19681719 to 19682647 reverse strand)
agagagggaacctgctgaaagcactgggtactcaggtactgtttgatggtttcatattcataatctccatatgatatacataggcatactattatgtaagatcagtgactgatgtgttatctgttatgcttgaaattcttctgcatttaattaagtagagccggtctgatgcgttatctgctatgcttggaatttttctgcatttgatcaagtagagccagagaatgacacatagattcgattcatgcattgtctccttgattcgtatgtcagttaccatacaacaagacaaaacaccatcttgtaatatgtttttttaaccctgtctatgactcaacgtaatgtgctgtgctcgtaggataacaatatatattatggttatttgtggtaatacatccgtgctcattaatgtatctaggctctagatttgctatttagttattgaaggtgagtgatttgccaggttcagagccttgtcctagttccttttatgctcttaactatttcaaacatgcccccccccacccccaacacacacacacacaaacaaagtagaagatagaaagtggggaaacttactgcatgtactactgttcacgggtgggagaaatgacttgtagcgtctaagatttcaactgtaggctgtagctggttgctagcagcggatggctacctattggcatatgacttcattttgtgatgttatgtctttacagtttttattttgttattaacctagcacctgttaaaaacatgtatcatttgtaaaatatccattaccatgcacaggctaataactaccttattctgcaatgaatgccataatgcccttgcaaattgtaatcttgtgcatatattttactcaaatctgcatgagactgttctgacatatggattaatatcattaggtggcagaaccgttgagggct

SEQ ID NO: 13531 - DNA, 590 bp, Oryza sativa
  Intron number 1 from transcript LOC_Os10g42130.1 (locus LO C_Os10g42130) derived from phytozome v7.0 (chr-ID Chr10; p os 22598511 to 22599100)
ggagctaccaggtttgtgcctttgtcaatttttccatttgattcatgttacttcatttttggtagttgaaattctgcatcaaatatatttagcacaagttgttgtttcatagttgagttttggtcgtgtcaacattgttaacttttggtgaaaacagttttaactgtggaaagtagctaaacaatatgcaaagcctttgacctgctagccttttttttttcgcaaatctattcctgaaaagagagaaacaggtggtagaaaattggaaaggaacatgcagaatttttcccagaggcgtttctcattttctagacagataaaagcgacctttttacacgggcatctgggctttttcctccctaggccggttgctgataagtctttttaatcacacaccttttaattttagtattcaagaatgaattcctcctgcaaccgcaaagccaaacttttcggatattctcttgcaatttggtttcgccttggtgacataaaatgataataaatatgatcaaatcaaattctgaagaagaaaatgattatgaaaatgtgcagagaagtcgttcttgccgaagcgtgacctggagtgg

SEQ ID NO: 13532 - DNA, 1040 bp, Oryza sativa
  Intron number 1 from transcript LOC_Os11g38970.1 (locus LO C_Os11g38970) derived from phytozome v7.0 (chr-ID Chr11; p os 22723497 to 22724536)
gaccgcaagtgagggaactgcaaaaagcagaagatgccacgattctgccaacttgtgattagtgctaacgcaaaaggcgccactttcccaacagttaatgtttggtaacttgcagtatgcaatttcttgacatgacagcaccaagaaagtagtaagcctgaaaaacaacttacaggtctccattggcatagcctttcgactcgaccagcaagtgacaagtgaagtgaagtgaagagaaactgtagcgttgagacgagcctgatgcacattcacttgcatgttcagttggggtcgacatgttcggtaatgctaatgtcttctcaagagctagtgcaacgtccacataaaagcgattcacatgcccctcagctgagtgagttgcatctaatcttgtgggttgtgacctgtgcaaattgatagggaaaacacataattggacttcataccaacaaaatatagacacatcatgcccataaagcagtgacattagcacctttatgctccaagtaggtgcgtatcaagaacaatatagggcaggacaaattccatagcaatgactttatgctcccagcttcctttggagggaatttctaaaatgacacatggcatagttacatcatagaactgtatataaatttgctttcaatcaagtaaatgggaagcttttacataccgccgttcgatccccacgcgtagatagtttacagagttgaaatttgatcttggatattggagctttcatcatcatgtagccaccaagacatatgctcctaatggagtggttctgttggagattctaccaaatcgaatcctgcagcacatatgaacggaatggggattctctggatcaaagaaatatttataattaaaattttaatataattaaaaatatctccattaatgggaaagaatttgattctactttgagaggcttgttgcacttctgagtaacaccgtttgtttgattgcttgtcttttctgcttctgcttttcttggttctccaggtgaagcaccaaggaaaagttcttcaagaacattt

SEQ ID NO: 13533 - DNA, 660 bp, Oryza sativa
  Intron number 1 from transcript LOC_Os09g25860.1 (locus LO C_Os09g25860) derived from phytozome v7.0 (chr-ID Chr9; po s 15504204 to 15504863 reverse strand)
ggtggccgtgttgcggaagctcgccgcaatctgtgcatgaaggatgccgcaccatcggccatctcagttcattgaaatgtccatggtttgagttttgaggtcagaatttgttgcagttgtacatttaatgggagaggagggtgtttcttgcctcatctctctcgtgttgtacccccgagtagtagtggtagtatgctcgtggctcctataaaggagtttgtttggctggagaagccagccattgtttctgacaatgctatgagtggtgttcaccatgagaacaatggtcaaagctttggtgtgtggcatgtggatagttgctattcagttttccctttcaactatctcatgaagaagttgaattattgcacaagttttgaacttatcaaatcaggaaagttctacctgtttttatctattttaaactatggagatttttattgatggggaacaattgagttattattctcaaaagagcattgatctagtgcttaagagcatacctgcaagagcctagaaacacaagtaaaatccatgacagacgatctctacgcatactccaatgcaagcaagattctcctccaacatactgtattgatattgatgctgtgttggatcacatcagataattgtgctgtttacaaaaaactgaaaaaaata

SEQ ID NO: 13534 - DNA, 784 bp, Oryza sativa
  Intron number 2 from transcript LOC_Os09g32210.1 (locus LO C_Os09g32210) derived from phytozome v7.0 (chr-ID Chr9; po s 19224616 to 19225399 reverse strand)
ggggccacagtccaaatcttgtagattcaattaaggtaattcccgtattaattcaagaactagctctgattgttttttccacatgcactcaaacaaacttcgtggcgctgttcggttgtgggttttgcagcagctgcacctggtttctgcggctgtggtgcacagctgtggctactagtagcagctgcagccgcagccaaaaaaatggcagccggagaaggctaatgttttcatccgtgacataactccatctttgtatcctcaaatattaaagtcaagaaatctttatgcacggctatacagtagcagtcggcttcacagaccacaagaatggcagtcagctaagacttagtaaggtgaaataatacagtacaacatatgattaatgccccctgtgatatacaaacaaacatttccaatattcagtggctaagacgttttccaaaaactcacttatttgaaatagtaactggaaattctgatttaaactaattgatctttattatgtagtatctgctaaataaaatcaaaacatgtttttgtttcaaggaaatgtgatgggaatcgcactaaaccttgcaattccttaatacaagtacgacaagaaaagaagtattgattgtactcctccataaacattgttatttaccaactctcatgcatgcagatgaactccctaatatcttataatcatgttctgttttgctacagagtttgttgctgcagtctgcagatacttattgataatgatttctttttgtttaggaaaactttcatcggagca

SEQ ID NO: 13535 - DNA, 944 bp, Oryza sativa
  Intron number 1 from transcript LOC_Os09g32210.1 (locus LO C_Os09g32210) derived from phytozome v7.0 (chr-ID Chr9; po s 19225995 to 19226938 reverse strand)
gttcctgtcgttgctcgcgggaagggtcagcgaaggtgagggcctttggttacccctaactcaattatgtgtgaacagtgcttctccgtttgtgctctgtttatgtgtgtgtgtgtgtgtgtgtgtgtttattgaggctttgagtttttttttcttgagggggttgcttttgctgtacaggagaagatgatgtttaagtttaatttaatttaatttattttttttactcgctgcggtttgagcgttcgtggagtggtatgtgttgcgagcacacgggtgggtttgtggttatggatgtgtgtgtgtgtgtgtgtgtgtgtgattctgtgcaatgcttgatcaggtggcgagttcctcacttcggtatgttttaaatttatcctttttcgggcttcgtttgatgttgctctgcggtctgcaccctctagcttggtttaggcatgagattgtatgcaaggtgttttctttttaaccaatttcgtgatttttgggctagttggagacttgtttctgttcagtaataagtatttggggcagtaaacttttcttttttggaagatgtaatttctgttttcgatgggcgaatgtgtgcgtgatctcaccagcaagtccccgcctttggtgtgcttcacgtggtgtcctccatggcctcatggggcaggtttctctaggcggtggattttatctgctgtgctggatcacaaaaaccatgggtaaaaactaaaaaatcgcatttatttggcattttgctatgatgatttcgatggttaaagttcttgagttttttttttctttttgggtaatggagcttgcatatttgcttgctttgtagcattacatgtgtagttagtctgtactcgtataggttctaaaattgaactgaacttacagaattcagttgagaaattatcactaaaaatgatcaccttttgttgtccagcaaa

SEQ ID NO: 13536 - DNA, 779 bp, Oryza sativa
  Intron number 1 from transcript LOC_Os08g40560.2 (locus LO C_Os08g40560) derived from phytozome v7.0 (chr-ID Chr8; po s 25678543 to 25679321 reverse strand)
ccgggagtagggtacgacaacccggacgataggaggtgagagggtttgtgatgctttggtggtgtggagttgggagggtttgagttgagtttgatagctggagagaaatagaagcttccgactcattttttttttgtttggactgttagtttatatggtcgattgatgtgcgaaaaccgtggtcgttagattggtttagccatgaaaaaaaatgttgagtgcgcaatgagcagttcgaatgcgtcccatttttttcattcggaaacagtaggttttggactaggaaattaatgactgaagagatttatgtttgttgcagttttccacaatttaggattttggccagaagacgtttttcatctgccacatgggtagtctgtgaatgtcttgtagtagctcgatgtttagctcctggttgaatcccagtaagaccataagagcctgagctattgaaggcactggctgtgcttattagtcaactgaaagtgttagtaatttgggtaggataccaaaaaggatcctgaatttgactcttatatatgaagtaaacatatatggtgaagtgctacatctcattttcttgtggatttatggtacctcttcgccttttcgtatggtatttatgtgctattttgagttgggagctgctctatgtgttataacatttagcaggaattaaggaaattaatggttctggttccttgtgatatttctttctgtgattatacactattttgagcatcactgcagcttttaatttgtttggttatctcctaggt

SEQ ID NO: 13537 - DNA, 593 bp, Oryza sativa
  Intron number 1 from transcript LOC_Os07g23770.1 (locus LO C_Os07g23770) derived from phytozome v7.0 (chr-ID Chr7; po s 13424955 to 13425547)
gtgtctcttctctccatagtggaatcctcaggtgaaaaccacatccttgtttcctagggcaagcaatggcaacgccatcgacatcgtatattcttcctaaagacgtcgcttggtggtacatttccgacctaacttttgtccagactttgtcctcttgtggcatcctaatcgtctcaagttgatcacgttggagcgcctagtgggagagagcggatccattcttctctcttaccctcttccccttcaaccctaagatgtggatggagagaagtgtgttgggtatcgtgccttttgctcccagtaattggtgtgtcatagacgcttagtttgattagccatttttgtttttcctaattagcctcccaggataactttttatattttctcctactatattaatatgaaacctctattgtctcgtacagttcgtttaaaaaaaagaaaatataacctttcttcataatatacataacattacatctgcatgtgtatgtgtgcagcttttttaaaaaaataacaaagagaggtacaccatgccaaggatagaagtggtggatgttatccacagaatatctggtgtctttttcaggtga

SEQ ID NO: 13538 - DNA, 480 bp, Oryza sativa
  Intron number 3 from transcript LOC_Os11g03200.1 (locus LO C_Os11g03200) derived from phytozome v7.0 (chr-ID Chr11; p os 1162548 to 1163027 reverse strand)
atcaatcaagggagttgaaaccaagtcttgtgaaggtatgtacacaaagttaaaactgtatacttatctttgtgtgtctttcatccacaagtttttaactttatgggtatttcttagttgcttagtgtgccaaattggtccagttacatattcctgtcatccttatggagttttgggataattttctatttcttcacagttaatctacatcccatgttaccatggcacattcccttgtttatgttccaggttactcccctaaggcttaacattcaacccgtttcatttttctaatccaacagtttcactaagatttctgtcattacgatggttttgtttttgtctatattatgactcgtcttttgagactgctaaatggttgtttttagacaataggcatagactgctggatgtttcacagtcctagagttctaaaagatcgatgattgattattgaagaaattgtctttgtattgcagg

SEQ ID NO: 13539 - DNA, 1017 bp, Oryza sativa
  Intron number 2 from transcript LOC_Os08g23590.1 (locus LO C_Os08g23590) derived from phytozome v7.0 (chr-ID Chr8; po s 14279018 to 14280034 reverse strand)
acctcgacaaagaaggtctgcttctctggatacaaaccctagtttgcatagttctgattgttcccagtgagcggtgtagggtggttttggttgtcacaatatgcaactttcactttgcattgggggcttgtggggtgtcctggttttcatgcatagactaagagatatgataatttaacactcttttaaatgggtttcgattatttgatatcctggcccactttcattcactcagatggccccacatgtcatcatcacaaatgtcagttaaagtaattgggcatcgaaaaaagtgtcaaattatcaaattttttgttttaatatatacatctcaattaatattttttgaatcaatagttttattccttctagaattgtgcatgccataaaaagcttctggatgtcattttgatttacctcgtgaatttataataaagaaagcatggttcagcatccatacccatttgttggggttaattggattcatgccattataaatttgccccttttgaaaaatgccattacaattcatctaattggaagattccattgcaaatatattaaaattagaaatatgcaactgcttaccatttgtttgcactgaaattcctttttggaccaaactacccttatctctatctctctcccagatccgccgctcattgacaaactcatccgtcgggctcgaggatctgggcgagtaggttggctttgcgggcacgtagcggtgctgaagaacttcatgtcctccgctcccaccaaatgtctgcgaaccgctaaatatcctcccaaaattaaacctttagctccaaagatgcccaagcaaacaaacaccaaaatcaagacaaggcgctaaaatcattcaaaatatccaatgtttgcccagatgcgagcaagtttgcactctgaaatccaagcttttgaccatcaaccaaaccgggggaaaaacaaaagacatgcagaaatttcttgagatagaaaattttgttgggttcatcattgattgatgaagccgat

SEQ ID NO: 13540 - DNA, 475 bp, Oryza sativa
  Intron number 2 from transcript LOC_Os11g03760.1 (locus LO C_Os11g03760) derived from phytozome v7.0 (chr-ID Chr11; p os 1472489 to 1472963 reverse strand)
gagggggataactctcaggcatatggtctcttgttcctgggcatccttgccttccttcctggtatgttaatgtacactggtttaccttacattttcacgtaacgttatcatggaatttttttcatcttctcaatgaaatttttcccccaattatttattgatcatttgccatgacttccttcaaaagtatttattttagtgtagtttgatggaaatattgctacatttttctataaacttggtcaaatttgaagaagtttgacttaggacaaacccaaaacaccttataatgtggaatggagggagtgccatactggaaacagaatggtcatactctttggatatgaaatctatttaagtgtgcatcagtgtaaaattatgtcctttgttattgttgtagatagtagacagctctactattgtatccatttagcgagatggattatattgttctgacattgttttgtaggttttt

SEQ ID NO: 13541 - DNA, 936 bp, Oryza sativa
  Intron number 1 from transcript LOC_Os08g38700.1 (locus LO C_Os08g38700) derived from phytozome v7.0 (chr-ID Chr8; po s 24462022 to 24462957)
aagtccgagcccttccgcatcggcctctggaactggttcgactctttatgtatccattcctccctggaaaagaagcttttgcagtagatttttggagagtacagttgcttgttctgtttgctgattttgttacggttgttctgagatgaatttgatatgaagtttgatcgttttatctggtgtgttaggtgaatcttgtgttgtagtttggcatggaatcatttttttgttttttgttgtgaatagtgaatggatggcctgaggtatttatgagttcatgtattttcggtggtgcagaagtagtcaatttcttttaattttattttccatgtaacagtaatttcggaaggagtgatccattcaattttgtggtggttgtggtgaattgagctgtagtcagagttgaagttgcaaaagctttggattttgtagcagtggaacttgactgaattctgtttcagtgcaacagttttcagcttgctaccttgtgtattcattagttctggatgatctgcttaaattttatatttctagtcatggccgttttgaaattcctttcagtgagattcagatacttttcctcaccaaactatgtttagttgttgggatcctgtcttaaccatatttaggctctaagagaaaagtaaaagctttgcttggaataaaaggtatttcagacaaaagtggccgctttattcaaccttcactgttaccggtttattttctactgttaccaagaggaatatttaattaagtcgtactatttgattcatcttcccacctttagatgattattataacaaataaactatcaatccattgcattaatagatgggaattatgaggggggctgctatcatgtcatgatctaatttatggtttctgattctgcaatatgaaggtacctatctgtggagagaaataacaagcaaactt

SEQ ID NO: 13542 - DNA, 416 bp, Oryza sativa
  Intron number 1 from transcript LOC_Os10g38160.1 (locus LO C_Os10g38160) derived from phytozome v7.0 (chr-ID Chr10; p os 20366691 to 20367106)
tcgctcgcttctgggcctcctacatcgacgaaaaggttgttacgatgatcatgtactagtagagtactcttctgttgattattactcccttcgtattttaatgtatgacgccgttgacattttaaccaatgtttgaccattcgttttattcaaattttttatgcaaataaaaaatacttatgtcacgcttaaagaacatttaatgataaatcaagtcacaataaaataaatgataattacataagttttttgaataagacgaaaagtcaaacgtttgttaaaaagtcaacagcgccatacattaaaatacagagggagtacttgattttctcttggcatttgtgtgattgattggtgtatacgtgttctgtgcgtttgcagctgttcggtgcgtggattccggtgttcagaggcaa

SEQ ID NO: 13543 - DNA, 521 bp, Oryza sativa
  Intron number 4 from transcript LOC_Os09g27900.1 (locus LO C_Os09g27900) derived from phytozome v7.0 (chr-ID Chr9; po s 16963542 to 16964062)
gcctgtcaattactggaactctgttgtatgtacttctgcattactttctttttcatattcttcattccacttgctatgatacaatgttccctggtaaagtacttgtaattagtatttgaaagaattttacttgttgaacatgatagctgtttttttacagaggttactacaaagggtgtcccttttttggaacctttgctttgaggtctatttatgattgctgtgaatcaaaatccttgcttggaatatggaaaattcacgtgtttaatttctcagtttgccatttaccttgcattgctgatggataatttaagccattcacctttgcattgctgatggacaattttaaggatccttttctagcatatttatactctacttcatgatctggcaactgatcaggtctcacacattttgtgtttatggaacagttaatactaaccgattttttttatctcacttatttattcatctttacatttccaggtacatatttacattcgccattggagccggaccag

SEQ ID NO: 13544 - DNA, 841 bp, Oryza sativa
  Intron number 1 from transcript LOC_Os11g37560.2 (locus LO C_Os11g37560) derived from phytozome v7.0 (chr-ID Chr11; p os 21711336 to 21712176 reverse strand)
gccggtgacggagacggcgaccgaggcggcgaaaggtatggggtgattggtgcacgtgaggttgcttaaagatcacaagtactctttcttgtgaacgcattatcttttcgatttcttttttactagctttttgaccgtggctaacatgataattgagctaaaaaggacaactcctttttaatctgacagaatgtatgaaactaacaatccaaccataaatcccttcctgaggaatagttgaaaaactgggaatctatttttaatcttttttatgtgtataatagaagtgtttgatttatgtcaacaaaaaaaagtgtttgattcgattgataggtgaatggatttagggaacttgttagatatttatggaaaattttgattgtgtgcactgccatttttgtctcgccattggcaatagaaattgtagctgtgcagataacacacaggtgcctgcagtattggcatcttgttttgttatccatgcatatttcttcatttatctgggtatcaaacatgaatttattgtcgaagtgcgatgctgattccaccaaatgacttactcccgctgtccaataaatgtagctaaaagtagcataaatgcaccaaaataacacctgtagacattaagcatatagaaaaaaaattatcagcatttctattagttgcaagttgcatctgcatttttttttcagacatacatgtattcttatgcgggatacacaattaactgcagtattttagttagtaaggtattgtaaaaccatgctgttcttaatctgcaatctgacattagcaatcagtttcagtgccggactctggtgattcatctcctttcaagaag

SEQ ID NO: 13545 - DNA, 1044 bp, Oryza sativa
  Intron number 2 from transcript LOC_Os10g09200.1 (locus LO C_Os10g09200) derived from phytozome v7.0 (chr-ID Chr10; p os 4983831 to 4984874)
gagacttgtgggtggagccgtggaggtagagactgaatcttatttttgtttagatctgatgctaatgaatggatgtgatgtgagatttggtggctgattagtttgtgatgcagtgcatattctgaaaatagagaataacattttagatgcagattatttttgcttagtgatgtttgtagtgggatttagtgtagtaaaaattgcttcttcaatagtgattctattgactgattttgtctgcattggttccacaagaaaatttttttttggtctgcagatgcatatgttgtgcacacttgtgattgcaatgtgagggtggtttgctcctgtatgctgtagcgtattactatatgaaaacctaagtaagcattgactaagataaaaacaatatcgtgttctctctacattggttccacaagaattttttttgggtctgcagatgcatatgttgtgcacacttgttcttgcaatgtgtgggtggtttgctcctgtatgctgtagcgtattactatatgaaaacctaagtaagcattgactaagataaaatagtatcgtgttctctattagtacttaaaaactctgcagaaaatactgatacattcaaattgatttaggctgaagctgtctcatcaggagaatccttgaaactaagtccagaggagcggctgcaggaccagagaaagtaaccatatatcagccactctaaaatcatggtaggtaatcaggagattaaaatgaaattgaaatcatatcctggcatgattcttgtgtgatgcatatactagtatgtgtaggagttgggagttgcattctcatccattagaatatgaacaagagcatctctgaattagtaaaaggaccatataataatttcagctgtagaacatgtgtaactaataggatataaatattttgatttatctaacaagtagaaagattagttatagttcaaaattatgagtgtgccagctgaatttcatgcttatggctgtatttgtttgctttgcaggcgacaagggtttattgcttcgtgcacaaggttcc

SEQ ID NO: 13546 - DNA, 750 bp, Oryza sativa; identical to SEQ ID NO: 13236
  Intron number 2 from transcript LOC_Os10g07586.1 (locus LO C_Os10g07586) derived from phytozome v7.0 (chr-ID Chr10; p os 4162722 to 4163471 reverse strand)

SEQ ID NO: 13547 - DNA, 606 bp, Oryza sativa
  Intron number 1 from transcript LOC_Os10g02340.1 (locus LO C_Os10g02340) derived from phytozome v7.0 (chr-ID Chr10; p os 836054 to 836659)
ccaccatcctcctcttcctctccatctactccgtatacttttttatttattaagaaaagtatgctcaaacaagttttttgttaatgcgaaaaactgaatgtttgaagagatttttcttagtttttaatgtgaaaatatatcatactcctttattcaattttcattattcagacatttttgtgaatgaaatgtttttacaacaagatttagataacaaacaaaagcatatcaaatatgacaatagagaatttcggaattaaaggtcaagcaaagcttaagaagattttttttgggcaaatttttttatggtcttcatgctttacagggactgaaaaagagagagaacaataaatttcttatggcaatcaagaatttctgcgaaatgtcaagcaaaaattaagaagatattatgtttttttttcacaagttctttagaaaagaacatcttcttatggcaatcaagaatttcttaaaggtcaatcaaaatttaagatttaatttttgtttcacaaattattttgatggtcttcaccagtggactgaaaaaacaataaagaacgaaaaatttctgaaatttcgttataaaatttcaatctgtgacagggg

SEQ ID NO: 13548 - DNA, 295 bp, Oryza sativa
  Intron number 1 from transcript LOC_Os08g15505.1 (locus LO C_Os08g15505) derived from phytozome v7.0 (chr-ID Chr8; po s 9432555 to 9432849 reverse strand)
tgtgttagcacttggaggtcctgcttctgccacaggttcatcttaattctccctcaacccatttgatttcatctttcgaagaaactgcatgcgttctatatgctctgaattttatttgttttcttgagcggttctctatagatatctgtcagtgatgagattataggggacagtttacaattaatgtttcatgtgatttaataaatgataagctagattattttataagctagcatctaatgagttctttctctttgtagattattgctacaaagccattggcaagctgatcgtc

SEQ ID NO: 13549 - DNA, 846 bp, Oryza sativa
  Intron number 1 from transcript LOC_Os10g05580.1 (locus LO C_Os10g05580) derived from phytozome v7.0 (chr-ID Chr10; p os 2772037 to 2772882)
tgcatatacaggtatagaagatgagtagtgtgttccagtaaaaagaattaaattggggtgataagattaatgagtagaaaaccatagacgtttatagtagatagtctatagaaactgtttagatttagagcatagcatctggataagtttcttatatataattagttgatcaatagttcaattattggcctcgtcaaccattctaatcaagtatgacataaattgtgttatttgttctgtaaagcatacattgatgtcaggacatatagatagtagtagtaaatcatcgaaagaaatcagtcaccatctctttatattcaatgtcagatttcataggttataattcaactatataaagtacagatcttgccataattatcaaattgtagaacatgtaaattgctcaataaacctaattcagggatttaatcctgctaatgtgccactaatttcagaaattcggttattctacatgcaagcatatttataaggacaaaatcatgttagtgtgcttttaatttcagtactgcatttactctaggatatattatgtaagtattcattcatggcaaaatttgctacagggcattcaaaaaatatgtaattagctggtggacaccgtaacaatacgaatttgctgttggacatcacaaaaaactgataattagctgatgaacactcctaagattattttactatttatggagaaattggagagagaaacactcattaaagacaaatttacccttgtcaaacttcttctgtggggcctacctgtaagacttgtcttcttcgctggatcttcctctagttcgacgaggctggcagtaggacgacagcgaccag

SEQ ID NO: 13550 - DNA, 898 bp, Oryza sativa
  Intron number 2 from transcript LOC_Os10g15164.1 (locus LO C_Os10g15164) derived from phytozome v7.0 (chr-ID Chr10; p os 7971590 to 7972487 reverse strand)
gaaacaggacgcggttctatccgccagtgaggtgcctgccctgccaactacttagggtgtgttcggacctctaggttcccaacccaaatccctcgttttctgcgcgcacgcttttcaaactgttaaacggtgcgtttttttataaaaagtttctatatgaaagttgcttaaaaaaataaaattaatctatttttttaaaaaaattagctaatacttaattaatcatgtgctaatgaaacgctccgttttccgtgcggaggcactgtgttcccatcatccacatgcgaacacagccttaggagtgtgccagtattctacatggttgtctcctccatgatcacttagcaggtcaatttcaacacttgcctctcacaaaaactagatatatgatattttatcgacaccggtagttgctcgatgttcttgaagaatagcatgtcaaactgaataatcttagccaagatcatccagcgatagatttattaagtttgatggttacgattgacagtttccttttcctattaacttatctgtgctatcaaataagctttagtgatcgtcaacaaaagcaatgtgtacctatgaagcaaagagcacaccagctagagctgatcatttgttttttagggtttactgcgtgaaaagtccaatagagatgtcaatttttatctccttactatctattggctattgctctctagggacaacatatattgttcagaatttttttggttggttcatcttgtttgccatcagattcatttgaggtttatctatgctttgacgatggccaaggaggatcagttccatttgagccaagcgattatagttttttttcctgtgcttcatgtaaaatttaattattatgcttgtttctttacaggaaagttgtgagatc

SEQ ID NO: 13551 - DNA, 912 bp, Oryza sativa
  Intron number 1 from transcript LOC_Os08g14650.1 (locus LO C_Os08g14650) derived from phytozome v7.0 (chr-ID Chr8; po s 8808345 to 8809256)
aggtgggcgcggcagaggtgagccggcgaggcatcccttgtcagaggtggaagaaggtagtaacaggggtatttttgtccgttagggcattatagcgtgtagtcttcgattgaaagtggcattttaacgaagcccactcccagcgtggcatttgagcgaaacccacttttgaggatggcacaatgtcaattttctcgttggcagcaggtgcggcgccagcgcaacagaggcaaaaatagcaagccaacaaactagaggctgcttttgatggcgactgtagagacactgactggtggggccattaaacggacgcacacggatggtctggacgctgacgcgccagccaccccttttgttacactgagatgtgggccccagatgtcctcttatattgtccttttttcagtttttttaatttctgccattagtattcttgtctgtaaagaatgttctcttccacatttttcacatttcttgctattactatattactgacctagcatttgctttgaccactgaaattcaagcaagggtcattttcttttgagtagtcttttttttattgaaccgaggaatgattttaaagagatactcctatttaactatttgccgctcctaaatatgacaatgaactatttgctactatttactagacctacattttatagacacatgagacgcgcaaatagctaaacatcaaattaaaagtggcaaatagttaaatgccccaattttgaaaggtattctttttttaaaaaaaaaatatttgacactaattgtgcactctttagcaattcaaaagccaaggctgagtaatgaatccaataaaaaaatacaaattaattataaaatcagttctaatgatcaatattggcagcagcgtataagtcaaagctcaaaacggcagattgc

SEQ ID NO: 13552 - DNA, 930 bp, Oryza sativa
  Intron number 1 from transcript LOC_Os09g33600.1 (locus LO C_Os09g33600) derived from phytozome v7.0 (chr-ID Chr9; po s 19829523 to 19830452 reverse strand)
ttcaggaagcaggtgagtgagtggagatctcggttcgtggcggtttgggggcgctcgtgcgccgtggttgggaggttggtgtcaggcgagtggaagcgtaggggaagaagaaaaaaagggatgcagcttttggtgtaatgcttgccgctggtggcttctgggttgcgctgagagtggcgggttggatctatcgaatgttttttgggctgtgacgatgggaatggctggagaaagtgtgatctccctctatctcgggggggtctaatttgtggatttgaaattgaaatggagctgctcgtatcgtaggtttcttaaaatttttttgttgctgttctgacggtttcattcctagatggaagaatttagcgtcattagttctgtatttttcgtatgagcgtgtgagtaaagtatctcctgtaagcgttatttttggcttgggttcctcacaactgcagtagattttgcattctgttagaatatcttcttttctcatgtgtgtgttcggcactcgattattatcctgaattcctgatgcaaaggggaccttaggttatttctgtgtgaattttggcgaataatgttatattggtatgggtcctgtttgaaattccagaatgacaggggcattgttcaattccatcaggagataatcctgcaccctaaaactgaatcatacattatttgggttctttgattctttcgctgattgtgaacaagtggtttataattatcgtgattcatagagaaaatggagggactcttttattcaagggttatggggaatatattataaacgtttgcagtttgggcaaatgtggtgtattgatttgaatcatgtcttctaaagtttttggttcatgaacactgtttaaatggttatccttgcaatatgtagatacaatcccttgaagaaggttctgaattgctgag

SEQ ID NO: 13553 - DNA, 1037 bp, Oryza sativa
  Intron number 1 from transcript LOC_Os12g16520.1 (locus LO C_Os12g16520) derived from phytozome v7.0 (chr-ID Chr12; p os 9462716 to 9463752 reverse strand)
gtcaacggcggcgtgcagcgtgggtggaggcggcggtgtggcctgggtgaatcgcgcccgcgcagatggggatttttgtgcgacgatggtgacgacgcgatggattttttgtgtgggcccacgaaaatttctgcaaccttggcgccttgctgggcccgccgatatttttagcccgcaaaaaatttcctccaaatttgttttcccggtaacaaaattcccggcagattatatgttatcttaaattatcaatggcagattagttgacctgctatattagtttattgccggcacttaatttgctgccctatttttttaattcccggcagatgagatgatgtacaatattatttccggcacttgatatattcccggcaaatagtttgccactaacttcattttattaccggcagttaagtgccatgaatactaggtcatggtgtagtgccagaacaccaccccgcaccattccattttctctgtggaccgaccgatccaaaccatttgtagtagcaggccatttccaccgatccaaaattaaagtaaatgcagattagaatcccaattcaacccattcccacccaagtaccgaacccattggtggtcagtatttctttttttttaaaaaaaaacaatatgtatagcctggatcaaaatggtggacacgatttggacccactgcactactccaatatcgtagactaatcaagtgtttgtataataagaaagttagtgttatttgcgtagttgacttaccattgctagaaatttacctttgtctataaaaagaatccgttgcaatgcgtgggctatttaatagtctccttaaaacatggcatggaatttatgtttctttcctaaaatttagtactaaaacacaactattggcatgtacgtatgttgatgaaaaagtttctgtccttttcgttttttcctttgattgatattctaataaatatcttcgtgttgtgatctaagccaaatctcatactcccacgttatcaggtttaagtgttggcataggagttggcagtggcgcg

SEQ ID NO: 13554 - DNA, 776 bp, Oryza sativa
  Intron number 1 from transcript LOC_Os10g12190.1 (locus LO C_Os10g12190) derived from phytozome v7.0 (chr-ID Chr10; p os 6809863 to 6810638)
gtcttggtcgtcccctttgcagtgtcattcgagaagttagctcctgtgttgcttgattctttaactttttttctcatctatttcatattatatgaacaatattgtgtattgtatgattctgctatatcaatatcctttgatagaaaagatattgttgtagcgaatttagcattcagccatcagaatactcagttaggacatactgaagccgaaattctgcgtatattcagaagttaggacatactgatcaaatctgtagttcttggaaccagtgtttcagttgtacaaatcaaatttaacggcaactacttggattttgattttgtattttagacaactactagtacttgatttaatatttttctgatcatctatatctaatactccttctattttctactagatgacgttgttgacttttgaacatatgtttgactattcgtgttatttaaaaattttatgtaaatgtataagatataaatcattcttaagaataagatgaatggtgaaacgtgtgacaaaaggtaacgacgttatctattaaaaaatgtagatatatagtgtcactactattctattcttcttgtcaccgatccgtatacacaagaaatgaacatgagttcttgcttcttaagtcctaatgtccataggggtgaatgcgcatgcgttgtgagtgtctgcgttgtagaatgtaattctcaaaaaatatgtggctgttgtttttttaatgtgttgttcaagagggaagctgaaggagcttaagttaaaggcattca

SEQ ID NO: 13555 - DNA, 304 bp, Oryza sativa
  Intron number 2 from transcript LOC_Os12g08280.1 (locus LO C_Os12g08280) derived from phytozome v7.0 (chr-ID Chr12; p os 4217583 to 4217886 reverse strand)
ggcggatcaaagtccggtgacagttgccgattgtacgatctgttcatctcttcagttgttgccaaggtttcttcctttgatgtttgcaactgaattattgacatgtgtactcatcagaatttggaattcatagagcatctttttcgtactgcatctttgtttgctagggaatgtaaaggactgataggacaattttgctgttcattgttacatggtgcttctgctttatcgcggctcaccattcacctctagttttcttttggttcatgtagggtctcaaatattggtaagccttgtcttgaaa

SEQ ID NO: 13556 - DNA, 599 bp, Oryza sativa
  Intron number 1 from transcript LOC_Os11g30200.1 (locus LO C_Os11g30200) derived from phytozome v7.0 (chr-ID Chr11; p os 17093957 to 17094555 reverse strand)
aatccaaaagtcctcagcaaggtatggagaagcagatgcagcaatatcgcccggtcaagccaaaggagaatgatcaagggcagaaaggggaggggttggtgattgcagagcaaaaaggtcagccacatattcccaatccttctcatcctggtgtgttctctagtcagaagtttgtcttagatgcaaagagagagggcaccttgctagggattgctgtacaaaaatcttctgtactaattgttccaaaccttcatacaaaactgaagactgtttgtatgacaaacaacccaggccggttgctaagctagttggatatggggctccgggatttggttgcattttgattcagaatatcaaatctgcaccacctaaagagcatgtaaaccccatggcaatggtgaaaattatctatggagaggatttatctgaaacagagttggaagaaggatagaaggattcagacaacagttcaaatggaattgggaatggagggctaagaaacaaccaagtggcacctttccaaacaagttaaggttgtctcttgtttgagatgtcgaattttgatcactttaatgtgaagggcactaaggtggaggtaa

SEQ ID NO: 13557 - DNA, 511 bp, Oryza sativa
  Intron number 3 from transcript LOC_Os11g34850.1 (locus LO C_Os11g34850) derived from phytozome v7.0 (chr-ID Chr11; p os 19956469 to 19956979 reverse strand)
ctgacgagctagtgacggttcttgcggaggccaaggtgcggcattttcttcttttgtttttttccccatttctttggatgtttttacagcttcagcattggcgtcccactcccaccgctacagtagcaaatgtgttgccgactccatgtctagtgccatgtattactattaccttgtgcaaaattagatggtatttatggtgatgattggtctgtaccgagtgcttgaatttgagaaaagtgaaaccttggcagctccaatggggcatttggattggactagaccgagtaggttttgatttagttatagacttgaattgtaactctaaattaaagaatggaaggctctggttcgtctctggttgtgtctcagtggtacattgctgctgaattggtcatagaagaaagagcataccatgacttcgtgtagatctgcattgtgatattgtttctttgttgtcggtttttcccctataaagaaactgaccactttgagcatctttttcaggctg

SEQ ID NO: 13558 - DNA, 542 bp, Oryza sativa
  Intron number 1 from transcript LOC_Os09g33920.2 (locus LO C_Os09g33920) derived from phytozome v7.0 (chr-ID Chr9; po s 20019278 to 20019819)
tgattcttggggacagatcttgggggttcgtacaagtaagtgtttcttccttcatcttctctccctcttttcgagatgtcttgatcttctcttgaatttgtgatgttggaacttggatgtgatgtttcttggctctatagttttagctgttgacaacaggtctttgggccgtttcttgtggcatttggcatttcaatgggggtttagctcattgcgatttcccctctactttgggtactcttgatgtgtgatgtagctgtaagttttccggctatgaaatctcatccggtaggaatgggtgtcctattgtgccccagttgttgattttctgtgtcctttggaagtgagaagggttcaagaagagttatcccagtagaaagaaattttacatgcccaagattttgataatttgacactttatttgtcgtcactttgattgtattgacattacgaagaattgttacattttattttcaccatcattacagtgctactgcattacatttcttttcaccgtcattatgatttggtcgtttcaggca

SEQ ID NO: 13559 - DNA, 870 bp, Oryza sativa
  Intron number 1 from transcript LOC_Os12g06620.1 (locus LO C_Os12g06620) derived from phytozome v7.0 (chr-ID Chr12; p os 3209782 to 3210651 reverse strand)
cgctcgccggcggccggaagctcctccgggtgaaggtacggttggttcccgagcgagccccaaccctaaaacctttgacacgccgcccgcttcccttcctccagtccaccgatccaatttgagttttcttttttttttcttcttcctttttcctttgcgcttgttcgttggattggtgcttggttagaactcgttactccggccgcaacgtccagcggctattgtaatctggagagtgcttcaatactctgtggatgcgatgcgatgcgatggtgtttcgagttgtttttcgtttaagccagcaggtgtggtgtgcgggatttatgagaaagatatattcgatgattagcactaatttgatctgatttcgaccactgtgaaagttatcagatagaaatgagtagtatgtggtatgtaccaagcaatttatggtttggatgtatcatcattcagcatagtgtttcgtcaattcctttgtcgaatgcgtagttctcttccctccttagttattctttgctatacttgtcaatagcgatggtgtgtattcataactagtgatttgtgaacctggaaattgttgtgatgttagtcctttcattcttgacttgtatttgtgaatcatgattgctatatgttccatgtagatgttttcgagaaaaaatgtgttccatgtatattgtctatttataccaacctgctgtggtgattcctctacataaaagtatgtgatttgcttagtttggaggtgcctgagtcttctgtttctgattttccatattatgctttgttatgcgctttaatttctcaagattcatatgcctttttccccttttaggcgtcagattaccttgcagccaccaactaattcat

SEQ ID NO: 13560 - DNA, 858 bp, Oryza sativa
  Intron number 1 from transcript LOC_Os08g41990.1 (locus LO C_Os08g41990) derived from phytozome v7.0 (chr-ID Chr8; po s 26530262 to 26531119 reverse strand)
tggagaagtccgaggagatcttcaacgccgccaaggtgacccgcctcctctctttcctctccttgttgcgtggagatgcgtctcctcgcgcttcgttcaggggggggggggggttactccattacttgcggcatttctgtgactgcgaattgtgagatgacgctcgtttgcgctccattgatgggacctgttcttgggttgaaattggtgggcaagatggcggtgtttcttcgttcatgccagcgatgcgatatgtggggtatagtcgggtggaatttcagttatgttttggatgggaaccatgggctgtgagagttggacaatgtgagcttttggcaaggtcaactgtgttcgtagtccaggttgttagattaagatggacatatatcatagacagctagacactgcatcaatcatttaggtaatattcaagcaaacaaaaactagtttcaaagtacatggtccctagagagtacatctatgaatctatgatgattttaccatcccaatttggatcatgatcttgatgggtgtattggttatcgaaggcacaattgccataattaatagaactgaataatgtaaaattcctatatataaatttccaggcttattatgcacttaaccatccccttagattcatgtttaaaaaaaagggaaaaggccatggtttccactttttactgtgtagactaaaatcggtttatatccttgttagaatgcataccgactgatattaacatccatgctggtgcagcctatatccttattcaacaatttgaattccttttatgtttgatgtcttagtcagagttggatatttgtactgatggatgtttcgcggcattacaggagttg

SEQ ID NO: 13561 - DNA, 1023 bp, Oryza sativa
  Intron number 1 from transcript LOC_Os11g19840.1 (locus LO C_Os11g19840) derived from phytozome v7.0 (chr-ID Chr11; p os 11425389 to 11426411 reverse strand)
ctcaaggtaatttgtaaaattaatgcaaccgttatctttcacccacaaagaaacttgcacatattgtgagccagctagtgctccctccattccataatataatgcacaactattttttaaaaatgttttgtaatattagacatgcatccatacaattaactaataacttatatccactaaattattatttttaaatcatccaccctcaagatctataattttattgggtgcatgcattatatttattagggtaaaataaactaggatgtgataataaattatttcttgatgtttaggttaagtgtgtttatgccttatattttggaatggagtgagtactatgacctattacttcctcaattttcaaattaattataggcccatgcgttataacggtttttctatttagtttagtgataggattcgcactgggtgagttttttttatatactatggttggttcttttatagaaatacgatttttcacagttacatgagggaagaggtttttatgaggaagtggaggggaggacgattccctctttttaagtatagatatatgactatactgatttctagcatgatgtttgaccactttttttatttaaaaatttagtataaatataaaatataagtcatgcttataaagtacctttaatgagaaaaatcaagaaaatttataaatgatacaattttaaaatgagataaacagtcaaacattattttctaaagtcaacaatgttatacatataataacagaggtagtatattcacgatagacttgagaagtaaacaagtaatagttgaaaaataaaaggttcatcttttgttgctatgtatttcaattttatagttcctgcagaagttgtcaacaaaagtttgcgacttcaccataaagaagaacggttaacgactagaactaaaaaaaagaactgtgtaatgcaaattataagtttgtttaacttttttgtggcttcatctatggtagcttgtgcttcaccactggagtgacgaggattgtgt

SEQ ID NO: 13562 - DNA, 591 bp, Oryza sativa
  Intron number 1 from transcript LOC_Os11g11780.1 (locus LO C_Os11g11780) derived from phytozome v7.0 (chr-ID Chr11; p os 6534886 to 6535476)
cagctagcacctctgcagctgcaaagcttctccaggttagtgcattcaaaagctgcttctgttcaaaggctaagaaacattacaccgttctttacttctttaggtatgtccatgtgtgtgtgtgttttgaggaaagctcatcctgactcagtatgtgagaaacccttgtttttatttgaatttgaaagcttgttagtttgaataacagtaatatgaattatgaaacaccagttagcaacaatatatcacaaaagccatactgactactcaatgctagtgcattcaaaagttgtttctgttcaatatctgtgagactaatatttatgaactacgaaacaccagctagcaacaatatcagaaaagccatactgactactgaagcatgaagggtactcagaagcagctttcacataatactgagaaatcatatatttctatgtctcaaacaattgtaatttttttctctgttttcttagctttgtgttattttgcttgtgactctagttttctattattgggttagtgctcaataatcagaaatggaaataccgacacctgagctatcatcacaatttctgaaggaaatcacta

SEQ ID NO: 13563 - DNA, 302 bp, Oryza sativa
  Intron number 3 from transcript LOC_Os11g11780.1 (locus LO C_Os11g11780) derived from phytozome v7.0 (chr-ID Chr11; p os 6536031 to 6536332)
gaagccttgacaaacaccttttcggtatgataatgcaatacctaaatatttccagtcattttccctgtttgcaatgtttacaagatttagatattagcatgatgtagcctactctaggttctactgaagtatacaataagtcaaaaaggtaagaagatcaagctctcactaggttgtgggctcatgaaaattccttgtgttttttggcaattagtaagtaatacgattaatcctaatgttatttgttttccataattgcttcttcaggtgaatcaagtcgacttgattggcacacacgcttc

SEQ ID NO: 13564 - DNA, 831 bp, Oryza sativa
  Intron number 2 from transcript LOC_Os11g02450.1 (locus LO C_Os11g02450) derived from phytozome v7.0 (chr-ID Chr11; p os 733577 to 734407)
cctcgaggtcgacggagctccctggaaggttattggttcgtaatcgtatccactcacaatctcatcttctttcttcctttctgctagtactaaaaacatacctgattcctggttggagtctcccagtggatacagtagctttgttgaacatacctcatgtagccacaaatttcattatttcaaggcacattattatctgcattgcatatataggaccagatggggggacgaaagctgctaccttgatttctttatcacattttaggaagaataacaactcccttttatacaactgcaatccatgttgttcataagcaatgtgacactctagtgctataaaaaccaattattttcttgcttgttacatccactgtttcagaagaattacctcctttcatacctttcagtgtgtacttgagcaaatttgcttctgttggttcgatttttcaaacttcacatatagcttagcttgccacaatatgtgaatgttatttgctttcccaagtattccccgcttttcagatcactcactgctatgtttctttcagttactagaatggaatggtaaagcatactctagtacctataaaatgagctttaagagtttcatttgttacgtttgatctaaataaaattatgtgtttttcaaaaaaattccagacaaatctatatctgtgaaaaaacaaatgttgaaatgtcatagagtattctgacagatgtatataatttcttgccatctattgctcatctattccattttactttagatgctcgatataagaaatatagcatataaaactttctgtcttcatgcaacaacagaatttctcc

SEQ ID NO: 13565 - DNA, 881 bp, Oryza sativa
  Intron number 1 from transcript LOC_Os08g25770.1 (locus LO C_Os08g25770) derived from phytozome v7.0 (chr-ID Chr8; po s 15684819 to 15685699)
ctcatcatcaagtggtactcaacgcttacccctctctctcttcctgcccatcctcccgcaccacggctagccctaatcgatcgatggtttcccttggcgtaggctgatgcattggcatccaaacctcgtagtgacgctgaacagctagatcctcacagaggcgtgtgcgtgcatggtatccatgggaggatccaaggacaggaggcgaaagggaagaagggaggagtgaggataaggaagaaaactgcccggggagagagagaagggacatgtgggcttatgttttattattttccagatcaaattgccaagtaaacaccacgtcaatgctacataagacgaagacctagtcaaatgagctacgtatgtgccacgtcaaccaaaaccggagacaatactaccgagagaacttgtttgtacaggttttgtaagttgagggatggtttatatctagtgtttcggttaaaggacgaaagcagaatggttgacaaattagttggaggacgatcttcagtgtttggttggctgataggcaggctttacatagacaactgtagaaaaagtccagtttacatcctttaatataggctgagtttcatttgcatctctcgactgtaaaaccggatagatcgtcctccaactattaaaatttaaaaccaatgtaaatatagtccttcagcagtgcggagcacggttttgtcgtatgtggtgctaatgtagcgttataaaaaaagaattcgtgggtcccagcagtaagtaaaacgttgatatttttcttactctcatgcctcctccctaataaactgtcagcggcacatcacgtcatacctgacttctaaactgttagtggcacatcacgtcgtatctgactccaggtccgc

SEQ ID NO: 13566 - DNA, 858 bp, Oryza sativa
  Intron number 1 from transcript LOC_Os07g44420.1 (locus LO C_Os07g44420) derived from phytozome v7.0 (chr-ID Chr7; po s 26545673 to 26546530 reverse strand)
gctagtcccttacggtgcctacggatactgtcagcaggagagatatagcgctgtctctgatctcgccggatgcggattcgaggaggaaggctacactgttatcgactacgagtcagaccttcacaccgccatatcgacaacagtttgataggttatcccaaatattgtactagtgtgattatggtgaataagagtaataccggcttcggccaacaggatgttgggttattacctgacaattcaggggcccgaacctgtataaaaatccctgtctccgtctcttttacctcagtctcgcgtatatcatagtaccaacgatccccatactatgcaaataccggaatcgcgacatcaaacatcgacaggctcttatactaccaaatccctttaccaggccctatgttttggaggggttaaagatagggttttgcaggacctgtggaggtcctccattcccttaaaagtcaaaatcttcttctggttaatgttgaagggaagaattcaagctgccagccagctgaagaaaatgaaatgggaaggtagtccaaattgtaaattttgtggggaagtcgaggacgtggaccacatgatgtttagatgtgccattcctaggtttatgtggtgctgttatagagatgctctaggttgggatagtattctcaattctagaggcgaactggtacataaactaaacttgtacaaagaagggtcgcattctatttggcttgcttgcttcgctgcgggcgcttgggctatttggctcatgagaaatgattgggtgttcaatgacaagatgatttcggatgcctctcacttgcctcataaagctatcttatttcttttacagcggagaaaaaa

SEQ ID NO: 13567 - DNA, 894 bp, Oryza sativa
  Intron number 2 from transcript LOC_Os08g34480.1 (locus LO C_Os08g34480) derived from phytozome v7.0 (chr-ID Chr8; po s 21631506 to 21632399 reverse strand)
caggttagttgtctctgacccatatcaccatgctactcactactgtggttttcttttcttttttgtgctgcccaactgatgcagatctgtttggaatatgatgtatttggtgctggaacacttgagttcacgtttgaatagatgttttttcctttttgatcttgaatcatcaattatctgggactgcttttgtattgagtttttcggtagtaattatagcctctggtttgttatcaatttacaggggtgtgcacaccctgctacgtggcatcatatacttttagtgattcaaaactgagttgatgtgttcaggtttagtgattccctcttaggacaatttggaatgggcatactaaggttttttacttttgggaaattgatgttaacatgaagtcaatacttgtgataggaacaattggatctatcagtctgcttgtgagaacagactgtgttctgtatggtctacttctttgattgattgatattttcaatataagtatttgacatagtagttcacttgaagacgaataatacctctgtcaagcaatcaaaatttctagatatttgatatttacattatcttttcattttcgtattattaccattggttaggtccttatctgtcatgtgatagtcttagagctcacctgctattgtatacttcagatcagataccttgatgttcattttccattcatttactgattttggagatctctactgaatattgctagggtttgttttgtttttgcattaagctttattcagtttaaatatgttgtaccttttcaatgaactttggtaatatccttttgtattttgaccatgatgttgatatgataaatcatcttctttaaaggctagcgacaggttcaacataaattctcaacttga

SEQ ID NO: 13568 - DNA, 1002 bp, Oryza sativa; identical to SEQ ID NO: 13194
  Intron number 1 from transcript LOC_Os10g36690.2 (locus LO C_Os10g36690) derived from phytozome v7.0 (chr-ID Chr10; p os 19550396 to 19551397)

SEQ ID NO: 13569 - DNA, 937 bp, Oryza sativa
  Intron number 1 from transcript LOC_Os07g46930.1 (locus LO C_Os07g46930) derived from phytozome v7.0 (chr-ID Chr7; po s 28052888 to 28053824)
tacagcgccattcacctcgttcagaggtactgtgcattctttctcctcactctgtatttcattttagaaataatttggatatgaaaagaggggcttttcatattcatatgtattgagaagaggctaaatgtattcggcggttcattcgaatgcagaccttcatggactctgcccactacacactacactatctcttcttatgtgcctgtcggaaagagtttctatcagttacagtttctcgtggaatctctggctcttccaaacaatatagtttgtcacctaaattctaagaatttgtagttatagaatttagaaaatgaattaaaaaacagaaacttaaaaactcagctttccggccatattttcataagctggctatcaactagcggattcttaaaattttaagctctccaaataacgcctatagctcttcctttatcatgtcgagttaacatatattgcgattaatcatgagatgtatcgctcaccaaatatcgcaatactattttttaagtgcctttgtagtgtagaaaagtctacgtactccatttgttttacaataattcgactattttgggatggtgatggtatataagtcagtggcaggcggtaaggatcattaagaaaaaatactccctccttccctagatgtttgacgccgttgactttttaaaacatgtttaaccattcgtcttattcaaaaacttttgtgaaatatgtaaaactatatgtatacataaaagtatatttaacaataaatcaaataataggaaaagaattaataattacttaaatttttgaataagatgaacggtcaaacattttaaaaaaaagtcaacggcgtttttggggtggaggaaggaatgaagacgagatttttatggatgacgtggtatttgtgctttgtggcaggggcaagaacagagcagggttgacg

SEQ ID NO: 13570 - DNA, 787 bp, Oryza sativa
  Intron number 1 from transcript LOC_Os12g14580.1 (locus LO C_Os12g14580) derived from phytozome v7.0 (chr-ID Chr12; p os 8325854 to 8326640)
tcgcctatcgaggtatgtacgtagcagctagcttcgatataattgatggatgatatccccgagcccaagctcaggtgtaacttcggtattagcctatgtatgtccaaccttagtgtacaaaacttgatttattttgaaagggagagggtagtatcttctttgacgtatgggccggtccacctttgaaaccacatgaatgcaaccgcgtgcgtggtgacggttttttgtttaggtccgacaaagatgaccaccatcgatgacggctctaacacatatgagtttccacatcgctgaccactaaaccgctaccagaccgtctgacatagatgagggttcccgccagacagaaatgacttgattcgcactagcgcactcgggatgaagcggtgcaccactttgttttagggagttcaaaagacttccagcttagtatacgtacgttgtgctaggttaattatagcttgcatttcattttttttctttcctttcctattccctgctttattttttcagtgatgatgatatattttgttcaatacttctttatttatgagcaattctacggttcttaggaaggtaccatgagatagcaaaatttacacttaaatttcggtacctcacagtacctagataccatgagttaccaaatttacaatagaaaaaatggtatttcatggtatctcctcaaggactttaaaattgctctttatttattcatttcgatatttcacttaattggaacctcgccttataactgaatatatatatgctgcacttggcagtctgg

SEQ ID NO: 13571 - DNA, 576 bp, Oryza sativa
  Intron number 1 from transcript LOC_Os08g39280.1 (locus LO C_Os08g39280) derived from phytozome v7.0 (chr-ID Chr8; po s 24822806 to 24823381 reverse strand)
ctgtacgctgtcagctgtaatgtgcgtatgtacatggttgcttgcttgtgcattccgccatttgattcggcccatatggttggatttcttttctaaatgaaaatatatacattaaccaaataattacgggaaattctgaaagaaaagatgcccttgttccttattaaaaaaaagaaagaaagatcgcacaactacaaaacccctaatagggacacccttatatgtatcggttcatttaaaaccgacacatatgaagcttttcccgtctatccgacatctcacataaggctaaaatttaaaaccagcacatataagtatctatatgtgccggttcgtattaaaaacctgtatatataaggttgtcatattatatgtgttgggttttttttaaaaaaaaagcccgaaacattaaatcaccaagctgagctaagccatggtccgttcgccctgacttatctatcacccacctcatttccggttttggcatctcctcgcttttctctccacactctctctcagctcttcgctcttttctcctcagcttctcctcgcttttctctaccgagtcatcagcaa

SEQ ID NO: 13572 - DNA, 727 bp, Oryza sativa
  Intron number 1 from transcript LOC_Os07g35520.1 (locus LO C_Os07g35520) derived from phytozome v7.0 (chr-ID Chr7; po s 21246054 to 21246780 reverse strand)
caccgcattgctgctgctctccatctcccgtacaggtaaccatggcaaacgtagaaacgctttcgattattttggactagtagtattatttagatatgcttaagtatgtgcagctttgtaccaacagaaccggtgtttcttagctttccactgcactgtcagtggcagagcgaccgctcggctagcccgggcagtccggctcgccggcgaaaactccattaaattttaatattgatggataaatcaatgagaaaataacaaatactagttaggccctctttaattgaaagaaaattcataggaattttagaggattttattcttataggaatttttcctacaaagccttttgaatcaaagaaatgaaccctatgaaatcctatgaaattcctattaaatacctcttcccatacaagttttggaggaattttaataagagatagaacctcatggaagaaatcctttgagtctttatctctccttaaattcctgtgtttttcctgtggtccaatcaaacagtcattccgtttttcctgtgttttgcaatcctctgttttacactttcattcctgtcagaatcctatgtttttcttattcctccgttttttcatttctgtgattcaaaggggcacttatattgaagtttgcctgggctcaaaaatctatctttctgactccaccactgactgcagaggctggcgaggtgggcgtgtgctacgggagggac

SEQ ID NO: 13573 - DNA, 976 bp, Oryza sativa
  Intron number 2 from transcript LOC_Os07g31850.1 (locus LO C_Os07g31850) derived from phytozome v7.0 (chr-ID Chr7; po s 18928416 to 18929391 reverse strand)
gaatatcacagggacatataaaggtaacttctgggtcatagttacacttacacactcgatgttctacctgcttctttagctgaacatttgtatcactacagcatgtgctatagtgatatgttgtctttcgcttgccatacattttattgccgctgcatgtgtttggatgatctactgttgtaggtattccaggaattaagtatgtgctatttgctcttggaatattatttgaaacatgggaactgccctctattccctggagttcagtactgtacctgcattttaggtgctggaatgatttaattttagtgctaccaatttttctttcgaagattataagttaatgatatgctattcaaaccatatgatataatttgatcatgccttatcttctttgcacttacttcttttgtttcatgatattccttgtgcctaatattaattcactgctgttgcttgcttgtcataatgcttagagctttcttggatcttaggttaggacgttcagccccaaattgaaatgtttgatactttgattttcctgctgtgtatctagttagtaacaggagtcttttaacaatttgtggtagattttctattatgggtccatatctatgctttaagatagttactgtggccaaaaagtggaataacatatgtgcttttgaaaatccacctcgtcactgcttgccaatcctagcaactgtggtctttccttcctgtccaaacagttgtatcatacaccatgtctatacttgtgtgcgtttgagtgttacacacattgttctcttaaatataattgtaaatataaataaagtgcacatatgacgcctttttttaaaaaaaaaaatagttaccttatgttgtgctagtgctatgcataggataccgttgcttcattacagtgttaatgtgcttcatgaaataacatcaccaatttgttgttcaggaagttggaactttgctggttccacaa

SEQ ID NO: 13574 - DNA, 925 bp, Oryza sativa
  Intron number 1 from transcript LOC_Os07g36600.1 (locus LO C_Os07g36600) derived from phytozome v7.0 (chr-ID Chr7; po s 21895813 to 21896737 reverse strand)
acgccactgaagagcacaagggtaattgatttaccgtctggtgtgcacttgtgttgctgactctatatgtgttgtttcctactttgatttgctatacaaagtgtaatctgaataatcaaatagtgggtatggataaaaaaacaaacgaacaatcaactacacctgcaaattatcgttattcgtgcaaaaataacgagaaaaatgagttgtaagataatgtaaggttgtgtagtacaacaatgaagcaatgttgacactcactgcagagccctatgttttggtttagttccccacaaccccaactccacaacatacataaaaccccttgacattttaggagttgctctatgtagtcacagggaggtgcaataatatggtggggatgtggcttttaagtgtagggatatgctgtaacatactgcatttcctttctattctcaaaattacatgatctagtctattgttcatgacatctttatgtgcaaaagcgatttaactatacgattttgatcttgtcgtgtgatttagttttttggccaatcagttatcagtcaacaacagtgttatctatatatatcctatatagttggaaccaaaatctcaacatgcattgagccacatcatcctaaacatcctgaccgttggatcatctgttggagagctaaaacatattagctgatatgaaactaaagtatttaaatttagctatatttacatgcatttcatcgtcgtaattatggtacattcatgcagcttcaattttagttggaagactattgatctccccgccacataacaagagttaaagccctatacttgtttttttttcatcccttctttagcttgcatatcttttcaaagccgcttatccatacatagtcatcctgcagcaacgtgcgtggtaccatcttgtaaataaaggata

SEQ ID NO: 13575 - DNA, 805 bp, Oryza sativa
  Intron number 1 from transcript LOC_Os09g36244.1 (locus LO C_Os09g36244) derived from phytozome v7.0 (chr-ID Chr9; po s 20906385 to 20907189)
tgcaggttaggagatattgtttgacttcaactaaggtacactatcctgtttcaagaaaaaaaaaagctattgcccttaattaagcatgtagcgctattgatattgagttctagcactgttttggtagtacattttgtatgtagattctgaatttctgatgcttgttagttaaaaccatactctgttctagtagtaattttcaaatacatttactctgaatcgagtagatcatttactttttcttatgcctcttcaattgtgctttcctgtagctgcaacggcagcacccagattctgcattcgcagatcttataatctgccaaagcccaaagctttgatgccaggattcgtggttttgtagaaatgtgcagtaaaaaccgaagtcgtggttttttcggctgccgaatcaaagcgtaagctgtggattggttgtagtgcgggatggtactttctggttctgctgattcagaaaagtgaaacatatggtttgccttaaaatagacgctagtaaatggaaagaacaactgcctttcagtcccaacttcttgaggagacctgcacctttacttatgtggtatgtgtcagatcatgaaggttttaattggaagggatgagatcgaggtgtgttttatcaagttatgctgtggaaatgggtattagaatctggtgttaacattcatatacaagtaacatcgtgcgaaattatactgtaatctgtattatgtagtgcaagaatcgcaagtaatcacactggcagttggctttaacattagcctttttatcctttgcaggttactcagacacg

SEQ ID NO: 13576 - DNA, 736 bp, Oryza sativa
  Intron number 1 from transcript LOC_Os08g17580.1 (locus LO C_Os08g17580) derived from phytozome v7.0 (chr-ID Chr8; po s 10752758 to 10753493 reverse strand)
cctgtaggctgcagcctgctgcagtgctgctcgaggtaattttctccatcttttcttttcatagataaaaaattattagctctcgtactacttaataattgatgattattttttcaacacaacattaatcatgtcgtcgagaaaatatgcatccagtagcgaaaaaaggaaacagaaaaagcatttgagatgttcaagcatgttagagatgtggattgttatcctaatctctccattgctcatcaaaatatttctatttgaagttttaaaatgttatatatagataaatttatcacatcgaatattaaatgttgtgtttttataagactataaatatatatatatatatattagtttatgtgtatatatatataggggcctctatataagttttcgccctagggcctcgaaaacccaggaccggccttgctgcttagctgcccgccacaattatatattcatgttgctagcacttaagcatatactatgattgatcgtttattgattattctattgtcattctttccattgctaacttgatgttgcattgattgcatatacaagtaacattcgataattttaatccgttttttgaaccgagtttgcacctattccacacaatttctgatatctgaaacaatctgctatgtatcaacaccatctgtatccgttctgaatacgcttaaacaaatatgctgtaggaccactatccattttcacctgtaggaattgtggg

SEQ ID NO: 13577 - DNA, 1035 bp, Oryza sativa
  Intron number 1 from transcript LOC_Os11g29990.1 (locus LO C_Os11g29990) derived from phytozome v7.0 (chr-ID Chr11; p os 16970806 to 16971840 reverse strand)
acgcctgcaacggtagtaagcgcaagcgccatcaggtaattaattaattaaagtcacaacaaactgcatgttatccccagttttcaaagaacataatcccactcatgcagtacttttggtatccgattggggtggtgaaaattgataggatagtatatatacgttctgatctaaaatcctgttggagtatggatatggtatgtgtcaattttgaaatccggctgatacaaatggtacggtgtggatttggatttggtattgcaaaattccagctaataatccaacatcttcaatgcaccttgtcattagcccagctgaacggtctaatccatctattaatctagctctgacctctaaggattgaaattttggttcgaaattttccaaaaatttatgatttacgaactttattttgcctgaagttatttgaaatcacctcaccataccaacttaattatcggtctcttatatatgcgcctcgatcttgtgccagccaccgtcaccaacaccggatggcagagaagattatgtgctactgctgtatccctttgtgccaagcaacaaccaacacgccggctgcctaacacctacaacttgaccaccagccccacacgaatgactcagcccccctccccccaacgtgcacacccacacatatatacgatgaccgacgaggccccacattacaacatatacacataacatatgaattcaacggttagagaatatgtggtaggatttgatatgacctctgagtccactctattttcacttctattgccttatctgcgaaagttacgaatacaatcattaattccattacctagattggaaagtgtggtaattgacatatttttttatcagattagtgatgcacatttgaatagtaaaaattgattaatattatctgttatatgaccagaaatttttgttttctatttttggtgaagacgttgaagcatatttctagaaatgaaatatctgatgtagattgaaaaattaagctgtaattcctttttcttccctgcaaggtca

SEQ ID NO: 13578 - DNA, 884 bp, Oryza sativa
  Intron number 1 from transcript LOC_Os09g39450.1 (locus LO C_Os09g39450) derived from phytozome v7.0 (chr-ID Chr9; po s 22680979 to 22681862)
caacaatctcgacggtgacttgggcaggcgagcatgagatggctatagttgagctcgggggaaaaggtgatagagaaaaggagattagagggcatcaaggtcatttccaacctgtcttgctgacagcgaagagcctaagaatggcaaaaccgaaaacaacctagtgggtctggatggcaaataatcaaatatgatgaagagaatgacatttgggaatgcacacttaaagaggatggcaaatagtttaaaaaaaaccccaactttcagaggggggggggttgtgaataatttttggttggtttgatcttttagattatataggggctgttcgacaggctgactgcgagagctgcagctgcgcacagtgagtgcggcactgttcgtgccggctacggcgtagccgcagccctggcatccaaacaggccctaggttttttttatttagagtttatatagttttcacaaggtcttcaacaagatttaggataagcttgtctactgggttgctgatgatccaattagccgtgccaattctatggtttggggcactagtttgtttggtgataccggtttgttgatatttagggtgatgaagatggtggccgatactcgttcctagtattttttttggcgtgcgtcggagttgtttagtgttatacataacaagaagaagattataatttattttttatttaatataatctgccttgcctagaaaaagaaaataatcactacactagttagagcatgtatggtgtagagaatctactacttagttgaggggagggcaaaaccaaatcctgagcaggaagttaagtaaggctgaatcattccttccttcgcatgcaggcccaaaatatcccgtccgtttgctccatcagcac

SEQ ID NO: 13579 - DNA, 729 bp, Oryza sativa
  Intron number 2 from transcript LOC_Os08g06400.1 (locus LO C_Os08g06400) derived from phytozome v7.0 (chr-ID Chr8; po s 3588398 to 3589126 reverse strand)
aggaagaggaaagaagaaatcagtaggagagtgagcatagaggtttattcacataaccacacatctctttcttctttttttccatcctgattttttgtctgtccagtgtccaaattggtcactagcaacaaaacccttgatttccatgcctttcttatttgttgtatatcaagctagttcattatcgtagccaagattgtagaacaaatgagtgttgccgttttttgagcccacctttttgtctgaccaatatggcgtgactttaaactccaaaaagtcttatttttcaactacatacgacgtacatgctttccgaactgcaaaatagcgtgtgtttttttgcaaatatatatatatatatatatatatatatgaaagttgcttaaaaaatcatattaatcaaaattttaagttttctgctcctctcaaacacagactaaaaatatgttgcctcaagtgcatctctctccttttttttttccacaatcaacatttttgttgtttaattctggtcagctaggagagtatttggagtgccatttgggaaccttaactagcgaagatgttattaccattgagaactgtagcaaacagagagcttctgaattctccacaactattgcttagtaatttctccaaagttttctattcctttttgtaaattcgcatggtttcttcattttgtattttgtaggtcgccagaatctcgacatataaagagaagatcaa

SEQ ID NO: 13580 - DNA, 1027 bp, Oryza sativa
  Intron number 1 from transcript LOC_Os09g31980.1 (locus LO C_Os09g31980) derived from phytozome v7.0 (chr-ID Chr9; po s 19082793 to 19083819 reverse strand)
caagcaccaacaccttctcttcttcgtcaaaccaggtacacaatgcaaaagtataaaagaaaagataatgtaattaatgctccctccatttttttaatacatgacactgtcaatttttagacatttgaccatttgtaatgataaaacaactcgtagcaaaataaataattacataattttttttaatataatgaatggtgaaacttgtacctaaaagtcaacggtgtaatatattaaaagacgaatgtagtatgtactaacaagcatatataggataaggtgattgcgagtgaaagattttgaaaagcaggtgataagtattcagctggttatgcggattttttttttaattccagagtggagatgtagtgatagaattgtttaccgaataatattcttttatccaatgtcagttatttttttaagattaagtcattgttttatttggtctagttgtcatggtcagctcaaaggttacggattttgctacactttttgttgaaacaatggatgagattccccattatctaaaataagtattcatttggtgagaattagaacaaagttggtgtcacactttaattagaatagtagttcgtgttttagattttttttttatccaccgagtcttagaatttgaagtcagactctaaactgattgagtgagataaatattttaggaatagctgccagataagaaaattttaaattttgagcgactgataattagtcaaactgcgaagaaaataactgtggtaacaccctgggagaatatttctccgcttgtctattttggttctcctctctaccaaactctatttttttttctccaacgttagaagtgttaggatgattcctacgctaacgcactactaataagaaaagtgtattcatcactcaaaaatacgagattggtttttttttaacagatggagtatatgtttgatataggtaagaagaattccaagttgatcgatccgattgtttttcaggtgggttcctgcgctgcaagtgcgacatctgcggc

SEQ ID NO: 13581 - DNA, 672 bp, Oryza sativa
  Intron number 4 from transcript LOC_Os12g03720.2 (locus LO C_Os12g03720) derived from phytozome v7.0 (chr-ID Chr12; p os 1501784 to 1502455 reverse strand)
gcaaacggggcagcacactgatactcggtgtcaatgtaagtgcatcctggtttgtcttaaactatcagctaggttctaatcaagcatagtaaaacagtgatttttattttgtgtaagaattatgtgttatgctcttgagctacatcttttgctgttcaagttgactttattatgtagtactagacctaacatcaaaagttaactttaactctgttgtctcttcaccgttcttatctccatctgcttcaaacatgtattaggtaaaagtgtcaaactagaaaacatgaagtgcattttctcacaaatgttggcttgtcaaaaggtgctaagaactaccatttttttcttcccatagagtggaacctgcgataaaatccacactcaatagagtaactacgaactacttgctctggttaactgccacatgttttgttctataaaaatgcaaacgtgagaaactgtgcagtagattgcttgcagattaaataattttcttttatggtgatgttggtttggttagaagttatcttttgtgtaatcatttttttacacatatttatagatactataaatattctgcttccctttgacttggaaacattttttttatatttgtaactgttgtctctattttcaggaattaagtggccaaaatagtgggaaaccatttca

SEQ ID NO: 13582 - DNA, 536 bp, Oryza sativa
  Intron number 1 from transcript LOC_Os12g03720.2 (locus LO C_Os12g03720) derived from phytozome v7.0 (chr-ID Chr12; p os 1503721 to 1504256 reverse strand)
caagatcgagaacctcgtacgatccgtctactccggtcagtgccttttccctcctgattatgctgaaaaatgggttgaattttgggttcttgggatggatttttgcacgatttccatgtgctatgtggtctgacttggctgtatcacttggtaaaagctttggattttgattgggatccatatcacattttggggaatatcattatgtcgtttagcgattttgggtttagttatccttgcgagggaaattcttctgttcgcactttgcatttttgggattggcatagcatagctcccaaaattctggatctcctcagaaaaggtagaatttgacccattcggatcaactctaaatcttcttgggtttatggcattttcggtgatttattcaatttaccacttggagagctgatttcctttctctctggatttcctgacgatttataccgtatacaattagtctcggctacaattttggtgctctcttgtactctatcttttgtcatgttggatgtttgtgtatttttcagaggttg

SEQ ID NO: 13583 - DNA, 951 bp, Oryza sativa
  Intron number 2 from transcript LOC_Os09g32860.2 (locus LO C_Os09g32860) derived from phytozome v7.0 (chr-ID Chr9; po s 19589725 to 19590675)
aaagaacaagatattcagtgcctagccttccagaggtatggtacctaatgctgataagaaatacttatattagaagcaaagtgggtcactatgattctatgactgctctaagtagtctctaactacacactggtggtcatatggtggctagatcaaaaggattgagatcctctaccttcaaactcaaaggtaccatgtctttgtcactgacagatgggtccatggttcattgggcctacatgttagtgacaaaggcacgtgcctttgaagttagaggagcctgatccagatttatgaacagatatttatagctgcaatcttctacaattctgcatgagggcaccttttctctgttctagctgttgcacctttatcactcaagcagaaaattgtttgtgatggcgtcaccttaataatcttgttaaggcagttcactttctaaaggttcttcctcacttatcagcgggttcctgtacttcttttatgtgattactctggtctcgaccagtttcctgatgatcaatgtttatgtttaccagaacccccaatgtgcgatttgtccttaagatacatgtttatttttttcttcattacctttgactaatttataggatgatattgtagggagaaaagcatcatttcatacataacattgttgactaccgctgcatacttcaagcaagaataggtttcatactatgtgatcataattagtcactggctacaatctgctttatctttttcccgatagccactaagaaaactttgaaagggaaaaggagaaaaatgaaaatgtgccgttcagtttgcgtaccacaaatcccaaagagctattccttataagctactaatagtactgctttcccttccaattgaaccttcacaattcttttaaaaaaacttttatccttgctagtgcttgtaggaaatctggtgccatatacactccct

SEQ ID NO: 13584 - DNA, 713 bp, Oryza sativa
  Intron number 1 from transcript LOC_Os12g18140.1 (locus LO C_Os12g18140) derived from phytozome v7.0 (chr-ID Chr12; p os 10456768 to 10457480)
cctcgacaacggagaatccgtcgtacattaacctgcaagctaatttaatcccctccaccttcgatttattctggcattctaccttcgatttccattggctcctctcgtgttttccttttggtttgtttcgcctaaagtagacaagatgatgatgctcaatttttggcagctacaccgcttagccctatatttcatccctcacattctatcatgtatgatgatgagttgttctgtttagcctcaaatgaatcaattttgatttttacgttaagcctttggggagttcattcgtcgcacaatgtgcatatgcaaccaaaaggccactccataagtttgtcgagtttggctcagcttgttaagtttaggtcctctttggtagtttggtttgaggaatcaaaccatctaggatcagtgatccatcatgggataatcccacaaaatttgaggaatgactgcattcttcatccaatagcttagcatgtggaggtggtgctggacaaacctgttccattcctcaatccaaactaactcatcatgtatcaaatgatgagttcatcatcccgctcgtgaaaccaaacaggccatttattcatctgtctggcatgccacttaagttattttatggtttttcaatcagcattgacccctttatacttttgttttcatgggagtttccaggtctcagctcacacatcagctggaaagacagtggt

SEQ ID NO: 13585 - DNA, 523 bp, Oryza sativa
  Intron number 5 from transcript LOC_Os12g18140.1 (locus LO C_Os12g18140) derived from phytozome v7.0 (chr-ID Chr12; p os 10458575 to 10459097)
ataagaagcttccccaggtaagttgttttatatggctaagttgattcagataggttttcaaaaagacaggacgtttgaactcaagctactagcacacaggatatgtattgcctgtagctattatgcacttcatttgtatatgtacagtcttgtggaaactatttttcaaacaatcaaatgatacatcagtcatctttcatttatacccatacaataggttttctgggcctcttctttttcttaacaaagtttcctgtttcttcaaagtttgaactttaaagcacatatgtgttggtggaagactgctatcgacatagtaattaataaggttgtaccagtaccacgtcacaagatactctgataccgtgctataccagcatcaacagactaattacctactagtacagggaccattaattggtccataccttcaaccggtgcttgtattttatctttcatttagttcctttgataactgagcgattgggataattgagccatggggttttcacaggtttcaaac

SEQ ID NO: 13586 - DNA, 967 bp, Oryza sativa
  Intron number 1 from transcript LOC_Os08g03620.1 (locus LO C_Os08g03620) derived from phytozome v7.0 (chr-ID Chr8; po s 1712800 to 1713766 reverse strand)
tggattcgccctacgtgcgggcgaagcaggctcaggtaattggaattcggaaaccatcatgtgcgatgcaatttcgtttactctggagagaggttgcaaattaggttgctgaagtatgctcaatatggtgactgtgtgtactatattaatttcaataatgagtagtttgtgagggagaaggaagggcaaaagcattttgtggttgttttagttacagtattttccattgtttcatgatatgtttgaattgaatttaggatatcctgggggcaaaaacttcacaaaaagcaatgggatggcatcgttttggtgtgaagcttttcttgctgattagctttttttcatagtttctgctttctagaactctgtaatctgaatttgtttccagtaatggaaaggggaagctctgcttctctgtcccccctcaacccacaaaaaaaaaaaacacttttaattgaaccagaagagagaatatgaaggtaatttccatgatatagataaaactacttctatgtttctttaacaaaaccagtattagagtaaaatcgtaaagcgatatagaaattgtgttctcatgactaggctcccttgttaccagaaatctattatactaaaagactgatagaccatctcaaaaaagattgaatagacaccagccacaccacctgggcaagttttgatggtgtgttgccactaacgcatgctattctaactagtaactgtagtgggtactaatttttcccttaattgttgcttcaacatattcatgctaaatcattcagtacatgttacttgcttttttgcaaagtgacagcgtttctttttctacagctctttcagttttgtgaacaaaaatgcatgtaataacctgaatctagaaattttcataagctagatctgaggtttttgttttcttgtcttgttttctgcaggtgattgaaaaggacccaaacaaggcagttccatt

SEQ ID NO: 13587 - DNA, 638 bp, Oryza sativa
  Intron number 1 from transcript LOC_Os08g21240.1 (locus LO C_Os08g21240) derived from phytozome v7.0 (chr-ID Chr8; po s 12682636 to 12683273 reverse strand)
tcgcgacgacgtgctccggcgaggtaatgcaggtcctaaggccggacatgacgacacatagaggaatggtggcgtgccacggcctcacgaacaacacctccatgacttagcaggctcgacgttggcatgtggatgccgaccaacagagctccagcattcccatctcgtcgccatctcatgcatgcatgaactgaaacaagattaaaatgtaatgttagattaaaatgccatcattcacataatgatttaatttattccatgagctccgttttaacccattcaaattgcagtacattcgttaaaatgtgaagaatctattaaaattggtttcttttgctgtttcagtagctttttatcttgtatttattgtgtgccttgtttgtcgtttagactccggagttccgacgctccagcttattttaaagtggtcgctgaggttccgtcagctcaagagcaaggcaagtcatatggatatcattgatcatattgagcctatttgcaaaatctttgcttttctcttaaaattgcattattttataatgtcacgtgggatggaatctacccatactcagcccttttgaataccttgattcattgatagcctgggataataacctgactagatgattggttcagga

SEQ ID NO: 13588 - DNA, 763 bp, Oryza sativa
  Intron number 1 from transcript LOC_Os08g18920.1 (locus LO C_Os08g18920) derived from phytozome v7.0 (chr-ID Chr8; po s 11276898 to 11277660 reverse strand)
tggcgtctcctcctgcaggtgagcatacacttctctttttttcactcgtttcgagatgaaaaatgctttgcctttgtgaccgtgccgtgcggcccaaatgcaggttctttctgcatatcctttcacgaatttccatgtaattgccttctcttttttttttgagcgaccattcgatatgtggaagaactgctggctttccttttctgtcggcttggtgctgatgttttcaactagtactaatttggttatttggtatggcattttggagttctggattgcaagaagcccctcctttctctttgcttcctctgtgaagttaacttctgacctgttcatcaattgtggctcaatttccttgggtaggacatggattaagcttctctgtgcgcaccattggagtgtccatcagtttgcatccacggcatttgggtgcaaatgagaagcttgtcctctccgtttgatttgtttcatgccgtggcatagctctggcagcttgaaatgaggaaactttagctgttctgccatttttgttcagattttcttagctttttctcgcattctgttgtgttgtttggtcaacgtccaggtctccattattacgaaaacggaatagatcgtgaatcttagctgcagacgtgccaattccatttatgccagtgccttacacttgtttctcgatcaacattgaagttgtcctttatgaaaaatttctgttgtgcattttgcagtgcaaactgagggtggcaaccattaccaaaaggag

SEQ ID NO: 13589 - DNA, 644 bp, Oryza sativa
  Intron number 1 from transcript LOC_Os08g10410.1 (locus LO C_Os08g10410) derived from phytozome v7.0 (chr-ID Chr8; po s 6113842 to 6114485 reverse strand)
ccgccgacctcggcttccccgcccctcccgcgcaggtggatcccgactcccgaatccccttcctcgcctcgctgattcgcctcttcgcgcgaatcctcgacctgttctggtttccggtttccgattgcggtttcggtagatccagatctgctcggttaggtttgcagcgcgtttcgttggaggtgattgtagtagggtttggttccttgcgattgtgatgcagtcgagaaatgtaggttttgagtctagcattgttggtaagattgagctctgtcactgcagttccgaatgatttgggcgggtttaagaatttaattccgagaatttgggtgggattggttagccttacgataatcacctgcggaatctgccccaaactttggtgaacataagctacttgatctcatgaaccattgcttgctttgtcataattatgaaaaatttctatgctggcgtgtgtatattttcattatgattgtttaatttcctagaactggcaacttgcagggatgatcattaaaggatttcgttcatttctaaagaatatgtttcttgcaagaaaaaaaaaatcatctgacatgtattaccattccttgtgatggcttatttatggcaggaggatcagggcagctcagacaaaagcg

SEQ ID NO: 13590 - DNA, 888 bp, Oryza sativa
  Intron number 3 from transcript LOC_Os12g15510.1 (locus LO C_Os12g15510) derived from phytozome v7.0 (chr-ID Chr12; p os 8854220 to 8855107)
agggaggtaaaatggacttattccaataccaaataattttggagcaacgttggcatccagggaccagggctgggccacacgcgcagaacaccacggaccatcacctgccacagggcccacaacggcacaacctcgtagggccgtagggctgggctgcagcatggcccgtcttgcggcccaacgccatcgggccgctgcgcaccgatccccgatccagacggacccaacgatgtcattgtaaatggcatttttacatgatcgctgatgttctctctttatgctattgtgctatggaaatggaaggaaatggtagttcttgtggagctattgtttaagaaagataggaaaacgcttcagatcggtcgtccgggcggaaccaaaacatcggacaaacttgtaagatgctgattccagaaatgcttataattagccgtctgatgaaaatttaaccacatcatcagcgttagttgtgcggcatgacgtcatggacccatgaccatacagtctgaagaagcagtcggccactcatttaaatcccaaaattcaaatgattttgtctattcaactattcatccgatctatagtctaattacacggttggatttattacgattatatctttataacaagatctcacttgataatgttttgatgggtttttagtttgttgcagtcttaaatgttgcacgtagtgttaattagatgttgcaataagtatttcatggtgttcactttgtaatttgtaaatgttgcacatgttggtgttttgaatgtttcagcaatattttttatttttcaacaactataccttgatgattgatgcatgctataacatagaacttaatgtttcgtctaattgttatcatggttgcagacaatatcttttaa

SEQ ID NO: 13591 - DNA, 489 bp, Oryza sativa
  Intron number 4 from transcript LOC_Os10g07350.1 (locus LO C_Os10g07350) derived from phytozome v7.0 (chr-ID Chr10; p os 3873872 to 3874360)
atccctcaaaatatcccaaatcactgttcacccttgtaagttagtgcctatagctacacactatgaacttcactaacttaactgcccttgggagtggtagtcctgtcctgtctagtattctccaggacaaaaaaaaaaaaaaacaacaacaacaactccagcaacaatctatttccatgtcaatttttagtaaatagtaactgaattatatgaatatgaataaacaggaactgcatttagacttgtaatcttggatctgtttagaattttatattaacattttcttatctgggaacttaattttcttttgaggctggccttgaatgtgttgctaggaacctgagccacttcctcatttgttttcttcaccttctaacgatgcaagttgtcttgaaaaaagatcggaatgatcatgatactaaccatcattatttgattgcttttgtgctattttagtggcactgtggcaggacaacgttaacagtgtaa

SEQ ID NO: 13592 - DNA, 869 bp, Oryza sativa
  Intron number 2 from transcript LOC_Os11g18880.1 (locus LO C_Os11g18880) derived from phytozome v7.0 (chr-ID Chr11; p os 10739475 to 10740343 reverse strand)
aagggataacaaactctttgtagtgtacatatcaggtcagcttgctaatcctagcagctcgttgttatgctatctaccttactaattgtctgatgatatccatgatttatgctgcaaaagtcaaatataggaggcaaacattttattttatttggaacaaaattagtgatgcacaatcagacagatattataacctcaggttgaaattagtcatgctaattacttttctgttcagttattctctagatcagccaaatattaattttctcacgagacttgtttattctgattcaatggggaaattactggaacactaataatttctcttgttaacttggaattgatttgcactgaatctagtacatgcccaatttgcaacaacataacaaaaattctttgcatgcactctttttcaaaaaaaaaaaccagaaatttaaattcaaatttcaaatatgtgaaatttgtctggtttagtgagttctgatcttagacatcagtgaagtttgggaaatccattaacccctgaccaggaggtaaatcacattctgtagaaacaaatctaatcctttttcttaaaggatagcatgagcatgtctcctatctggaggggcttctaacgttgtatctagaggcaaatgaaagtaaaacctattgacagtatgcaattcaactaaactacttacttttctaccaaaataattttctgttggcgcatgctgcaatatgcagtacattatccccttatgcaacacaaatgtgcattatagcacattgttcaatacctcttatgttgtaattgacaatatgcagtacattgatcagtccaggatattgacagaacatcatatattgctgcatttcaggtgaag

SEQ ID NO: 13593 - DNA, 972 bp, Oryza sativa
  Intron number 1 from transcript LOC_Os11g40510.2 (locus LO C_Os11g40510) derived from phytozome v7.0 (chr-ID Chr11; p os 23708170 to 23709141 reverse strand)
cagcaggcgctgctcatgcagcagcagcaggctgcggcggtggcggcggcggcgcagcagcagcaggcgcccttgttccccccgcaccacccgcacccgggcctcctcgcggcgccgcaggtggcccaatctctctccctctctctctccttccgtttcgatcagcggtcagggtttggtggatttttactgtgcggtcgagggtttcgtttttggggatttcggtagcacgattcggtaaatttcatgttgtagtgtttgaggccagtgggattgattactattgagagtgaggatttgactgtttcgcggttgggattttgtcagatactctagtttttttcttttgattttgtagtagtctctctgacttgtcgcatgtattggggaaaattatttttttcccgtagggtttgtggggatagggtttattgttcaatttgtcgtctttgggaacctgttttggttgaaatttcagatctttatgtattattagacccaacaagtacctatagtacacgaattatagttctctgtgcttgtgtttaagctttcatatttattaactttgaatttgtcagattgtactgcgaactagtataaatgagttccgttgaaggtcagtggaaactagtctggtgattgctagatcagtcgctattaaaggatgtggtttaccgtttacgtttaggctgcatctgatctttaacaaggtgtacttctttggggcaagtggtaaatggggaacatacttgaacacaccataattatgctcgaattccttttataacctggatgttatttgcatacattattgcagttacagtgacttgtatgcttttgctcctttatttcttcttctatctccttgaattattttcattataaaatatttaagtgcaccattttttttgacactaatattattttctggcagatagagcccattgttagtggcaacctgcctcctgg

SEQ ID NO: 13594 - DNA, 823 bp, Oryza sativa
  Intron number 1 from transcript LOC_Os09g36700.1 (locus LO C_Os09g36700) derived from phytozome v7.0 (chr-ID Chr9; po s 21166188 to 21167010 reverse strand)
acaaaatcttctaccagattactttcgtatggatgcacagattaattaagccctgtagctatttgtagatgatcgatttaaatacgtgcaaactctgaactcacctgttatatttgagttttattttcgtttctattttatagagagactaacatttgcaggcaggattgttaattgattcatgaccccccagctcagttttcagtcgcatgggtaaagctgttaattaattaaattaactgaccgttctctaaatatgcaaagggagaaatataaccgtcgagatttatcatcaccagcatgtatcagatttttaatagcagaagaggaaataacacatctgattcgcgtaaaaaaaaacacatctgatgatctacacctattgcatttttaaatctgaattctgaaacgtggcgaacaaagctcgaggacgacagatgtggacactgcaaataaactaaggattttattttgaaaaaaaagaggaaaaacgcacgttttgcttaacatggaccaccggttttaatttgtcgagacacgaactgatcatccatgcaaaatttgtgataacccatactgaccttgtcgacggcgtgcagctaaccatatggccacccatcacctcatgaaagctaccacctaataattcgtccgtatttgctgaaacttgattgttcttgcagcatcttttattgttcttgcttgttcatggtagtagcaattaaaacactcactagatctggcaacaataataacgtgattaattaaggatatggatgcacatgtagtggccgggagcgtactgcgcgcagacgaaggccgg

SEQ ID NO: 13595 - DNA, 772 bp, Oryza sativa
  Intron number 1 from transcript LOC_Os07g42490.2 (locus LO C_Os07g42490) derived from phytozome v7.0 (chr-ID Chr7; po s 25428832 to 25429603)
gttgatctctgaattacagtagggacttttctgagatctctggattagtggggggtgctaaatttttttctggttgcatcagcttgggtttctggtattggtgtgggttcttgctctgaattttggttcagaatgtcgatttgtttgtgtttgttctctgaagttgagagtagctatgatccatccagcacagaactgcaggtcctgcctgccggctgcatatacaggacatgccattttgcaagctctgggcttatggtttctcttttggagttcttcttcttgcatgatctgtgttctctaacaaaggaagcaagatttagcaactttattcagagacaagaaaaggatctggcaaccttttgtttctgttttatcctactcgtaaagattgttatttaagcaaaaatttcccaaaagttttaaatataatttccatgatgtgccactctcatgtccttgaacctggcactcattatgggctcctcagaagtgctgtagctaatgtcactaatcttttgtatctttgttcatagtcttgtattttatgatgcttatccctttgtgctttccatgtttgatgtccaaatgtcatggcaatgtttttgacttctagtaggggttttagtacctttttgttagataagtacatccaaattctgtttatttattcaaaaatcattctgtttattcactgaaaacatttgtccattcaatggactcataaactgtctgtgtttttcaggcttgaggatccatctagaagatagca

SEQ ID NO: 13596 - DNA, 361 bp, Oryza sativa
  Intron number 1 from transcript LOC_Os07g43560.1 (locus LO C_Os07g43560) derived from phytozome v7.0 (chr-ID Chr7; po s 26053589 to 26053949 reverse strand)
ggtgagccggccgccggcggtgccgggaactcccggtgcgttcttgcctttgctactcctactttattatggctttggaaattctttgttttctattttattcgcgaacgcgaaaaataattgcacgctaatatattagaagagcatagtttagttgttttctattttagagataaacacaatacacatgtcttaaacatttgtattagttcaattcaaactttgtgtattagttaggaccgttattttgaattcttttttagttcaaactaatagtattattttgctagaaattccattatttgaaatattgtgtttgttttcagggaaaaagagtaaaactggtaagattcttgcaatt

SEQ ID NO: 13597 - DNA, 948 bp, Oryza sativa
  Intron number 1 from transcript LOC_Os07g19150.1 (locus LO C_Os07g19150) derived from phytozome v7.0 (chr-ID Chr7; po s 11335673 to 11336620 reverse strand)
gactgacgcgcgatcatatcaaggcaatcttgctggtatgttttattaatttgttgagcaaatttcataagaccacagggtgttgacacacaatactaaaccacaagtaactttactatttcaaagttttatcataataaaattgtaaatctcaaaaatcacctagtaactttttaatacacattatataaaagcattagtattaaaactaattgattaagtacttagagcatcaccaacagtgccccaattccattcctattaatttttttatggaattttagttgaaaaaactgatccaacagtatcctgatcatctctcaaaattttgccgctcccatccccgcgtatgtcgctctccttttataagggtggcttgatcatctcctaaaatttagccgctcccatccctgcctatatcactctcctcttctaagggagagggctcgctcccaaaattagtttcacactttttctgtccatcgatctcctggtacgtggatctggcaaatgggccacataaaggagcgagcactattaaggcagaagctcaagctcatgtacgggagaaacaatttatgctgatttcggttgttagtttagcatgggcccaccttttactttttgaaattaattaaatttaaggtttctcttagagagacaagtttttcactacctattttcagtttaattaggaagcccagtaacaaaattttgatggtgtattattcacattccattgatgatgctcttactagagaagataggtgagatgaaacatacttaggccctgtttctttcagcttgagattattataatctagattattcagagtaagttgaaagaaacagacaacttattgaagtagcttattataatctggatcccagcttattataatctgataagctcatttaggtgagtttttttttcagattattgggtga

SEQ ID NO: 13598 - DNA, 762 bp, Oryza sativa
  Intron number 3 from transcript LOC_Os10g03910.1 (locus LO C_Os10g03910) derived from phytozome v7.0 (chr-ID Chr10; p os 1774514 to 1775275 reverse strand)
ctaaaagattggagttcgattattttgggaggaaggtatggttattggtctcacacatccccctttccttattacatccatgcatctcaatgtagttgtcgatatgaaaaaggaaaaactcaagcatggtgtttcttattgacacttcacaatagcaccggcaaaactaagcgttgcataactaattcttatgcgtgaaatcatgatgtgttgtaaggatgactgatgacatcaatcatcaatgcaatctagctatttcgtgtagtcagttcatttgtatataaatcaagctgttggggtcaagcagacatgaactatctaagttggctattcaatttcacaatgaaactggagcatttcccatttggtaactcgacatgttcttgttcgctgtaatattgggttgtcaactgaagattcatattcatattttgagaaatctgagtgtttgtctaatttcagttgtcattactgcacataaatttgaaaatcaagacaacctcaaagtcaacatacaaatggaaatgtctccgcaattgttgaaagtcttgcaatagttttttgtgttgtgtttagactggcgtagctacttaaattgcatcaaaagcatcctgacaattaaatcgcatgtgctattatggtcttttatcgcataatgttagtgcgctggattgtgttttcatgttttgttggaaattttgtctataacatggcaagggttttctgttgcaacataatcatttcagtatcgtgcagctgaca

SEQ ID NO: 13599 - DNA, 479 bp, Oryza sativa
  Intron number 2 from transcript LOC_Os07g12530.1 (locus LO C_Os07g12530) derived from phytozome v7.0 (chr-ID Chr7; po s 7156088 to 7156566 reverse strand)
cagccaggcccaggacttctccactcgcctccaaggtaatcgattggttgatttctttccccatctctgtataattcgatttggtacttggttcaaagccactgtttaggcccagcttagttgaacatttgaacaagcgactgtttctcattaggcaggatacgggtgatgatgtaatatgaagcgagaatttccggtgtggattttcacgagtcgtgagtttgttttctgttcatcgcagtagcatagagaatgttatgtattttgggattcgggtgggtaaaatgtgtgtctcttcagattaatgtactccttattaacattcctcacaaaaataagtagttatgaacaatcttgggatagctagatcacagatgcattgaatattaagtttgtttgttcttcgcaaaatcatcccatgtctttgatttcgttcaaatgcagatagagctggcgaattgcctaagttggttgaggac

SEQ ID NO: 13600 - DNA, 646 bp, Oryza sativa
  Intron number 2 from transcript LOC_Os11g39010.1 (locus LO C_Os11g39010) derived from phytozome v7.0 (chr-ID Chr11; p os 22759442 to 22760087 reverse strand)
ggccgctccggcacgaccgtgctgcagctcccaaggtcagctaattaattaaactgctaattttcatgcgttttggtgttcttctgatggtttactaaaaagtgaagattccaaggtctgtgttactactaccatgttaatcattttaagctgcacggttataaccatatgaacttatccgcgattaagtgaaattaataagcatgattcgttcaacacactggtcaatttgttttctcaacacaaacgtacactgtaaatgtcaacatgctgcccgttagttaaaaattcagaatgttcttggggcaaactgacgtatgttaatcccgcgtttaagatatttttatgtatatttgttttttgaggaaatgtttatgtatatattttactctgctgaaactgctgcaaattgattaaatgcgacatgctgcgcacttcatcgctccttttaatatttctgtctgaatgttctttgggacatctgattgaacaatgtactatacttaaaaaattcagaacacacaagtcgtcgcgccagattgtcatgcttaatttgttgaactattatttgtttaattttgattctgaccattgtttagttttgatcctagcaggagaggagcaagctgggctacctgttctgttg

SEQ ID NO: 13601 - DNA, 535 bp, Oryza sativa
  Intron number 1 from transcript LOC_Os09g39490.1 (locus LO C_Os09g39490) derived from phytozome v7.0 (chr-ID Chr9; po s 22690606 to 22691140 reverse strand)
agcgcccgcatcttcatccactacctctccgccacgtccgtaccccatccccccttcgccttattcttccttctatctatggatatggactatgaatatagatactcatactgatatagtataactttcacgtttttggtcatggatttcatgtttctgtttaatctctaggggtttgggggagaaagctattagtgaatttatttatttcgctgggtaaagctaagtgaatttatgctcatggccagaattgcttgacattactttgggaaaaaaattattgacatttgatggtgcaggtgatccacgatctgcatttgttcataaactttcttaactctagtaatgtacttgagggtacaggcaaactcataagaatcatttttcttcccttcgtgaacattttctttttttaaaaaagaagactttttgtgtagatctattagaatcaaactgcagtaccatacctctttgtaagtattcgtgatgattttatttgcagcgcctttacttatagaaattgtttgcagtgcca

SEQ ID NO: 13602 - DNA, 965 bp, Oryza sativa
  Intron number 2 from transcript LOC_Os12g02380.1 (locus LO C_Os12g02380) derived from phytozome v7.0 (chr-ID Chr12; p os 775914 to 776878)
cctcgaggtcgacggagctccctggaaggttcttggttcgtaatcgtatccactcacaatctcatcttctttggcggtgtttagttcagcgcaaagtttggattttgattgaaattggagatgatgtgactgaaaagttgtgtgtgtatgacaggttgatgtgatggaaaaggactgaagtttggatccaaacgttggatctaaacacagcctttcttcctttctgctagtactaaacatacctgattcctggttggagtctcccagtggatacagtagctttgttgaacatacctcatgtagccacaaatttcattatttcaaggcacattattatctgcatatataggaccagatgggggggacgaaagctgctaccttcatttctttaacacattttaggaagaataacaactcccttttatacaactgcaatccatgttgttcataagcaatgtgacactctagtgctataaaaaacaactattttcttggttgttgcatccactgtttcagaagaattacctcctttcatacctttcagtgtgtacttgagcaaatttgcttctgttggttcgatttttcaaacttcacatatagcttagcttgccacaatatgtgaatgttatttgctttcccaagtattccctgcttttcagatcactcactgctatgtttctttcagttgctagaatggaatggtaaagcatactctagtacctataaaaggagctttaagagttccatttgttacgtttgatttaaataaaattatgtgtttttcaataaattccagacgaatctatatctgtgaaaaaacaaatgttgaaatgtcatagagtattctgacagatgtatatcatttcttgccatctattgctcatctattccattttactttagatgctcgatataagaaatatcatataaaactttctgtcttcatgcaacaacagaatttctcc

SEQ ID NO: 13603 - DNA, 723 bp, Oryza sativa
  Intron number 1 from transcript LOC_Os10g32700.1 (locus LO C_Os10g32700) derived from phytozome v7.0 (chr-ID Chr10; p os 17047822 to 17048544 reverse strand)
cagcagagcaattgctaaataatcgaagaccgaatgtaagtcgactgtttctgattcccttgaactcaatatgatgtttcgatgaaataagactgtcctctcctagggaaagggttatgttcctttcttctcaaatttgagtgcatttttttctgcaaatattacatatatagtgtagattcttcaattaatgaaaggataaatcatacagtcagaataaaacattccattagcaataggagtaaagtcttttaggttttgacattgaagatggtttttcctttgttgaacaaagcgtggctatctttcattatattgatgtaaacaaaactttctgcacatcatgaagaactgaggaccaaatttagaacaaaaggaaaacagagatagcgagtaactcatcaattagtagcatacacttaggcatatcttgaatgtgtttgattgtttcagatgtcataatttgatgtaatatggattactaatgtagttcagtcctcgtggggtaagtatggggtattcagagtagttctggctcccagattctcctctggagcagccataaccaccaaacaggccagctctgttaaaacaaaaatacagaacctgatactgtttgttctgaatacttgtacacataatttaactgaaaaaaaaatcagtggctgacaatactaaattctatcagaaagtgactgtcaagattttttcaaggcgtacatc

SEQ ID NO: 13604 - DNA, 568 bp, Oryza sativa
  Intron number 2 from transcript LOC_Os11g14420.1 (locus LO C_Os11g14420) derived from phytozome v7.0 (chr-ID Chr11; p os 8093269 to 8093836)
gggcaaagaatatcaagagtgcaaaaggagcgaaggtatacttctcattttggaattgtggtgtatttttgagcgtgcacatctatctatttgaattcaccttgttactcttcccaatttatgaaacttggttattttctggtggtggcagttattgtcttttccaatcacgcttttgttcttgggatttaagaattaataggtgcctgtacttgttcagatgttcaaaaattgtgggtattggttaactcgctaagcatactaacatattttcatgccacgaaataaccacttaacaaagattttattgttatacaatctctctttcgtaattgatggtatattaatgtccaaagcatgtttctattttcccaatctgttatcaagtggcaccctcttcccagttcccacccatctctaaagaaacttaattgtatattttatcagtacagcgcttagggatttatttttagcatcagacctgataatatttgattagtcagcacattcacctacagaaacagtattgtttgatggattttcaacctttttttttattcaggtatcc

SEQ ID NO: 13605 - DNA, 976 bp, Oryza sativa
  Intron number 4 from transcript LOC_Os08g20544.1 (locus LO C_Os08g20544) derived from phytozome v7.0 (chr-ID Chr8; po s 12333306 to 12334281 reverse strand)
ttcaaacaacacttggaatctcacttcctgtgcaggtaactcgtaatttttgtaacatgacctaaaacaatggttatatgtaaaactgctgtacaaaatatagtgtggaaacaatttttttgttatatttatttattagtgttctgttcttttgaacatcttagatagaaaaccacattcaacttcatctcctgtttgctttatgtttaactcaattaataagacagctgtttctgatattgtttttaatagtaactaaggtactgagtgagtgattaatacggggtactacactatcgtagaacatcatgattttatgatctacattttgcatgataaatgaacaacttttactattgtagagtatattggaactaaggatttgattaaacaaatttgttggtgatttatgttgggattttattgactagtttgcaattggtgaacaaatttgttactctgattcagtgatttactagttttgcatgtttcagttttcaaatttcctcttttgaaatatttcaacctacaaaaggagcttctgaataataactgtttcagcttctactccagttttagttgctcatttgttattttgagaatgtggagtgagaccattttatgttaaaaaaaaatatggttatgcctagaaaatgaattgtaaagaatctattttcatgtaatttcatttggctgtatgtagagacttttgtgtcaatttatgatctggataaggtaaacataattacctgaagagggtaattgaggcttcatttactattgtgtcatgttatacgtattttgtcatacaactagtgttccttagatcatgatgtatatgctatactaatcttgtcatatgactagttttccttagatcagtgtgtgaccatgtataaaattccaagagactaattttaaaatgtctgtcctatatttaggtgaaaaatattggattcacaggagtacttcgctt

SEQ ID NO: 13606 - DNA, 1010 bp, Oryza sativa
  Intron number 1 from transcript LOC_Os09g12310.1 (locus LO C_Os09g12310) derived from phytozome v7.0 (chr-ID Chr9; po s 7018868 to 7019877 reverse strand)
gcggagggggagggctcctcttccaggtgagcgcgcacgctgccctcccctccacaccccgcgcagcacacgcgggcgctcgctgctcgggtcaagtctgatgcgtttctttgttcgttttgggggggttgcgatgcgatgcgatgcgatgctggggggtttttggtcgcaggaggtgggcgttgggcgatccggatgtcgtcgaggtgtcgccggaggcggcggcggcggcgcgttggagctccgcgcgcctgaagcggaagcgcacggaaggcctctctgctctctttcttcttcttctactttcttttcttttcttttttctttttttctttcttttttttatttttgcgtctctgaatcttgcaagggtttgggctgtctctcggtagggaggttccaatacgcgcgtgtatcagcattgggaagaggattggaaatggcctgattctttttttttcttttcttttgggtgccataatgtgttgtatgcctgttataaaacatggaacttgcagtttgttcattcttgattgatcaatggaaatccaattctgccatatagatcaccgcattggcttctgtagtgattccaccaagtctattgtggtggctggttgtgttcgtgtaatttatctgtcaaatgacaagatataccccatgctgaatgtggagtcgttgggtgtaatccaacttatagccattaggcatatcctctcatgaaagtagcaattgtttactggaaagccagcacaagtcatacatagttcactttgcattctgaagtatgtttttgtatcccatttccctttctatgtgtcttttgattgttcctgggaattagtttgtgccacacaagccgtgttacgacttttaaggtccatttcacgaaacccctccgagaaataacagtttcgttattgcaactttgagtaagatgcgaagaatctaatatgctatatgtttaatcaacagactgttgctcacgaaataattgatctcgacgccaa

SEQ ID NO: 13607 - DNA, 231 bp, Oryza sativa
  Intron number 1 from transcript LOC_Os08g19820.1 (locus LO C_Os08g19820) derived from phytozome v7.0 (chr-ID Chr8; po s 11859804 to 11860034 reverse strand)
cacgtcgctggtaagatttttttttcatctatactactctttcttaggggtcctttagatcagacgagtgaaaaaacggagaaattgaaaaaacataggattctaacaggaatagagaattataaaacacaggaaaaacatatgaatgtccgtttgattgggccgtaggaaaaacacaagaatttaagaagagataataattaaaagattattttcatgaagttctacctt

SEQ ID NO: 13608 - DNA, 783 bp, Oryza sativa
  Intron number 1 from transcript LOC_Os07g34220.1 (locus LO C_Os07g34220) derived from phytozome v7.0 (chr-ID Chr7; po s 20476241 to 20477023 reverse strand)
acctcggcgacggcctctggcagtgggagggcaaggtcggcagcgttgaatcggcaggagtgagctcgacgagggacggcgtgcacggatctagcggcgggggccgatgagctcggcgagggacggcggacgctgatcgggcagcaagggacggcggagctcctttctccccatcggtggcctctcccctctccccatcggcggccggtgagcttcccctttatgcccagcagccttccttcctcctctggccgacaagatcactggcgtggagcacgaggatgactgttctctctcctccctctctcatccttgacgcgctgtgggtcccacctgcaaccgaggaacccgtagctaaagtttgctacgcgttcctggggaggccgtgcatatggacaatgtggcacggaatattcgactttttgcgctgaggccaaatgccacggaggtgtactgtggatggccttattggcactggcagcacggacaaggacatcaaaagtgcaggcgaatggcgtgagggacaactgacaggcacgcctttgtcaactagttgttggaggaagaaacttcaattttttctaaactagcaacggtgacaagtgcgcttctcattctttgctctacagtttataaattatgaaaatacaaacgaaataattaaaaataagttataggtaaaaaatatatatctatatatgttcttgatgatttaaaataaaatattgaaaaacatgctacaataaaagtaaatctcaaaatcaattcaaaatacagatttcg

SEQ ID NO: 13609 - DNA, 844 bp, Oryza sativa
  Intron number 1 from transcript LOC_Os09g28940.1 (locus LO C_Os09g28940) derived from phytozome v7.0 (chr-ID Chr9; po s 17606347 to 17607190 reverse strand)
cggcggcggcggcggcggtgaaaggggtgtgcgtggtgtgccgaaggccaaccacgtttagatgcaagcgctgcaaaggggtcaaatactggtcagtgacttaccatcctcctagagttgtttcccgtgcaattcatgtcgagttgtttcccgtgcaattcatgttgattatgatgtggcattgtgcaaatggcataaaaaatagtttggctttcctaaaaaacaagggcgctgctacgccactgatttgaatggttcataaatgttaatagagtaccactgcacctgttctttgtgttgagcttgagcgtgttttccctttcccaaatatttgttgcatagaactttatagaacttggagtaccagaaactgcataacacttcaacacatgatttgctcaacaccgacatgctagaacctgcattacctctgacaattatttctgaagcttctaatataaaatgataaattcaatcaaatgatatgctagtggaataatggtcacggacagcacttgcaagacatgtattctggcacagttgcacagttgtgctaagcagtggtagcattagcgcctgtggaagtgtgggactgtgaagaagatgtgccagaaataggagtaaatcctaaagtatggcaattaacagtgcttctaggaatttaaagtatccattatgtgtaatattcagtatgagaactaatgaccacaaaaatcctttattagttctaactggtaatatttagttttttttttttttggaaaaagcaagattttgctatgtggtgatgttatgtatggagtgtgttatatgtaaataccagataagctataatttcctctgt

SEQ ID NO: 13610 - DNA, 741 bp, Oryza sativa
  Intron number 2 from transcript LOC_Os07g43770.2 (locus LO C_Os07g43770) derived from phytozome v7.0 (chr-ID Chr7; po s 26187935 to 26188675 reverse strand)
cgcgtccgggtgttggtgtttcaggttcagcagaggtaaaagttctcggtttcattcagagtgattttgtgttgcctcagttgtaaaaatctgaatccctaattgtgtattgatgcgtgtaaagctcgattactacgcatagttccggatgcgtctattgcttcctggaaaggctcacgattcagaatatgaagacaaaacaaagacgtttagtgcatctctgcagaaatagaaaacataaagcgttgtgctgttcaaaagagaatggttcttttggtcaggagatctttttctggatgtttgaaaaaaaatcatattacatattatctattcttgatagctgaaattaatagataatatgattttttttataactatttgagggtatatacagatgaaatgactacttacgaagttaaaaagttattttagataacatttctagaaagaattgtttttcttgatcacctcaaacttgagtgcaaatagaaatccaaaatcgtgaatcagacaagaaaaggtaacaaagaatcaaaccgtcccttaagtgaaagctgcaaaccatgttcagacttctgagaattctgctaagctgttgtaagagccaccgacagctttcttattctatttcctatccttagatttagaaaattttaatcaaaaatcacatccaacaaaatctctaacctgtcttccgataatctaggttctcagctccggatatcccgttccccgtttcaa

SEQ ID NO: 13611 - DNA, 1034 bp, Oryza sativa
  Intron number 3 from transcript LOC_Os11g03270.1 (locus LO C_Os11g03270) derived from phytozome v7.0 (chr-ID Chr11; p os 1202492 to 1203525)
aagaaaactccccttaaacttggggtactacttacctaacaaatttcaatattgttcttcatctaatttaacaaaacatgcaccactgccatacaattattataacaaaatttaagttttctaaaagaacaggattcaattaaatatttgatttggcccctcgttctgagatctgtgcaactagttcaaaacaaatcaatataatatatacacaagaaaaggcaatgatattttgggctctgtgatgaagtagttttcttggatcctttacccagaagttgaatactccatccgttcaattttataaggcatatttgatttttaaaaattcaaactttgaagattttgaccaaagattagtaagcgtacaaataaatttagtttataaaagttaagcctatagatttgtatttcaaagagctttcacatatataatattggtttcatgcccattaagaatatatattatgagaaattgatggtcaaagtttagtcccgaagagtttttttattcgaaatacaccttacggcttgtttggtaactcgatggaaggggattgggagtttatacaagggaattgatgatgagattaagataagaatttgatttttaatcccaatatcttgtttggtagaggagatggaaattgatagagagtttagttggagattaggtcattaataaaaacggatggctgagatttgcttagacaaagtaaaggataaatttcctcccaattacctgcccctacccaggtattgaaaaggagggagttccttcctcaattccccatccctatcccaccaaaattctcatgtctcccaaccaaacaaaacacttaatagcctcatcactctaaactcccaatccctcctactccctccaactaaacgggccgttatagaactgaacggagggagtatcgatcattcaagctcaaaccattttcctactaaaatattgtaaaatgtttctaacttgctaatcaaacatttaaacctacaggcaactgctggactcatacttattggag

SEQ ID NO: 13612 - DNA, 854 bp, Oryza sativa
  Intron number 1 from transcript LOC_Os12g23260.1 (locus LO C_Os12g23260) derived from phytozome v7.0 (chr-ID Chr12; p os 13160263 to 13161116)
gacagtggtggcttgcgagccctctcgccttggaggttgacgatagccgcggcggtgcctcccgagccctcacgttgtggatgggatcgatgatggcagcggctccaagccctcttagtggtggaggatgatgaccatcggagatagagtgaagagaggtaagggaaagaggtgatgaagatggaactgacagctaggtcccacatgcagttggggttaacggagatttttgacagaaaacgtgacggagtggcattgttccaatttttccaaaattccagtggcacgtagccgatatcattaatagtagtggtgtttttttgaatcaataaatttgtagtggcatggatccaattaacccaaaaaaaaagctcaaaaccgtgatgggtcatccgtagttttgcctctccgcactcatgacagattcgaccatccgtaaatagcctctacaattccaattgaagaaaaaaaaatacaaggtgaaatctttgcttgatgagataatccattttggatagaatgtgaactggatagatttttactggaatggtggtagaaaaagaccattcaaatatcgttaagattgaggaaaaaaaagtttgcaaaaactcgatagaaggcaatcaaagttgattgtgcaccgaactgcatgcccatgtaacgcgccaaccacacaagcacatgtcgctgagagtggaacctagcactaaaccgaacaccgctatgcgtggccaaattccactggcctacaacaatctccactgagtctgcacactatccagtgtgtagactccaaacacaacgcctccatggaggttatgccattgatgatgcgctgactttgcctatccaag

SEQ ID NO: 13613 - DNA, 870 bp, Oryza sativa
  Intron number 1 from transcript LOC_Os07g17170.1 (locus LO C_Os07g17170) derived from phytozome v7.0 (chr-ID Chr7; po s 10098052 to 10098921 reverse strand)
aaacaggcggtatttgtcaagcttccatgctggtctgctgaagtacatacgggagtctttaagtactactacagagtttctcaccgatcacttgctcagccgcctctaggcttcagcttaggtattcccaagctccgtatatcattggttgctttttaattgtgccgctgctctgctctaccattttctacagcgctagcagccgctgccaactcccctccggcctcccatctctctctcgtgcatggtgtccatcagtaaaaccatgtcagctcagcagcctttcaataattgaattaaaattttcaaaggctggacctttcatgaaaaatgaagcttaaagcttcaagttgctcttcagaagtgcccaggagaggctgttacgcagaattttttactttattttgttttacaaatatagaatcatagaagtggatttatgcatgtatgcgtatgcacactttgagttatatgcatcgaccagttcaaccccaaaagcttaagctgatggggaaagataggcaattcactttatattctaacattcttcctcacgcgaggccccttaagtatctagcattgatgcactaatcagttcaatccaaaagcttaaagctgatgggggaaagatggttaattcactttatgttccaacacatatcagtacacacaaacaaataattgcaagcaactcctttccttttagactaaaccacaatgtgttgatgagaacaaactctagtcaaatgtgttaccatgaaaaaaaaagaaacaacgagatattttgctagttcaatattcttgtatgtgctaaaatatcatgtaatgtaacaagttgaagctcctaattctgtatcacttttgatcgtt

SEQ ID NO: 13614 - DNA, 686 bp, Oryza sativa
  Intron number 1 from transcript LOC_Os10g02220.3 (locus LO C_Os10g02220) derived from phytozome v7.0 (chr-ID Chr10; p os 774464 to 775149 reverse strand)
tggtaggattctatctgtttcagagcattttttaggtatttatatatatctctatgcaagttgcaagcaaatctttcttcttttgtggtattagttctacacctgaacttttttatggatgcaaaaaaagatatcagcatcgaaggaagcagtcttgttctttatgagtagggagctcatttcccccaggttaaattgtgggatggatcaaataattcagggctaatttttgttctgaacttgatttcgtagttttttgtgtattcgcattcaagattgaataggataagaaataggggtatctttgattctaaatatcgtagtcaaagattctagctgctggcaaatatatatggatggaagaaaaactataatatatgatttcttccttccctgcaaagtagttaatttgaccccccaaaaaagttgaacttatctttgttatcattaaatttttaagttccaagctgacagaatatggtgtttgcttgcaagaaattagtcgttcacaatatatgcagtcaatagtgttacatatcttctaatatcgaaattgcgtgatggcgttattctaagacgaaaatcggatatgagaaatctatcagaaaagaagtgtgagtcatgatacaatttgctccatataatcttcttgactttcttacattttcctatattatcttgcccag

SEQ ID NO: 13615 - DNA, 993 bp, Oryza sativa
  Intron number 3 from transcript LOC_Os08g05660.1 (locus LO C_Os08g05660) derived from phytozome v7.0 (chr-ID Chr8; po s 3023846 to 3024838 reverse strand)
agctcaaggtgaaggaagagtataatagctacagggtatgttacaattgtactattgatgataatctatagccatcaagttgtgttttgaaatgaaaattttgggtgtggcattctggtgtctttgagcttccatttgataaagagttcaggaatttaatttgcacattgatccaagtaccttagaagaaaagagtgtctttgtgttgtccaaagcttttacaattgtaaattctgcactgctagacaaaaaaaataataataattctgcacacattttagtgttcaagtttttttttaccatgagcctcaaataattttaagttagcttgagatgtactgaggtgttagagaattcatatacaaatcgattgaattcacatactactttaattcgttatgttttctttgaaactgttttgtcaagtcaatacataagcctaacttgtgcaaattgtgatcaattaattaatttcaagttaataaacaagtcaaactaatctactattatttgtctatgtaactataacatcatagcttatctaaatttacataaatgacaaacataacaatcaaggaattgcacccatgacttcttcactcttcctagtggaagtgaaacacctggcgatttcagcagtgtaacttttaatttttcatagaaatcctgtacctccaaacttttctatcatccatcttgttgatgttctatccctgtagaaaaaaaaaactcttgcctcaaatgccttttcaagcttgcaatggtgatgacaccaaaattagcagcctttctgtgcaaactgaggccaagattgttacaagaattttaaatgagaatatttcctacaatattgtttgaacgattcagtgagtgatcaccttagagtatactgatagataaccataaacagcaataactctttgtcctgttcataaataaacctccccctttcttccaggataggactgcattgctttttcttggtttcccaat

SEQ ID NO: 13616 - DNA, 995 bp, Oryza sativa
  Intron number 1 from transcript LOC_Os11g06230.1 (locus LO C_Os11g06230) derived from phytozome v7.0 (chr-ID Chr11; p os 2974590 to 2975584)
gtgttcgctccggtcaatcgccgccgcgcccccaggtgagtcgacacctctggagctttggatctcgctctgttcatcttctttggctggatcaggatttaaacgcattattccattattccttcgttcttgataaggtggcttgaacaacttaaggagttattaccatttactctgttacaaagttaaggaatttactcaaggtgtaagcactttgaacctcactacaaatggtactgtttgtaagcacattgaaaaatatcttcctcttggaaggttgagcacaaactattttacacctgaatgcatgtaaattcatgtctatttcacaggaaagtaaggaacatagctgttaaatcatatctaatttaccttttcgtaaatgaaggaattacagctttgacaattgacggacctcatactgcaaaaggctggatgtgcctttcaccaattctttctctctctctctctctctctctctctctctcagataacctattcaccaattctcaccactactgcaagctattcagatagttcaggtcaaactggtatatgtgtctgtcctctatgtctgtatctaataagtgtttgatttttgaaaaaaaagttccgttgtatctgcttttattaatttggatagttaaaaacagtcagttactattgctgctctgactagcactatattcatgaaaaaaaccatttgaaaagaaactactttatgcttctgagttctgacagtggtgtcctcatacgaacaattcaacgtacaatgatatctgttagtgcctaatgtaaacctgaaaatgcattgtcttactttttgaagagaaaattctggctcaggaagagccatctcgtgtgaactgcttccagtacttgttactaatttcttgtagacttgtattgttctctttgcctacttctttgtaacctctagaagcctgatcactttgcaaactcccattttgacctccaacagagctctggttagc

SEQ ID NO: 13617 - DNA, 862 bp, Oryza sativa
  Intron number 1 from transcript LOC_Os10g09680.1 (locus LO C_Os10g09680) derived from phytozome v7.0 (chr-ID Chr10; p os 5251019 to 5251880)
ggtcggaaggcggtagccgacaattagtagcagacgtaagttagagagagaaggaagaaagaagagagagcagaggaggagtggagaagaggcacatgggtgaggtgaggtggggtggggaaccctagagatatggggtgtggggttgtttttctagtcagcagggatgggtataagaatttaactcatttaaggtgagatatatcaccttcaacggggtttgtacccgtcattggtaggtcatctgtaacatgtctatatgtggacccattaaatatgtcatgtgataggccatctccttgagtctcagctacaacaaggctgtgtttagttcccttcaactttccaacttttccgtcacatcaaatgtttggacacatgcatggagcattaaatgtggaaaaaaaacaaattgcacagtttgcatgtaaattgtgagacgaatcttttgagcctaattacgccatgatttgataatatggtgctacagtaaacattttgctaatgatggatcaattaggcttaatagattcgtttcgcagtttacaggcggaatctataatttgttttgctattaatctacatttaatactttaaatatgtgtccgtatacgtcaaatttttgtgccaaaacaactaaacacggcccaagtttagtttgatccattagagatgatgtcatccgtgacaagacattttggcccatgatagatgggatgataaggcgtagtgagccactctcttataatccccatagaaagattcgatagtactaaatctgctctaaaatatagtaatttctatgttgtttatcatggattaatgttgacaggataatattttagcacccctctgtaaataa

SEQ ID NO: 13618 - DNA, 794 bp, Oryza sativa
  Intron number 1 from transcript LOC_Os07g16040.1 (locus LO C_Os07g16040) derived from phytozome v7.0 (chr-ID Chr7; po s 9352247 to 9353040)
gcgccgccccgaccttctcgcctcctcgccgcgtggtatgtctcctccctccctcctccctcttagccaacttccgccgtcgtcgcctctgtttgttccctgtggggtgtgggtggctgtttcccatggtgtttgcttcgtcttcggatagatggatttgtggatggtttgtttggggttgggggtgatgaaattggatgggttttgggggggaacagtcgggccagtgaatgatcagagggtggctttgccatttgggtatcatcccaagtagcatggcgagatgggaagggaaatccgtgtgtgctacaagagatcttgtgcaattggagactgaacatttcagttattcttgataatttctttggctccaaagtgatctatgtttgattggaatgaaggatttggtcagtgcagacagactagtttgtggcattgtgtcagtgacagtggtcaagcggccatggatggcatggcacgtttgaatcggatacacagagttgaacataaattaattgactaaatatatggccatatgggaatcctgggtccccgcagaaaaaaaagggaatcctatcgttttttttttcttctcagtaggtcaatcagaccttggataccctcatttcattgacttgattccactatcttggtgatcttgtcttttcttcaccaatactgcatccatcttttttttttgttgctctgtttgtctctgttcaattatttttgtatacacaacttttaacccttgttacaaatgtctttctcttttgattgcaggtttttcaagc

SEQ ID NO: 13619 - DNA, 1045 bp, Oryza sativa
  Intron number 2 from transcript LOC_Os09g29080.1 (locus LO C_Os09g29080) derived from phytozome v7.0 (chr-ID Chr9; po s 17659734 to 17660778 reverse strand)
ttctcaaccagattggcgtcgaggtgagcacgcgtgcctgcctgcttgttgcatttctgatctgaaacgaatgatttaggtgcgggtggtgaagatttcgtcttgatcaccatttcttcgatctcatttctttttcaatcaatcttgatcatggtttgaacataacatgagttttttttctcttttttacactgattaataggacaggagtaaatgttgctactgctctagttcagcatgtagaataacagtcttgcgagtagattgttttagttgtccgatgagtgctaatttgtagatgttcttgtttgctttgtaaactatcatagaagccatatatttgttgaagtacatatattcaggaaataaatactacctctcgtcatatttacatgacgtttatggcatcagaatatacttgataatagtacaactaagttgtcctaaatgtcaagtatacttgactggagggagtaacactttctgggatactagaaatggtctgtactctgtaggctctttatcaaagcaaaaagtaaatttgtctctagatatccgattacttggtctcagtatctatcttttatgttttatagaaaacatctgccatttacttactgtttggatcttacacaaggacggccttgttcttctcattcagaatgctatcagcctatgtattagatgaaagtaaacatttatcattgtaagattactttcagaattgtcaccctactgttatttttgaaaaaaaaatccttttgttcttgactcctgtttaatttgtccaaaatgttcatatgttttgatggcataagtatattgttagtttgttacttcatgctttcaagagagctcaggctcataaggtctataccaggtttttgtttatcttgtatcttccaaatgctatgcataatatgcaatttcctgagagtatttcatccaatgtttcatctatcaatgatgcgctttactgtggctcacctctacaaaccactcttatgcagttggactctgaaaattcatatactgctcttgttta

SEQ ID NO: 13620 - DNA, 669 bp, Oryza sativa
  Intron number 1 from transcript LOC_Os11g03530.2 (locus LO C_Os11g03530) derived from phytozome v7.0 (chr-ID Chr11; p os 1359844 to 1360512)
gcaagcggcctccacgcaacgcgggaggtaatcaggtagtgcgatgccactgcttacctgcttttctgttcttaatttcgccgatgttttcccctctactgaaatttctttaaactgtctcgaattgtcgatgcattcgcggggaagggaaattttctgttcttgttcgtagtttcttggctcaacctctccatcggctgcagtttgggatttcaatttgggcgccaattatgggtagctttcggtgacatctgactgttaggtttgtcagcactcaaccaaatggcctggccgcgagtttgtgcaaatttctttcgtccttttgttgaattgggcgtaaatttgatgtatgctcttgcctacattacttgtagttatgtggaacacgccgagcagaacaatttcatggtcttagtgtactctgatacaagtaatgttttcttcagtttggtgggagatgtcaaactttgtttgctaccactagcgatggctgcttggttttgtacctgtatttcatgttgacctagagcatgttttgcttcaccgtgttgtttttttggagttgtactccacaaatttttgttggtgccactatctattggttggttggtttcaatataaatttttcaataatctctttggcgttccaatttttcctacataacaggc

SEQ ID NO: 13621 - DNA, 507 bp, Oryza sativa
  Intron number 1 from transcript LOC_Os10g07974.1 (locus LO C_Os10g07974) derived from phytozome v7.0 (chr-ID Chr10; p os 4276133 to 4276639 reverse strand)
agctctagcgactccggtgcggtgcggagccagagccgcggcgggtggaggtaggaagagtaggacgggcagcacaccacgtcgacgtgcgtcgggagagagaggaaaagaaaagaagagagagagagaggaagttgtgtgccgggacgctgccgtgcgttgtcgccgtcggcagtgaaccccggcgatatgccgccgctgccccatcgtggctgagccatcccggctcgagccaaccgccgtcgcgcctctgctctgctgcgaggaagaagaaggggaaaagaaaagaagagagagaaagaacagtatctagggcattttggtacttacacaactatttcctcccctaaccggaaataataaaataatgggaggagtgttcagtagctaattatcattttttacagtgtccacgagtaaatacacgatcttcgaatgtctcacagcaaaagctacaatcttttggtgtcttctagcaaattttgacttttgtttatacagagattg

SEQ ID NO: 13622 - DNA, 811 bp, Oryza sativa
  Intron number 2 from transcript LOC_Os10g39680.1 (locus LO C_Os10g39680) derived from phytozome v7.0 (chr-ID Chr10; p os 21134680 to 21135490)
gacgtggcccaattcaattgacagggtaactataattaactgcagaaatattttttcccactgcttcaatagagagaagtaaattaaacaactatgtcatatccaaaacataaaaaagaaagatatcatcttgaaaagtactggagtaggagccacaaaagtaaaccaatttcgacctggtcgcaagtttactttagctcttacatctttttcttcatggtccaacaatcctatctgttgcctgtaccttcttcaccgtagttactccctccggactgataatattagtcgttttaaataagggtataaccaaattttaaaagctttgattataaataatttctaaaatatttatcttaaaaatataaaaaaccatatgtgtagattagtcttaaaaagtacttcaataaaatcatatatttgttgatatttctatatatattataatagaaaatagttatcaaagctatttttttaagaccgtgtccttattcaaaacgataagtattatcaacatggagggagtatcatcagatgccatctcttcttaaacttagccacttctttaattagcagtatacttcctctgagtctacatcaaaaagtagctaaaagaagaaataattatattagcatttgatgaagttagggtttttttatattggttcgtgttggatgagtagaaaataaacttattttaggatgaaagtagtaaaattcctaccctaacgaaacagagacccaaatctgatatgataaaatggttttttttttaggcaatcgaactaccaagcagccgggaacgcgctgg

SEQ ID NO: 13623 - DNA, 710 bp, Oryza sativa
  Intron number 1 from transcript LOC_Os09g08400.1 (locus LO C_Os09g08400) derived from phytozome v7.0 (chr-ID Chr9; po s 4358393 to 4359102 reverse strand)
aggaggggtggcggtggtggggagagtgagtgtgagagagaggcggagaggctgagagagaggcgacttgcccataaaacactgaggctcaatcagtcatcggctcaactccctcagaggtattggatttttttttttaaaccaacacgtataacccttcataagtgtcagtttatcaaagaaactagcacaaatattgttggtgccgtttttttaataaactagcacatacatgctagtttttatttttacccatatcagatcttttaagaactagaaaagccttatgtatgagtcgtttttttctaggcaaattttgttacaggacatcgcgacttcgtggttttagctgtgggacattacacaaagtcacttttgggggaagacactctcaaatgtggttatttgccaatggacaccgtagacattaaaatattaatttctaattcaataggagagataaatagtgtaaaatatcaaaaatgcacatgggcccacttgtcatattcttcccccacaactaactccctctcacactctggccacaacgccaccttcacttgcccctggagaccaccccatccctcccttcttgcctcctctacctccatcgtgatagcacgacccggctcccaaacatgggtggcgcggcctggctcccctcaatacatgcaggctgcggcacggctcggctccagcaagcaccaagg

SEQ ID NO: 13624 - DNA, 660 bp, Oryza sativa
  Intron number 2 from transcript LOC_Os10g37830.1 (locus LO C_Os10g37830) derived from phytozome v7.0 (chr-ID Chr10; p os 20181741 to 20182400)
agatactggcaacacattccaactgccgaatcgaggtaattatcgctttgatctgatattcactagtaatatttatctgttcctctgtgtctttttttttcagaaagatgatatgataagatcgtatgagttgctacttgcatcgtgatgatgtcacaaaatatctcatggtgtgattgacctgttcctagtttcttgtagaaaattaatgaatgagaccatatagctatttattttttttgctttcttttttactcgtgtattcaactcacaaagtgtacccttagttctgaaacataatgatatgtttggctgtatgagcatgttctcaattgttcgggatagtgttcttgtaacatgcttatgttgtttgttgctctaatacacgagacatgaaatcaaatggttgaataatatatatcttattgctgctgtcgaaatgtaatgtagctgcagtctttccaagtgatggcataagaagtatgtatctactctgtgccagtggaagatattgactgtggatacatcatacaaatgtattcatctattcaaactcaattacggttgaggacatcatatgttctggatccaaccttacctatgctttcttgttttgttcatgcagattttattctgtggcataccttcagcaaatctggt

SEQ ID NO: 13625 - DNA, 889 bp, Oryza sativa
  Intron number 1 from transcript LOC_Os11g31480.1 (locus LO C_Os11g31480) derived from phytozome v7.0 (chr-ID Chr11; p os 17932322 to 17933210 reverse strand)
gcggggccatcgatctccagcgcccagcggtgccggtgcgccgcggattatgtcggtggcggcggccatcgtcgcgccagggctgcctctcagctcgatctacttgtctctccagctgatggtggatggaggaggaggaaggagaagaggaggcggcttttggggctgacaggtggggcccacctgttcgtctcaggggtgaatctcacagaactgggtgtttttggtgaaactctgatggatcaacaagacctgtgtggtgtggttaactgaagcaaacctcaaaaaccttgaatcgatgagcttgcgtgtgggttaatagttgtggtttattgcccttgctgagatggttggcatatagccttgaaaatgcacttcttttctgtgagtcttaattgcgtatgaatgatgtagtatatccaaaattctgtgatcttgtttttacccttttgaattattgtcgtcatatggtaccacacacataatgcatgaatcttctattccttatgaatgagatgggaaagtctgatgtcaaggctgtgtttaaatgctgtaacctgaacttgtgagcctatatatttgcttgtttctcatatcttattaagccaacaaatttttaattcccccatttcacaatgtaagttattccagcattttccacatttatattgatgctaatgaatctagatagatatatatgtctagattcattaacatcaatatgaatatgggaaatgctagaatgacttgaattgtgaaacggagggagtatcattttagcaagtgaccttcttgctctgtatgttgtgtattattctgcttttcatgtatccttagtaaaatgctataactacatgtctttttaatatttccttgtttcataaataga

SEQ ID NO: 13626 - DNA, 740 bp, Oryza sativa
  Intron number 1 from transcript LOC_Os08g27860.1 (locus LO C_Os08g27860) derived from phytozome v7.0 (chr-ID Chr8; po s 16986114 to 16986853)
agatcctccttcgatttgtggttcttgctgccagggtaagctcttgttagtccctagttgcactacctacacttaggaaccaaggttttttagacatcaaatagttgattggaatctgttcttgcgacctatgagctgatatatatcgtttcgaaatctgggatttattcatggggaatcggggctcttggtctaaatggaagttgtagatttctctctaagctttccgtagagtattagaacttaaacttttggtcaggtggtttgggagaaaagcccctgggagtgctgctgtttagaatttgatgaccacatgtagcagtttcagtctttcccttataaattatgatggctatgtgggctcataactagaaagtcttcacagaaccaaatgttgcaggagttggagaaagaatgaggcggttatgtgcttgcgaagcaactgtccagttttggacagaacagcaatcatcggttaaaactagagtctttttaagcaaactagggacaacggctaataacgaatagttagcgaacttttattagtctattacctgaaaagtattttactttggacggagtgttaagtgacgattttgagagcagagctctagcaggttgcacgtagcacgattgttgttctctttggttgtcatcctgtcctgttttgagttgtttttttaatgttatttgatgaatgttcaggtcgtggtgcgaatcaagaagtggaaacctccacc

SEQ ID NO: 13627 - DNA, 789 bp, Oryza sativa
  Intron number 1 from transcript LOC_Os08g01820.1 (locus LO C_Os08g01820) derived from phytozome v7.0 (chr-ID Chr8; po s 492809 to 493597)
ttgatcagtcaggagttgcacaacgccaacataaggtaattttggacagactatcagggctgtttcaaattttccatgtatgatttgacattatttgacaatgagactaggatcaacagtggcaagaaaggtttaaaaaaaaggagatttggaaggagagatgttcctccaaatattttttaagaagaaattgtgagcatgttgggattgaatacgggatctcggggttgaaaccacgtaccctttgctattttgctacggcacttgcatctcgcaagaaaggttcctcaagagctcctgttattccgtggttgatttattcagaatggtctttattcttgaaagctcaagagctcatgcataagcgtcttatttgtaacgagtaattgcgttggagcggtgcaagaattgatgcataatttgagtccattttatcatcaagtcatgttgattgctcttcagttacctgtgcactctgcttccagtcacattcacatgtactcctgctatgcctatcagtgcacatcgtgctgcttttgcttgcttattaacagtactcatcatagtaggctaaaaaaacccttgttgcatatctacgtatgtgtcgtttttttagttttcggcccgctctgtaaatacttttattttttcttaatacgaagatgcgcctctcgcgtattaaaaaaaaagcatatctatgtatctgtaaaaaaacaaaatatctgaactttggtctgatttcatttcatcacaggactacaggaggcaacaaaaaaacaaagcccaaga

SEQ ID NO: 13628 - DNA, 499 bp, Oryza sativa
  Intron number 1 from transcript LOC_Os09g08450.1 (locus LO C_Os09g08450) derived from phytozome v7.0 (chr-ID Chr9; po s 4407763 to 4408261)
gttgaacaacgtgcggtaataacctctgattttttttacttgtctttttttttcaaacatcaaccctttttggggtatgctccttaccggacaatttctaaactactgatattttaacaccggtattatagtatttttgagaataattcttatgcaaaaaagaaataattctttttatatttatgagatggaggtagtagtatagaagtatatattggaggaataaactagtagcaaaagctggcacttaaaacatataatagtatcttgggatcctaaacttttaatataacagcacaacctaaaaggtttgttggtttttggaaggtcagtctacaattgcaattttgatcagagcatcatcttctcagttcagagcaactacctctttgagttcaccacttcctttcgagttcacaacagcaaacacatcctttgaagttcatatcctttttcttttacttttatttttcatcgttgcagcaaccacaaataaaca

SEQ ID NO: 13629 - DNA, 879 bp, Oryza sativa
  Intron number 1 from transcript LOC_Os12g26410.1 (locus LO C_Os12g26410) derived from phytozome v7.0 (chr-ID Chr12; p os 15430646 to 15431524 reverse strand)
acttttggtgtctcacggtaatcaccctctttcaggtatttggttaagtctcctcacgactgatttttcttttcccattacctatttagacttcaaactagccactagttaaacggcacatctgtcgaaacacatggtttaaatcatggtgttcttgtctactccctctgtcccataatataagggattttgagtttttgcttgcaccatttgaccacttgtcttattcaaaaaattttggaattattatttattttttttgacttactttattatccaaagtactttaagcacaacttatcgttttttgtatttgcccaaatttttttgaataaaacgagtggtcaaacggtgtaaacaaaaaatcaaaatcccttacattatgggacggagagagtaactagtacataagtagatcgatttttgaacatgacgttcttgttagggttcacagttttggactgaattttccaagatttcgggtttaccggatgttcctgtaggatgttcttctcgcaaaaattttaagctcttacgagaaattaagtttaggcacaagttatttgaattagaatttttttagttacctcagaaaatcctaaagttcagtacccagaaattatgcatttgaaaatagtgaacccgtctgcgttctaccttaattccacttgttacatcagggtttacaatttcggttgggtggttgccgaaaatttgaaatttcgtgatttccggatttttatggccgaaattatttaaagttttaacatattttgactgaattttaacaaatttttacaaatatttgataaaaaaaattaaaaactttgggtagatttgtgcttgacgggagggccgatattaccgaaatttcaaacc

SEQ ID NO: 13630 - DNA, 424 bp, Oryza sativa
  Intron number 1 from transcript LOC_Os07g30590.1 (locus LO C_Os07g30590) derived from phytozome v7.0 (chr-ID Chr7; po s 18101834 to 18102257 reverse strand)
cggcgccccgcccaccgccctcagcaactgcagtacacacatgtcttgaatgcatgttacgttttccctttaatttcttcctgttttttatatataatccattcttttcataatataagttgttttgactttcttttttatcaatctttgttaaatttaattaagtttatagaaaaaaaatagtaatatttgggccggtttgtttggcagagctctaaatctgatacgaaatcagaattaattatattctttagtcccagtttctattcaaacggggacaaatgtgatttttggcatcagggtaaagatcagttctatggtagtgtataaagatgaaaatgcatgctttaaatttaaatctctaatttggtcctcgtcgttttatgcagtgccttcaccaaaaggtggagacagatctggttca

SEQ ID NO: 13631 - DNA, 777 bp, Oryza sativa
  Intron number 1 from transcript LOC_Os08g06550.1 (locus LO C_Os08g06550) derived from phytozome v7.0 (chr-ID Chr8; po s 3698663 to 3699439 reverse strand)
ggtctgcaggtatgcagatcactctctcaatccaccagcatcatcgtttctacgcttaataccgctataaagatgaagaaatctttaccatcgtctgctccctcgtttgtttgattgattttattctgtgtgtaaaatgtattgtaccttagatttagcctagaacaattcttgttcttccccttccctttgtggcgtaaaagaaattcttaatctcccgtctcctccgctccttgcgccgccaagacgagtcgctgctgaccaggggaggggcggcgagcagagcaggggagaggatcatgatgagcatcacatcctctttctgattcatctctctctcccatcgggtctggaatttgcttgtgttcgttcgttaaccctagcttctcttctagatctggaagaagctcttcccttaatttcagagccttaaccttaatacaggtaacagtttgtttgttccccgaaaagttagttggatccgcccctggccgtagagactagatctgactcttccctgctattacacatctctcatctctttgtctgattcgttcagtgagtcttgtcaaaagatctatgagatgcaatcttcttgtttaagatgctgcaattgttccgtttgaattgtaattttccattgctttgcggcttaacattacaacttctgaagaaagatttagtgtgacagtgtgactgaagcatgatccgattacaatttgtgactgatatccaattgcaggaggattttgagcagtacgccgagaaggcgaagac

SEQ ID NO: 13632 - DNA, 966 bp, Oryza sativa
  Intron number 1 from transcript LOC_Os12g02690.3 (locus LO C_Os12g02690) derived from phytozome v7.0 (chr-ID Chr12; p os 940019 to 940984)
ctctctttcgtcgactctttccgttgagctctctggtaagggctaggttgtcttctcctcccttccttcgattttagccgatttgtttggattagaccgaccgtgtccccttcataaatatgctagatctactaaaagctgacatctttcttggttgatttcgatggaatgaaatgtctagtggcttgcttttcatttttcctacacttattcctatttttcctgttgatttgtgttatgccattgtatctttggctacaaatacaagttactgataaggccggatacaatagtgccttcttttaaattgatactgacagatacacacttgattaatagtgcttatttgtgatgcataagaacagatatgcccgcacttgaccttattcgataaggtcaggcaaccaaacatgccctttctaagtttctgtctttctgtgatctttctcagtattttatagttcaaatgatcttagcagaactgaggccacctctacacttgaactgagcagaatttataagagtacatgaacagatttttctacacttgttctttttttcgtgctgttaggctgggaaagatggccaatgatgatatatgctgctgtttgtgatgcatgtgaatagatttttgctctacacttgttctcattttcttgcggtttcttttttcctacacttggtcttattttccttttccttgtactttttcttttgctacatttgatagatactggaaagaacagataccaatgacagtagctacttcacattcttcatatatctgaggccattgttctgcatttatttacctgctggaaatgaggctcaatgatgtcaaatttctgcacatatttgctacattttcgagttattgatgtcaggcaaatactatcaagttccttgttcatcttttgatatcaactgatgtactcatttttttaggtaaccacacttgattttgac

SEQ ID NO: 13633 - DNA, 692 bp, Oryza sativa
  Intron number 1 from transcript LOC_Os09g02600.1 (locus LO C_Os09g02600) derived from phytozome v7.0 (chr-ID Chr9; po s 1114820 to 1115511 reverse strand)
tttaaaatattcaggatataagtatattcaccaaggtatgtacataataggaatcaaaggaatgacaagaaagaaattaggagctaaagtgctaataaccttattagataaaagatgggacacaataaacaaagcatctttaggctatctagaaggagatatgaatgaaaatatgttgataacctatatagcgcctgatttaatgatgcctgtaaatgaattcatagataaaatgagttttggtttccaaacaaaaggatacgaagagtttaagggaacaaatttattaataagtatagaatttataggaagattgactaatagaagtgcctccaaatacaaaatcaatgtaaatgatgtgatagaaaaaatgcattctaaaggaataaaattcatgagccctttaataatagactctgaagaaagagcaggagaaaaatggccaattagtgaatttataaaaaataaaaccttgagtcagcctgaaaacttcataagttaccaagacagcaaagggaatgttagtattagatttacaaattataaaaccagagcttcggatgatttggatgcagaatcatctgacagagatattatagataacagaagacatagtatatctgaattgatggaaaaattagaccatgaaagtgaaataaaatattatgaagataaattaagagatatagcag

SEQ ID NO: 13634 - DNA, 764 bp, Oryza sativa
  Intron number 1 from transcript LOC_Os08g14820.1 (locus LO C_Os08g14820) derived from phytozome v7.0 (chr-ID Chr8; po s 8917676 to 8918439 reverse strand)
ccactgggtttgccatcaagtttgggcgaagccaggtagtgaagaccggtggattcgcatgttagggaaccttatgcatctaggtgattgatatttgagatatagtttagatgaaggaaattcttgtgttctatctcatggcaattggggatttgtttttaaaatcaaaaattcatttgaaagcttaatcctcatatgactttattcctacctaccaaggtcatacaccaaaatattaatgatgaaccttattaatgtgtatgacttcctgtcattatattgagctttaccaaattattgtgactcgtgttagatctctctcatgctctctcgatcaaggttgcacaaccattatgctaagcttctacattgtaagttggcaccattccatccatttccgttaccactgaaaaaaatatgatgaataaattctccatccaatttatgccttcttctcctagaaaaatccttggaaaagaaaaagtaacagaggggaatgcatggctatgaaaaatattgctctttcaaaaatatggagcaacattgaaaaaaaattaaaaaaaagaaagtttacaaaggagaaaattggagaagaaggcatatacaaaggagaagcatcttctttatttcccattttttcacatatatcatacactttccaggtgcaatccttgatccgagagtatgatcgactatcttcttgagtccatttatttggttttgcaatatatatatatatatatatatatatatatgatgcaggt

SEQ ID NO: 13635 - DNA, 803 bp, Oryza sativa
  Intron number 2 from transcript LOC_Os08g30480.1 (locus LO C_Os08g30480) derived from phytozome v7.0 (chr-ID Chr8; po s 18756319 to 18757121)
ccctcttcttcctcgtcggcgtcgacaacgacgaggtattgattcctccgccttccaattttcattagacaaaaggcaccctgcctccctttgttgaacaattcggatgatttaccaaattttgccattaaattccattttatggcaccgaaatgctcctgcagttgcagttagctcatagtttctgaacatgtccttgctactaaaaatgatattactacttagtagttgagggtttggggttgttatcagttctgaagatatacggtttaatggtttctattaggaactagaaatttcacatgagaagtttaatttactcaataatcatgaagtatcccgcatcgcaacagaggcttacatcttgttcatctgttttcttctttcgatgaatatatgcacaagtcggatttgctaattgatagtaatgtgaaaatgcattatcattgtctttgatggaactataagatatacgctattactatttatttatcattagatagaactctttagtaagaaaatttgttatattggtgattctgtgtggtaacactatttcatacttacatctctgcatacgaatctcagtatctccatcttatgcctgttgactgcagttcattgtttgctgcctggtttctcaatgaattttgtagcaattgccgaagtcaaatcttccttcaacttgttttggttgcaatttgcattgtagttttcctctgggatgtcaatcataactacagcctgcaccatgttttccttgattcatattaaaatgcctcaattttcttttgtttggcaga

SEQ ID NO: 13636 - DNA, 898 bp, Oryza sativa
  Intron number 1 from transcript LOC_Os10g21238.1 (locus LO C_Os10g21238) derived from phytozome v7.0 (chr-ID Chr10; p os 10768819 to 10769716)
ggttggtgtattgatttattttggaaagggagtgtgtgcgagttgtctatttcaagaatagattggatctatccggctgcactttagaatattttttagtatttttcgaataaataagaaaagggtgcacgatctcgacgaattacttctgaataaatgcagaaatcatatgaaagaaccatagcatttcgcgacctattggtaaatcaaatcaactttgattctctatagaccaataatatgagaccattaacacggttaaagctaaactgcttgaagtctaggcaaaagggggtactctttctacaactatattagtattagtaccaaatgctttaaacaggaaatagctaatgtagaatttatctgatatagaacactcatatcgataaaatggtttgaactatttactagaaggggcaccctgcccttttttatccaatgccgaatcgacgacctatgtataaaaaaggagaaagtttttggatttgaagaaaaaagtaggaattctatccattttcattttccatttttctatttagtttttcttaatgaaattgaaaattttaactaaagggcaaatacaaataaaaaaacaactttgctgcccacgatagatttttatctaggcagaagagtcctcttaatatttatctagtcttatatgggtttcggtatattgaaatataaacagaaaagagagggtagaggataggctcattacattaaaaaaaatatggaagtagccatagcaaaaaaagaaaaaagggagcgtgagagccaaatgaatcgaaagattcatgtttggttcgggaagagatcataaaagttgtaaacttaatagcaaggtaatctactttcattaaaagatttattagataatcgaaaacagaggatc

SEQ ID NO: 13637 - DNA, 990 bp, Oryza sativa
  Intron number 1 from transcript LOC_Os11g43934.1 (locus LO C_Os11g43934) derived from phytozome v7.0 (chr-ID Chr11; p os 26058305 to 26059294 reverse strand)
cagaggtggcccggcgttctcctgctccctcactggtgagcatcctaatccatcccatccggcctcggcctcggcctcgaatttcttctcctcgcccgccgcttgcgccgatccccatcctgcgagcagaggctgcttccaccgcatcgtctatcgccggtgagcatccctccctacccacacctcatcaggtattctgcgttatccctcaaaaaagtttgggacagggttagatctgcctctgcccagttccacctactttcaacttgttatttttgatttttgtttttagcagatgtaatttggttactgaatctcatccaaacacccttagaatagttgcattagaacggaaaatgtaagctcacataatttctactcatcctaactcacataaatttcttaagaagaatctataccacaaactactcagtcactcaaaatatctttttattaaggtatattcttataagaagttttcattccataaaattttctaaaggacatactgtgacacttggcattaatctaatttaacatttttttctttattaggttataaattttctaaaagacatattgtgccacttggcatgaatctaatttaacattctttctttatcaggttatcaggttagaaacaatgtgaattcaatatttttataaagtttaagtacgattcatacataaaattaaagaaaaatataaatttatatataagtgataacataataaaatacaagttaaaattattaaaggaaaaatattattaataaacaatgatattgatgtatttctaaatactttcacgtaatatttattaagtatcaatgagcaaaataaatgatttaccatatgacagattaattattaaaattgttttcatccgttgcaacacacgggtattttgctagttgaactcaaacgatccctttgtggccttgtgggcttgtaggaggcgaaagaaggagaattattgatcaatcaatt

SEQ ID NO: 13638 - DNA, 877 bp, Oryza sativa
  Intron number 1 from transcript LOC_Os09g15200.1 (locus LO C_Os09g15200) derived from phytozome v7.0 (chr-ID Chr9; po s 9228121 to 9228997)
gaggcggattggcggagactgccgccggtagaggagaggagacgagaagactggaactcggacggtcgcgtatgcccgacgattcgatcagaaacttgtatacatgtatatggtatacctaatacatacctaggtcttctgggcccctacttttcctgggccctaggccatcgcacttcttgccgtagcccagagccggccctgaaaaagaggagatacaagtgcacgtgagggagagaggagagggagggattacattctgtttataatctaatctaatctaatggtctaaaacaatgagcccaccaatttaaatgaaaaaaattgagggctagatgtttctaatctattagaatgccacttggtggtttagaagcgtttacagaaatgccacattggcatgagaacgcttgtagtatgtttaatggacttgttcaagataaagtggtataattcaaatatcataaaatttggtgttatatatgaaaaatgtcatgtttaagagtgccatatgttaattttggcagtgcagttggatgctgaaagccgacagagagaaaattaaatcaaagatgaccttttgttagggatcgatgtggaagaacatgactgtattactgtaatagaagtttattaaataatcttaacatcttagagatatttcattctagagatcttatgtctccagttggttgtaggtagattggacgtccagtatttctatgctaacatggccctccgctattgcaaggaaccctaggaagattgattaatttagttttctaaatttgattttggttccatttgccctttgggcttgcttaactgatggtatcacctgctgcagcactgtctgtactgttagagaagtgcaaga

SEQ ID NO: 13639 - DNA, 1032 bp, Oryza sativa
  Intron number 3 from transcript LOC_Os07g30640.1 (locus LO C_Os07g30640) derived from phytozome v7.0 (chr-ID Chr7; po s 18132583 to 18133614 reverse strand)
cggccacaccaacgaggtgatcatctctatccttgtgttttttatggtgcattttgattccggaaagtaactttcgtattgatcaacgcgcacttgaattatattcatgttcttagattagttagttagtgtagtagtacacttagtagtgatatctaagatccatgttctattttattttggccgtttgatatatatagataattagatatcacctgtaatgtttgtcttttttggtcatgacccaaattatagaaatgtactccctccgtttcacaatgtaagtcattttagcatttcccgcattcattcatataattgtggaaaatgctagaatgacttacattgtgaaacggaggaagtattaaagagatgtagtcgaaccttttcatcagatgtatatatataactttatgcatgttgcacttttgaatactcccggcctctaggttgaaaataattattgctaattgtttggataaaactgatgtcaatctttgtaaagttttaaaatattaccttagtaacatgaagacaataagattaatctcaaaagatacttaaattacttttataagtaattaggttcaaaagtttcccactagcacgtccccatctagctccatccgtccctgaaaattccctatacgattttgcatagagtacaatcgtttaatttacatgtaactaccgtttaatttgctttagaattcatgcaagggagataggtaaaaatcataatccacgcacatgtgagtggattcggtacaattatctttgtttttacggaattagcatgtcacttaaggatttttgaaagttacatagatgtttcactataattacatgcaaattacaatataataatatcatgattgtactatatttatatttgtcaaattttttagttaaaatttaacgataaatatatagctaatcccgttgaatatttgttaactattttgacgcgtatttttccaacattattgcttttcagctgaggccaaagaagaagctggtatccaagctttc

SEQ ID NO: 13640 - DNA, 884 bp, Oryza sativa
  Intron number 2 from transcript LOC_Os10g41170.1 (locus LO C_Os10g41170) derived from phytozome v7.0 (chr-ID Chr10; p os 22046410 to 22047293)
tgggttgcatcaagaacctctcccgtttgttcctggtacggattttagtattttaccatcatcaatgacagtgatgtgctgaatgttttcagatctggtgtatggggattctgataacaaaattccaacttactttgttaaatctaatgtcagttcatggcccggagaaaattcttggttgccatctgagcttatagagtatactggtaggctaaggaaaaattataggacatgttcatattgtagccaaaataaaccttaccaaaccaaaattttggcaatttggcaatattgtcaagttttggcaggatttcttatttatttaccagagtttggtaagaaactaaatggatgcgcatatttgacaactttaccaaaaaaaatagtatggtttaaaatggcatcaatctgaacaagcccttactctagcacttttcagtcttctatcactgttcactaactaggcaagtgagcagtgatataggacttttgaaccttgtaatttctatgtaggatttctcaaatcactacagccaatcaccatttgcatacgaagaatcagactcagtgttatgcttgaagagtcttcccctgaataaagttctttggtgttttttgtactagccaagcaccgaattatcacaagaagtgcagtttgtgacttctagaaaaattgaaaacacacaaaagaaactgtttaactaatgagtattcaatcgaatttatcagaaattatttaatggtatgccgaaaaggcaagatcgcactatccatttgcaaatgaacagtcaaacttgtcgaaaatgtgaatgatcttattcttggagcattgactttgtgttcatccaggcaaggaagcagtaggagtagtgtctgctgttgga

SEQ ID NO: 13641 - DNA, 786 bp, Oryza sativa; identical to SEQ ID NO: 9660
  Intron number 1 from transcript LOC_Os08g16570.3 (locus LO C_Os08g16570) derived from phytozome v7.0 (chr-ID Chr8; po s 10137869 to 10138654)

SEQ ID NO: 13642 - DNA, 293 bp, Oryza sativa
  Intron number 2 from transcript LOC_Os10g32570.1 (locus LO C_Os10g32570) derived from phytozome v7.0 (chr-ID Chr10; p os 16992767 to 16993059)
ataaggtaatagcacaaagacttcctttgagcttctcaaaaaaaaaaagacttcctttgagctccttttttttttccttccctacattgaggatggaattgatctgagtctcacatataattctctttcatttggtaatatccatcttcctaatctgtatcttgctatttctagattttcttggaattattgttcttgattttttttcccggggatgaattatcttcaaaactagaaagagttgacattgactccagagcttgtgttgtttgtgcagattatcaaacgggcaa

SEQ ID NO: 13643 - DNA, 985 bp, Oryza sativa
  Intron number 1 from transcript LOC_Os07g27430.1 (locus LO C_Os07g27430) derived from phytozome v7.0 (chr-ID Chr7; po s 15981810 to 15982794)
ccctcgccgccggggtctccgtcgtcaccgccgtgagtagagtcgtcgcgaccaattctctcagattcaagtccatgttcgtcagtgcctttggtttagggggtatacgtatttatatttggtattgcaagaagctgaggtcaaatactcaaattcatgcttttagcatttgctaattatctgaggatttaggccaacatggggaatttgaagaggaagaagggtacaaatatgaactgggtgattggtgaattcgttttgttaactcggtttatcttcgtcattgcgacgttggggtttacgtaatggaagttccattgtcaggactcgcaaggttatgcttgatttgcttgtcactagacttagctcaatttttatctataattacttaacatacgagttcattttttttctttgggaaatatcctgataagttctaatgttctacacactgatgggatgggcgtctttttaacagttgatggttgcctgtcatgatgtgccccagcgatctgatagtaatgttgacattcatcgatgctattgatgtcgtccagtgctcttttaatacgcacaaatagattgaaatagtttgagcagtaatttgtctcgaagttaaagtaacatttttcctattctaacttaataggaactttccaaattttttgttcgattttgtcttcatttagaagtagaacttcaatatgtgaagaactctccataatcctagatatctttcaaaactataagttagcttgcttcagaaatctaataaaatagcaatgggagaatttgattgacaaaagggtataagaagaacagttactacttactataacattaccttttctaagttagaatcatgcattcgcacgttgattgatttgtctttttttaacgatctgttttgaatcttaccttgtcattaatcttgactttaatcgtttcagtctgcagtactcggtgagtttttggtctcagggcg

SEQ ID NO: 13644 - DNA, 944 bp, Oryza sativa
  Intron number 1 from transcript LOC_Os09g19330.1 (locus LO C_Os09g19330) derived from phytozome v7.0 (chr-ID Chr9; po s 11562901 to 11563844 reverse strand)
cgttgggggtggggcccacgttttttcctgttggtttttttttttctgtttttgcttctctctttagttttttccggttttctttccggttttttcttttcggtcttttagcacttacatatacctataaaaagtttgtatatgtgtatacaaactttgtatacgtgcatataaactttgtgtacgtgtatgcaaactttatatacaacacgtatacaaactttgtatacgtacgtatataaagtttgtatacttgtatacaaagtttgtatacgcacatgcaaactttgtatacgtgtatacaaactttatatacgacgtatatacaaagtttgtatacatcgtatacaaagtttgtacacatcgtatataaagtttgtatatgtgtatattttttatacatcaaaaatatataaatataatatatgtatatatattatagtagtaatattagtagtattatagtgtagtagtactactagtaatattagtgtagtggtagtactactagtaataaactagtactagtatagtagcagctatccgcgcaactagtcgcgcattagccccggggtgggggtatgggggtatgtgaggggagcgttttagttataatgcacattgggcgcggtttagcgcatatatatatatatatgtatgtatgtatatatagacaaacatacgaaaaaatgcccgtgcgttgcaacgggaaaaagagatgagaaaattgaggagaagttgagaaagatttaattatgtaattaattaaatacaaatttcctggaatacttgatattttttaagtaggtaggtgtttaaattaatttaaaagtaaagtaagtgtgtaaataaaatgatatggctgaatttattttttatgaagttctccataattaattacactttatggatttttcttgaaatttttagaacttatttgctaa

SEQ ID NO: 13645 - DNA, 856 bp, Oryza sativa
  Intron number 2 from transcript LOC_Os07g37260.1 (locus LO C_Os07g37260) derived from phytozome v7.0 (chr-ID Chr7; po s 22330631 to 22331486 reverse strand)
caaccgtgagtaagttggaagcaaggattaagtaaaaacatgtgattcaacggattttttttaaccaagccgctcgctctctctttttggggttttttttttgggaggggcacactatagtctgcgcgcatgacgcggggaagaatgacaaatggacgattgagcgtttaaatcatagagatgtacgaaaacatgaaaatgcatttttagtatttctttaacaaaactagcaaatacagtgcctgtgcatggcaaacaaaaatatattataagatccaaaataaaataataatcgtcccaaagaaaaaagaagccttgtttaaaatcctatgcacgatgaattatatccattgcatatgcacatctccatagaatggaattatttaaaaacgcgttgcaggcaccactacatatctatcaatataaagccattaaagattctctaaagctaaagttggacatagatcacgttctactcgactgaagagtagttagaaagcataagatgagaaaaacagaaaaaagacattgaagagcattctagttcactacctaagggtgcagaccgcaggcccaaatgccagaggagaaaaggaaggaacacgactttaattctcggagaagctgaaagcctgaaagaatgacttccaaactaaaacaaacccagctctcaaaaagaacgtgaataatattgcttcaaacgactgacgctaaaaaatgtctgatgtgctaaagatttaacccttaattctgcccttacatttgcgcgcaatttacagaagtaaattcagtatgcaagctctccggtctctgatctttgaagtgaattactgagcgtttctcttgcctctgtcag

SEQ ID NO: 13646 - DNA, 203 bp, Oryza sativa; identical to SEQ ID NO: 12830
  Intron number 2 from transcript LOC_Os11g30820.1 (locus LO C_Os11g30820) derived from phytozome v7.0 (chr-ID Chr11; p os 17481340 to 17481542 reverse strand)

SEQ ID NO: 13647 - DNA, 916 bp, Oryza sativa
  Intron number 3 from transcript LOC_Os08g16690.1 (locus LO C_Os08g16690) derived from phytozome v7.0 (chr-ID Chr8; po s 10206646 to 10207561 reverse strand)
cttttgttgacagcaaaagtgacacaagacggatcgtaagttagacatcctgtcctttttgatgctgccttcgcattatggaagaaatacttcggaacttgctactgtttagattctagatgaggctgttcttgtgcaaccagctgcttgttttccttcttgaggaattacagagtgttgtacctcttgtccttgccatgtccacctttctgttatggaagcatagcttttgaactttgatctgttacattctagatgtggctgttgtacatacagctgctacttttccttctgttggcagaatgcatagaatttcactgtatcagtggacggttttttgagttgaacactataatttggtgacaggctgacactgatttagcattttggtatttttgaatgacaggctgatttagcatgatgaaagagagctgtgaatatgccttgctagaaatgtttgcgtctctttttttccttgatcttcaaatgctgtcaatgtatcctagagttttgaaggatgttgcaattaatactgggtactagcaggagcacttttcacgtttgacgatttggttcaaaatatatactcgctccgtttctaaatatttgacaccgttgactttttagcacgtttgatattttcatcttattcaaaaacttttgtaaaatatgtaaaactatatgtatacatataagtatatttaacaatgaatcaaatgataggaaaaaaaattaataattacttaaattttttttgcataagacgaacggtcaaacatatttaaaaaaatcaacggcatcaaatatttagaaacggaacgagtataaaacagcatttgaagtgacataactgaatgttgtcgacaatcagggttcaaaattttctgaggtttttctgaaaatcgtgttgcaacag

SEQ ID NO: 13648 - DNA, 1053 bp, Oryza sativa
  Intron number 4 from transcript LOC_Os11g28350.1 (locus LO C_Os11g28350) derived from phytozome v7.0 (chr-ID Chr11; p os 15845041 to 15846093 reverse strand)
aaccctggaaaggctgctgccagtgacacggtcagtttatattcgcaaactggatggtaatagtatgggtacactaagtttttcttttattttggtaaaacagcaattaagctttgagttttggttggatatgtccatatgcatttgcaattccatcagctttgcgtgattgcgaacattctgcgatggccctgttcttttcagcttatgcggacatggattattcatgccacgcttttgaaactatgatttctcaaaaaatgtttgcattgcttagataactctctaaggtatgttttagctttataatgtataatatctaattcatccatataataatctgtcagctaatcaacttataagccaaagcgaatgcataacctaatagcttctactgttcaagcctctaataaatttcttcagcaagtgctaccaataaaatactaaatcgcatgttccagccttcaagaaaatactagtattgcaaatgtcgtgctattagattttttaccttgattttcatcaaaattttctgagtggtttttttatcaataaatactatcagcaagctttggtctagctgaaacttggccacagtagaattgatggcttagactttggtgatggaagcacaatctttacctaggtcaatttttgcttgcaatatatcagtagaccgcgtgttcccatctctttaaaaaaataaattctcgtggagaccttacagctttatgtattcactgctttgttatctgaccatataccgcttctgcacaatgtccacggtttaggaagatataatatgatcatgtttgttttgcagccttactttttagtttctaattatcctggcttattctacttctgtaaggcatagaaaatttaccggaagcttctcactcttatgcccctctgtttctctgtttgcaatgaattttatctgttcttttaaataatttatcacttttctttgtgaagtataaatatgaatatttgtcacttttgcaactcgtaacaggctgctggaagctcccagggcattagcagcagcgc

SEQ ID NO: 13649 - DNA, 803 bp, Oryza sativa
  Intron number 1 from transcript LOC_Os11g07120.2 (locus LO C_Os11g07120) derived from phytozome v7.0 (chr-ID Chr11; p os 3537046 to 3537848)
actagactgcaggctgaaggctactcttctcgctggtaaataaccttcttgaatgaatgtcgattgatcttttaatttaatttgtttatgttcatctattaattgactgctttgggggcttttgtgggatgggtctccatgtatctacaggcttgtttctgttcatgaattttatgcatatttaataccccccccctctcatgttgctttgattttttttaaagtcaaacttcttgaaagtttgatcaagtttatagaaaaatatagctaacatttatagcaccaaattagttttattaaatctaacattgaatatattttgatagtttctttgttttatgttgaaaatattgctatatttttctgcaaatttggtcaaagctaaagtagtttgatttagaaagaaagttaaaacgacttataatatgaaattgagatagtacacatatgattagaaagatactgttagatgataagaaattattgtttctttgttacctagaacttgttttgctagcttctggcttgcatcccctctttcaagtctttgacactagagcccttcttttcaatgactggtgatcatatttcttttctttttgtttttacgaaactgcgggagtcagattcatcattcattaactagtataaaaaatatatgcgtagtaaaaaaaccaaaagaaagaaaaatcataactgtatgtttctgaataagtatatctgctaactgtatgtttctgaagctacttctcaactctgattctgaagtctgaaggacagttgcattcatcaacctatagcag

SEQ ID NO: 13650 - DNA, 1014 bp, Oryza sativa
  Intron number 2 from transcript LOC_Os10g35000.1 (locus LO C_Os10g35000) derived from phytozome v7.0 (chr-ID Chr10; p os 18596069 to 18597082)
ggaaggagggcaccggcctcggcgcgcaagagcaggtttgcgcctctgttcttgcgtcaccggaaatcttttgtgtgtgtgtgtgtgtgtgtgtccatttaccccaattgtagttatattttggggttttgcactttgatgcttaattctgttcatcgtgcatgtgattttgttttccctcggcttgtttggtaactcgagggaaggggattgggagtttacacgagagaatttacgatgagattaagatgggaatttgatttttaatcccaatgtcttgtttggtagatgtgatggaaattgatagggagtttagttggagattagctcattaataaaaacggatggctgagatttgcttagaccaagtaaacgaggaattccctcccaattacctgcccctacccaggtattgaaaaggagggagtttcttcctcaattctccatcccaatcccaccaaaattcccatgtctcccaaccaaacaaaacacttaatagcctcatccctctaaactctcaatccctctttaaaactccctccaaccaaacgggccgtagttgttaatggtgcgtagagttaaatgttgagacaaggctactgcaagttgaactgttgaaagctcaaaaaaatgtgtagatcaacgtaagatatatgtttagtttctggataatggttagtggtctctggaggaatggtaaagccaaaatttgtttccgaaccaagtaggcaggtagcttaccttagttggctgttaactccaaatgtttagtaggatctgaaattatatatcattttgaccggaatgattatctcgcatgttcataggtattaattaagagctgatgtttagtagtcatatatgtgttacatactatgtttgcatgtcacttggatgaagccagtttatgggttagatttgccttttatgctgtgtttttgttttcatactcacttagcccaatttaatcctggaacagggaagattggagcctgtagaaagtcgtgtgaagaa

SEQ ID NO: 13651 - DNA, 936 bp, Oryza sativa
  Intron number 2 from transcript LOC_Os07g16130.1 (locus LO C_Os07g16130) derived from phytozome v7.0 (chr-ID Chr7; po s 9394936 to 9395871)
ctcatctacagggtgaggaattcgccgcctgacaggtgatgttcctgttctttgctctgtctgctggaaatgaatgaatcgatgagtggtagaaggtccaaatgctttggaaggattttgatttgaatccttaagtctggtcgtggttgcatactttactagtacacagatttatttgtagaggattaacggttcatattagtttacttttgtcctgaactatctgaaattcttctgaagtaaccatctgggactaaaccacttaacatttacatttgcccaacgatgctcaggaattaacaggcgtttcagagaccaaattacagcaattctgatgatagtagcagacagttgtaattgagatacgtcagtccttaactttatgaaggttacaagtggtaggtttcaccatttttcttaggtactgttgtgcattgtttttttagagagaactttcctggcttttatcgaaagctagattggtttattgacgtactctgaaacttgacgtactagtgtactacagcacaggaagtcacgaagtaacaagcagatgcatgtaggcacaccaaatcacaactaggaatccagattacagaatgctaacagtcttcggaccagggtggcttatcctgctgaatactaggaatccagattcttgtgtgcagcttcttgtaacaccaccctggtcaagtatgcatgcaaaaaaaagtcactttgaacactaaaactagtcaaaatgattatggcatgttttactatctggtttttgaggtgcctgttggtgtcatcacttttggtttagcaataccagcaactaagattagtcaaaatgatcgatacacataacgattttgggtctaacaatttcactgagtgctgattcagttcatcattgtcctgttagatacgcgtgtttagtggcagaagaagtgg

SEQ ID NO: 13652 - DNA, 680 bp, Oryza sativa
  Intron number 1 from transcript LOC_Os12g01500.1 (locus LO C_Os12g01500) derived from phytozome v7.0 (chr-ID Chr12; p os 303027 to 303706 reverse strand)
ccgccggcgaactcggcatcttcgctaacaaaggggtatgcgcttcctactgaaaatctctcctttctagtataaaattgaacatccatgttatgattacttactttgcttgagtttctaaaaggattagaccgaacaatcttccttcgcattaggaacaagagtaaacctagccaattccaacgaaaataagtgttttttttttcacatggaaataaggcaatgttgtaccataattttgatctcagcagacaacaggtgttaatttgttatgctggtaccatgactttgatgatgaacatgagtaggaaaattttaagcgcatctcttagtcaatcaatgcgatttgtttcgataaaattcaatgtgtcaatgttgcttttaggtggaaatcacacagctctctttaaggactactctaaaatgcgcatatggttatattagttgcttcaattacactagtttgattgcttggagaataaagaataactcgtccactgcagtttctttgttttttctaatgcaattttactagtgaaccatgaatcgagtttcataacctactttgctgggagtagaaaatgccatgatggccaatatctgctgcatgatttcaattgcttttcaaatcttcttgtgtcatccgcataattccttttgaatttattgcagactagatc

SEQ ID NO: 13653 - DNA, 340 bp, Oryza sativa
  Intron number 1 from transcript LOC_Os09g09750.1 (locus LO C_Os09g09750) derived from phytozome v7.0 (chr-ID Chr9; po s 5275701 to 5276040)
ggaggtttagggaaaacaactcttgcccgagttatatacaaaaacaatgacattaaaaaacagtttgattgttgtgcatggatttcagtgtcacaaacttatcaagctgaagatttgttgagaagaatattataacagctcctaaacatggatgggaagacttttcatcacatatatgatatggatcgaattagtttggcagaaagattaagagatcacctgcagtgcaaaagttatctaattttcctagatgacatgtggagtcgagatgcttggatattcttaaatcatgcatttgctacaaataataaaggtggacgggtaatcatcacaactagaa

SEQ ID NO: 13654 - DNA, 787 bp, Oryza sativa
  Intron number 1 from transcript LOC_Os09g25990.1 (locus LO C_Os09g25990) derived from phytozome v7.0 (chr-ID Chr9; po s 15614373 to 15615159 reverse strand)
tccaagctgcatcagaaggtacgttatacaattgtaagctgtcactaaaaatcatcaaagtttgggtcatcatcgcatcataatgtggcaagatcctatgcaatagttatttctttgaagttaagggaacttcacaaattttagaacttcaatttcattatatttaaatgtaatggagggaaaatgatacaaaaaaggcactgaaacacatgtttttcatttatacagtttttattttcgcgtttctcttttctacaattgctgcaaatcttcaaagcattatgtgcatttagaacttaatcctaaaaatgaaaattttaagcaaaataaaaaactagaatcccgtgacacctccacagatctgtatgcaggttaaaatccagtgtcttcacagttcacacttgtcttatcgaatttaagtttttgccattgtattttaaaaatacaacctttgtgtagtcttctctatctttagcaactccttcaattttggagcaaaaagagagctccgtatcaaatatagctatgctatgtagaatgagctcactattttgctctgatgtgcccaatgtcgtgatgaacacctaataagaggtgattatacagcctagccattatattctaagttataacaccgctacttccagctgcctaacacctcaagttgcactaagattcttatgtgtgcaaccacaatgtatgcacgtcttacatgttcttcaaattaactgatttcctattccattgcaaagcaattgacctgctggaaaattacaacgtgagagct

SEQ ID NO: 13655 - DNA, 1026 bp, Oryza sativa
  Intron number 2 from transcript LOC_Os08g30020.8 (locus LO C_Os08g30020) derived from phytozome v7.0 (chr-ID Chr8; po s 18450489 to 18451514)
ggagcggcgaggcctcttatcaccacgtgtggccggtaatactactactactacaaagcacactctcttctgtttctgacaattaattaatcttggagctgtatttttttttgtccttttttcccgtgttggaacatgttttttttttatgtatatatttttagtaagtatcttgtttttttttttagttttgtcatttttggtgcaatcatctaaaaaaagagtttaagagttctggtggtgctgatgtagtattttgtttgattcacggtttaaaactacgaaaatctttacctttctctttctttactactggctttatataggattctcagttattatcggtttatcctaaaatttggtcaaaaacatgtctaactgaatggagtgttcctaccttgagttttttcaggggaataaatttgctggcttaattgctaaagactgcagttttgttttgtggaagaacactgcacttatctttcgtgatgaccctgtcaatagtagttcatatactgctctccattttttataacatgttgattttttacagcatatttataggctgtcgattttttgtaggatatttcgaacatcttttatactccctctgttttatattataagtcatttgacttttttatagtcaaacttctttaaatttgaccaagtttatagaaaagcatagcagttttttaaacacaaaccaaacatactataaaaatatattcattattaaatttaatgaaactgattttatattttagatgttgctaaatttttttataaatttagtcaaatttcacaaagtttgactagaaaaaaaatcaaacgacttataatatgaaacaaagggagtatatatatacctctcgtttttgtgtcaatatgccgttaatttgttgatttaaatgaatcactttgtttttgcagccgatggaatttggttggaaaattgttttgggaatattaattggattctttggagcagcgtttggaagtgtaggaggagtaggtggcggtggg

SEQ ID NO: 13656 - DNA, 1000 bp, Oryza sativa
  Intron number 1 from transcript LOC_Os10g05220.1 (locus LO C_Os10g05220) derived from phytozome v7.0 (chr-ID Chr10; p os 2557876 to 2558875)
gcggcggcggcggtggcgtggcggctctttgtcaagttagtcgccgtcgtctccctcctccttcttctctcccttccccgatttgtttccgccatagctgttgctgatggggcagtgagggtctgagggagagggcagagaggcagaatggggatggcaaattttgtgctcgctgaatatgttcgtaggttgcaattgagcttcctaccaaacgatggattcagggggttgggttttgggaggtggattgaccgacccaatccctatttggattgttcttcccccacttgtcaaataaaacccttgattagtttttgagtacatttatgttcaagtgagaatgcacagtcaagctaaatgcatggaccaggatggctgctctggttatgaattgcaatcccccgcaaaatatgcttaagtactattagaaaatgggttcagtagtatttacaagcttaacaatggttacggacgaacatttgagttgatggatattatgactgaaaatcgaccaacctaggaggaattaggttgcctgttgttttgattaggaagaaacatgcacccaaattcgcctcgacgagggcttgaacttgggtggtctgggcgtacatccacgccctcgaccaacttatgtcaggtcaatttttgtgtgtgaaaacataacctttgtattttattgtttattcacatatctttgctattgtaatttgttgtactgaagcgatgtcagggaaagtttatatctacggttgttatgggcatcgaagtacattattgctcagttcactagggcttactgaaacagaattaagatgaatattatatctttctttagctaggcatgtcaaattgctgaagaaaacgtgctcccaaactgtcattacccatttgagcatgttgccttatcatgttttcgccctgctttccactaactgatgagtgcagaatttatgcttgtgcagggtaatttatcctattcgcaaaactggtacatcag

SEQ ID NO: 13657 - DNA, 527 bp, Oryza sativa
  Intron number 1 from transcript LOC_Os11g03900.1 (locus LO C_Os11g03900) derived from phytozome v7.0 (chr-ID Chr11; p os 1557915 to 1558441 reverse strand)
caagatcgagaacctcgtgcgatccgtctactccggtcagtgccttttccctcctgattatgctgaaaaatgggttgaattttgggttcttgggatggatttttgcacgattttcatgtgttatgtggtctgactcggctgtatcacttggtaaaagctttgaattttgattgggatccatatcacattttggggaatatcattatgtcctttagcgattttgggtttagtgatccttgcgagggaaattcttctgttcgcactttgcatttttgggatagctcccaaaattctggatctcctcggaaaaggtagaatttgacccattcggatcaactctaaatcttcttgggtttatggcattttttgtgatttattcaatttaacacttggagagttgagttccttgctctatgaatttcctgacgatttataccgtacacaattagtctcggctacaattttggtgttctcttgtactctatatcttttgtcatgttggatgtttgtgtatttttcagaggttg

SEQ ID NO: 13658 - DNA, 611 bp, Oryza sativa
  Intron number 1 from transcript LOC_Os11g23050.1 (locus LO C_Os11g23050) derived from phytozome v7.0 (chr-ID Chr11; p os 12790708 to 12791318)
cgtttgtcggccactcgcctcggttggcacacggggtatgcttccgttgacctgtggaccgtctctgtatacttggtcgtacggcaatagtcgaggatgccgacgtcgtttttgaagaagaggatttgaatgacccgttaagccaaaggtgagtattttttccaactagtgcgcatctttcatgtgctcatcttcgtatgttcatattaacctagggtgtgattagataatgggatatatgggattggattgggattgggaaaatcaatgatgggttaggattaaattgaagattgagaatgtatagttaggatttaaagatgggtgtgaaattatttccctttctcatttgccaaacattgccctagtgtgtactaaatgaggtcagcaaatttgataatacagagggctgcattttgcgcctaattgacattttcattttttgatgttataaaacagagttgttttttctcgtttgtttatgttactatataagaatactagaagtgtactgaatatatttttttcatgtaaatcaatgtttgatattcctactatattatcataatggttgttttccacacaaatagcatcaagttgacaggtgagat

SEQ ID NO: 13659 - DNA, 778 bp, Oryza sativa
  Intron number 2 from transcript LOC_Os10g03540.1 (locus LO C_Os10g03540) derived from phytozome v7.0 (chr-ID Chr10; p os 1529884 to 1530661)
tccttctccaccttcccctcctcgccgaggacaaggtccatcagattgctcaatgcttctttttttttttctaattgttgcgggtttcgatagctgttgcttggggtgcagggtttagatgaaacagcacaagaagtgatagagtcgttagtatttaggcagtaaatgtgatttgatacctgttagtactgaatccagtgcatgcattatttggctgacaaattttgattattgattattcaacattgcgtatattccgatagtttttttgatgccctgtgctttattttgtcatgatctactcggttcaggttcaattatgtatagataagacttaagactaccttgataattttccaaattgctgacgagtagcttgtccaagaacatttagttgcaatttggaaaagatacttatgtgttgataatttgttttccctgttttgtatgtgaaattgtgatattttcttttgaagcacatcaatattacctgactctgccaatgtgactgatgattgttgagtatactcttccacaaattattagtgtatcttctatactgcattattttacaagatacggtaggatcattttttagttgattgatggtgctgtactgctcttattacactcaattgttccttctgaatacaaaatcatgaatgaattgttacatcttgaccttgcatctcactttcacacgcacgcccactggccataaaccatgaagagtttcatcctcaatggtgtaccgaactcatttgtaccgatgtgcaga

SEQ ID NO: 13660 - DNA, 528 bp, Oryza sativa
  Intron number 1 from transcript LOC_Os11g41150.1 (locus LO C_Os11g41150) derived from phytozome v7.0 (chr-ID Chr11; p os 24186170 to 24186697 reverse strand)
gggcgcagggccagaattgcggcaacttcctcacggtcagtgtctccattgttcatccttccctcgattcagtcggcctccatgtttgatttgattcgttcccgccaaattttatttgcacatggacactcacctttttttagatgaaactaaacttatttcagaatttccaagatcaagtggaactttatgatgctccggtcatgaattttgctgaaacattctcatcttttttttgggtgaaaaaaaaagagattgtgattctgatatatgaaccagtcatcttttttgatgaaatttatttgcaattatttccattctttttttctttgcaaaagcaaatggaacttgctgatgttctaggcatgatttttttttctgaaccaattttctccaatctttcgagtgaaataaagattgtgattctgatatatgaatgtacaatttctggatgctgatgttgttgaacactgattgtggtgagactatgcaggatcggccgtcaaccaaggtgcacgctgctccggg

SEQ ID NO: 13661 - DNA, 1039 bp, Oryza sativa
  Intron number 3 from transcript LOC_Os09g28840.1 (locus LO C_Os09g28840) derived from phytozome v7.0 (chr-ID Chr9; po s 17515961 to 17516999 reverse strand)
aagacaagtcgacccgccatgtaagtaacacgtaggacgaaaacgccttcgaaaccgtcgggggaatcgatttgcaacggtttgaaaagttaggggatgggttatataccctgttttgcacttgaggggtgcgatattttcaaccaggcacatgagttgaaggaggcaaagtagacttatttccattagcaaatcaacatttttttcttttccaattacatggtggacgcacacacacaaacaccaccatacgtaacaccacgctcacactcctgtaaatgcgtaccctaacaattatgctaagagacggaaaccagttacatatctctaatctcactaaaatctcattaaaaacacgtatatacgtgtaatattcatttacattaggaaaagttatcatcatctaaaaaaagtatgcactcacaaacccactaccacaccagtaaaacttttccaaatcgttaatatgatcacgtagatgtcacctcggtctcggcgccatcgtgtggattgtagccgagggctgttaacctcggcatcgacggcaaagaaagttgatgttgtccggtgtacgggatgatgacgagtttatgtggaggaagcaacgaaaatgctacctcacacgtggatctgcaaaaccaaccgttattttttctctaatcaagatcagtcaaatttcaaacttcttaattaatactaacagatggcttacgttaaaaccatatcaaacacacaaaagccaatagcttatagaacttgattatttcaagaactctcagtggtagtgatgcaaactaggaaactcctttggagaatccgtgttgaatgcctcgattccttgttcttctccccatctaatcacatatatactcacatatgaactgttaaatcctcggaggaccttccaaaatttcttcacaatccaaccaagatgagacaccaaatcacattatccgtcctaatcatcatcctcctagcactaggcgcatcagtcacagacgcgtcgtcccattcccaggaggatcagctcatcaagttc

SEQ ID NO: 13662 - DNA, 948 bp, Oryza sativa
  Intron number 2 from transcript LOC_Os11g29240.1 (locus LO C_Os11g29240) derived from phytozome v7.0 (chr-ID Chr11; p os 16487139 to 16488086 reverse strand)
cctgcgaggatttgctgcttcaactcatccgggaggtgaggtattcggcgcaacgcattgacatatttgcctcattcgatcaagtattaagtattcgtttactggaaaactctgcaattcgtttcaaactattcgtgaagacaaggtgatccccattcgcatggttgggtacatttcttgaataatagggttattggtagcttggttcagacaccctttctatgttttgagctcatccattccagtgatatgaaacggcattttcaccctttgacttgtaatctgctcagcaccttttgaagaatatgtgcttagatgaaccttcagatctctaaccaatgagttgttcactgatgcatgtttattatgtgcaacattgctaggcaagacccagatgttttctgagctcaagcattctggtgatatgaacatgatattacctctagcattttttgtcttacgtatcccaattgattttggtacctttgctctagttatatatagcatatgcttatgaagtctcaaaagatcattgttgctgggaaagggggtatactgtggtaaatgttatttttcacatgattattggtggcctgagtgctccatgaatgctttaatttgtgcagggaaaaggggaggctgtgctaatttttttttaagaaaagaactgtgggattgatataaatatattgctagctgtgttaaatattgttcctcacatgattatgcatgtatctactgtcacccttttaatttttttgttgtttgcttgtgattaaacctgttttttctctgtgaaacaatattatgcatatggtttattcaagtttcgaagctagtgtgctgcaatttgtctgtaataccttcctggtgtccagataattttgaggtttactttacataatgtaaaattttcaggttggtagctcagggagcttggagaaggat

SEQ ID NO: 13663 - DNA, 980 bp, Oryza sativa
  Intron number 1 from transcript LOC_Os09g12720.2 (locus LO C_Os09g12720) derived from phytozome v7.0 (chr-ID Chr9; po s 7279247 to 7280226 reverse strand)
aggtgtgtactccttttgcatttccccccttttcttgagtttgcgttgtgaacagtgtgctaacagtggctgtgtgtggcctacctggtttatttgatactgatcattcatttattggaattattgttctaggagtagctctcatccatcccatcttgtactagtatcctgagaaaaaagaattgcaatagggggggggggggtaccattcttgtggttcggtccatgtttatggtcccttcatttttctcccagagatctactttggatctacaattctagacatatatagtagtagtagtagtagtttgatgttaaaagctgtgaacaagttgtattttgggtttatttatacttgagatattttttttttgttgttgtttcagttgttggtgaaagttgtgcattctctctggtcttcgtacattttccacgtagaccgtctgttgatggttgttgcgaattgggcacatatttccacggagcttttatgtcttcccttttcctcaattttttttttaaaaatgggcatttatatttctttatcctcccgaagttgtgttttcttggaattggttatcatctttacatattgtccacttatcggtgcattgtactaccttgctaacaaactctagattaatatctttcttcagtaacttaactgttattagtgttaatgtgtaggcactaggcagtactgttactgtatgagatcagtgtgtggggactgaattgtgtgtctagattttctcgcttaacagttaccaaacattgtcgatgcccatgtgcattttatcatatcattgataggtaaataggaggggaaagtaccaaaatacactggaggagacaatcttgtttttcatttactttttctgatgtagaagcagattattctactagtcaagaacagtaggtattttgcctattagctgtattgcaatgtagtaacagattgtggtgtgtatgcagatctc

SEQ ID NO: 13664 - DNA, 844 bp, Oryza sativa
  Intron number 1 from transcript LOC_Os07g14600.1 (locus LO C_Os07g14600) derived from phytozome v7.0 (chr-ID Chr7; po s 8327413 to 8328256 reverse strand)
aattgaaggtaatctgcaaaccaagtttttccaaacatatgcttaattatatagccatggtgaaattaaattcagatatttgtgtcccaacagcgagtctgtcaaaatgtcaaataaaacgtatagcggcatgtattacaagtaaatgaaacaattggtagcttgagaaattttatcattttattaaacaaagatggccaaatttgaatcttctttgcctttcatttctgaaggctcgtcagtcatcactcaatctggttcaaaaaaatcaatccaaggacatatattcttctattatctgaaaacaacgttattgaggccaacttaagagtgcgaggtgaatgaatccatgtggctcttgctcaacgttcaagaacttccgaataaaatttccgaaattctctgtcaaccatttggtcctagtatgatatgtccctccaaccaataattttgaatttgtttgaattcagccaaaaaaaatccctttgttccattttaagcatagccatgagtttccatgtttaattttgatcgtccgtcttatttgaaattttttatgattaatattttattattattagatgataaaacataaataatactttatgtgtgacttatgtttttttttaatttttcaaaacaaaattcaaataagatggacatggaaacttaaaatgaaacgaagggagtatataatttcagtgaaatgagtgcaaatttaaaaataattcgtttgaaataccataaattggcataattccctccattctgagatgaaaaaaccctgctctttttgcttccatttacagggcactatcaagctggtgttccagccagccgaaga

SEQ ID NO: 13665 - DNA, 835 bp, Oryza sativa
  Intron number 1 from transcript LOC_Os08g43320.1 (locus LO C_Os08g43320) derived from phytozome v7.0 (chr-ID Chr8; po s 27375068 to 27375902 reverse strand)
cgggagaacccgctcctcgggccctcctccgccacgtacgtaacgctcctcctcctcgctgcttgccatttgattcgattccccgttgcgcaattgagcttggaaattggggggaattttaggtcccgttcgaatccactaaaaaaagtggatttagtcaagcgtgtgaagctggcgtctttgtcgttacaggggatttccttttccgctccaggtgtctaggagataaaagagagagagagagagagagactgcgatggcgactacttggatcttttcaactaccgttttcgaaagagaaaattacaaaacctttagcagcattgcattagattatcttgtgccatctatacatctgatggagtattaagatttattatgctttgtgccttcgtagaatggagcaatgcaaattctggaacaattcggttggcacaggaatattttattcttacatgatttgtctactagtagtgtttacgtcacttgcaggtttcccaaattgcagtcgtgaaatgtaggtagtatttttatcaattagattattagaattaggtgattggcttttgtattggtactactaccccttgcaatccaggattatggaggagtgacgttttttttttccaacacatgttaaaaagggtgaattttgtttgttctagcctgcgaatttcatcacatcggaagctttctgaggactacattatctatcttcattgatgcatactgttctgtaatacgcctgtgcagtttatttattttgatagtgttaagaacaaggggggttcttagtgctaacaagttgtttgctccattggccagtttggagaag

SEQ ID NO: 13666 - DNA, 713 bp, Oryza sativa
  Intron number 3 from transcript LOC_Os12g40880.1 (locus LO C_Os12g40880) derived from phytozome v7.0 (chr-ID Chr12; p os 25272753 to 25273465)
ggagcttcatctccagctccgcagatcgaagccaagtaaatttacctcttcttctataacttattaatgaaccaatcgatacggttagtttagcatcgatttgtttttacacagttcttgtagtagatttgggactgtagtgtcttattagtgaaagcaatagccctttcccccttttcacttctcaatttttgtgccaaattatatccatgtattattcttgcttgccatgtacgttcctagatcaagagcaaaactcatgtttttaagagggcataaataaatataaggcataataaaatctcctgatgtggtggtgccaccagtcagggaaaaagatattactgttttgctacttctgcaccagtcaatgtaaacttattacttcataaatctgcaaagcaaccacaagtttttgtagtggtcacctgaggggagaggctcatatacctgaatattggattaaaaggagtactaacaggaggtttacaatataaagaatctactgtaattggctctgtttttgctgcattcatataatgtataaactgaactatatctacagtagttttgactatggtgtagttttttcaaagttgatcactgtactagttgagctgtataatttttttaggacatgcgttgagtggtacaattgagctttctatttacagtttaactctgtttttttttttaaaaaaacctgtaggtca

SEQ ID NO: 13667 - DNA, 800 bp, Oryza sativa
  Intron number 1 from transcript LOC_Os12g38410.1 (locus LO C_Os12g38410) derived from phytozome v7.0 (chr-ID Chr12; p os 23545547 to 23546346 reverse strand)
cagcattgcagcggcagaggaggtgtgcttccttccacagtactgtagacgctgcatgcgcgggtggcagcgatggcagcgcaggaggccggagatcgtggaggatcggagtcggagagagagggaggaagaagagacaagagaagcgcaccgccggcaatggcatggcatccgcattgcttgtcgatcagccacagccacaatatgtcgcgccggccggccggccacccacacagggacgcactacaacagaaacagcctatagagacggcttgggaaaccgtctttatcaaagcccacctcctatcccactctattactagatacagatggaagagacagatgaatgaaccgtctctatagttaaattaatccgtttgatgaaaatttgataagacgggggttaaaatccgtagacacggtccttccgacgggtgtagaaaaaccgcgtcaaacgcgtgcgaaaagatttgtttttggcgcccgttcgctaaattttttaaatctacgcgcgttttctgatgaagttcgcgggatatttttcgttcactcggaaagtcggaggtggttacgatccaactaaggtacaaaaccaatctattatccacttctttcaatctttcaatacccaattcctaggaacgccgcccagccaccgcccaccggcagggctccagcctgccgtgcgcctgcagcattgccgcgccccggcgtcggtccggcacgtgcatcctaccaccagctccggcgcgcatattcgtgcagccgttgcccagcgcgtccctcagtggtcgtccaga

SEQ ID NO: 13668 - DNA, 883 bp, Oryza sativa
  Intron number 1 from transcript LOC_Os12g41780.2 (locus LO C_Os12g41780) derived from phytozome v7.0 (chr-ID Chr12; p os 25849878 to 25850760)
tcatcttcatcttcttcttcttcttcgtcctcgcggtgaggtgattcttgttctttggccatcccagtgctccaaacatctcgctatgcaaatcttggatggatctactattggcggtgcttgtctgattggttatgtttgatgccaatatctttagggttggcggcagtttctaatctttaggaatgttgtaatgcttagcctgcagactgcagtttgttagtattgatgaacaaatgaataaaagggtagtagaggtgctgttttgatttgattttggggggcaaataggggctttcttattttgtttgtgttgctgaaatggaattgcatttttgggcatacattcaacgaactgggcatagagattagatcttcatttgtagagaaggctgatttgttatggtcttccaatgttgcgatccaacgaactaggcctgaatgctgatttgtgtggtctacacaggtctgaattctgaaattagtaatgactgtatcatctttaattgtttgttgtcctctaaaatagaaaatgtttcatgttggggattgttagaaatgaggtgctgatagaagttgcttccttcagtaacacatgaatacgtgaacatgatgtttaagacccttttttattgaaatgattcaataatagtatatctgtcctactaacatttctatccatggctgttgcattacaaatttagaagataaagggtgtacctgcaattcatctctttcttcttattttgaaattagtactttctctaattgatacttgcatcacattgcttgttctgccacttattttttctgtttgcttactttcttctgtctcttgcataatacagatttactttcacattccgaagtttgctacacttcc

SEQ ID NO: 13669 - DNA, 675 bp, Oryza sativa
  Intron number 4 from transcript 13113.m00164 (locus 13113. t00037) derived from phytozome v7.0 (chr-ID ChrUn; pos 284 378 to 285052)
gagactctatcatctgaaaaggttgtttccctaacccccttattactttacttatcattaaccgatgtttctgctgcttgatgaaggagtacatcgttagcataaatggaaccatacatacatttcttttcgtcacaatgtcaaaccctttattagcattataggttgccaacttgacatactgctagtcatgcagccctaaagttcaaaaggacagtttttgacatactacaacttgattgctggatgtttaccatatataaatgcttgattattattttttcagtaatcacttcttttccccacaaaatttcaagcatgaatgctcctgcatccttgttctctgtgttggcctattgtaccaggagatccagttatcattgaggttcaatgtcagatgctgcttgcttcctctgtttaattaaatttctcagcatatttttgtaatggcaaagcaattcttaatctctgctgtaccaggagatccagttatcattgaggttcaatgtcagatgctgcttgcttcctctgtttaattaaatttctcagcatatttttgtaatggcaaagcaattcttaatctctgccatagtttttttcttcttgttgcaatagttggttatataaattgtattgtgtgatgttagtaacactctttgatttcacaggaaaaga

SEQ ID NO: 13670 - DNA, 880 bp, Oryza sativa; identical to SEQ ID NO: 9998
  Intron number 2 from transcript 13113.m00233 (locus 13113. t00106) derived from phytozome v7.0 (chr-ID ChrUn; pos 844 887 to 845766)

SEQ ID NO: 13671 - DNA, 748 bp, Oryza sativa
  Intron number 3 from transcript LOC_Os12g32470.1 (locus LO C_Os12g32470) derived from phytozome v7.0 (chr-ID Chr12; p os 19569660 to 19570407)
tgagaaaaccggactgcagaggtttgcaattcctctttaaagacaagctcaactcctaactggcaccaactaattcttttctgagtttatttattgctaaatattgtcctacttatgcaaatattggtaattttgtttatccatttccgcgattgattttactgctatttgactaaactgtgtgtatgcctgtatggcaatctagctgtgaaagttgccgtttcaatgcattgcttgatgttttctgcttaccgttatggtgggactcaagttcagctattaatgtattctactttagttgtggcttagttgggtataatttaagcaatgattttgcgtcagtatttttcttggctaaatatgaaggaatcaagcaaaataaatcaagtgaacttggttacaatgatcaaaatgtagatatctctttcaacattagttgtcccattggcaagatttattctcttatgtcagtttcttgactatcaacgctattgcctactatagtatttgctgttttctggatttacttgtgcgattaacctattgctatttgcgccattttttcttgttaatataattttagttgcataagttattgtttgagtgcaatgttttttcatcttagatgctagatgctattcttgtttgcttagtttttttttcgtttctttactcatataacttcttaagaacaaccgagagtattgcaaactgtttgtttatttatgctgtttgtttccatttgcag

SEQ ID NO: 13672 - DNA, 689 bp, Oryza sativa
  Intron number 4 from transcript LOC_Os12g32470.1 (locus LO C_Os12g32470) derived from phytozome v7.0 (chr-ID Chr12; p os 19570819 to 19571507)
atacggtatgcctaacttttacaatcttaagtaaatccatctcatagtgcacatattatagatatagcaatagtgttactagctaagttcttggcgctggttatcaaagaaatcgtgggctgggagctatcaatgatgactagtaggagcagatagcttaccaccattgtcaactcacattgtggagtcataatttaaaaccgggggcattgattcttgttggtagccattgattcatttcatctgttagtcatgctcaaccaattctggggagggtcataattgattatttggaacttcatgtaacatgtttctgcaaaaaaaaaaaaagggattgaacaatcatagagataaataagtgctataaacacaaaagaaaaatctttcactagaattatttataatgttgaatatgatactgtaatgttattaaatcatttttttgtatcactaaatttttagtatataataggattgttactctatttcttctttgatcaactcaaatatgtcaaccaaataactgggtactcatatataagtcaacatggtacaatagtaatatgagagccaatatttcttttaacagtatgctcccttacttttaaatcattacgttttaagctgtttgataataaatgttccattccttttgttggcttagctccatattaaatctgtcaaaggtg

SEQ ID NO: 13673 - DNA, 906 bp, Oryza sativa
  Intron number 1 from transcript LOC_Os12g36270.1 (locus LO C_Os12g36270) derived from phytozome v7.0 (chr-ID Chr12; p os 22180652 to 22181557)
tgccttgtccctcctcgcccatcgccgacgagaaggtattgcagttctctcgcatgttgctccctagatggataatctttttttgctttattgggcagcgaaatgggctgtttggatttgtgagccggtcaacgcaagtcaaccaattcggaaaagggaactgaaatcactgactttatgtgctatatggaactgaaatcgtgaaattttgatgctatcgaatcaattttatttttcttgttttaaacaggtgactgactgttccaaagtccccaacagttagcttgactattctgctgttcagctcagacgccatggtatttgctttcccatcgtacacatatataatgtcaacttgatctattgggattcgatttgagaaaacggaatattattgttgaccaccacaatttggcactaggccaaatttgcaacaaatatttaggtgaatctgtattggcccgaaaaggcaccaacaattatttatgctgacaaccagattatatgtttacgaattacggtaacatctgtgatccactgatctgggctgttcttctttagttacactaactccagccagctagccgaggcctttgcttcctcaccatatgattttttttcctttgactttctcaaacaatcaactgaacagattttgacaaaaccaaagtcagcctaccttgcttgatgctaatcaaaactgattaaatttaataggatggacatatttatgttaagaatgaccatgcttcttgtagatcagtttttttttccattcttggcgtgcatctccaggctttattatgtacgagtatacaacgaatagagttctgagcatgcgggcttacatattggctttgttgcgttgcagacttgcagttgacctccactctgcacatctgcaag

SEQ ID NO: 13674 - DNA, 985 bp, Oryza sativa
  Intron number 2 from transcript 13113.m00186 (locus 13113. t00059) derived from phytozome v7.0 (chr-ID ChrUn; pos 354 811 to 355795 reverse strand)
caacagggtatgttgtatagcgttggattaatattgcttaattaatacttaactgtttttaaattctcaaatgtttgctaaatgctgcttttgcaaaagaaaccctattatgccatcctttgttatcctgtgcacttgcatatttgctgcgtggcttgctgagtatgtcatatactcaccttgcaatcattcatcagaggaagagttctacagtgaagctgatggtgtggaggattaggtgtagccttggtcaagctgcctgtggagtggagccgtctgcgccgtttatctttttccgctgcttagatctttattgattgagaggaactatctacctctgtaataacattttatacgcttaataattagagtaataagtgtactctattatcaatttgttattgtgtgcctcggctgattcctggacgagggtttacacacatgtaagcgtttggaattttggatagaaattccgggcgtgacaagttggtatcagagctcccttgaccctaggttatgccaaatggttacccatagaagccttctaaaaatattggaaaagtagaactgttctcctctctttctcttttaattaaaccaaactaatggcacatgcatttcataatctcttttaatggttttcgttcgaaatttattccagtgttattagtactgtacatctattactgtactgatggctcatttatcagcaggagtttttattgttttatttaaatcttgctgcaataaaataaatttagcgtgttgattttataattttcttttatttcttttgaaaacctgttattcaaaagtacaaaacttgtaacctcgttttcaactgtttcgacttatcttgcaagtttgatttacttttaccttgaattttcaaactttattcaaattaatccaaaaaaaaaaaaaaaaaaaacttgtgctattaattggataaatgtcttaactccctcctttcacttgtctttag

SEQ ID NO: 13675 - DNA, 648 bp, Oryza sativa
  Intron number 3 from transcript LOC_Os12g44230.2 (locus LO C_Os12g44230) derived from phytozome v7.0 (chr-ID Chr12; p os 27398728 to 27399375)
ttgataatccaccaagtaagtcttccagagggccatcttttgtcatttgttgattgatttatccattcagaactgctttcctgtattctcttcagattccatgtttgtgtctctatcgctgctctttttttttcccatcttatttattttagttctaaatgttggcatcagaactacaaaacaaaatggcaatcgtgactcctaatcaccaccttcagtgttgtttcaataattttctctcttctgggccaattgtgttcaataaataaactactactgggcacattttaaagaatggcttagtcaaagatgctgaatggtgagtacaaatcttcttcgggatcttcaaactggcagtattatcattccatatgaaaatattaggttacgttgttcatatggtcatagtttaaaccttgtagacgattgacacctgtcaatataaatttaaaacccagtattttgtaggataaagataaactagtttctattgccagtgcaagtagtttgtaagataaacttaaatctcctctcacataagacaaacaattagcaatatatggagcatcagcatgtactatatttgataatttgttccttttttcctttacaggacagagtgaaattgctaaccagagcttgtggggt

SEQ ID NO: 13676 - DNA, 769 bp, Oryza sativa
  Intron number 1 from transcript LOC_Os12g41140.3 (locus LO C_Os12g41140) derived from phytozome v7.0 (chr-ID Chr12; p os 25459021 to 25459789 reverse strand)
tcgcaatcggtgcgtgcgcgtttcgtcccttcgttcttgcctcatcctctctctctctctctctctctctcttccttaattaaaaaaaatagagagattaattcggtcttttttaattgagcttgtccctgagtgagtgagtaactgagtacatcctaatagcaaccggattatggactttaattattttattctttttttaggtgagaggttggtgagattattctgtagtatgtttctctgctttttcattctgtttctctctctctctagccaaacaatacatgaacttcaatccagtgcagtaaaaaacttgtatctcccaacttttaggtgtgattctctcaactgcatgtttttggtttgatttctcatgggtattacctcgtcgattagtagtacctgctttgctttaatgttctctgacttcctgtacttcttggactgaagtgaggacaagaacaagaggccaaatatgagatttctttccccccacacacccccatcataatcaacgaaaaaacacacacaaaatactagccatctttatttggttctgtaacatgaatccaagctaattaatgatcacaattcacaccaacatttcctactctttaaaacttccttgcatgttcaatgattattgtgaaattgtgctgttctgcttggaacagtagctcactttgcagatagacactgagaatttactcgtttcttgtttcatggagcagcaggaggtgtcgccgctgacctccggccgcctctcaca

SEQ ID NO: 13677 - DNA, 802 bp, Oryza sativa
  Intron number 1 from transcript LOC_Os12g29580.1 (locus LO C_Os12g29580) derived from phytozome v7.0 (chr-ID Chr12; p os 17625406 to 17626207 reverse strand)
gagtacttgcggcggctgcttgatcggttttcttggtaagcgttgcgttactctcctcgccgccgggagacctcgggatccggtggctgtgtgcgtcgggtgggaggggagggagggatgagttcttgcggggtcggggggtggttgaggggagagcggtggtgggtgcccgccggaatgtggcctcgccggaggccggagctcgccgccgcgccggatctgggatgtgggggtggggtgggtggctactgcttcttcggttcttcttccccgtctgcgtgtgtgtgtctctcctcgtttgaacacgaaatcttcggtttttcttttttctttcttcgtttgacctctccgtttttagcgggcgtttttttttttttttggagatttcggtgccgtgtgcgcttcgcgtttcggggttcaaagtttttttttttttgcggtttcatctgcttcatcatcaagtaatgggaggagatttttgagtcttgcagtttaatctgcttcttcttcgagaaataatgggagggaagaaaaataaatcgttgcttcttgctgcgaatctgggggctttcctgttcgtccgttccctacagtttcttttgcccatgtcgagttcttgatttgagctcctttaatgtgaatttgtttgtatttttcttcttggatgctgccttctctttccagtttctacacgtttggtgatgtagctagctactgctgcccatgtctcaatcactgataaactctggatctcatcatctttgcaggctcgtcagttgcagtattccctcctcaaaatata

SEQ ID NO: 13678 - DNA, 754 bp, Oryza sativa
  Intron number 1 from transcript LOC_Os12g40160.1 (locus LO C_Os12g40160) derived from phytozome v7.0 (chr-ID Chr12; p os 24826417 to 24827170 reverse strand)
tcatagacttgctgatttggggtcctttgtgcctggtaggttctgaaccagtgctagcctttatttcatcatgtagtatgaacttggttgctgaggatatctcggctagtgagtaatggaagttctggtttgattttaaaaaaaggttttgaaagaagcaatatgaggctgcgtttgggattctgaatcccacgagaactcattatgagaagatcagcccaacggcctcaggtaggctttgtgtgatatggtactagctcttgtaggatatggtaccaggatgcttaaaactcttgatgtgttcttttctgtattctcattggtgctaaggggattcgattacatgatggtgcaaatttctatgacccggttctgaattagcaacagaggtcgatctgtgttgttgatgaactctagatgatgctcaaaattgagttaggactcaggagtgaactttaattaggataaaattttcttgtgatttttttttcaaaattgattgcatacttcgacctcggatttctacgtcttccaaagatgacctgttcagtgttgttagataattaatttcgtctcgtctttctataccttgattagactcaggggcggagacaccgcccagctaccccgggcggccacctgggctcactagcgaaaactccattaaatttctatgttgttgaatgaattgacgatgaaatttctataacaaacattagttatagtgaagtttactaggctcaaaatctttctg

SEQ ID NO: 13679 - DNA, 595 bp, Oryza sativa
  Intron number 1 from transcript LOC_Os12g28260.1 (locus LO C_Os12g28260) derived from phytozome v7.0 (chr-ID Chr12; p os 16697536 to 16698130)
ctcgccagccacgtacgtccactaatcttctcattcgatttgtaaatttcacataacgtaagtaccttcaagtttcagaaaacaacacacgtttcgatacttggcatttaaccagtgttagaaattccggaatgaaattttcgaaatttcggaccccccgatacgatattatttcggccaaaatttttaatttttttaatttggtaatattttgttcaaatttgaccaacatttgtttaaaattataaaaatttcggtatatcagtaaccaccgatagaataagccaaaacaaaatatatattaagccctgcaattaactacatatgtttttggattaaagcttcacaaaatcaaactatcaacgaattgaacgacgtgcgagatgacgaggttgttccacgtccagcgcacacatcctaaatatatatagataaaaaaaaccacgttatctcgccattgcacatgttcgttgatagtgtgattttgtaaacatcagtaacaaaatatatgtaggtaagtgttaaaatatgtatggttttctatattgaaccaatttacttgtgatataacaattgatactacaatttcgattag

SEQ ID NO: 13680 - DNA, 798 bp, Oryza sativa
  Intron number 3 from transcript LOC_Os12g42884.2 (locus LO C_Os12g42884) derived from phytozome v7.0 (chr-ID Chr12; p os 26625388 to 26626185)
aatacaaggaggccaaggcggtaagataatagaattatatctttacatctctgtctgcttaatgattttttttctctgcctgactagatgtcgctagcacattgcttaatgtcatcaatatcctagttcataaagttatttattagtttattttgttgccttttgttatgatgctaattcaaacatcaagttttagtagtgatcaattgtttcttagttgtgcatttatataataattttgtttagaaaagaatctgatgtagattaagtgctggcttgtaaattatgttttggaagattgtcacttccacagattaatggcctgtaaatgacaagcccaccaagtcagttcgtttctttagtgctgtattaatacggccaaacaaattttggccccttgcttagaattttgaatgtagcactttcagattgactatgactagagttcactttaaaggttatgaaataatttttttgcactatatgttgttttcatcttttttcaaaaagctgcccatgttgatctgtggcaatattttttttttctaatttcacatattctttattggtgattggtgaatttacctgaaaagttctttgattaaatatgttatcttgttccagtttgtgaatagtggcactgctgtttcaagcatcaaattctgaattttgttgtagtcctgaaatgaaaatcacagtgccctatttattaagatgtaatctggttgccttaatgtctcctatgtaattgttcttcatgcagctcggcgttgacaccgtgccagtacttgttggacc

SEQ ID NO: 13681 - DNA, 483 bp, Oryza sativa
  Intron number 3 from transcript LOC_Os12g32650.1 (locus LO C_Os12g32650) derived from phytozome v7.0 (chr-ID Chr12; p os 19673252 to 19673734)
tgcttcctgggcctgctattcctatactgtcccaggtattttgcttttgttgatttgaattataaccagtttttcatctctgtttggttattttgtatcaagttacattagtacttggttatatatttcttttgtgatgaattcatgttttagtgtaatactatttatggattctgcaaaactatttatttgaaccaccctaaggttaggttattggttatcctgctatgttctaataatataaacttcacctatagacagtaacaatcttgtttgattattagtttaaacctaattaataataccaatttcctacaatgtcctaatagtaccaattttaactataaaaaagaacaatcttactattcgattatcacttatcagtatcgaaccttgttacctctgtccaatgctgatggagtaattttcttctgaatatgtgctgcagtcattcctggtgtggcagcttatcttctctgcgct

SEQ ID NO: 13682 - DNA, 832 bp, Oryza sativa
  Intron number 1 from transcript LOC_Os12g41790.1 (locus LO C_Os12g41790) derived from phytozome v7.0 (chr-ID Chr12; p os 25852650 to 25853481)
ccactcctgttaacttcaggtaataacattcacaaactcataacctatgcaactcctgctgatgatgccactcctgcataaggttcatttcatctgaaaaagcatcaaagattccattgattcagacattcagtgaagaacaagtgtaggattgggttctctagctttttctctgcaggaactttgccaacgcatcacgataatcaaggttgattaaaatcacgatcaagatccccaatcggaatcggaggtctctaaagtaggatcgcaatcatataatcgtaaaaatcatagattctatacctactagaatcgtagaaccagacccccttaattaagatctcaaagttgtaaaatccgtacgatagaacagggttcactttctctgtttgggacttttgattgggggtcaccgaaatttcggaaatttcggtccgaaatttccgaaattttgagcaaaatttaattgaatttgaacaaatattatccaaattcatgaaaactttgaaaaattgaaaaaattcggccaaactaatatcatatcggtcggtccgaaatttcggtccgaaatttccaacactgcgatagaatcgagatttcatcgacacacccctaataattattcagtatggctctaccaccttgatgtgtaatcgtctgagttcaataaaagcttccgttatctaaaaacaatccctgataattgttctttatgggattcacagcactaaaagtctgaaactgaatcatctgggcactgaaaaaagaagaaaacttttttttggtttgcattgcaggtgtgtttgcagggacagtgaggacagaaggctgc

SEQ ID NO: 13683 - DNA, 678 bp, Oryza sativa
  Intron number 1 from transcript LOC_Os12g39050.1 (locus LO C_Os12g39050) derived from phytozome v7.0 (chr-ID Chr12; p os 23994683 to 23995360)
aggagcaacgaggaggccggatttggtgagaggtggtggcggcagtgcacgcgcacgggctctggacggctggctggaggttgaagatgcactgtagtgaaagggagaagaaacagacttccggctgggcttctattcctcggcccgattgaaggaggactcaggctagactttggaaagaaaaggccgaccagacagaggaaggaaggacagccaaggactgaaagagaacttttcctatttcggcccgaaaaggaaaagaggatttgatttatttttccaattaaattaatcaccgaaatgatatttgaattgttaaaaataattccaatgctctaataatttcaataaaaattctaaaaataattagacactcaaaatatataaaaataattaaaaccagatcatttaatgattaatttattatttaaataattacttaaatgtttcctaatttattaaaattagtaattgagctctgaaaaatccgagaaaattccagagagtataattgatcatggagaatttaataaaaattaaatccaaccattctttacacttagaaaattttatttcccatatttaacttcacttgtaaattaataaacatttaatataaaatttattaataatttattaaataatttataaatcctgaaacggaaattcaggttgtga

SEQ ID NO: 13684 - DNA, 453 bp, Oryza sativa
  Intron number 1 from transcript LOC_Os12g30960.1 (locus LO C_Os12g30960) derived from phytozome v7.0 (chr-ID Chr12; p os 18564331 to 18564783 reverse strand)
gcaagccacatcaacgtatgtagcgggttacatctcgtttggatctatacgacacccaagacaagttcgagaacccgaaaatgcattttgagggtttagggacctagataacacacccgcacaagtttaggaaccgcttgtacacttcaaaaatcgacaagattaatatgcgatatattacttcctaaatatgtaagtttaaattcgacttgcatgtgttgaaaaaatacaaatttaattgtaagtagtacgcactactcatagttaatttattttactgttttcctatttattgaagttgaattttgacttgcatgtttgtggatatcttttcatacgaagattgtaaagtttattatatgttctctataatatcagaactaatctatttaatttttcctatgtaatttgtgtaatatttgtttatctacaggtgtggatattagagggacg

SEQ ID NO: 13685 - DNA, 910 bp, Oryza sativa
  Intron number 1 from transcript LOC_Os12g36530.1 (locus LO C_Os12g36530) derived from phytozome v7.0 (chr-ID Chr12; p os 22337619 to 22338528)
gccggtgagagcagaggtggcggcagcttggagtcggggatgggtttgtacttaggttttgatgtctcagttatatacctgggattggatgggcccacccatcagcgcttattttctggcagttagtttcgaaacccgcaaagatatgtcattttcctgtaggtttaagttagactcgtaaaacaaacatttttcctgtgggtaggctgtaggatgatagaaaataagccggtccataggctcgcggccaagtctggtagtgcagcatacaaccttacaagggtttactggggttgcttgttttacctatcgtcatttaatcatcctcatcagattcaaacatgctcaacaactcagccacccgcgcatcttttcttcagaaaataccgatccatccagcacagtcaccacgaaaagctacggtgaggtgatgagtggtgtaaagctatgacggatgtatgccaaagcccaaagggtgcttattatttagtctccgctttgatcagcaccatgaatgtagtaaagccgtaaattaaggtctccgatccgtgcagctatatattattactcgcatgttgttagcatcatgcgtgcaaatccatgacatatatatatggaagcagacaggcagctacgtccaattaagattctcgaggaaaataaaacactaaacaaaattttggatctaccgtacgtgctgaattgcacgcactcccaagtcctcgataaaactacagatttcaatcatggagtggacgatgatttatgaaagactcatcgtcggtcggctcggtcagtcaatctttgatattgttcgtccaaaatgaatatgttctgcgcatctccttcatgcttttattaactgaacaaacactctcgattggttgaatgaatccatctcctagcaagg

SEQ ID NO: 13686 - DNA, 882 bp, Oryza sativa
  Intron number 1 from transcript LOC_Os12g38440.3 (locus LO C_Os12g38440) derived from phytozome v7.0 (chr-ID Chr12; p os 23562576 to 23563457)
cacagtttcactccatcagagcactaggagtcggtgtaagtgcatctctctcctctctctttctcctgtgcaagaaaaagatccaagctttgagcaccgcatcaatcgcttttgttattccagcgagtttttgggttctttgtgtgatttggatggaaggtgatcggaacctctatctctctctctctctcatcttgtttgttttgtgggcgactgttcttgccttcttggttggggatgatcagacattcagaccatcagatgaatcgatttctttgtagagcagttcttgatttatttatttattttgcgctaggtagtagatcggaggggttcatatgattcttggatcttttggttgatttgatttgatctttgttcttcacatggatgaagcgagttttgtgtgtgtttgagcctttgccctttgcttctctgtctgcggaagaaaatactcgtcttttccccttcacttgttcaattttttctcagttttggtggttagaaagaaaatctttgtttgcaaacttgattttctttttggaatgctcatctgcaacgagttgcggatttttttgttttcttgctgctctctgaagagcaagtgcggatcttgcattctcggtcggatctctgcgtttctttgcaaccatcgattccactgctttgcttcttgtaggtttctttggttcgatggaactcgctttatgcatgttctttcacttctgttcttgtgaatccttcgatgtgactcctgcggtttttttcaactatattattttgttttatgtgctgttgatttcccttccagtttactaattcctactgcattgtttaatctttacaggtgggcttcaggactggtggtgataactggctgtt

SEQ ID NO: 13687 - DNA, 947 bp, Oryza sativa
  Intron number 2 from transcript LOC_Os12g41590.1 (locus LO C_Os12g41590) derived from phytozome v7.0 (chr-ID Chr12; p os 25705573 to 25706519 reverse strand)
tcccgctcgacgtcaccgacgagagcaccatagaggtatagatatactgtgcactatatgcagagattgataggtagtactccctccgtattgtaatgtataacgctgttgactttccgaccaacgtttgaccatttgttttattcaaaatttttgtgtaaatataaaaatatttatgtcatgcttaaagaacatttgataacgaatcaagccatagtaaaataaataataattacataaattttttgaataaaacgaatagtcaaacgttagacaaaaagttaacggcgtcatacattaataacggcgtcgtacattaaaatatagaggtagtagtagtagattagattattctttgcttggattgctagtcgtacccggatagacaatgttgtgttgtgagcagagttacttgatattcagattcagaaggatgatatgaggttttgttttttctagtctgcacagcttgtttcttggtaggaactactagattatgatgctagtgaaggcatgctgaattgagacttgagagttcttaggccattcacagtgggatgatctgtcattcagcccaacgctgccacatctgcgagattcttcaatccagtgccacgtttactcctgggcccactaaattagtccgcgtgaccaactttggtcacacgttcttcggctcaaaaagcgagataggaagcagaaaagcgagagagagagagagaggagctcccaagccagaaaagtagggaaaagcattacttggtgggcccactttagatacccatgctgccaatctgccatgcattgtgagccgagtagctttgagcgtggtttgcttacgtggaggtagaaagcccctgctgattccgcggcgcagtgtgaatggccttatgtaaaattttgagtcttccggtgacaggcagctgcggcctcgataggagagaccc

SEQ ID NO: 13688 - DNA, 658 bp, Oryza sativa
  Intron number 1 from transcript LOC_Os12g41590.1 (locus LO C_Os12g41590) derived from phytozome v7.0 (chr-ID Chr12; p os 25706603 to 25707260 reverse strand)
tgcagggcgcgtcccgcggcatcgggctcgagttcgtgagcactcatcgtctccttcctcctcctcctctcccatctcccatctcattttcacctttttttcacatcaattccttcgcttctccatatttactacttactccatttcaggttataacatgtttggattttggtaaaagacaaattgttttaaatttaactaagtttatagataaatatactctctcagtttcatattataagaatttttagcattgtctatattcatataaatgttaatgaatctacctgtctaagaaaatataggcaatactagaaagtcttataatatgaaactgagaaaatagtagatattactattttttctataaatctaatcaaactataaacaattttactttaactagagtcaaaacctctttacctaaaacggagggaatactttccatattcatttcgcgcttggccccctcattcgccgaaagaatccatcgggcccacctgtcagccactcatacggctcaccgagttcgtgctggtgtgcagtgtgtagctgctctgatcatgcgcgttgccggcgatttcttctacgagctctgaatctctcgtgcgcatgcgatgcaggtgaggcagctgctgaagaggagcgacgagggccg

SEQ ID NO: 13689 - DNA, 477 bp, Oryza sativa
  Intron number 1 from transcript LOC_Os12g35310.1 (locus LO C_Os12g35310) derived from phytozome v7.0 (chr-ID Chr12; p os 21420751 to 21421227)
ggggaatccctggccaataaactcacctcaagccggtaggttgtttgtcatccatataaaaagactacttctcacaggataacaccagagtaatttgaaagcttttagacatgcattgatcatacaaaagaagaacacaatatctgcataagatggtatgccccaattatcccattcttgaaattatattatcactagtgctctagagctatcagtccccaaatctctcaactccttgaaaaaaaatcaaatgagtaatcttaaacagtctcagcttccatcttctttccatcttccatcttcttttcaagtcaacatcctcctccccacatttgaatcttcctatgcacaatttgcagatgttctctataggaaaaaaaacaactattccttgtgagacacaaaacaaaattcaactgctactgaatgtttctcattggcatgcccagatgtagaatgtttcttatttgtgatcag

SEQ ID NO: 13690 - DNA, 822 bp, Oryza sativa
  Intron number 2 from transcript 13113.m00156 (locus 13113. t00029) derived from phytozome v7.0 (chr-ID ChrUn; pos 258 081 to 258902 reverse strand)
ttccacagatttcaggttcgcctacaaaattttaattgattcatccatttgttgtcatgccgtggataatagggtaccataggtgttcatcacttccattattagattacggcattttgctgtttgctggattggcattttaaagtaaataggaaaataggagtaatttcatcaaccaggcagtttgtgcagctattaattataggggtgtttggatcctagcctcatttgctaaggctaggctgtgctcaactagctcttttgggtgaaggtcaggtaatcagcctcgttgtttggctcacgcaagattgacaatgatgtttccacacaatctttctctctgtgtgtggcaactggcaaggacttccttgtgcacattggctatcgttccatccagagcgaggctttctagcttttaccgaacggctggcctttgcttagctaggctataactgtgctagccacctagctgttttaagaaaaagatgtagcctactatcttaagaacacatctttttcattcagttggttactcctctagtcctcttaaagccctagactaaaatatgccatatgcctttccatatattttctttggcacaatttagaatcttctagccttcaaaaactctgctggtaacaggttgcaacctttgtttgatatcttagcgtgataattttttaggggacgtctccaatagtttgatcaaacacatcttttggtcattttattgcattcagtatgcttagtctggttggactcatttaacctatgaactttatacaggtcctaaaaaaagggcaattcaaccttgtagcaag

SEQ ID NO: 13691 - DNA, 753 bp, Oryza sativa
  Intron number 2 from transcript LOC_Os12g39320.1 (locus LO C_Os12g39320) derived from phytozome v7.0 (chr-ID Chr12; p os 24158496 to 24159248)
gctccaacaagtgagctatttcgagcttcctgatgcctaatttttgttcgcggatttagggggttttagtgggttttgtgtgattgttagtgcttcaaggtggatacaattgtttaataataataaattacgtgccagttatagattaaattctcgttttcgtattaggaggatgaatctcttggattgttttaatgaggttgagtattttgtttatgctagtggctattgagatgttcagagtatgcttcactgcacagttttagcttaggattgctcagtttggtgagcactttgatggttttcttttcctggccactagtctatttataaagcatgatttgtttttctcattggttccttatttttctgaaattctaatttgtattttctttgttttgaaggggcaaagtgctaactgcatgaaaaaaaacacagagattcactaattcacctatttgatgctgtctcgagaaaatgcgttgaatctctctcataaaagaaaaatatttcttttagtagtatttagaatttgatgtcggtcatttaaaatccaacggtttcaaacatgggcctgcatgcttaggccttctccatggctccaggctgatgcgaccattttgctagagtgttaagttgatttctgtctggaatttatcttcattattgggctagcaatgcatagcatactcattaccggtggtaatgtggtgaacagattgtggctccacttttcggctgtgtacatcataa

SEQ ID NO: 13692 - DNA, 865 bp, Oryza sativa
  Intron number 1 from transcript LOC_Os12g37440.1 (locus LO C_Os12g37440) derived from phytozome v7.0 (chr-ID Chr12; p os 22947141 to 22948005 reverse strand)
gcaacagataagaataccaaggtattctcagataagattttgatctcagcagatcctgcttcgagcatggttgctttccacataaatatcaataacctattgcaatcttttccacataataaaccatcatcatccacaaaaaggcatgataccattccccaaacaccatacatactgcataatcatcctaatttattccttccacaatatatactccggacccagccaaaagcaccatgtagatcttgtgcctacaaagattcttgcaaaaagaaacttaaaagccaaaatcccatgagtactacatacgaaaatctccaacccagattaagcttcaaaacggaacaaactttatcctgctttgggcaagacatcctcgatcttgtttggcaaaagtttaaggagagacaaatgaaaatattccttggactccaagattatttctttgatctcttagaagggagagaaagaaacccagccatacgagtaatcatatatatgctccctctcttaagactagatgatcaggcaatttctgacccatcctatagattcctggttctcaaagctgagataaatcttcaaagattccggaacctacccacatacaaccatgaagaaatatctctccaaaccattatagatcatggtcttgtgaattccatatatgcaaccctcgatcagatccttcaatctgatttaggaaacgctgtgaaagatgtatgcaggagacttggacatggaagatacatgattatcttctcctcaataccaccaaaattcacaccacctgttcgtccagcaattcattatatatatatatcatgaagggacaatttaattttcaagaagacggtcctagcaa

SEQ ID NO: 13693 - DNA, 878 bp, Oryza sativa
  Intron number 1 from transcript LOC_Os12g41780.1 (locus LO C_Os12g41780) derived from phytozome v7.0 (chr-ID Chr12; p os 25849883 to 25850760)
ttcatcttcttcttcttcttcgtcctcgcggtgaggtgattcttgttctttggccatcccagtgctccaaacatctcgctatgcaaatcttggatggatctactattggcggtgcttgtctgattggttatgtttgatgccaatatctttagggttggcggcagtttctaatctttaggaatgttgtaatgcttagcctgcagactgcagtttgttagtattgatgaacaaatgaataaaagggtagtagaggtgctgttttgatttgattttggggggcaaataggggctttcttattttgtttgtgttgctgaaatggaattgcatttttgggcatacattcaacgaactgggcatagagattagatcttcatttgtagagaaggctgatttgttatggtcttccaatgttgcgatccaacgaactaggcctgaatgctgatttgtgtggtctacacaggtctgaattctgaaattagtaatgactgtatcatctttaattgtttgttgtcctctaaaatagaaaatgtttcatgttggggattgttagaaatgaggtgctgatagaagttgcttccttcagtaacacatgaatacgtgaacatgatgtttaagacccttttttattgaaatgattcaataatagtatatctgtcctactaacatttctatccatggctgttgcattacaaatttagaagataaagggtgtacctgcaattcatctctttcttcttattttgaaattagtactttctctaattgatacttgcatcacattgcttgttctgccacttattttttctgtttgcttactttcttctgtctcttgcataatacagatttactttcacattccgaagtttgctacacttcc

SEQ ID NO: 13694 - DNA, 764 bp, Oryza sativa
  Intron number 1 from transcript LOC_Os12g39200.2 (locus LO C_Os12g39200) derived from phytozome v7.0 (chr-ID Chr12; p os 24104550 to 24105313)
gcgggaggcccctccgcggcggcgcctacgaggaggtgagcgagcgagcacagccgagggggttaaactccatgttcctcctccatgttatacgaaacagaagaatcgaggcgaaagtatgaaacgatagctttcagccttttgcaaatactcgattgagcagcagtaggtggtatgtatgatttgcgttagttggtgtgggatttggattggagcgaagtgatgggggattggaaggatttgaaccgtatatagatctgttcatttagagatgtaaatgttcctaaagtcggcaacacaaaagtaaacgatactagcgtcgatgcgcaaagctgcaactttatctttctcattggatagtttgtcatgctgggtactaatcttggcacacagtttgtcttaacccttgagcagtataaagcttcctaaaagtgcatccgagtgctaatatggttaacttttttgagtatgcatacacattatttagcctctcatagttggatggcagtgatggagaagtaattcagcatgcttgagcaacaacaaaagttagaatgtctctcctcacaagtgtgaggatgttatttagctttcaccaacaaagaatatatgcttgtcatccccctactgtcaaacttatctagatgagagcattagcatcttttggtcctatttgaatttctgtattgtcacttttcattatcgtgatgctcctgtgtttgcttgtagagatctgccctttggaacttgataaaagacataga

SEQ ID NO: 13695 - DNA, 683 bp, Oryza sativa
  Intron number 2 from transcript 13114.m00127 (locus 13114. t00039) derived from phytozome v7.0 (chr-ID ChrSy; pos 833 52 to 84034)
tcctcctgttgtgttaggtgttggtgctagaggtggtgagattttaattaaacatgatactaataaaactgtgtttaaatctgctggtatcatgtctaccatgaatgcatcttcttcaaaatccaatgttggcatgcaaaacctcttgtttctggcttggggttgctaaaacttctagtttttaaaaatgtgtttaaaaaacggggggaaaattacttgttttttttttggaaaaggtggaaatattgtggtttttttttcagattagctcataaacagaaaaatgagagagagattgcttttgcaaaatcaaagtggcaaaaatctggttttccctcgtggaaaccggtcagaccgcagtgggtcccgcggtcagaccggcgaccggtcagacaggctgaacagcctcggtcagactggacaccggtcagaccggcggtacagaggcggtcagaccggcccccggtcagaccggccactgtacttcggtcaaaccggcctcggaggaatttttctgaaaattctaaaattgattttgcacgtggatataagcctattggatcttctggtcgtgtgtctcagtactggattcctaaatttttattatctaaccccagtactgaggctttgacttctgctgctgtgtaggcttttgtggcaaggaaggagaacgtgtggatcgt

SEQ ID NO: 13696 - DNA, 567 bp, Oryza sativa
  Intron number 4 from transcript LOC_Os12g37840.2 (locus LO C_Os12g37840) derived from phytozome v7.0 (chr-ID Chr12; p os 23216559 to 23217125)
cagcaggctatcaaggttggtgcttggatgctgccctttcagtgtcattgctctttttggggctagaaagtggtgtagttttttttctctttttttgggaagaaaaaaagaattatatgtggtaaatgttcaggatggcttgctctacttaaggtaaatgtttgcatgaattatgtattgaaaaaaaaaaggttgcacatgtaataagctgtgtagtactctagccaagctaaatcaaccaattagggagagaatctgttatgctggtcaaagcctcaaaggcatgtgcagaaactgaagagcacatggaagctaatggggatgtccccgaattctggctccagcggttctgatgttttgtcattggtgcaactgaatgttcttgtccttaagtcaaaagaattgaagtgcacaacaatatgaatgcctacttgcaaattggacagtatctgaattacttttttgttagccgaattcattccagacagttgacacttgcacatgtaagctcacatttctgttttcgatgcaggggcttgttgacgagttccgcatccctgagaggga

SEQ ID NO: 13697 - DNA, 796 bp, Oryza sativa
  Intron number 1 from transcript LOC_Os12g29960.1 (locus LO C_Os12g29960) derived from phytozome v7.0 (chr-ID Chr12; p os 17879233 to 17880028 reverse strand)
gcctccacgacgacatcatctccaaggcttttcaggtcggccctcggcagccggggagcttttccttctccttgaattctttttttttttttttgttcctaggagctaattacctgcctgcctaatttagggctcctgcttgatcgaagaaatgatcagtagttgttcagatgagatacatgcttgttactactccgcactacgtatgttttagtgggatatggttggatatgcagtgatcaagtagtccatatcattgcggtaacggtaattggactaacaaaaaacctggatgtggcattggtttctgattgcctgtgcggtttatgagtcattatgtgattagctgtcgatggttgcaaactcttttttttttttctagtcatgcatactgtataagaataactgtagatgatataccctttgtgtaaattggcatgatttcagtaaagatttgaggtagtatttagcacgccttttgcttaccttactaccggggttgtgtgtatgttatgctaaagaaccagcacctcaattcggtgtgctgcattttattcctcagtttaattcatgcttacaatgaaacaacttgacactaaagcctaaaagttaacaaaaaaatgcagtcttatatttgttaaaatttatacctttgctttcctaaaagaacaactcaaaataactgaacacaagcacagtagctttctgaagaaatactgcatcattgggcctttagacaaatgcttgaaggctgatgccttctacttaccgttattttggttattttaggggagga

SEQ ID NO: 13698 - DNA, 567 bp, Oryza sativa
  Intron number 1 from transcript LOC_Os12g30800.1 (locus LO C_Os12g30800) derived from phytozome v7.0 (chr-ID Chr12; p os 18465548 to 18466114 reverse strand)
tttcagaaaaggacctcctcctaaggtcaccagaggtacaatagttttcgttgggatcgatgttgctatatagatcaaattatacctatatttagttaggcactttattataatattttcatagaacagtaaaaaatttcaaaaaaagaaactagactattataccatgaaaactgaagaatgaagatacaagattttgatggaatctctatatgcaatttataattttaatttttggagctcctaataaaatgagaatttgtttttcatcattaattatacttcataaaaatctacttatttactttgttgtgatatttttatcgtttaagttactttaagcttgacttatgtttttgcatatttacacaatttttttaataagataaatggtcaaaggtatataaaaaaaacttgtgtgagtgcacaggtactggtatctgtaattttcagccattgaagtttcatattctagtggtgattggattggttttggcgacatatttcacttcttttcattttgttttcccagcagcaacaggtgttgagaagaggatagaatttgag

SEQ ID NO: 13699 - DNA, 721 bp, Oryza sativa
  Intron number 1 from transcript LOC_Os12g41810.1 (locus LO C_Os12g41810) derived from phytozome v7.0 (chr-ID Chr12; p os 25863562 to 25864282 reverse strand)
gaggcggccgaatccgtgagtgttccttcctcgtgaacccattgggaatatcgtgcatttcttctttattcgtttcttggttctttcaggtcggttggttggtttaagttttgaatttctggttcagttctgagtctgatacggtgtaattgattcgattcagttcagttatttatagctgtagtagttcttagtttgtcttcctgccaggtggttgtcttgcagatatgcgtgtgcagtttttttttctttttcttgagcagattatgcagtagatatgaagtttttaaacttggggaaattcgttgagtatgtactatatgtagatatatagtcgacaaatttgtagacttttagcgtgcaatttacttaaagcaaagaataaaaggtcaactgaatctctggtgaatatcagttggcatcgtcaaatttctccaattctcctagttttatgagaaaatctcatcttttagtcagtctttaaacagtttggatgcacgtgcattaggtttgatgcacgtgctaagagaagttcttgacttttatgcgcattttcttctggaatttggagtgttgaatggcaacattttgacttcactataattatctcttcgacattatctaaaaaaaaactctcttggagtttgcattgtggaaaacaatcccataagttagactaactttaatttgtatggttttgcaatctttcaccagttggagt

SEQ ID NO: 13700 - DNA, 761 bp, Oryza sativa
  Intron number 2 from transcript LOC_Os12g43950.3 (locus LO C_Os12g43950) derived from phytozome v7.0 (chr-ID Chr12; p os 27240893 to 27241653 reverse strand)
atctttgagaagttgcagtctattagttcaacaaggtactcatcatgataaatgatcattactcactcaagagtcatatgttcaaaccttatctatccaatgcaattctccttttcatgatactactgtggtttccccatgttgcttttatgaaaagaaaagaaaacactgggcagtcatttgattttggtttatggtgttgtccggttgtttatcttggtatataacaagaggaattcacaagtagatattcttataacatcttgttagcaaaggaggaccacaaagtccaaaacttttttgatccaatcttaaaaatggaggaccacttgtggctttagcctgcaaatcggcatgtcacattgtcagttcatatattatcgcacttctcgagcaaagttttgcaggtgactgcatttctatcagatagaatcctgccaaaacttagcctgagccccaattctgattactcacttatgactggcattctttgtgtgcttctgctgtatctatattaacagtttgctcaattaaactttcttgtctttgtttgtgcaaagtgttttgaagttttccattgaactgctttacaagcacttgcctgcagttatttttgttggcattggtgtgctgttattttacaatctcagaggagagaactccttattcaatatttgaacttccttgggggtgtcttatcagtccatttcatgtactcaattgcagggaagttgaacgggatcaagtttagtctggataac

SEQ ID NO: 13701 - DNA, 356 bp, Oryza sativa
  Intron number 2 from transcript LOC_Os12g37430.2 (locus LO C_Os12g37430) derived from phytozome v7.0 (chr-ID Chr12; p os 22941238 to 22941593 reverse strand)
gagattcgcagcaacggcaaaagcattctagtcaggtatgcgccgagtcatccatttcgtttgttttgtaatctacttgcactttgttgattcattacttgatttcaagataaataaaatttatataatggaaattagacgatgctgctatgacataaatctaggctgtgtacctctcctggtcaattggtcattgttttgatcttttccaatttagggggcatatgggttctttgcaaatctcctccctctattttcttcaacatgtgagtatgtgacctgtaatgataattgatgaaacaaaagatgaattactttcaggctgaaggagtaaaagattccagtaggttggcatc

SEQ ID NO: 13702 - DNA, 431 bp, Oryza sativa
  Intron number 1 from transcript LOC_Os12g42400.3 (locus LO C_Os12g42400) derived from phytozome v7.0 (chr-ID Chr12; p os 26316905 to 26317335 reverse strand)
gaaggtgaaaagaggatttctggattcttgggaaggtttgatcttgcatttattcacccaaggttgtttgttcatgtggtttggggggtctttttctttttgttactaataatttacccaagtgtgagactttgtggctcttttgatgcatatgtttgtatggtgattggccatgggttctttggtaaagttggttcttggtctgcttcatctgccttgttactatcttccttttgctaatcttgttctgcttagattgtcttttctcttggggcatcctttgcattttggctaatcttgtcatctccttttgaagtttcacctctcttcctgcatctcactacctgatttggtgcttagtctaatccaattcctttttggttcttgtgattgcagtgggtgattaggtgcttaacataatcccaatccta

SEQ ID NO: 13703 - DNA, 1003 bp, Oryza sativa
  Intron number 2 from transcript LOC_Os12g41700.1 (locus LO C_Os12g41700) derived from phytozome v7.0 (chr-ID Chr12; p os 25783598 to 25784600 reverse strand)
ccgtgtccagcacagcaccgtctccaggtaatggcacatctaaagcttttgttagtttcgtttgtgcaatcgaccatcaaggttgcaaacactggccagaatttgccgggtcggccgaaggattaggccaacatgattttattaggattggaggatttacaggtacagattgcgattccatctcgacggtatgctgtcgaaaaaatcgacgtttcatccaagggatcagaatttcgagggttgatattagatatctgtattgcaatgttgatgcttgggtgacggtactctttgatgtatgcgatgatcaatccaaaaaaactgtttcttttgaacgctgctagaactccaatgttgcaagtccagttagacaaaggtcaagataagatagtgaaagagaggtaacatggaaatataaagggcattccacggctaacttatccttatagaaaacccagtgtactcattgtattagcttaaatatcatatactagcacatgctgctcagtttctaagcttacatccctagttctactgcctgattcccgcagactgcagcatttggttcttattcctttaaatggtgttgctgtttttttctactagattgtaattatctaccaaattatgttctgttccatagagtgtctcctgcataagatcttctttcgcaggctgttgtgtgatgtatttttttcatcaaacactgagccccttgtgggccaaaaagaaacggcttgatttttgagaaataataaagaattggtttgtcgtgaagcctagcagcgcatcctaatgtccaagtccaacagtcacctaggaggagctacaaatgccatatgtagaggattcctgaagcactgaatggggtagctcacgtaattagaatctaaacctcgggttatcgttttaccatcgctctcattgcttcatatcactgtgaactttgtagttgcttcaagttgtcatgctcatgaaagttgggtaaatttcatgtgcagga

SEQ ID NO: 13704 - DNA, 1038 bp, Oryza sativa
  Intron number 2 from transcript LOC_Os12g42430.3 (locus LO C_Os12g42430) derived from phytozome v7.0 (chr-ID Chr12; p os 26338610 to 26339647 reverse strand)
aaaaagcacaaacttctgaaagcagtggagtggtaagccgaatgatattcagtatggttgtttgctctgcaatgataacgaattgtttataacttcatatttggtacatgtgagtatgtgacatgtagtattttgtttaagtcatttcatgttttgccctgttgtgagtggaagaatatgatatgcgtcatatgtatgtttgtctttccctgacaaaacatgaggaatctttaagaatgatatgaaaaatagatgttttacctaaactcactggaagacagtcggtgctgttgttgctgactgttgatatgttgttatcatctgacatatcacttaagggttaccgctacactattctcttgttcattatcagaagtgtcacagatatataaatcttgtttgccatgtgtcatgtagctaatgcctaatggtagcacctttttctgttcattgaccttgccaaattatttctgttgctagttgccgccatcaacactgtaatgttttcatccttctcacattcaccatatagtggacaggctgagtttaaaaacattttacaacaaatttatgtacataaatgtgactaaatcgaatttatttcttctgaaatttcttgctttataataaatctcaatataaatcaattcagtctaaactattgccactgaaacagttaggttattttctatatattgcctttttatgtactttgtccaggaatttatataaaataaccactcaaaaatattgtatatgaaatagcagaagatctggtatgagttatatcttgtgtattaaggtgttcagtgctgagtcagtgagtctgatagcatggccagttaagcaaactattgcattgctatattttgatttcttgtactccatatttggctcactattgccacacatttacatattaagcattgttattttttctactgtattcatcattctttaagaccctactttgtgctaattgtagaggagctctactgcgcagttgctacacaagcgaaaacattctattgatactga

SEQ ID NO: 13705 - DNA, 911 bp, Oryza sativa
  Intron number 1 from transcript LOC_Os12g42770.1 (locus LO C_Os12g42770) derived from phytozome v7.0 (chr-ID Chr12; p os 26550572 to 26551482 reverse strand)
cgcagtcgtacaacccagtccacgaaccaacataggtaccatgtttgtttccacaaatttctcgatatatactctattaggcatcatgtttgtttacaacaaaacaagctatgcttcctttctagctgcatatttttttagattcacaaaatattgccgtagcttatatgcatgcatctagatagccaattagagtaaagagatctcgccattttgcaggaatcttttcttcttaacatttgtcgcttttccagccatttttcagagttcagagtttcagtttcagagttgttttaggttgtttcgtgtgtgcttctgcaggcagccaggcagagctaggatcctggaatgtgttggccactaactcatgggagcctgtcgattaatcgagtctataacactagaataataatcttaatcttaatcacgcagctcacgtttgttcagcaagttttgatcttaatcttaatcggcaagctcactgctgcttgcgtttaatattttgagttgctatacctatattatcagctttggtggagtatgtaactttgctatttttattggacccacggtgatcattaccagtagtaccaaccctccattactgcctctgagtgctgcaataacagtgccatatttttagcttcggtaccatgttccagtctgataataatgtcttctggatttaggttctcctacaacaaattgtgccagagagaggtgcggttcactatgcactgatgaaaaagaggccaatcttcaaaaaaaaaacgtgaatacaagcagagcaagaaggataactttgcatctctaacaggtaccacaatgctctcctttttttttttttttttgcttcctgtcatgaatttgacatcaatatttaagccttgtttcaggaaccgagtacagtg

SEQ ID NO: 13706 - DNA, 749 bp, Oryza sativa
  Intron number 3 from transcript LOC_Os12g30510.1 (locus LO C_Os12g30510) derived from phytozome v7.0 (chr-ID Chr12; p os 18282801 to 18283549 reverse strand)
cggtattaccatgtttatcttgttggtattaaatttttggtagttctaagttactagctgatgttaactatggcacaaattaagagctatgtatctgtttcttgaaaagctcagcagaatgaggggatactcagggcaattatccaaatatggggccaagactgcaaataaatccgactctttgcagtaatgcgtgattcaagaagctggctctattcaacaatcttcttatggcaaacacttgattcacaccattaagctctatgatctggatttctatactatgccttttatacatgcgtgcatcttaatggacttttgaattttctttgcaataattgacaaatggagattagttcggataggctgaatttctatgttttatgttttctatacatagatgaatatcaagtaagttttggattttccttgcaataattaacaatgtaaattagtttagacaaactgcgctctctggtgtggcatgtccttgcaaatcccacaatttctcgcacagagacaattatgggaatagctgtttaggtttgtgtcacaatcaacgaatctgaattttctgttcagagaatttgagtgaatagttctatgttacatatgtgagtaaccttttgtaataaggaatttgttgagtaaccgtggtctgggtctacctgcttgtgttgccttgatattttctttaggtgtagatctccctaatctatttgacatattggttcctttgaacactgcag

SEQ ID NO: 13707 - DNA, 829 bp, Oryza sativa
  Intron number 2 from transcript LOC_Os12g32499.3 (locus LO C_Os12g32499) derived from phytozome v7.0 (chr-ID Chr12; p os 19585729 to 19586557)
gctttttgtgaggtgagtcctacccgttgtcatgctttcgtaacatcacatttgatttttccttcttcagataacaatttcatgtgtgttaatacttatagttagggatgaaaacggagcggatacggacggataatgctcataccatattcgttttcatattttttgccggatacggaaacgaatacggatagctcgaatacggaaacaaatacggactatctcgaatacgaataagaatcgaatatgatcggacacgaatacggaaacaattttttctcggaacacgaaaaccaattcaacttctaatagaaacaaatatcaacatatataattagctcattttatataaaatatagtataatttataaatatttttaaaattttaaataatattaataatgtggactagtgttaagagatgaactactattaaaatctaaaaaggtatattgaaggtcatagagttataaagaaatgggatatgtcttgtggcttctgcggatatccgaattattatctgtatccgacggaaatcctaataccatattcgtattcgtatccgagagaaaatatccgtatccgaactatccgagaattatccgatccgaaaggtatccgtattcgtttttatccggagcggacggaaactatctgctccgttttcatccctacttatagttgacctctttattaattggattgtaacatcaatgctgactaccaagtttattagtgttcagtttcaagaatcacttgctgtgtttattactgcttgtaccgctccattgcagcaagcgtttggaaaaccatagccctgctggtgaga

SEQ ID NO: 13708 - DNA, 946 bp, Oryza sativa
  Intron number 1 from transcript LOC_Os12g32450.1 (locus LO C_Os12g32450) derived from phytozome v7.0 (chr-ID Chr12; p os 19555651 to 19556596 reverse strand)
cttctttgagctagcgagagagccaaaaccccaaggttatttctgacgtattgtatcattgtatgttttgcgcctagcacaccgtgcatacattggttattgtttttcttacatgttcatcatgtgtggttaattttgttctttttgccagaaatccatatcataatctttatcctctatgtgcttttgatctccttttgtttgtgcagctacatagtacgtttatgtactgtagatgtgtatagctaaaaatgaacaactaatcctagctagtttgttagtttctttcctcgccaacaatattatttctttttgctacttaattaagaatctcaggcttacatattcttaatttccacttaaaaaacgggggtaactatacacacatgcacacacatattaatttttcatggatccttatagtctctttatattaagcggtgaaggtttttttgttgattttgaatttttggatcatagagttagcaattactcgttctcttatgcatgaagagtgtatatacattttataattaatattattgtagctagctagctctttgatttactatacgttttttttccccaaacacaagttcaactagtactaattgtatgaccatcatttatatcgtacgtgtctgaagtttgcttgcatatatatctactgaatccattattttgcatgcctcaactcaagttctcagtacgtttaattcttgcattgtgtgctcgggccgcctgaaatgtatccataatattgtagtagtatgttgagtgaaaagttcgtagctagcttcttaaaaattttttgaagttgattaaattttgtttcgatagatgtgtggtttgatctcatgcataatcgcctcactaattgatagatatttatttatgtggtttaagtgcagtaactgctagctgggcaacggattggtgattgatt

SEQ ID NO: 13709 - DNA, 843 bp, Oryza sativa
  Intron number 1 from transcript LOC_Os12g30970.1 (locus LO C_Os12g30970) derived from phytozome v7.0 (chr-ID Chr12; p os 18568251 to 18569093 reverse strand)
gtatcagagctatcaaccaccaaatctgtcatgaacaaggagaagctatagatggataaagcactggtttggttactaaagatgtttgagttggtaataagagaagatagacacgctgttgcaaatgtttgagttgtggaagaagagagaaatagataaaatttaagttgcatgcatgtttatggagttatatatcacatattaatacatctttttatttttttttaaaaaaattcataactatttgagttgtctcccaaaaagtaagttagagaatcttaattagtccacgagctcttatctcgaaagtatacgtttaattttttatgtatatgtacataaccgcatatgtacgtataaactgggatacacgtataactatatatatataaagtttatacgtatatacatatcaatatatataggtgggcaaactgattgtgtggttgcacccgcacgcggtcagccacccctcagtgcccttgcatgtgggggcaggcaaatggatttttttctgcttatttttactttatatttttcccaaattttatactatcatgtgcaaacaccttgactccaaccatcatcatcagagactcttttcctcatacagaaaaagacaaacttactaagaaattaaaaatcgaacacagtacaaaattcaaatgactttgaaccagtttcaacgaacctgagctaatctggaaagaactgcgagagaatccaaaatttttgaccgattcccatgcatatcgcgtagaccgtagccgcatgggattctttgactagctgtagtgctgtactactactacttatagcccccagacggcgtcgccaacatcg

SEQ ID NO: 13710 - DNA, 474 bp, Oryza sativa
  Intron number 1 from transcript LOC_Os12g37550.1 (locus LO C_Os12g37550) derived from phytozome v7.0 (chr-ID Chr12; p os 23009222 to 23009695)
cttgcaggtacatcttcgtcttattttgttaaagtctttaactctaatgaggttctgatcctgtaggtattatttagttattttgacaggaaaagaaaaaagagtataactctcctggtgttgttcttgttgaaagttcaaaattttttgctttatcatgcttgaaactagaatacgtttccctcaacaacttaataactaatttcagtatggaatatttattttttgtcaattgtcaaacattagtcttgttctatgacttctttttctgtcttaatactactagaaagggggtaggctgtatgtgtcttcatgatctcacatgcgttttatccccaaaaaattgaaaacagaaaagacaagcctatgtttatctaggaaactaagctgttatatctggtgtttacatagtcatatctggtgttaactgtttgctttgatgttgtttttgcagtcgctgtaatagtttcgagg

SEQ ID NO: 13711 - DNA, 661 bp, Oryza sativa
  Intron number 1 from transcript LOC_Os12g38820.1 (locus LO C_Os12g38820) derived from phytozome v7.0 (chr-ID Chr12; p os 23825114 to 23825774 reverse strand)
gcggcaaccttcgcggcggtgagcttgtcctccggcatccatggagcagcggcgggcatccatggagacggcggcaccgagcatgcctctctccgagttttccattttcatcttcttcaccggcagaaggagtggccaccgcccgttgtttccgttctcaatctggaaaccaccgagagccacctttatttccattcaacggatccagaaggagaagaaagctgctaggatcaacaacacaatcaatcaattatttttcctgattttggttggacgttgtcctgttatttgatctcaccgatgtgttattgcattatttgtgtgtaattagtttctaatacatgtgattcctatatgattagatgcatccggacatcttgcaaaaaaattgcaatctacatatcagtatattgacaattaaaaaagtactatatgtaatgtttggagtaaaatatttactatttgtaatttgtcagtaaaagtaaccaaatgatgtactatagttgaatctgaccatacctaaaagaaacagaaattccgttccctgtggagagaaaactaaatttaggtgtacaagcattattttcggatcaaggactctgttcattatccaccaggaccacaacaacaggatgtatcgcatgaaatgatttcgcagctt

SEQ ID NO: 13712 - DNA, 893 bp, Oryza sativa
  Intron number 1 from transcript LOC_Os12g37490.1 (locus LO C_Os12g37490) derived from phytozome v7.0 (chr-ID Chr12; p os 22969658 to 22970550 reverse strand)
tcgtatgtttctagaccatatatatatatatagacatgggttaacaatgtgatttttgtgtgtttgcttcatgtacctagctagctaaagctagatctttgacatcataagcttgacatgatcataagctagctatgatatgatacctcttgtctacaattctataactgccctaaagagtggtcttcataagctaggagttaccttttcactttaggctttacatgcccccaaatatggaaatggaatgtttgtttcacctcactggctacttgctaattgcacagttaccctaagtatatagccaatcttgcaaaggctagtcatatgaattaggttcagacttacatgctaccatctctgttcttttctacttgacttttttaaactttgacatagtcttcaatgtcgcaagtgtccgaccgttacatttctgataatatgtttacataaattaataaaaatatagttacatgaaaggatttctcatgataaagtcccatttgtaaatattaaatcataacatttttattgtatcgatgatttaatatatcgaggtttgactctattcattttaggacgttatatatttgagtttttttttaaaaaatctatttgagaatagagatactttcaatcaagtgagtctttgatcttaattagggattccaactaggtttgaccatgcttagaagctaataggctcatatgaattcatatgcatgcgtgttcataacttgtagcaattaattctctagttctctaggctaaaacattcaaatctgtacaaaaattagtgaacatttattcaaatttgtctgaaattttcattataaattctggcccttccataagtaggtagctgagctcacagggggaggaggggagctcgt

SEQ ID NO: 13713 - DNA, 833 bp, Oryza sativa
  Intron number 1 from transcript LOC_Os12g36750.2 (locus LO C_Os12g36750) derived from phytozome v7.0 (chr-ID Chr12; p os 22480096 to 22480928 reverse strand)
gcgacggcgacggcgagctccggttcttggtcagtatctgtctcccttctcgcctggtttctttgctctgctgcttgtcctgctgccgtctcgccttcttggtgtgttcgtctcgaattcagttcgattcatcgtcctgtgtcaggatacaagcgttttggttgtgaacttcctcgttttcaattttgagcccgggaagaagcaaacaacctatcaaaggaaattaactgaaccaggattggatgaaatttgatggggccacttctttggggagcttctgttttcttgcaatgggctgctagaaatttcgttcacaatgttttcctgataaattccgtcaagtcatgctcttctttgatgaactttgacatgttcaagatctatagttcgtcaaaagttccaagtctcgaatcggtcggagtgcgcggtcttgtttatttttcctgaccttgaaactgcagcactttgtgactagaatataactaattctggtcatgaaaggtgtgagctttgagtctgcaaagctgaacttgccaccatccagcttcagcctcacctgcaactctttaattctaattaggaagatgtttatgccttcccaaccgaaccgatcacaactgctgtttactgctttgatctctactctgtaccaaacttaccacatgcattcttcttgaaaaacaagcacctatttttttttgttaatgttaggtgtggtagcattaatctgaactcacctttttttacttattgtctacattcttcttgtatgatgcagctgcctgattgcctgaccaacagaattcagagaacctctattttatctgcagttg

SEQ ID NO: 13714 - DNA, 611 bp, Oryza sativa
  Intron number 4 from transcript LOC_Os12g31800.1 (locus LO C_Os12g31800) derived from phytozome v7.0 (chr-ID Chr12; p os 19103842 to 19104452)
gaaaggtaatcttatagggaattaattttagcgggcatcatgtttatgttccaggattctaagagttggtccctgtatggtgagggtcagattaggtttaatttaattttttaccccatcatctatatgtttatccagacttaataggtattctgtcaaacttaaggtgtaatgatttatgctggttaaattcacttagaatgcttctaaagttttggagcccttaatttctattactctaatggattttaccactgcaaaccaatttaagtggattttcaacactgccatgtttccatacttttgcaaaagatatggtttgtagaatgtcaaatttcatgctgcctgatcagcttgtatgcaacacgatcgcttaaatgaatattcctactctagattccttgttacagaaattggagatgttccatttcaaaggttctgattgagcttcttatttgttattttactatgcattatggtgttgatgctttgattatttacctctggttttctagttaaaaaaaatatgcaacagttccattaaaccaaagtcatttttgttcaatcttatccagcagcttattttcttcctggctggtttcaggatctcg

SEQ ID NO: 13715 - DNA, 990 bp, Oryza sativa
  Intron number 1 from transcript LOC_Os12g33210.1 (locus LO C_Os12g33210) derived from phytozome v7.0 (chr-ID Chr12; p os 20055827 to 20056816)
aggcggccgccattttcttgattccgaccttgcaggtattaaagccacctccacctgcccaatcctctgaattttgcagtgctgggcagttctttctcctggttcttggcgagattttgggccctgtaaccctgcattctgtttgattgtgatgatccgtgggtggatggggatggcctaggtggtgaactcggttcttgatttcttgcgatttttttttccttttgatttatcaatgcctgaagcagtggattctgctggagcagagctgttaaatgtgtagcttgtacagagtcgggctagtggagcgaactcgcactcgtgtttgtgattttggtgtgattagttgatcagtaggtctgtaggtggtatcaattttgctcatatttctgattcgtttaattggctcagcaaatgcatgtacccctggtgttaattcggctatttttttccttgattcctagctgtctgctttcatcttatgcatgttgattgagttgattggctgaaatggcagggcgtgggtataacctaggtgaactcggttcgcttatcaatgtagtataaacatatccttaaattatctgagcatgttgatgcaacttgcagagtcagtggtggacttcggtcgtgttgtgttaaatgttttcggtgtgattccaaatatgcctgaaatttcagacactggaatactatcttaaattctcgtattgactagtcaatcgcagacatgtgggctgtagtctagtattattttgtttcttacgggttaattgttgtttgctcaaagaactgtataaaaataaatagttccaatcctatcttcttctgaagaggaagaggaacaaatgtatgttcagcaaaagagcattcaattcacatatattgatgattttactactgtaatttgatcacctttacatgtatcattctgatcatattaatttcatcccagcactcagatatctgctgaatctggtgatagcgcag

SEQ ID NO: 13716 - DNA, 1018 bp, Oryza sativa
  Intron number 3 from transcript LOC_Os12g40710.1 (locus LO C_Os12g40710) derived from phytozome v7.0 (chr-ID Chr12; p os 25169323 to 25170340)
cgataataaggtaaatgatgcaataaggatcagatcaaccagtagaaaaacattcagtaatttttttttgggtaaatgatgccctcttgttttctttaaatttcattgcagcgagatacttatgaaaattttaaaacatagatcaatatatatgcatatatcattacacaaatttgcaggtttaaatttgaaaagaagagataaatatggctgtgaacaatatacgtatttaccctcaaaaccctaagaaaaacaatatacgtatttagattttaatttgttcctaattttatgtcaacttgttttttggataatgaattttttttatttcaacttgtataggtagaatttagctatttatatatcttttcatgcgatttaacttaattgaacttagaattaataacaaatgaaattaagaacggattattacaatttaatcaatataggatatagatgtatcgtcatgcatcgtgagtagtggaccaaactaaatgactaaactgaaaatttgtcgcatgcatgcgtacgtgcattctctaaatcagaatcgatgaattataatatataatatgttgtgtcgtctgagtcgtaagtttctttagtgaaaattttcaaattcactaaaatttttaaatgtaaccatatcataactaaaatataaatacattttaactaatctgtaactgttctttaactacatgcataactatgatatagtaaaaacttgtattcaactaacgtttgattaattggctaccacttggagtctagaatcttacgcatgacatgtgtgaaattagatttctttccagcgattattttgtcttgatgcacgaatcttaagaccatccgataaccacgaaactagaactttgggaggaaaaaaaaacttgcggaagttttctatcgattccttcactgagtactgacacggccggcatccatggcgatggatggatggatgcgtccataaatttcagtcgaaccaggcgtcaacgctggaccagacaatcca

SEQ ID NO: 13717 - DNA, 899 bp, Oryza sativa
  Intron number 1 from transcript LOC_Os12g37600.1 (locus LO C_Os12g37600) derived from phytozome v7.0 (chr-ID Chr12; p os 23058820 to 23059718)
atttgctccggagtcctttggtgtcattttgcaaggtaaaatcaccaatgaaaattttctcgtgtttatagttattccctctgttttatattacaactcgtttgattctttttattagcgaaaattcttttcaagcttgaccaatctataaaaaaataatattaaatatatttctttttacatcaattaaatgcttttgaatgacctagttgtgttcgggaggtgagctggtgaggttgggaactcttacctcccgcgcaggtaaaacggagcgacacatttttttatgattaattaagagtttactactacctctgttataagacattttaactttgtcaatgttaaactgtttcaagtttaatcaagtttgtagaaaaaaatagtaacattttcatccaaagacaaatttattatgaaaatatattcaattatttatttaatgaaactcatttagtatttaaatattactatatttgtctataaaattagttaaatttaaaatagtttgactttgaccaaaatcaaaatgtctcgtgacctgaaacaaagggagtattttttataaaaaatagattaaaatgattttttaaagcaactttcatataaatttttcttttagaaaaacgtaccgtttagtgatttgaaaaaaaaatggattaaaatgattttttaaagcaactttcatataaatttttcttttagaaaaacgtaccatttagtgatttgaaaagagtgcgcgaaaaaacgtagaatgtgagtttggaaagttggggaaagaactcaacctaatttaaaagattgatcagtgtaactaaagttgtactccgtaattgcttgactaaatcgtggctaattttgcaggaggtgtacgtggtgagccacgaggagaagagcaa

SEQ ID NO: 13718 - DNA, 1018 bp, Oryza sativa
  Intron number 1 from transcript LOC_Os12g29220.1 (locus LO C_Os12g29220) derived from phytozome v7.0 (chr-ID Chr12; p os 17298055 to 17299072 reverse strand)
gcagcatccctgggcttttgccttcggcctccttggtatatcatcatcacctaccacaactaagacattcccttcattgccaacattttacttctttttattagaaaccattgagtttgtacatataagctcagagttattacttgctggcagatacgcatagctagcgacgacatttagtgaggattacactttagtggtcatcatatataaaataataaaattgttgtgtttctttatttgttttttattttctagctagcttctttcagttattttcaacaaaaagaatttcttctagcacttttatttacagcagtttattatgtctatttgggcatattaattagctactagcgcataagctaaaaaccctactagccttccgaaggcaatatggatggtactcttgtagtaataagccaaaagctagatttgattttttttatttcttttggcttttgtctattagaattatacgcgcggcgccacccttaaaattgcaggcttaaaatccacaagcatataaactacaagggcctaagcatacttaatgagatgcacatagccatataatttttctgcttcttgttaaactatatatatacagcaagtcctcatcatttgtatgtatatcctacttgtggagcaaacattcgatcctttggtgcaacctctatatatttatgttgccatggagagagagtggaattaataggtcaagctatatagtactctaattaatgacatcatagtgcaccatgtaacacaataatttaaagaacaagttaaaagccaaggcacaatctttgttgcaaaggaaggcaagggctagacataaagtttgtaaacgtgtctatctatcacaacttatcacgtctggtcgctaccttagctgcctccatggggctctttactcgcattactttgccttttttcctttacaaaatcctgatcttgtttctgttcctttggctttgcaggcaacctcatatccttcacgacctatctggcacca

SEQ ID NO: 13719 - DNA, 797 bp, Oryza sativa
  Intron number 2 from transcript LOC_Os12g39640.1 (locus LO C_Os12g39640) derived from phytozome v7.0 (chr-ID Chr12; p os 24442157 to 24442953)
gcggcagcgtcaagaagcagcagcacaaggtatttttgtttggttaagttttgtagtttttttttttataaaacaaatcaagtttatactagtttgaagggaagatatgggaaaaacatgaatattttgtttggttaagttttgtcaagtttgtcctagtttgaagggagattgttttggaagggaagagaaggagtaatgctactcctactagattttttttgaagaaacttaatttgcaaatttatgcgatactactactactagtctagtgctactaaaaaaaatggagaaaattgtaatattgggactgcaaacacgtgggcttcgctgttttgacactccgagtggatgacaaatgggtccatctgtgtgtatgaaatgtgggtccagtgtcattatagcaaagtttaatgtttgccgtgttataattgcaaatccccaaaaaaaaaaaataggaatctttacaattcaggtgttcaatgaaaaattctctctctttttttggtttctactagaaagaggagaaactttttccccatatcaccatgtagaatagaaatggaaaaatacagaataaaacaaaaaaaaaacaaagattcattttgttcgatttcttgtaatttgtcaattttttctatgttattccaccaagaaaatattaacacatgttgagcatgcatagctttgttgtcaatctcatgcatatttgtctgtattttcgctaacttttttctcaaaagagtatattttttcctaactagttctgtcaatttcaaatcatgatcaggtgtcca

SEQ ID NO: 13720 - DNA, 328 bp, Oryza sativa
  Intron number 4 from transcript LOC_Os12g43720.1 (locus LO C_Os12g43720) derived from phytozome v7.0 (chr-ID Chr12; p os 27124503 to 27124830 reverse strand)
tgaaagtgagatcaaggtgagatgagaaacttcttgtagttttactacagggtagtttaaccaatgttctacatgacatttacgcctcttgagtgctggcatttagagaactccctccgctctcaaatagacgacattttagaatgtgtgcaatcaaatcactaataaatgcaaaaaaaaaaagacatgtgaaaatagatttgtcatcaaaagtactttcatagaatcaataatttcttctttttttttttttttttgagaaagatatgatttatatgccggttgcattgcaggctttgggtccattgtgtagccttgtacataatat

SEQ ID NO: 13721 - DNA, 873 bp, Oryza sativa
  Intron number 2 from transcript LOC_Os12g43720.1 (locus LO C_Os12g43720) derived from phytozome v7.0 (chr-ID Chr12; p os 27125542 to 27126414 reverse strand)
tgtgttgcgccggcgagcgggcggtcgacttggaggcaagttaatctcgcctcctccttcgtcttctctacttgttcgttttagttcgtcggatttactacgcgttggtttagacagaaatttcagttgttaatccccgttctttgtccatcgatttcggagttggattctgttccttctcttgctgcggttgcggttaatctgttaatgggggaggagtcgcggttaatgcgatgtagtagtaattttctgcttggtttctatactaagcctgcagggtcaggtagagttgcagtttgcaggcaatccgctttctgtcgcgtggtgttgtggtgatgcggatgctcacacgcaaacaccggttccaaccatcgaatctaaacccaacctgttcagacagcttggattcctctatttgcagccttgcagccaacgatgttgacgcctcttgcatcgtgttcttctttttaattaactactccacttggtagtagaataatatataagcagccctcatgtcatttgggcacatgacattgcatctggagtgttctacatgctaccactactttttgttttagccaattaattactacttattatctccaaggttccactgtccgtacacccactccgaggaattggcttcattctcaaatctgattttaccttggtgccacttttggaatgtgcgtttgtttattcatggtgtagaaataggcagtgatgatgttatctgttgttttgctatctttcttttttctctttctctttgtggagattacagaatttgcagcgatttgtacttgcaggattgatttgatttgctttagcgatctcttcctgcaggtgctgagcctctgggtaccaagg

SEQ ID NO: 13722 - DNA, 516 bp, Oryza sativa
  Intron number 1 from transcript LOC_Os12g31560.1 (locus LO C_Os12g31560) derived from phytozome v7.0 (chr-ID Chr12; p os 18956523 to 18957038)
catctccatctgcaggctcccagactcgtgagctggtacgtacacatttcttgctccaagctaataaatggacaccttaacattcatgcatgctttaatttaaatgaaactagaaacttaggctgtgtttagtccgtgtgccaaaatattttaaagtatacgaacacacatttgaaatattaaacgtagactaataacaaaataaattacagatccgcctgtaaactgtgagatgaatcctaattaatccatcattagcaaatgtttattgtagcaccacattgtcaaatcatggcgtaattaggctcaaaagatccgtctcgcgatttacatgcaaactgtgcaattgatttttttcgtccacatttaatgttccatacatatgtccaaatatttgatgtgacggaaaagttaaaagttcgaagaaaaaagagttgaatctaaattaacacggccttaataattgtctgcgtttgtccaggagctcgcagaggaggccgctcaagaggtggtatt

SEQ ID NO: 13723 - DNA, 904 bp, Oryza sativa
  Intron number 4 from transcript LOC_Os12g32499.1 (locus LO C_Os12g32499) derived from phytozome v7.0 (chr-ID Chr12; p os 19588327 to 19589230)
ttaaaactggtacataagtaacgatgaggactaacacatctacaaccctttcaagctaccaatgggtaggtcaggtaacttgtctcatcagtccatatcttaagacttaatctaatcacttatggttgcttttgctcttttgatagagtctcaattaggcatgacaggttttgccataaatcttgttgctaatattactgttgttttaacattctggtggcatttacaagtttctgttcttcctatgttaactcatcaattaattcctaataacgctcatggtttcattctattatggaaagaactggtttgctggtcatcctgttaattttctaacaattgattaacagttcagtgacaatttataatataacataacattataggatgtttcatgggtctcctgttcagtgtttgcttgttaaattgagctttgagattctgtctaaggttaacatcttctgaatagattagctataattgttgatcaagtcatttctgaatattgaactgcctttatgaaaaacggatttatcgtgaagagtgttttcatcgtccatgagacccctcgtaaaccaattttgaaagacttgtgacaaaataagatggccttttcaatatcaagtcaaattgaaaggcttctctgatatttggtgttattggattatgaaggttgttggggaggtcggttagtcataaggttggaccttatttcaaaactttccatggtctgagacagggggattcctgtctccccttttatttgacatcactccagacaccctagctttattgattaatagagctaaggaataaattttgtttagagggatgatccctcaattaattgaatatggcttatctattttgcaacatgaacatgacactgttttgattatgcagg

SEQ ID NO: 13724 - DNA, 676 bp, Oryza sativa
  Intron number 1 from transcript LOC_Os12g42400.4 (locus LO C_Os12g42400) derived from phytozome v7.0 (chr-ID Chr12; p os 26316905 to 26317580 reverse strand)
aaatgtgagtgggccttcttgtttctttctttgctatactccacactcccccgtgcatgccttggatcctttcggtttggtttcttgctgctcagtgggagattcttgcatctgctgcacatgcacctgctggctgtggctgtggcctatgcttactagtagtagtagtagtagctcaccttgttattgagaagttcttggttttgtgactcctgtgggttattgaagttcttggtttcagttgggaaggtgaaaagaggatttctggattcttgggaaggtttgatcttgcatttattcacccaaggttgtttgttcatgtggtttggggggtctttttctttttgttactaataatttacccaagtgtgagactttgtggctcttttgatgcatatgtttgtatggtgattggccatgggttctttggtaaagttggttcttggtctgcttcatctgccttgttactatcttccttttgctaatcttgttctgcttagattgtcttttctcttggggcatcctttgcattttggctaatcttgtcatctccttttgaagtttcacctctcttcctgcatctcactacctgatttggtgcttagtctaatccaattcctttttggttcttgtgattgcagtgggtgattaggtgcttaacataatcccaatccta

SEQ ID NO: 13725 - DNA, 879 bp, Oryza sativa
  Intron number 1 from transcript LOC_Os12g36860.1 (locus LO C_Os12g36860) derived from phytozome v7.0 (chr-ID Chr12; p os 22562063 to 22562941)
aagcttaaccccggtcggtttcgaacaatagcattggcacattttcacttcgtacacctgtaattttggaaaagaaattttgggaggtgggggtgaggagcttaattttcatcctttaggctaagctcgggagtgagggttgggaaccttcactttcagcatgcaaaatgaagcggcagttagcgcatgactaattaagttttagctaaaataagcattgaaatagattaatatgattttctaaaacaactttcatatagatatttttttgtaaaaacaaaatttagaagtttgataagcatacctgcgaaaaacgaggtagaagtttggaaggaaagtttagaacacagcctagtttttttttttttttggatctttctactaacctagcctcatctgtcactcggtatcttgagataagttgagatcttaactaagatagtgtttgggaagaagtgactaaagtttagtctctcacacaaaaattttaatccctcctatagggacttatgttcttgtgagagggactaaagtttagtccctccttcccaaacaccacctaattaagagggttaaaattacagctgtgcaaggcgaattgattgggtatgtataacagaaaatactccctccgtttcaaaatgtttgacaccgctgattttttcgtatgtgtttgatcatttgtcttattcaaaaaatttaagtaattatttattattttcgtatcatttgactcattgttaaatatactttcatgtgcacatatagttttacatatttcacaatttttttttgaataagacgaacggtcaaacatgtgctaaaaagtcaaaggtgtcaaatattttgaaacggagggagtattcctattatatgcag

SEQ ID NO: 13726 - DNA, 459 bp, Oryza sativa
  Intron number 1 from transcript LOC_Os12g39160.1 (locus LO C_Os12g39160) derived from phytozome v7.0 (chr-ID Chr12; p os 24055387 to 24055845 reverse strand)
cgctcccccacctcagcatcaaggacacccccattgtaagtgctcttgggtgaaatcctctcgagtgaaaatttcggtgaatttttttttgtggattttgagttcttggattaattaatttctaaagtcgccacctattcaattatttcttcttctagaaaaacctgctggttcgttaggaagaaacaatatgaaaaaaaaaagaaaaagaaagaagaagaactggttcttgatgtgatgtttggatgtgatacattttctcatatccactgtacaaacggtttattcctcatgtagtgttctaccatttcactttcagttacccatttactgaaagaaaaaagaaatcagcaactctttgatgtagttgtaaaaagtattttgttgtagctgtaagttttaccattacgatgtgttcttgcaggagacctcgtcggcgcagtacattctgcagcagta

SEQ ID NO: 13727 - DNA, 768 bp, Oryza sativa
  Intron number 1 from transcript LOC_Os12g36950.3 (locus LO C_Os12g36950) derived from phytozome v7.0 (chr-ID Chr12; p os 22628027 to 22628794 reverse strand)
ggcctgcggcctccgcgtcacctgcatcaagatcggtccgtgtgtttcttcccccattctttcaactctttgctcatctgaatgcgatggctaaaaccctaggaaatcgagtgtggtttgggggagtgcggagatggcgattgtatgtgattgctggttgaattcgaatttatggcatttgttgtgcttattcttgatgaaggggtaaaatattgccgccttgtgatgaatttggtaggggttagggcttttttcatatctttcttgatttgggggtgtgtcaaaagcgtcggcttgttggtttatgtttggagggaggtgaaaggtggccgctttcttgtttatggtaatggagtattgaaaaggttgcctattattgattcagccttcatggggggccatgattgtgggtgcattcttgtcttggttatgttttggtggtgaaaatgctatcatttttctgtagaaaaataatctatcaatgaagccgtgaggagtacttattgtctaattgatgtagaaaaacaatccatcaatgaagccgtgaggagtacttattgtctaattgatgtgaattcttgaaggttctgttgctttataggcttttagatgtataaaggtggtgtcacctacctttttgatttttaaggttgtgatggatcatcaagtatcacaatgtggccttggaaagctctatgccattttggatattgaaattgttttcctgcaccgtggtcaatcttttctaggtgacttttcttgattgac

SEQ ID NO: 13728 - DNA, 867 bp, Oryza sativa
  Intron number 3 from transcript LOC_Os12g34120.1 (locus LO C_Os12g34120) derived from phytozome v7.0 (chr-ID Chr12; p os 20638080 to 20638946 reverse strand)
tctctttgtccaggtatctctttgttttgttataaacgtttatctatgctttttctttttctattaagtgaatatgcccagctccgaaccaatcgtttctttataaagaaagagtactaaatatgatattcaaaaaaagtactttttcgttgaataacgaaaactaaactttctatgagttgttgaaaagcagagacacccatattcgctttttccctgttccttccaacgaagaaatgtataaagtataggttcctctcctgatgatccctggtatctccgttttgacgtagcctatgccaagcgcatggaaggaagctaaactgctccagcagctaaaaggagttaaaacggacagaagagagtacgaaggagaagttcataccctgccgatgcggagcggccgattcccagaagaagaagccaaaagaaccggtgttgagaaagaagtctggtagaccaaacaaagacgctgtattaaccttccctagactagaagctagctctttactgatagggtaccctaggctttgattcgtggtttactttaaaacagggatgacagtcttcaactgctataaaagtagtgctgtgaactagtaagaatagcgcctgccaaaccaatggatcctgtttatccccaactgaagcgggaaaaaggcaccttgttcaggtggatcaccgatgttcatccttggtgcctcttctggttcctctatctgactagggtcgagcatcttcatgttatcttgattgatgcacacctgacctgttagcacttagcttgaagtgtgttgatgactttgtttgaggttctgtatattattacgagattccgcaagcattacttgaaagaggaagtgcgcc

SEQ ID NO: 13729 - DNA, 440 bp, Oryza sativa
  Intron number 2 from transcript LOC_Os12g38870.2 (locus LO C_Os12g38870) derived from phytozome v7.0 (chr-ID Chr12; p os 23863147 to 23863586 reverse strand)
aagaagaattcctcatccaccatcgcttcacaatcgtaagtagtagtaataggagatatctctgtttggttttcagaatttgtttctgggttcatctggataatgttttcaattcttgcatctgggagcaaaagggatgtgcattcttgagatgtgtgttttgttctgtgatttttgattcaatctaccgtgttttcttgcatcttctttcatgcatttggttggtgagattttgattttttttagtccccagcaaatccgcgaacccctcggaacttccaatcttttttcttccctgttctgaatctggttatccacattggtttccagaatttccaagaaatcctcttttgttttccatgtgggaataatttccgtatttgctaattttcaggtctcttccaggttgtggcgacctcttttttggagcatcttggccg

SEQ ID NO: 13730 - DNA, 1057 bp, Oryza sativa
  Intron number 1 from transcript 13114.m00107 (locus 13114. t00019) derived from phytozome v7.0 (chr-ID ChrSy; pos 326 28 to 33684 reverse strand)
gtgaggcgctggcctcggacaatctcgcgcaggtatggaagaaggaactcgtccactcttctcgaggctatggtgtattggtgtacgtcactcgcaaccacgttcccatcaacaaactgagctcatcttaccctctccccttcccacccctctagatctctgcacaaccgtttactactcttctgctgttgtttctatatcgatatagtagcggtagcggcctagatccggttctaggcatgggtttcgagtgctaattctgaatgttttgattctaggcatgggtttcgagtgctaattctgaatgtttttgttgctgatcacgatgaacgttttcgtgtgtgcactgtgttcgtttacgaatctcatgctgcctaatctgttttgagacggcgagattgttgatatatgattccaagtatcgaggcttccgatctcatcctttgttcgtttacgaattttagtgctgcttaatttgttcttgagacggcgagatgttatgtgatatgatccaaagtatcgaggcttccgatctcatccttgtgatgtttggcagaaaacgaaaaccaaagcatatttgaacgtttcttagatgtctttttatttcttattttgtattacatctttattgcatccctgtagagtacattacagtttaatgtatcctcctgacatcttttctgggtgagaaaagatgtattgcattttgaatgcataagtgtcaatactgtacaatttgaatgtattttgagatagcatcttcttgtgttacatttttattgtatctcgctaaagtactgtgctgttgaaatttattccgagagcaattttggtgacaccatgtattacattttacaagaatacatttaagaacacatcttgtaaaatgtgtggtaagatttaagagcacactttgattgcatctgtagataatgccgtgcagctaaatttattccgcgagcatttttctcttgtcaacaaatgagtactgattctaaactctaatgtttcaaaatcttcagataaaaacagcattaggtggggtttgcattgaaac

SEQ ID NO: 13731 - DNA, 335 bp, Oryza sativa
  Intron number 2 from transcript LOC_Os12g36110.1 (locus LO C_Os12g36110) derived from phytozome v7.0 (chr-ID Chr12; p os 22102776 to 22103110 reverse strand)
gttcagaaagtggtaatgattttcatccaacctactagtatttattacctttccttcagggagtggtaaaaaaagccatattttttgaagttttttacccaattgtgaatttacacatgcatctaccaattttgagatatattatcgattttgtgcaacattcagagcaaagatatgttagattgataagttcatcccaataaaagaagagacatgcggacattgttgttgatttcaacttggatattagaatttagaagtgctccctgtccgctgacctgaaatttgtgcttttttcaggtttcagaagaagtagagaaagcaattttcagaca

SEQ ID NO: 13732 - DNA, 721 bp, Oryza sativa
  Intron number 1 from transcript LOC_Os12g43730.1 (locus LO C_Os12g43730) derived from phytozome v7.0 (chr-ID Chr12; p os 27129154 to 27129874)
tccagcgccgacgtggaaggggccgagaaggtggaggaactccatctcgtgatggaagagtagctgcctagctagatgctgcatggctgattggtttcaagtaatttcatgggtcttttgttttttgagacagtccattttgctcagtttgatgtagtgatgttcatgcatggcgtgcaaagtctgaggacttctctcattttgctcagagagaattaatccattttgtgcagagtatgaggacttctcaagcaaatgattttaaccaaacattgcaaatgattttgtgcagagcctgccgccggctcatgtaagggcgggagagagagagaaataagggagagaggaggaagaagaagggtagtgagagagaggatgagatgtgggacctacatgttagtggatcccacaattttttttaatgacaaatgggcccacatattttttttcttttaatgtcacctaagcgccacgtcaatgtcacgtgggataaagaccaggtcaacattgccacgtgcgcggccacgtcagcgaaaccgccctccaaaaccaccaaaggagtcaaattgcaccggttttgtaagtttaggggtcaagatttctggtattgcggttgagggatacgatttagattcggtggtaaattgagggagtcaaagtgatcttattcctttaaactccgaactcctatggctatttcgtgcgctatctgtaggcttag

SEQ ID NO: 13733 - DNA, 1006 bp, Oryza sativa
  Intron number 2 from transcript LOC_Os12g41200.1 (locus LO C_Os12g41200) derived from phytozome v7.0 (chr-ID Chr12; p os 25508348 to 25509353 reverse strand)
gcttcaagaaaatctcacaggtaaactttattttggtcattttaattttattagtttcttcttatttagtctttggatataattagcattatgcatcaatatctagctacaacattagtcttctataccagtttgttcatgcagtagttttgtcctaaagtcacaaaacctaaccatgttgtctattgtttcgggtggcatatcggcatatttgttgaatctacatatcagttatgaaattgtctaaggctgcacatatctggttggatatagatgccgggtaaaaaagttcccttctctaaaaaaagttatgaaattgtctagacagtgtgctggttattttttctaggatgtaagcctgagattgaaaggctttaatgctaaagcaaagatatatctgactatctgtaaaaatctctgcctgtcacagtgttcataagaaagaacccatccctcatgtctcttgtggaagatcagcagattttgaggaaaaacacttgaataagttgaaactggaatatctggaatataagatagtaagatacccaaatggacagttgttgggattgttccaaatctcctcatgtgtgaaatatattatgctctctggagctttaatcgcttgttgggcatgctggttttagaatggacttgatttagtaatgaatcagttaaacagaaactgcactagagatgttatcagataagaactcatgattttaaaaacttgggcagcgccacatattagctactacttgtcacttgtcagatgttgatcattagaaatatttaggaaatcaaactcttgtatgttttgaacttcaagattataacatggcccaagttttatagattattattgtctgtttgatatggtctcagttagtagcagcaaatatttgtttttgtcaaatactcaagttgcacaatgttccacatctcctttgcaaaatttcttgaagtctgatctgaaatggcattttaaccaatgcttaaatacacagat

SEQ ID NO: 13734 - DNA, 976 bp, Oryza sativa
  Intron number 1 from transcript LOC_Os12g13295.1 (locus LO C_Os12g13295) derived from phytozome v7.0 (chr-ID Chr12; p os 7407333 to 7408308)
caagctgcaggcctgtaggtaatacgctaatgctccccatgctcaaacgctgttcgacaaaatccttgcttagacgttacagttgtgatgatgatcagggaaaccacttaggtgttaatccttgctaatatagcctggtgatatgccatgttttgtctaggaagagtttaccaggatgtttactacgcatacatgattcaggtagtagtgctctatggacgaacttgtatatgtagtgcactatggatgtttgccagcttaacatgattgtctgggatgatttgtagaagcgggctatattttactcaacttgtttctgcgtagcatgctgacaaactaagtgtctggtgggttagggcactacacaacattgtgatgagtgagccattgccactatgctggtcatggagcagcaaagcagagactatatgttaaggtgatgtcctctgttcataaatcctcaaatagttaaagatttgagtgcgaaatttgagtcatgtcttttaggatgaatctatttatgtagttgcaatgtgtgcttatggttttgtgattggttagtgcaatatttgactactgatttgctccatccataaagagcttcgaaataagattagttaaatcttatttgagttttaaattttagtttgttaaatttgctctttttcatgccagtgtgagaaggaatatgatttttgcattccttaatatacttatcagtggtatttttgaggttctgttcggatgtattatatctttgtgtccttggataaaatgatctcctactcttacttatactgaagatttttttcttctcacaaattcatccatctccattcattatgtttcttcatcacatttgatagtaacacaaacagcaagacccaattatcttccttaactgatcaactaactttggatcaacacattgtcactttcaggacattggcccttgtagtcctggaaattattctgg

SEQ ID NO: 13735 - DNA, 562 bp, Oryza sativa
  Intron number 1 from transcript LOC_Os12g13445.1 (locus LO C_Os12g13445) derived from phytozome v7.0 (chr-ID Chr12; p os 7534626 to 7535187 reverse strand)
tgaaccttcgttcttgcttggtaattgcctttttttctttgttatatttaccatttcttatcgttttgctttgatttgtttttgttcgtcgggggatatttgtttctcattgattatatgtttccatcgtgcttgtgtcatttgatttatctatttggttcttttggaataaaaaaatgcacattctcctatctctttttttttgttgttctataatttttaccccgttttatatttatattcgttccaatgatatgtttccttgttttgttttttttatagcttcgttctttcataggacatctgctgttggtaatcatcatcctactcttcttctgtgtcaccgcccgtgtttgttcctcctgccatttcgagtgtttagtgctttcctttatgttctgaccacgttttcggctatggttgattgtttctgttatttggtccaattgcacgtgtccacttctttctcttttttttacagattgccattcaaattcgttcatacattgccttaacttttttttcaggtctttcttgctccgttcgcacttcagacgaagct

SEQ ID NO: 13736 - DNA, 695 bp, Oryza sativa; identical to SEQ ID NO: 10131
  Intron number 3 from transcript 13113.m00224 (locus 13113. t00097) derived from phytozome v7.0 (chr-ID ChrUn; pos 820 361 to 821055 reverse strand)

SEQ ID NO: 13737 - DNA, 558 bp, Oryza sativa
  Intron number 2 from transcript LOC_Os12g38570.1 (locus LO C_Os12g38570) derived from phytozome v7.0 (chr-ID Chr12; p os 23656293 to 23656850 reverse strand)
taccaggtgcgggcagaagcaagccatcctcagtgagttcaattaattacctcgctaattgttcatactggaatgcccccgatgaattgatcttgtgttattttgcaaatttgtaattcgccttttgtcaagtccaattgtttgtttgcgatagttcaattcagtaacaatcctgagtaaatccacttttgaaaatactttgaggtagcaatatttaatttaatttcgtccgcagaattaattcttgaaaataaaactgatgttgtggatttaatgcaggagcgtcggtcagtcggtgtgtacttccgtcttccaaaaaaaaaatataccatcgaaaactttttgagtgaatatcactaactgttctaaacaatttacggagtttggttcagatttatggatatattgcccccagtagtttgtttctgaatttttctgtgtctgtttgattaacagggcctgatgaatttttcatgtgtctgtttgattaacagggactgctaattctcacaaatttgcttctgaatcttcctttctttattggatttgcagggctta

SEQ ID NO: 13738 - DNA, 662 bp, Oryza sativa
  Intron number 1 from transcript 13114.m00160 (locus 13114. t00072) derived from phytozome v7.0 (chr-ID ChrSy; pos 313 030 to 313691 reverse strand)
tgactagagctcgagctcgtgaacttaattatcaggtaaagtcattcctagctaatcatacaagttcttctcagaattgggtgctactaaatggttgttgtgatctacttgttgttaggaatatgggagaggaaccaaatcgcaagcagcactagcagcgctgatttgatgaagtcaatgctcttcactccggagggcaaacggggcaaatgagtacttgttggaaagatctcgtcatctactttcagctatatgtggcctcaccatcaactttgacccaggctgctaagaatgacgaaaatagttctttacatcagaaacttgggcttgggccttgtatcattacagcccattaggggtccacaaaacctagggtttgctcccacctcctctcctggtcattcctccacctatataaactcctagcagccaccattttgcactttgggttttgttttgatgtaagtttagctgcagctacttccttgtactcgcgtgtgtcggctagaccacccggatacttgtattcagaaccccattttggtttgtttaagtttcatcatttgacaagtgccgtgagctgtttccttgtcaacttgttcttgcttattcttcgattgcttgcaggttcaaggttgttcttggcacggcaagaacagcaa

SEQ ID NO: 13739 - DNA, 1012 bp, Oryza sativa
  Intron number 2 from transcript LOC_Os12g36910.1 (locus LO C_Os12g36910) derived from phytozome v7.0 (chr-ID Chr12; p os 22595694 to 22596705)
cgctcgaggccgcgctcgagtccgccattagccgggtaaccaatcccctcacctcatctcacctcacctcacgagagagaatgtgtgtgtgtcttactctgtattcaggaattatttttagaaataatattgttttaatgaaaagttgtaaaaatagaagctaattagctaaaatcgcaagtttaacaacacgtcgaactgcggttattcgacaggttttttggttcacttgaaaaagtaaaaggacatgaaagggcatggcaaggggcctatcgaacaatgttcgataggtcctgcatgcacggtgtcgcacagtggttgttctcttttttattattattattttttatcccttgtcgaacaaccgcagttcaacagggtatttttttatcccctgttttgcggttgttcgatatgtacccctgtcgaactttagttgctgggtgctagacttgcaattttagtcattcaacctctatttttgcaattctctattaaaaagtattatttctaaaaaaaatcgtattcagggacaagatacttgttggattttcttttaaaatgcttatgaaaagggaaagatatgaactagagtttggatataaattcaacataggggaaacctcaacaaagattcaagtttgaactaaaatattggaatttggggtaaatttcaacaggtatgaatatttcttcggtacccctctcttataaggattgaatttgccaaatacaaaacagtggatcactgtgtttttccttgtgctactactatttgattattaagatccttcaaatcgaggttgaaatggtcctccaaaatctggaactgctctgggtacaagagaataatatcctgaaatttttaaacaagactaattttgtaactctttttagatattgatttttttttgagttagtataaaaaactctgtaaaggctaaccgttgaaaaagtttaattctttcctttgacagattccagaggaggtgacaaaagcacttacaagctt

SEQ ID NO: 13740 - DNA, 984 bp, Oryza sativa
  Intron number 1 from transcript LOC_Os12g42310.1 (locus LO C_Os12g42310) derived from phytozome v7.0 (chr-ID Chr12; p os 26280469 to 26281452 reverse strand)
cacgccgccatcctcggccgggagcgccggaatccgtaatgcccttttaaacctcagctgctcttgttttcatgtatggtttggggggatggtgttggcgtgctaattgtttagtttgctgtcgacgagagccaaactccatgggagttggaatacttgggtttgtactgaatcttgctcgggactttggagtgatatgctggttcgcgtaccgactgatttagggatataacttactgttcgggatagcagctagagttgattgtagctctggtgtttcagtgtcttagttagaggtagaattcggagcatctgctgatggtggtattgctagtgtaggctggattaggttaaaaactcgtactgggagggattttcatgttctgcctggttaggaaagcgattatgagtggcacgttatgacaatatatgcagtgtaactcatgtgcacatgctgttaattggagggccaaatatggtgctcttttatgatttgaggcacaagatttatttaatgaacaacgatactcgcatacttctgttgcggtgaagtaccagttccttttaatgtttgttggttgtttcctttggattatgattgtctttgtatgttagaagaagcactcaaaggtttcaaattggaaaaacatttatgtgcttagactgtactgatgcccttggataccctagggcctaggttaaggcgtatgggttaattaattaggtgaactatgccgtttcaaaagttaagcctgaaatgctattatacgcattccggttctccaagtcttattgggggattagacgttttggtagaccgggtgccaaatgtattgtttcaaaactgagcttagaaatgttggaggttttgcttgtgatgaaagggaaagtttatcttctttataggcaaatcagcaaaattgacaagatcttacataaaattatcaatctcctttcttgcaggtcttgctggtgctactgcgg

SEQ ID NO: 13741 - DNA, 895 bp, Oryza sativa
  Intron number 2 from transcript LOC_Os12g36810.1 (locus LO C_Os12g36810) derived from phytozome v7.0 (chr-ID Chr12; p os 22539735 to 22540629)
tcctcgagaaggacgccgtcatcatcggcgccaaggttgttcttcttcttcttgttgctcactgcctacacattgtgaatgtttcgttttgattagcatgagcgtttgcatttgcattggtatttgatttgatgggtttgatggacttactaatccatggattggttggccatcatcatattcacctacctgtttgcgacgatgtgcgcggactgacttgattgattgaatgggatattgctgcatgaattgtgggcttatccgtcgatttcgattgcgttactgtagaaaagggtatagcttttggtattcagacggtttttagcggtcagctcgtttgtttggtggaaaatattgcattgaactgatttttaccatatttcgtaaatggtgtaaatttgctagttcgtttaccatgaaaaatgatctcttttggatgaataatattaatttgcttgttgtttgggccttagccagtctagtaaacactggagctgtggagcagtatttactggtaacatgtagccatcccatgtgaaggcagcacagcagctaaggaaagacaatttacgatggcattgttttgaagtcaagccgctatctctaatcatgccgcaattgggatgtagtgctaacaggctggctgatttggattggttgcctgtaatatacaaattttttcgtgtgttctgatggcatctcttaggttactgttccactgcattcttattgaagtgtgaaatgttcgaaaactagtgatgctaccgtgaaatcttatacaagcaaaacaaatcaatgaaaaagagaatacttgtgagaaatggtgccttgctccctatgacaagtattgaaactgactgtatgcctttgcatttttgctacaggaggtatcaga

SEQ ID NO: 13742 - DNA, 813 bp, Oryza sativa
  Intron number 2 from transcript LOC_Os12g36750.3 (locus LO C_Os12g36750) derived from phytozome v7.0 (chr-ID Chr12; p os 22480116 to 22480928 reverse strand)
gcgacggcgacggcgagctccggttcttggtcagtatctgtctcccttctcgcctggtttctttgctctgctgcttgtcctgctgccgtctcgccttcttggtgtgttcgtctcgaattcagttcgattcatcgtcctgtgtcaggatacaagcgttttggttgtgaacttcctcgttttcaattttgagcccgggaagaagcaaacaacctatcaaaggaaattaactgaaccaggattggatgaaatttgatggggccacttctttggggagcttctgttttcttgcaatgggctgctagaaatttcgttcacaatgttttcctgataaattccgtcaagtcatgctcttctttgatgaactttgacatgttcaagatctatagttcgtcaaaagttccaagtctcgaatcggtcggagtgcgcggtcttgtttatttttcctgaccttgaaactgcagcactttgtgactagaatataactaattctggtcatgaaaggtgtgagctttgagtctgcaaagctgaacttgccaccatccagcttcagcctcacctgcaactctttaattctaattaggaagatgtttatgccttcccaaccgaaccgatcacaactgctgtttactgctttgatctctactctgtaccaaacttaccacatgcattcttcttgaaaaacaagcacctatttttttttgttaatgttaggtgtggtagcattaatctgaactcacctttttttacttattgtctacattcttcttgtatgatgcagctgcctgattgcctgaccaacagaattcagagaac

SEQ ID NO: 13743 - DNA, 773 bp, Oryza sativa
  Intron number 1 from transcript LOC_Os12g29430.1 (locus LO C_Os12g29430) derived from phytozome v7.0 (chr-ID Chr12; p os 17472895 to 17473667)
ccgtacgtgtgtgctcgctcggatgattaatgttggtcgttttagggctcgtttggtttaaatgatttctatatgaaaccttaggacatctatcttctatcttctatctattatcttctatcttctatctatctatctatctatctatctattatatactaaaagtccattaatcttcctacaaacgctcttaagccgccacttggcgctctaataaattagagaaatcaaagaaattctgagaaaaaagaaaagcatctatccgttgattttaaaatagtgggtccactattagaaaccgtcagattaactatattgatcttaaaacgtacaattccacaccatccgtaggtacgtacgtacgtacggttccatctccctccctcctttttcttttcatatatatataatcgagataacagttaatatagttaaattttatataatcactagcaaaagtgcccgtgcgttgcaccgggtgattacagagtgtgtatattgaccaaaagtgttgtttggtttagcaaaagtgcccgtgcgttgcaccgggaagtttacagatcagaaaaatatgcaattaattaaaatacaaattcgctgaaatatttggtatttttaagtaggtatgtgtataattaaataaatttacaagtaaaattctccattctccatggttaaataaaatgacatggttaaatttaattttattaaattctccataattagttacgctctttggaattttattggaattttcagagcttaattgctaa

SEQ ID NO: 13744 - DNA, 581 bp, Oryza sativa
  Intron number 1 from transcript LOC_Os12g38910.1 (locus LO C_Os12g38910) derived from phytozome v7.0 (chr-ID Chr12; p os 23892331 to 23892911)
tgccggcgagaacggcggctagggaggcggcggcggtgagtctttgggtttcttgcccgctgtgtgtgtgttgttcttgtgttcatcaagtactcaaagtttcgggggttatttttttctttttactgatgagatggtgttgatatgatagcactgtttgatcacgatttgattgaatcaattagtaattgattattagttatcactatgttttatgtatcctggaatcttggaatggatcgcttcgttttattgattactgagcgagatttattatgttttgaggactggatttatcatgccattcactcattaattatctgattaacttgcatgtcctgctgatgaattatgtggctcctattgtcatcaagtaggcaacccaaacctactgtagtgttgcatatgcagcaatacaatataaatagaagattaaagttctgtatttatcatgctatgtatgttctgcgatctccacattttacattgttgtgtgcttgtgtcggatgtaagtatgctagttcttcatgtgctcacatgtgtgtctgcattgtgaaaaattgcagcatctgtgctcctaa

SEQ ID NO: 13745 - DNA, 927 bp, Oryza sativa
  Intron number 1 from transcript 13114.m00144 (locus 13114. t00056) derived from phytozome v7.0 (chr-ID ChrSy; pos 220 764 to 221690)
ccgtggtggtatgtggcacatggttacacgtgaggaagatgtgtcttgtgggtaaagatatacacctctgatcagagtataatctattcgaatagccgcgccctcggttatgggcaagcctagcaatgtacccaagttagtgttttaattcttaaaacctgcttaacaactaaaatgttgaatggttggcctgggttggcttgggacgagctgggacctgggtctggttgccagttcggtctgaatcatcgtaggccttgggttaaggcaggttcgtgcgggttcacggccttgattaataacattgtgtagctctagaatcgtctttacaaaatagcttcgggcatctaagtgacttttaaatgctgtttactgcaaaccctaacccctttattataactcccttgtactcctttgcatttattctgcattcgtgggtgtgtcttgttgagtacgatggttgtactcaatcttgctcaatttttccccaacccagaagaggagttcctggaggatgaaggctttggtgtctagctcgtgcctgtcgtcaagtgcctatggtcgtcaccctagtcttccgctgttttccgtttatcttcgtgtgtgctgggccttcatcgcccatgtaataaattaactatttatgcttccgcttgttaaactctgaattgtatcaacttttgatgtaccttgcctcctgggacaaggaacaatacacgcacgtatggaatgcccgttgggttaattccggtcgtgacaacctatcaaaccaggggttaggccacaccaacaacctcctagaagatgcaaagccgatatgcttgaacctgtcaaggctgagattaaacggttatatgatgctggttttattcgtccttgccgatatgcctagtgggtttctagtatagttcctgttatcaagaagaa

SEQ ID NO: 13746 - DNA, 536 bp, Oryza sativa
  Intron number 2 from transcript LOC_Os12g44230.1 (locus LO C_Os12g44230) derived from phytozome v7.0 (chr-ID Chr12; p os 27397114 to 27397649)
cctgcgccgccctcctcaagcccatcctctgcgcggtaccctcctcctttccctgctttttactttcctcacctcacgctcacagagggccacgccacacacctgttcgccgctttgcctcactggaatggataacctgctccagatttggcttgccttgtcttttccttttcagttactatactagtactgtattattcattcatgtcaaaaaaaaaacagagatactgataatccaccactagttcaacttcacttacaatttaactgagcttcttttctttcatgttatcaagttgattcactgccatatcaaattgcctcaccactaatatctcatctttctaacatgttactacaaagataccaccttccgtaatgtatcatataagagtgcagcaattctttcaatttatttgaatttatgtatcaaataaattgaagagagtatctgtaattgaagataccaccttcatgtaattacagatactttctttaatttatgtatcaaatttccctctcttccattttcagaa

SEQ ID NO: 13747 - DNA, 1068 bp, Oryza sativa
  Intron number 3 from transcript LOC_Os12g40630.1 (locus LO C_Os12g40630) derived from phytozome v7.0 (chr-ID Chr12; p os 25109870 to 25110937)
actataatcgtgtgctttgtttttcgtgtcaggaggtaaggttggcaaccttctcccgaacgcagccaatattgtcacggattgttttaattctcagtctctgaaaacatgttttcccaataaaaaaactccattcttctatatttcttacatccgtgtgttctaagctattaatttgtttttttaagaaattaaggtattaatttgttaagtttatttatcagaatatatagtttctatctatagttgtgtagataattgactataataatcggatcaataatttgttttatactggccctaagcacaaaatcgtgacaacttcagaagatcaaaacatttctgatttcagcactgattaattttgtatggttgaaatcactcttccagctatctagctaaaagtaagcaacaagaacaaactcatagcatgctgcagatatatataactattcaacactccatccattctaaaatatacaaatttcttaaattcaaatttgtcccacgatgtaattattttttaccctactacctcatctcaatcaatcacaatcatcttccatttaatttgttcacctactttcttttctcaactaatcaaaaatgtccttcacttaattttacctagctactaccttatttcccgcgaaaaaccttaccgaaatgctttgcattttgagacaaactaagggagtaaaacttaagcttagtttcaccacataattatgcaccgttaattatttaaatataaacttgtgctgctaattaaacacagatttctgatcaatttccttttgtctgacaggggacgagaagcgagtccagcaaggagaggaggaagataacacgagcaagaagatcgtcacgctactcccaaacacatagcctgacagaaagggtagtatccatatatactagacatgcatgtttcagtgtttgatatcaagaaaaactctgtatgctttgctctgtgatttgattagccactggattagcaaagatataattacgtttatgctaatttgtgcagaaacgaaggtgcaagataaacgagaacctgaagac

SEQ ID NO: 13748 - DNA, 888 bp, Oryza sativa
  Intron number 1 from transcript LOC_Os12g36180.1 (locus LO C_Os12g36180) derived from phytozome v7.0 (chr-ID Chr12; p os 22145250 to 22146137 reverse strand)
cgtgccaggtgagcacacctttttgcatgggaatttcgggcattatgttgtctacatgtgcaatctaggagtaaatttagtagtagtttggatcaagcggaagctttgtcggtatgagccaactcggcaacgagagaaccatgtgataattcagttgagttggacaaattatggactcccatatctaatttatgttgcatttgcttagattttagcttgttaatgtgcacgtgcgattgtttgaattggtaacttataccagttgaggtaggaaattcattgatggcttatatcttcaaatctatttggtaattgaatttataggctattttccattaggtatgatctgtgttgaccattgaatatcaatggcatcttgtggataaacttatgggcatcttgtgaattttatgggctctacttcgattttactattagaaacgcctaggaacatatgctatgctttttataagcattccctactttcctaaagataccagtgcactttctcaggcaaacttgctttggcctctatattgcgttatgtggataatacagtgtatgctaggtttattatggtttatttaaattgcacatagttcatagagaatgttcagcatgcattaatgaccggatgtggtaggttcataggctgcacaactttgattgcaaattaccttaggttcaaatataacgctttatagtgatggaatatgtagtgagttatgcaagaagaatatctacgaggttctgaaattgctttgtttaaagaatgatttggatctttttaatctaaaatatgtcaatcatatacagatttgttaccataaattccctcatcctttttttttttgaatcatagggagactgttggaactaaagataaga

SEQ ID NO: 13749 - DNA, 563 bp, Oryza sativa
  Intron number 1 from transcript LOC_Os12g42044.5 (locus LO C_Os12g42044) derived from phytozome v7.0 (chr-ID Chr12; p os 26052314 to 26052876 reverse strand)
cgaactccggagttcagatcagatcaggtaaaaacctgcttcagatgtgtcaccacctttacatttcagggcctaatgctaatcaatcaataggatcgatatgcaagagaatgagataatctagatatttgaattagtagattacactggtagcatcatttccttttgccatagacgaaatggtttttaattggtcattcatacatgttatgttacctggacatgtggaatctgttgaaacaggcattcttggatatggtttgatactttgatggtgtagtttgatctgattaacagatagtgaaaaaaaatcaaaatgttctatttttaatagttcatcattatgactgaaaacatcacttcgcatagtacgtcatagttgatgagaattgatgtgcaattatacattctacatactacagctgtgttagccataagaaagaattaatatacataaagagtgaccttgcaacaccagaagaaacttattactctactcgatgaaaggaatatactgttctcatcttgcaatatctgcatccagtaccagcttggctgtctcc

SEQ ID NO: 13750 - DNA, 704 bp, Oryza sativa
  Intron number 2 from transcript LOC_Os12g40520.1 (locus LO C_Os12g40520) derived from phytozome v7.0 (chr-ID Chr12; p os 25037278 to 25037981)
attgtggttcgttctttaattcgctttcctatttcctgtttctgcttaatgcattacctttaagatctttccatactagtggttattgcccagccggcctaaatacctaatgtatcattgtggaagaaccatgaaaaatattgttcttttcagttatctagtatgtacagccataggaatcaaatatcttcccatgcttctgattttttttttgtgtgtgtgtgtgtgtgtgttgggggggggggggttcctccgacccgccaacactccatcacattccataattgtaaatagggttctgcattacgtcgcttctatgtgctacaacaaatgcatatttattagcaaggtgtttctatattaccctgttacaataacctctcgataattttacagcagtttttaaataaaattcaatggctatacaacatctcatgacagctagttcaactagtaagtctaataaaaggcagatgctttggcacttgatggcaccctcccgcctagacctcctagtcaaaatccagctttgggaactacggtgttgagaagtgatataattaatgcattacctgtttgaggattctactggattaatgtttgtgataattgaaccttctaatatttactgatttcctcatatttgtgcttcagtccttgttgttttcattttcttttattagggccaaggccttctgagcttt

SEQ ID NO: 13751 - DNA, 748 bp, Oryza sativa
  Intron number 1 from transcript LOC_Os12g39170.1 (locus LO C_Os12g39170) derived from phytozome v7.0 (chr-ID Chr12; p os 24079895 to 24080642 reverse strand)
ccgcctcgctgcagctcaagcacttcctcgcgaaggtaattaattaatctatacgtatactatacacaacatgtgatatcatatatatcatatatattagtactactacatctgtcacataaaaattgtatttctacatttaaatctttattcaaaaattatatttctactaatgtggaacccagcaaattgattacatcaaaatatatttccttctaatctccattccttccaatcacttctctaacttgttgtctcaaaattccttttaattaaataaggttattgtggtcatttattaattctacgaatttgtcctcaattctctataaatataatgtaatttttattagatcggaggtagtagtagtcttctggtagacgtctctttgatttttttcaattcaaacttatttaattttgttaggaaaaacttatttaaatttaactaaacttataaagagaatagtagtatttttaataaaaacaaatatattataaaaatatttatccagtgttatatttaatgaaactaatttggtgttctatatgttattaatttttttctataatttagtcaaatctaaataagtttgaaaaaaaaagttaaattgacttggactacgatgaaatggtgggaatagtaattaattttgatttagtcaatcgagttgagatgattaacctgcttaattggtgtgattaatatatagtggattagtgatcatccggagtatctcgcaaatcc

SEQ ID NO: 13752 - DNA, 713 bp, Oryza sativa; identical to SEQ ID NO: 11541
  Intron number 3 from transcript LOC_Os02g55770.5 (locus LO C_Os02g55770) derived from phytozome v7.0 (chr-ID Chr2; po s 34147818 to 34148530 reverse strand)

SEQ ID NO: 13753 - DNA, 806 bp, Oryza sativa; identical to SEQ ID NO: 12000
  Intron number 4 from transcript LOC_Os05g26914.2 (locus LO C_Os05g26914) derived from phytozome v7.0 (chr-ID Chr5; po s 15570807 to 15571612 reverse strand)

SEQ ID NO: 13754 - DNA, 484 bp, Oryza sativa; identical to SEQ ID NO: 10693
  Intron number 5 from transcript LOC_Os10g26140.2 (locus LO C_Os10g26140) derived from phytozome v7.0 (chr-ID Chr10; p os 13475423 to 13475906)

SEQ ID NO: 13755 - DNA, 1030 bp, Brachypodium distachyon
  Intron number 1 from transcript Bradi1g24040.1 (locus Brad i1g24040) derived from phytozome v7.0 (chr-ID Bd1; pos 193 00714 to 19301743)
atacaggccgctgctgggtgtgtgggagcggcgtcacgtgcggccaagggcgggcgctaattaaacctaatcatcacctctacgactaaatgatatgcctcagaagacgcagactcattggatggctggctaagatgatgaaagaagatcattgactatacaaccatatgcactgaagtcttaaaagtaatgggctgacctcgtcaacttttcgttgacacgcaaaaaaaaagatcattccaaacacgcacacgaataattagccatatgctactgcctccgatccagtattagctagccatatgcagaaagggagataattgaacctggtaaagaatcctcatcaagatatttgttggtatgttgattcttacacaattatgactgtccatttgttgtctaaagtattggctgtaagtagcctattgagcctgtaagattcagagttgatgcattgagtagtgcacaactgttagtttgaacttctaagaatgttgcaaacttgcaatatacgacatatgtattgaataatttgttctgatctatcatgcggattgcatctggcatgattgcgatggtatttcagtttacacataactatgttgttgtcaaaattcatttctttcgaatatcaaattatgttgtttctttttcaatacacatgaattttcgcatatgttatgttcaaatgaaaacaaaaggaatttagaggccgaaatacatttcgattgaatgcatcattttgattgaatgtcaaattatgttgttattttttcaatacgtgtgaatttctgcatatattatgtttaatatgaaaagaaagaaattcagaggccgtgcaacgcagtaataagttttcacaaatgtcagttgtcttttttttttggaaatgtcagttgtgtttgagtagcacgggagcgttagcacagcaacttgtctccggattgtatcggcggctcaaaagaggacgagacagactcgttgccgccgtttagaaaccccaacggcggcggctcccctcctccatctg

SEQ ID NO: 13756 - DNA, 931 bp, Brachypodium distachyon
  Intron number 2 from transcript Bradi1g12790.4 (locus Brad i1g12790) derived from phytozome v7.0 (chr-ID Bd1; pos 967 7409 to 9678339 reverse strand)
agcaaagttttgttcgcatatcctcttgtctttcgtgaactctgttctctttgttactcagcgaatattttgattcgagacacaagaatacctttttgattagaaacaaacatggttagcttttttatctgtttgcaagttgttgattcctccatctggttaaatagcagtttgttccaacttgtcaacaaggcactgcgccgttgttgcaacggcccaactattttacaatctgggaaataccatttctttttgcgaatagaaataccatgtttaggaatcaccagaacccaattatagttccgaagcctccaggcttgaagcttaactctgaaattgccatggttggcttgaagctggtattgctaaattatcgtggcagaagacagctgattgaattatgtacacctgatgtttgtaaaccaagtcaaataaaagcacataggagattgtcatgtagattgtactgtacatcactgaaatttgctaaccttagaaatatctgcaggattaagggaacgttgaatatcttcgcttatttgcagataacagcaatgaagttccctcaagtctgtttgatcaaatttaagaaatcatttaacaggaatacagtcgaaaaaggtgaaattcttggatagagtgggcaaagagatgatgctagttgtatatggcttcagtttaacagactggaaaatacacactggggcacagtgcgccttccatttacgagtgatttagttcaggacaaaatcagaaaactctcttgccctccccattgatcttgagcacgattgtcgtcttgtccgagttgtccagtcccttttgaatctgtgatgaacccacaagcctcatcacatggcaatcagcccaaggatcaagaaaccaacagcacaaatactattagatccagaaccaagaatctaaaaaaaaa

SEQ ID NO: 13757 - DNA, 946 bp, Brachypodium distachyon
  Intron number 1 from transcript Bradi1g13710.1 (locus Brad i1g13710) derived from phytozome v7.0 (chr-ID Bd1; pos 105 50875 to 10551820)
aacaccgccctcctcggctggcagcgctgggatccgtatgcctttaatcccatttcttgtaatttctgatgctttcctgtgttgataggtgttatgtcgtcgctagaaccacttattagaggattttttttcccttgcggctggatatgattgcaacctggaacgttttttggtttacaaagtttgaggtttcagtttgaaatgaatttgtaggcttcaggggatttagggagaaaccgtggtattttttggttaaattatgctttgagtaggactagggagctgaaagatggtgaatttcagatacgacctctgtttgggaattaaatctgagctattttgttgactttaatttcgtcgtctgatatgctgaatgtagatgatgttggttcgttcctgataccaaattcgttccctgagctggaatgtgcaatggttttttggtgccattaaattgagtagtggcatgtcatagttttttaatgaatcccttattccatggacagtgctgctttcattgctgccatctaaagttgccaaatgtcttaggattatggtcggttggttgccaggaacattttaccgtcttcaattgggtgtgatactgttatttgagtttccatgttgtccctattctatcaatatagccggagaaaccttttctttctagacaagttaggcagggaatgaaacttcttcaagactcgatgttgacatgaaattaccggctttcttctttgtctatcatttttttttcaatttatggaaaaaatccttttgcagtgcaacagagaagtttagttgatccagtgtccaaatcatgctttggaatgagaaagtagatgatcttacctggcatagagtgctaattttgtcctccacccaaacacataggtggatatctcatggatctccttggttgcaggtcttgctggcgctacagctg

SEQ ID NO: 13758 - DNA, 940 bp, Brachypodium distachyon
  Intron number 1 from transcript Bradi1g33390.1 (locus Brad i1g33390) derived from phytozome v7.0 (chr-ID Bd1; pos 289 43965 to 28944904 reverse strand)
gctccgagtggcaccgctataacctcaagcgcaaggtatggttaccttcctacccggcagtcgctcttcaccctccctgcgccggtcttgtgggattagggtgtatgcgttgttagggttcctgtttatgtagcagatgatgccttttctaggcgatatgaagtgttgcgtgcttatggatcggagagtatggttcgaacgcctatgcagaacgcttcggctgcgtattattattgattattttttagtattattatttaggttaggcggtgggcttgactgttggtgttcatgaatgattagaatggcgattttgggtcaatccaaaagggtctaacttttgggcttgtgttttaattataaattttagctattcgatcaacctatatttatgtgcaacagtgcaagcttctttgcttggcttcagttaaaggacttaagttttaaatgaaagggctagccgtgctttgtgtcttgaaaatgtgccaatctgttcctactagaaatattttcaagcctgctttgttcatgagatgattccttgtaggttgtccctgctctagattatgcagactcagctttgttggaggatgggggagaattatgttggtttctagggggaaactattttgattctcttgtagatgaccttatgttaggcaattttttgttaacaaaattgatgcaagtcaataatatggtggattgtggctgtttccggatactcgtgaactgctcattaattcctagagggaagcttgctattctatttctcgatcaacttgacaagtgtgctttaacacattccagagaactaattggcttagggttgtatggttttgctgcttcttgcttccttctatttacttgtgctgtgcaccattttgatatttagtgtttgtcaggtggctggagttcctggtgttactgaggctctgtt

SEQ ID NO: 13759 - DNA, 573 bp, Brachypodium distachyon
  Intron number 3 from transcript Bradi1g05110.2 (locus Brad i1g05110) derived from phytozome v7.0 (chr-ID Bd1; pos 340 3656 to 3404228 reverse strand)
tccgatacgagtcgaggatttgggtttgtacaattgtaagtttcagaacatgcctttatcgacatttccagcactcattcttttcgtgcgattatatggaaggtgatttggttgtgggtgccttagagcaagttaatttttgtcagtctctaatcgttaaaagtaaaagaaaagacatgcattgtttggttagtatagccagttgttattagcaccctcatagcagtttgtctcgctccagtaattcttattagaaatatattactcttcacaaggttcctaaccaaagatcagccatccaatcatacttctgcttccattttaattttaatcggcaattggttggtttgttcgaaagaaaatagtaaatcgttcgttaaacctgtgaacagatcaaattattataatcctggttgatagatagaacttgatccttgtaatgaaccagtgcactgattgttcaaataagagtgtctttctactgataattacatatgcacagaaactgaccttgaccctgttagcatatttgacttaaatgtgttacattgtttatcagtgcaactgttcaag

SEQ ID NO: 13760 - DNA, 499 bp, Brachypodium distachyon
  Intron number 1 from transcript Bradi1g24710.1 (locus Brad i1g24710) derived from phytozome v7.0 (chr-ID Bd1; pos 199 54267 to 19954765)
gttcggccggaaggcggccaagcccagcccagaaggtaacaacacagcactgcctaattctttgatttacttattttttaattccccagatgtttggcccagaacaacccaactttcaccaattattgaacaatttggttgaattctagcaacagaagaatattttaattgaaattctaggaggaaaaaacaaattgttgatggcgatttatttaattccccggctttgggcccaggacaaagttttaccaattcttgaacattttggttgaattctagaaacgaaaacactttttttttcttgatgccgatttatttaataccccagctgtttggcccagaacaacccaacttttaacaatccttgaacattttggtgaattctagcaagaaaagagcattttggttgaattctaggaacgacaaaacatttttgttgatgtcgattgggcgtatcgttgcagggagcagggcgctgcgggtgtcacgaccgcggagg

SEQ ID NO: 13761 - DNA, 796 bp, Brachypodium distachyon
  Intron number 7 from transcript Bradi1g31600.2 (locus Brad i1g31600) derived from phytozome v7.0 (chr-ID Bd1; pos 270 68351 to 27069146)
cttgacttcttgcaggatctcccccttaaagacttgtaatcccttgatatcttcttccttataccatgccttttcagttttctcagtgcattggattgaattcatttggaatttattattatcatatgtgcatttaatatgtatggcttctctgtggagtatcaaggctttcggattgcaatgcgatattaattagtgtatatgctcttgagtttgttataggataatctgtaccattggtttcataaaagttgcagcattttaaatgtgcccatggagatagttatgcacttacataagccatcaggccatcagctgcacaacgtttgattgtgaagaacagaccagtaggttgtgattgtcgacactcgaaagctagtccttttcttagagttttgcacaataaattaggaagttaaaaaataattgactgtctcgtacagtattactgataccttctggtagcatgtagcacttctgtcatctgcctttcatttctttgcggaagcaatggttgcccagtgtgatttcttcatttgagaagccaacacatgttttctttttaatacagttgttcgaacaggcactgcattcagctggtttgctcttgaccttttctttggaaaaaaactacagatctttttcgattgaattactaaaagagaacaatgttattggtaccaaagtaataaagtttaaccccgtacatggttctagtggtaattttttttaaactccagatagttaaatgttagcctttaaattctttcttataaattccttactctgatcagga

SEQ ID NO: 13762 - DNA, 661 bp, Brachypodium distachyon
  Intron number 1 from transcript Bradi1g11150.2 (locus Brad i1g11150) derived from phytozome v7.0 (chr-ID Bd1; pos 824 4152 to 8244812)
aggtatgttatactaaaacaatactttctgttgaaagttcaaacacaagcccgattggactatgtcaagtgtaatcttaaccgcttctttttttggcgggaaaatattaattccttcataacttcatgtgcacatcttgtgtagctgatctcaatcaggttgtttttcgtttattataacttacaacactagcatagatggacaacgtcatgcacctattggtcaacagtattagtacctactccgtattgttcaacgtctttttgtttgccactgttggctgttgccagctcatgcctactcattttatttcacttacatgaactgggagatgaatttgcatcaataagcatgcacgttatgcgcacccataagattgaaccctggaagaaaaggcatattgaggtctgagtccaattcgactagtttctcagtttctagaaatgggaataattaagcctgatttgtccaagtcaattttatttgcctgctgctcaagattgttttttccgtctttccccgcacaagttcttacatgacatatgactcagcacactttttgactgctacacaattacacaatagcctgagataaaacatcgatcctattgaacgcgagtcactaatgcttgttttgcctagtggtatctaggattttgaa

SEQ ID NO: 13763 - DNA, 841 bp, Brachypodium distachyon
  Intron number 2 from transcript Bradi1g38280.1 (locus Brad i1g38280) derived from phytozome v7.0 (chr-ID Bd1; pos 344 67865 to 34468705)
aacatgtgagatcacgccgctgtccacctttcccctgtctctgtctctgcgtgtctatctctcttcttcattttccattaatgcggttgtgggagcacttttttggtcccgggaaatcaacgagatgaacggacgtggacgcaagcttttatgcatgatgccctcattgctgtgaaatcttgtgatagatagatcatgtgcgaattgaactttttttgtgggacattcttcttcatcgaggcgtatggttatctgtcaatttctccatcaagagatccagcgttgctgctttattaataggaccacgacgcaccttcagctgagtctaatacacgacacaccttttggagttttcagtatactgtatacggagtgtctatttttcagtcgcctaaaaaatagttatttctcagtcgacaatcgtagccatcaaaatgagaattttcttattcaccggacctacattaatcctacacgaatctcaatgattgaatcaaaatattgttatcatcgactaagaaatagcaaaaccgatacggtttatcgtgccgtaactgtttttcagatattcctttactgggtacccgcaaaaaaatgttttttcttactggggtttgctggtaaaaaaaaaggtttcttcctgatttcgaagtgtgctaggtagtgcagttaaaaatactagcatggtattacaaattgaaaaatggagttcactggcactcttgttctctgggacacggaagcagttctagtatatatgagcgatttattattgactatgattagcataagttcttctatctctaactggtggaatttgcaaaacagggagtaccttccg

SEQ ID NO: 13764 - DNA, 929 bp, Brachypodium distachyon
  Intron number 1 from transcript Bradi1g10690.1 (locus Brad i1g10690) derived from phytozome v7.0 (chr-ID Bd1; pos 774 0282 to 7741210 reverse strand)
cgtcgagggcggagattgcggcgggcggcgcacatgtgtgctgcttttggcgctaggaggaagacgggcacgagcactcgtgcgggcatgggctggacgctctcgggatagctggcccaagagggagaacgggtgtggcccaagaggaaaaaaaaagaaaaagaaaaaaaaagagaagacccgaaaagtggctttgcttggccgtgtggtagcgcacgggcattctgctagtatctatatctattctataccaatatattaaattggagttggtgatgatggtacgatcaccgccgtaggttaacttcgttaagattacaaccaatatgtcactgtccattatttttttttcctccagtttttttcacgattttttctactccgtcttacaaccgacgccaccacatccgcatgccgacctcgacggtgtcatgagttgcgtacacagaaaataaaaataaataatttgtgattttgttgatccctagcagcccgcggacacacttgttttttttctaaaaaaaaacaaacgttaggccgcgggagagcgggcaggttttaacgacagatgagctccaaggcccagttggccagttgtggcctacaaggggatagccctagcttttgagttcgtgataacttcgtgcgtgaccggactgaggactcagagcggcgccggcgcgcacatgacctgatcgagttgacgagggcttctgcggttgagcggctgcggcggagcacccgtcgttggactgggactcgaccgtgatatgctaggaactgcttgttaatttcagaactccactgcatctacaatagaaagttcaattcttccttttcaaaaaaacaaagttcaattcttgtacaacacaagtgtttctgatctatatatgtatgaagcataccggtattttgcctttgttcaggtc

SEQ ID NO: 13765 - DNA, 748 bp, Brachypodium distachyon
  Intron number 2 from transcript Bradi1g36320.1 (locus Brad i1g36320) derived from phytozome v7.0 (chr-ID Bd1; pos 319 65319 to 31966066 reverse strand)
cctccgcgctggcctccatagacaagcttagcgaggtaaatagatcgagaatcgattgatcccctctcttgtactattagattatatacttggggggtgtggggttgccacttgccaccgtagtatggtagttcagtgtaataatcttttgtgtaggccatgtgcatatatggatgtgggtaagattagttgcaatttttcattaactttgtgatgattaatggtgaaggatgataccttcatctacttggaagcaccataaaagaaccgaaaactctttcttaaaatggtgccacttgcaggctatatggttttaatcagtgaaattgtgtggaaggttgatatttctattcagtgtgaccgcttttttggctggaaggtgtggaagatagaaacttagcttttttttgacttgcttctttttagtgggaccttttcagtgctgtaatcactcattaccgaaacaagaaaaagtagaaaataaggtcaatttacttaggtcttcttactcctctggattctaaacctctgaatcattcaatgcatggaaggattaaaagcaagtggtggatatttttccaagctgaattcaactatgtataacacataattggatatcttaactgttccatgttgcttggataagtttcctttcgcacaacacctaatagtggttgtcacgttcttattgatttattgcagtttgtatcagtaaactaacttctaaaatatgcttcagactcttgaa

SEQ ID NO: 13766 - DNA, 571 bp, Brachypodium distachyon
  Intron number 3 from transcript Bradi1g42270.2 (locus Brad i1g42270) derived from phytozome v7.0 (chr-ID Bd1; pos 392 67230 to 39267800)
agtcgcggacgcttgttccagcggtcacattgctggtaccattctttatcaaacaccactaaaccagcatgcatgctgcagaatacttattcttagtattgtgatttatcaaatactccctctgatcctaaattcttgactcaaatttgtccaaatatgaatgtatctattcttaaaatgcgtctagatacatgtaatatttcgacaacaatttaggtcggagggagtacatcatttgattgagtttgtcatgcttcgcacttaccagttgtgggaaaagcttaaaatcagtataacataatgcaatgatgccaaatactcaagtatgacaatttgttatttgtagtgaatatttcattactgtttaaaaaaacaaaaggtgaactatacctctataattttttctccccgtagcactgtttttaattggctggggaactacaaattatgctttcaataaagaaatacttattattgtgccccactgaaagaagaggagaatgatcccgtatcttatatttctagcttgaccagtattccatttgacatgctctttcctatattttaggat

SEQ ID NO: 13767 - DNA, 840 bp, Brachypodium distachyon
  Intron number 2 from transcript Bradi1g05540.1 (locus Brad i1g05540) derived from phytozome v7.0 (chr-ID Bd1; pos 377 4801 to 3775640 reverse strand)
gctgtggtaagtgaacataagaatttacccttcgcaaaaaaaaaacataagaatttacgggtttacttcttgtcgatctgtacttatttcgataatgcgcaagctctagtgtaaaatcttgtcattttcatattgtaattatgtgttgtttctcacaggaagaattatgcatgctattttgattttccacctcagttaatatagtacaacgcttgttccaattgtctaaaaaaagttctctctcttcgtagctgatattcagaatttgttacttgtggtgattgcattagttgtccctaatgcctgtcccagtttgatccatataattttaatgcctgtcccagaatttggtactccgtatgtcccaatgttcgatgctatcctctgtctttacctctctggcccaataggccttcagataactgatggtatcagttcataattcagtagcatcattacccaacatcgccaacttctcaaatttctgctatctgattcttagctcggtctcctaatttcagtgaaacatgatagttaaactgctgcagaataaacagaatgggtgtcacttatcagctacagaaaaccggcagaatgtcaaactctggtttccttggttatcagatcatcaatcgacgttatttctgaactatcttcattacgcgtgccgtagcattctgcatgtcgacattttacaccggtgtagtaattcacatcattcgaatagacaaaatcatgccgtctgtctgcatttgtttgtgctgacccttgtatcagtgtgcattgatccttactcagttagacacatcaactgacaacacgtgtccatcttctttcagg

SEQ ID NO: 13768 - DNA, 619 bp, Brachypodium distachyon
  Intron number 2 from transcript Bradi1g14500.1 (locus Brad i1g14500) derived from phytozome v7.0 (chr-ID Bd1; pos 114 48690 to 11449308)
aggtaactgatgaccaatatatattcaattaaagtaccactcccttatgacttatgttataacgctagctaaatacccctgccactatggatcgaacttacaaaagcaattgtgtttacccatttaggatgctgtcaaattagtttgtggggagcttcatcccgtatcagtttgttacttatattttgttagagatcttctagcaaggtggggaaaattgtgggaggcatggatgaactgtggggctgtggctcaccaactcctatttataagtagtatacatatatgattttgttggctttctaagcacggtcttcacaatttatggtcatttctcatggtaatttggtgaaagaattcaagccactggcatgaaaccatttggtcatattttaaagtaaatatatcatgtttttctcatctttcttccaaagatgctatgcttttttaccattttctttaatttgctatgtattcagacatcaaagagacaatgacacgctacggttacagcgagtttcttttggatattgttcataagctacccttttgcaaataaagactttcaaaacttgtttctgcagatcgtcccagaagaatttgtgcagcgtttgaaggg

SEQ ID NO: 13769 - DNA, 1026 bp, Brachypodium distachyon
  Intron number 1 from transcript Bradi1g04540.1 (locus Brad i1g04540) derived from phytozome v7.0 (chr-ID Bd1; pos 304 4368 to 3045393)
cggcccccgcgtctccgccccccacttcctctcaggtcagacccacccaggcccccctggaaatttcccttcagtccgttccttccttccatttcctgatcacggaatggatctgttgccgggcgtggcggccctgctcacgtcgttttcgggtgccgcgaatctcgacggtgtcgtagctcggggggggagggggagggggctctgtttaggtcggcgatttgattgatttcgagcccttgggctagcgctcgccgcgctcctgccttcttggtggcgcgtgcgcgtcgtagactcggctaaattgtagcggacggggagcaatattgatgctgcaacctggtccacgcgctagactctagtttgtggtgattgttggactggtgaattcgtgctggttttcattactgtcttaatatttgagcaactcggaggtttggttggatccttagtctttgccattaggattatcaagctaataagttgctgactcgaaggagggggagtcagggactggttgtattggctcatctgccatgctctttggttcagtggggacaatggattggccttttacgtacctcagccatttgccctgttcttttactcaatctattttccagttcttttacctatgaagacctttctgttatcagtcacttctacctcagcacactgatacattgcatctcatatggctggacatgagtcgcaactactttctgatccactcaaaaacaactggcacggcactaggctataaattaaagcccaactgtcttgctttcttgttcagagcatggaatattacgtctcataatcttacagtactctcatacaagatatggaaacttatgctgtttgtttccttgagaaaactttggctgctgtaatgcaactgtatgccaatattatcacagctgatgtaatcatgtaatgaataggaaaaaataaatatctttttctaatcaatggaacgtggaggtatcatgtacctgattgatatcactctttgcttgcaggacg

SEQ ID NO: 13770 - DNA, 970 bp, Brachypodium distachyon
  Intron number 1 from transcript Bradi1g25350.1 (locus Brad i1g25350) derived from phytozome v7.0 (chr-ID Bd1; pos 206 16378 to 20617347 reverse strand)
ttcgacgacgagtgagcgcccgcatcctgttctcagcttcttcttctccccccggattctctgatttgcttccttttattttagtttatttccgtcagagttgtgacgagatgcgcacatctggatttttccggtgggttcctcgtctggggttccggaatccccggagtggtgtggttgctccgctagatcccgttgtgatcagaactaccgatggatgggggcggggcggatttgaatttgaatatatcgggtcgtgtactcgtgcttgtgcgatggcttgcatctgtgattgattatagactcgcgtctccgcctctccggggaggcatcgatctcgtctgtactgttgtggtgcgctgcctaaaatttgatccatagtgacaaaagatcaaagctgagcacatcttcttgtagatggtgcaaacaatggttgattggtcaatttgctatttgcaagttcctttgcatttttcgcattcggacgaagtgagcacaaggcttgcagtcggttatcaattatgcgacatttaagctggtgcttcagaagatgaaagttctatgtgtggttctaacaattatgcgtttccttcaagtactctttatattattttcatgaagatcaacctatactatgttacagttacagaaatataaaatactgtcttcagtaatctgtaatagagccttttacgttatgggcagcttaatcaaaaacaaattcaaaaagaaaggaaaataataaatttgtttatatttgtgatcttgactgcaaccagcaattttgagtaggcttgttccatgtgagcaagataagcctcaagtctagttgctgcatttgtccattggtctgatgtaaatatgtaatccattaaatgttcaaattgcttaactataaacatgccttctggagatattcaatgcagtcactaacatttttgtctgctatgcttggcttatcatttcacag

SEQ ID NO: 13771 - DNA, 699 bp, Brachypodium distachyon
  Intron number 1 from transcript Bradi1g32760.1 (locus Brad i1g32760) derived from phytozome v7.0 (chr-ID Bd1; pos 281 69116 to 28169814)
cctctggtcaacagcacatcttcagcattggctaggtaatccatccatcttgtggcatgttgtttacttttgaagtttgttgagtgcttagatagcattcattgatgattactctgactgtcaactgctttgtcagcagacaccaattgcgaccatccaatttctggatcagaatatcaaacagttactgtatacactgtgtagtgcgtactgctggcgggtaatattgtatcctgcagcatcttagtaacactaggatgaataaatgagggtgttcacctgttaatttttattgctaagagcctaagactttcagtaacttgttggagttgatattatagattactgttgcattccttgaaatacggctgcatctaaatggtaggatattgaaaaagcattattaactcaacatatgaattaagcttcgtacattttaaccatcattgtttgattaggtaatcttaaatggaacttgcttttatggttgattatattcacatactggatacattcttaaccaatttagtagactcatattttcctgttttttccccttcttgaggttattgctataccatcttatgtatgcaaaattccaaacgatgtatgcttgaattttatcttttaatagttgcttctcttcttttttcttccttgacaggtcgtgtgacactttacttacaaatcctgccactt

SEQ ID NO: 13772 - DNA, 890 bp, Brachypodium distachyon
  Intron number 2 from transcript Bradi1g24580.1 (locus Brad i1g24580) derived from phytozome v7.0 (chr-ID Bd1; pos 198 37316 to 19838205)
caagggcgagtaagtgttaccgatccatgtgatgtctgtactagcttgtcgaatgtgatctaggttgcacatactgcatattatgatcatgtgtttcaaggacaattttgaactttgattgatgaatattcaatgttaacctaatcccccatcctgcatacgaattttcttttgctgtagtatctggatgaaaacttgcatgaaattgtgaccatacaatgtgtaagtcttctcatgggctcgtagcacataaaaagaaaatgtaaccatgtgctatatctcccgtagataatatctcagagcaagatatgtaccttaaatgttttgccattttaagttggtccagtaaattatatggagaaaattagaaatcgtgtcaactttgttctgttttgggatgccattggtctctgcctcctattgtgtgagaagttctgggtgtaagttgatattttgcaagttctaccagtgaaccggttcggacattattatcactgggcaggactgggaaggaggcaaagaggggatggaagaagaaatatattcaatgataattttgtgaataagttatggatcaccaatgctaatcacatacatagaaacaaaaggcctatacctctctacaggttgatttaagactatgctatgccacatagtcttaaatcaacctgtagtaaggatacaaacttaaggttaatgtcctcgtatgcagctttcagtacgttcagtctttagccagtacacgcaggacatttcaaccaactgcattctatcatatatagttttgtgtagtatagtgaagtaaatttcagatcgatgtggtattttattgatattgtatttacttcaatgcagtgcttggtttgacgaacttcgcaaacagagaattg

SEQ ID NO: 13773 - DNA, 971 bp, Brachypodium distachyon
  Intron number 3 from transcript Bradi1g05430.1 (locus Brad i1g05430) derived from phytozome v7.0 (chr-ID Bd1; pos 368 5592 to 3686562 reverse strand)
gacaggcgactgatccccacagcatcgctgagagggtaatggaatttattcctgtggttaaattggtgtagcttgcgttagggcttttggagtattatttttggtggtctgcataagccattgctacgcatccatgcagtcttcaaagggatcgggtgttgtgttttggtgtggtgtatagcatggtttagaatctagaactggtattttgccccctcgagccgagtttgatatgtacaagcaatggtctgcctatctcatgcccttgcttggacagtgagagtctgtgagtgggcaatcagcattaacttacactgatgaagtggctcgattttcatatttaatgcattctcttgctggacaactcatcccaggttttaaaaatggtgttacatgatgggcagccatttggcgttttctctaagactctgaattgccaagtcgttgtacactagatgcttggcatctttgacgattcatatgtcattttgcaatcctgcttttttttccaaaagggaggacatgctcctggcctctgcatcatctactgacgcacatagtcaattttatcaaacttaaaagcgtacacagtataagatccctctggattttttcaatccaactgtgcagggaatgttgtgtaattactaactactccctccgatccataataagtgtcgctgatttagtgaaaagttgtactgaatcagcgacacttattatggatcggagggagtagtatggaatatctctgctttaacgtgggctacattctttgagtgaatatattatgtttctagcagttgtataactgttttgcatgtcaggctctattttctcgctttgcatttattttactccttttacaatgagtgcaccagaggccctcaattctgctacttgtttattcagcaatattttgaaccatgtttcttccaatgtagctaagaagagagagaattgcggaaagg

SEQ ID NO: 13774 - DNA, 943 bp, Brachypodium distachyon
  Intron number 1 from transcript Bradi1g02630.4 (locus Brad i1g02630) derived from phytozome v7.0 (chr-ID Bd1; pos 178 1936 to 1782878 reverse strand)
cgcgatactttgccggggagtcgctgcgcaggctcgtgagtgttttttaccttccctcttccctcctcccgacgctcactcgccccaaatatactggggactcgctgcgattggcgccgcatcggcgcatcattggatagaatagggtttttgattccacggtcgatttggcattgcgccggccgaaattccttctcccccgagacgctgaccccaatccccaaatcgcgagagcccccttcacggggcaaatgcccgccacggagcgagcggcgggcgatcatggccgcggactccacggcgctagcgagagcgggggccgatgaaggggatcaattagtagccagcctagccaccccggggcaacgaactgcttgtgtcgtcatgtgtttcttttggtcagttttcagtgtcgtgcacgttatatttgtcttaaaagctatagcagcatgtctgcatgtgctaagtaaaatttgattgttagcgttgtacaagcttcgtacgctatcattagacttcagcggggagtataatttgttccttttccaattatcttcccacttgtgctaggttcaagttcttacagatttgtgttgtttacgtcttgtagatacctgtcattatgcctctgaactgcattctatgctatggcagttgtaccacatggaacttgacaatttgaacctgccttatgctttattatgctgaatattgaattgaatgctgcctaccttattagtctgccctgggtctgctggaaatctggatccaccactggcctttatcctaggcaatatttgcttcccgtttgaattcctggcgctgattctagcaagtggaataagtgacttggacaaggttttgattccattctctgtcgatatgccccacagcttaactatggtgttacccttctaggtgagcacactggtcgtggcggaac

SEQ ID NO: 13775 - DNA, 654 bp, Brachypodium distachyon
  Intron number 2 from transcript Bradi1g37870.1 (locus Brad i1g37870) derived from phytozome v7.0 (chr-ID Bd1; pos 338 79796 to 33880449 reverse strand)
gtgccggactccaacgccttcggccatactttcaggtaagcaatggcgtgttttaggacctataccaatttgttttttacgaacaagacgtatatgtatatcaatgttgtttttgctattattaaaacttttttctccgaaaaaatagggggggggggggggatgaagagcaagctgggtttcattctattttgccgttaaaaaaacgtttctttttgctgggatttgctgctaaaaggtcacatgacgaaacgaaagagacgtgtgacgatgttgtgaatacgcctcgtactagaatggactcaaacaaatagcacttttcctcgtagagaaaaaggagtaatgaacattaaacactacatatccacacacacaaaaaaatcgcctctaaattgctgaactagtcaaacagaatcagtttcttgtaatctttcaaaagcttgtgagttccgattgcccacggcattgtcctcacaccgcgtgctttactcattcccttagcctggttccattctcgtgacccaaattttttcgcttaagtttgaacttaattatcaaataaaataaaagatatataccacggccctgaaatcggacgcgacggttgatttacctacagggactacgacgcggagtcggagcggaagaagacgg

SEQ ID NO: 13776 - DNA, 835 bp, Brachypodium distachyon
  Intron number 2 from transcript Bradi1g01730.2 (locus Brad i1g01730) derived from phytozome v7.0 (chr-ID Bd1; pos 114 5504 to 1146338)
aactcgctgtcgtttccgaggaggaggaggaggaggtgggcgctgctccctcctgccatgtggaatttcttggaatcgtcttcgatcggaagaaatgtttgtggatttgccatttcttttcttcttctccttcccctaatgctagggttaatcaagttggcatgtcctgcttgctgatgcgggagacagattggattgttgatttttgtttttcaccatgaaatgtcgaaatttggtacccgaatggtcgccttgtctgcctctttttgttcagttaattaatacagctctagcagtagccaagatccagtctttgtgcatctgtggatgtggctttgttgcgtgtgcagtgttacatgggtaagcttttgggttgattcgtcgagttgtttatttgatttgatgaaaatatgattggttgaacaaaactgctatattggcatgacaagattgcagtaaagaatgtgcattgaagcaaggtcaaatgacaatgcttattttagtgagagtgataactaatcaaatggattaccaccgtatctttttttttcctgtgttacatgaaagaacacatgctccaggtgccaagatctagtagatcccacgttctgtttgctctagattcttattttagtggtggttaatcaactggagtacctctgcatcttaccaattgttttctggagttcacttaatatgataggtgttttgcctaaaaaatgctaggtgttactttaatctgcttatcacattttgataataaggtagtactgtgcttctttgtttaactgtgccaggagcataaaggagttcctaaatttggaagttgggagga

SEQ ID NO: 13777 - DNA, 675 bp, Brachypodium distachyon
  Intron number 1 from transcript Bradi1g14710.2 (locus Brad i1g14710) derived from phytozome v7.0 (chr-ID Bd1; pos 116 69183 to 11669857 reverse strand)
cttggggagacaattcgacggcgaccaagtaacaggtagaatgctcctgtttcttatcctcttgggttctcgtttcccactatgtcttttctccggaaaatctcaagaatgcaagtctagaaataccctctagtaggtcttctttagaggtaggaattccaaatacgttgtaggagtcctgaattttatctcttggggttcccaatacctcgcgaaatcaaagaacattaaaagcaaaggtttgggacttcgagtatacgtagtgcggattgcagtggccagattttccttttactaacgcaaaagattgggcacctagtgactagtgtggccgcgctctgaggcacggacggtggaggaactgaacagtcagctggcaactactaattggttctcagtcgtagatgcgtctcggcttgatgtctctgcagtctgaatgtttagcttctgttcgtttttccggcctcgggcgcctttgcttcaaacctgtgccactgttggcagaattgctggcttttgatgttttcctttcgtcctagacttatctgtatgacatgcttggtctcatttataaaatggggctggggggagaccctatttttctatataaaaaaaaactgcctatagtttacttctttaattgttttctggcatgttcgagaacaggaattcagt

SEQ ID NO: 13778 - DNA, 745 bp, Brachypodium distachyon
  Intron number 3 from transcript Bradi1g03560.1 (locus Brad i1g03560) derived from phytozome v7.0 (chr-ID Bd1; pos 237 4652 to 2375396)
gtcttgcacgtgcttcgggaataagatattgtgtggtattcacttgatgtcttttttatttaaagttaattccatttcatcaaaatatttgtacacttgtattagcatagcataattaaaataaacatgatgcatgtgttctgaaagtactaccttttgttagtactgaagtcaggtataaaaacaatctggcgagtggagacaatcagatgaatatcaatgcagcataagatgagagctaagatgagtaactggatgtgattcttgaactgtgaagacccacagacattagaatgtcaatttgagaaatgaagtatagtacaatagataattttatatgagaaattggagggaagggaatagacatctgagtttacctgatttgacttttggcacagacttgagtagaagagcagggtagctgttcagttttgtccacagatctggttaccacatgtaggcagatattctacaggcaagcgaaactccttttcgaactggccttaaaaaataagatagcattagcaaagtgatgttactagagttttctttattacataaaaatcatgatttgcaaaccatgattacatcctacatgaaggatcgtcttgcagaagggcacttgcagaaacaagcttttgcaccatttcatattgtaaatgatattaatagaaagtaatttccttcatatttcatcttttatgtttcagttcttttgtgatacagaagtggaccattgtaggga

SEQ ID NO: 13779 - DNA, 1012 bp, Brachypodium distachyon
  Intron number 1 from transcript Bradi1g09850.2 (locus Brad i1g09850) derived from phytozome v7.0 (chr-ID Bd1; pos 709 7014 to 7098025)
aggactgtgacggcccattctcatgtaatttcttcacccctcagtccttgctattgctttcgaattagacaaaataaaatgtccaccagtcaggagtatatgcattgcagtattgtttaccagggaggattgggtttcggtgcattttacgatctaccactcttctttattttgtttggaatcgtttagatttttcatgccttaatggttcaccaactgttgttgaaagttgtcaagttcatcattggttatatatgttaatagatattgtgattactgaagatatatgcagttgtctttaaatgcattgcccttgtcacaaattcatcttcccttcctcttttgctgtgggtcaacgtagcaggaaaaataagataaacacattgctagaagatggatacacagtggataatttctgatgattttagaccatataccggatttgcggaacattccgtatacgaattagtgatctttgttcctgatcaattacctttgagcgatcgatgttgtatcttcaaccctgtcacttatccatgatcccagggtccaggagtggtgcacgcttttccagtgaaatttcattctttactggtgataatgaccataaagtcttcatgaatttgttatgcctatatctgatgtgtagcaattgcatggaaaatgatttttctaacaacgtgggcttatggtttatcgtcaaaattcactgtatatgaaggaagtggtatccttcgcaattttatgctttcatggtaccacttttattaggtgtttccttgatataatttccactaatctattgcgcagtgttgactgctattgtaaaattgtgctaatgaaaaggcatgtatttgcttttcgtattttttgtgaaactattcatatgtttcacatgctattctaatgcaactaatttatcaatcgcacctcatttttttctatcagtttgtacattgaaaggttttgcttaaccttttcaataatctttttcccccctgcagattttgac

SEQ ID NO: 13780 - DNA, 413 bp, Brachypodium distachyon
  Intron number 2 from transcript Bradi1g06790.2 (locus Brad i1g06790) derived from phytozome v7.0 (chr-ID Bd1; pos 463 0995 to 4631407 reverse strand)
tcactgttgatctcaacaagccccttgttttccaggtttcatttgctctgtcaatgcttcttcacagtaattgttgccatgatcgctcttggagattttagcctcgccatgtacatttcccgttccatttttacttccaaaccatcattttcgagtttggaagccaaggcataaacgtctgagtttctgacaaccaactgaattgctgaacttttgaattttgaatattttaagcaatacttggtaggcatgttctgatcttctgaaagagtatgctgtactggtaagattaggggtttgtaagtttaaaataatctaaaattgcttctgtctcacagttgaagtaaactatttttggttgttttctgtattttatggatgtaggttggccatctcgaggaacattaccagga

SEQ ID NO: 13781 - DNA, 541 bp, Brachypodium distachyon
  Intron number 1 from transcript Bradi1g38630.3 (locus Brad i1g38630) derived from phytozome v7.0 (chr-ID Bd1; pos 348 53939 to 34854479)
cgccgtctcggctcctcccactccagttcttggtaaattaacttattctttctctcattttggaagagtaaattctgtgtccgtagtttttttttttggttatttagagagagttcgtttcccctaaaccgcaagaaatgcctttggtatacaagatatagtcgagtacccaagatattattagttgggaatgcttttggtattcttgtacgaaaggtggaatatgaaattggcttcaatttccatctggaacacatgaatttttgtttgagttttgcaagaatttgcaggactggagaagttattctgagtaggtattgtttggatgagcacacatttcaggaacaaataaacagatgtcttgattgtttcaaaacactggtctttaaactgaattacgcaatacatatttgaatatcagaagaacatatgtgtatcacaattttctagatgtttgaactttgaaccaattgtgattaactgcaaactctgactggtctgatcagtatactgtggaagaggggacagaaagacaaggaga

SEQ ID NO: 13782 - DNA, 846 bp, Brachypodium distachyon
  Intron number 1 from transcript Bradi1g16140.1 (locus Brad i1g16140) derived from phytozome v7.0 (chr-ID Bd1; pos 130 85189 to 13086034 reverse strand)
ttgggtgagtgatcctattgttgattgattgtttcagtggtgtggtcttgttctttacttagctagaaagattgcattttgtgtaatgttcttgtcaaccagaactgtcctatgcacaaattagcttgaaggatgtgctaaaaactcgtcctttcgtaggacgagagagttttccgtagcaatttgtgcttccttttgactacctagatatgaaagttagaattttgatatctaaaaatatgctggtcggttcaattctgaatgttgaagtatacgttctaatttccaagcattgtcctggagtttaatacttaactaaagttatgaaaaaataatcgcatcgtccaaaaggagtcttttttgtggtacatatagcatatgaagtcatctcttggatggttttctggactcctcatgttatcttgaaaaaacattttaacataacaaaggtttgctcttgtttatgcagtgtactgtgagcccatcattgattgtgtgtgttctaattagcctttacaattttgcatgaacttgagtttgtttcataacagaatttgttcatgaacatgacctttatatggacttgttgcattgaagacttaccttgaatagaagggctcttagaccttttcttatgcatttcctaagtatacatgctctggtgtagatcttgtcagttcagctttgatttaccatgatttaggtttttgagttccatgtactccaaatttagtacactggtcttagcatccaagtctgctgtttacatttcctttttttttacacgacctttcctttaattttggatcaggaaacagtgcttctctgaggcatcttcacgcaggc

SEQ ID NO: 13783 - DNA, 468 bp, Brachypodium distachyon
  Intron number 2 from transcript Bradi1g30600.2 (locus Brad i1g30600) derived from phytozome v7.0 (chr-ID Bd1; pos 259 15495 to 25915962 reverse strand)
ctgtcgattcgccgtaccgcccggtgagttttttcctgataaattttccttctgacttctagttgcagcaagcttcagctttattttgttctgacttactgggcacaacagtgaactataatgtatgccacattaagatgctatcgtgaagtaaccaatccatgtttgagttttgtaaatgtggataaccagctaggatttgtaaaaatgggaatagcaggaggaaccaagtgctctctgtttctctgtaacaaataacatgatatggttataaacaatgttaattcaccatgtttctattacctactcatctgtatttcattccagtcttgtcagaaaaccataatgcaagtctttcacctcaagtccttgatgcataggttgctgaaacatacttcctcttcctttaactgttaactgatgatacttactgttttcctgcaggaaattggccaggaatctgaagcg

SEQ ID NO: 13784 - DNA, 805 bp, Brachypodium distachyon
  Intron number 1 from transcript Bradi1g16060.1 (locus Brad i1g16060) derived from phytozome v7.0 (chr-ID Bd1; pos 129 90808 to 12991612 reverse strand)
cgccgtcaccgccgcgctgctgccgctccccaagggtaaaaaggcgcctttttcttggttgctcccctatccttgttttttgtactttctactactagttcatatttttggtgatgttgcttttttgtcatgttggtcaatgcgtgctagttttcatttacagcttttttttttctgatgatgattgcatggtagagtagattggagtagtatgcactagtgtctgctgtgtagttagtgatttatggcttgtcatacaaagataaatgcaggtagtgttttggggtcaatgctacggtaccatgttgttagtcaaatgatatcttagaaagtttgtgattttatggattctagtctgctgtgccatatatttattttcattaatcagcatccttgagaaggtgcgatacaagaatgtttgatttgtgacatgtctaaagttctatttgtggtactgtggatgatacctttttcttttgaaagttagccccccttccatccctcgacaatggggcatggttatcttttgaggatttttttgggtaaacaaatgttcgattgccttttcttttcctttttgttgggaaaatgaagtaccgtaatcttggtgcatgtgctactgctatgtaatatttgcgtcattattccgcttgatctaatatattatttttatcattggcttaaccttctggttaagtggttttcttccggtgttttaatcattttgtgtagattctcttaatccttacatgttaatatcaatttactaacaggttccaacacacttcagactgaaaagtttttc

SEQ ID NO: 13785 - DNA, 658 bp, Brachypodium distachyon
  Intron number 3 from transcript Bradi1g28130.1 (locus Brad i1g28130) derived from phytozome v7.0 (chr-ID Bd1; pos 232 87769 to 23288426)
aggacgctggacgctctgtccatagactacaaaaggtaaaagcaatgtctcatgaaagaaactggaaaaaggatagtttgtgtatatctattttgatatctcaatatcgaaatccagaagtttcaatccatttttataatcccaataagatctacttagattttaatatgtttttgtgttctagtttaagaggttttatttcagttctaaatgttttttgttaaattctgtggtgaataattcagtctcaaaattataaccttcaattccagctagattcgcttccattttttctaaaaaagtgaaaaccttaccttcttatgtcaaacttgagctagagttccatatttaaaaataggaaagctctatataaagaaacaaatgtgtctgttcatcgatgtttacatcgaccatccatcatgtctatattacttggtggaaatggcagcacaagtttatgttaggatggcatgtagtaggagtgagatagagagagatttcaaggctttacaagacaaagacaaaaataaataaatcagagtgtcgagtgatgtagccaaaataatggctccgattagtgaactattgcagtaccctaaatatcttataccctaaatatcttctgcattgtttgcttccagaattccttgtgactaca

SEQ ID NO: 13786 - DNA, 839 bp, Brachypodium distachyon
  Intron number 1 from transcript Bradi1g36430.1 (locus Brad i1g36430) derived from phytozome v7.0 (chr-ID Bd1; pos 320 68291 to 32069129 reverse strand)
cctggctcaactcgctcctcgccgcgctcaacacggtgagtacgcctccgtagatccgatgagcctagggggctgctgccgatctacccttgtgctaaagtaattcccattattttctcaccttttgaccgtaatgtcccatttgaccaaacttgaagcaacctctgcttccagaatgtgcaaattagtcactacacaccacctaaaaacccacaaaatccaccctcgggatttagtgtttcgtgcagaattccacgttttttcttcatattcatatatgttttgaatgcaatttgtttgaaattttacatggatatatctgcattttcctctgaacacgaggttcccaatttgggtttatggctgttactcttaattaagaagatgcatatagttggcagttatacatcaacatctctcgctttaattataagacttattatgtcaaggctctggtcttgtgacatacactttcgaagttatcgctcctgatgagggaagcaaaactgactgatagccatagaggcaaaaggagcaataaactactgtgtggctagatagccatcaccatcagtatcggtttttggtaaattgggtcacccgaaaagccaccatccaatctttcccgataagttcaagaatctctttttttttgtgggtatagttcaagaatctcatcatcctgcattcttcacacatccatggatttcctgataagatactgcatctggctagatagctaccttggtcccccattgttattgccagtatcgtcgtgaggggatccatatgctgaatgggacgtgtgaccttcttctcttgtgcaggtgttcgtggcg

SEQ ID NO: 13787 - DNA, 292 bp, Brachypodium distachyon
  Intron number 1 from transcript Bradi1g26310.1 (locus Brad i1g26310) derived from phytozome v7.0 (chr-ID Bd1; pos 213 61175 to 21361466)
gttgggagtacagagaggtcaactttgtgtcaaaggcaattgctgctgctgctgctgcttcttttttcctttcagctatgtttgagtcgttgggttgcttctagatccagttttggcttttcagtttgatttacttacttgaataaattgtgagtttttagattcatgggtggattcgtatttaatccagtataaatgtttcttgattgttttgcttgatttttgacagaggttgtcttcttgggttttgcttgcaggttcaggttttggttggtttcatctggtcggctac

SEQ ID NO: 13788 - DNA, 331 bp, Brachypodium distachyon
  Intron number 1 from transcript Bradi1g15120.1 (locus Brad i1g15120) derived from phytozome v7.0 (chr-ID Bd1; pos 121 06190 to 12106520 reverse strand)
tctataggtatcttcttcctgctctccttgtccaatacttgtttttctccctctatgcctgcaggttttgttcattcccttccttttatttctccccacatgatggtgttagggttctgctctgtttctgattcttggaatatattcagtttcattcggcccaatccattcctggcgcttgctccttcagaaattgaacattatatacgccttccttttgatttatttcgtttcttttttattccttttgatgattccacatgtttcttgctgttttgtacatgaccaaatcgtaccgtaattaatggttccatgtggacagacgagggct

SEQ ID NO: 13789 - DNA, 567 bp, Brachypodium distachyon
  Intron number 1 from transcript Bradi1g04720.1 (locus Brad i1g04720) derived from phytozome v7.0 (chr-ID Bd1; pos 315 6453 to 3157019 reverse strand)
agcgcctcaacaagcccgcggtcaagagcatcgaggtgcgtaggtcccttcgagattgtcttcttgctgtcgctcttcttctcaagatttgaatggcttttctcgatggggattccttcccttcccagtcgaagctagcgtttgtaaggagctgcatttgggagggatttgagcgagatggcagctgcagtttcttggctaatctcttaaagttctaatctaattcaaaaggatggcctttctccggggctttttgtgtggtttgttcttggggggagattcgctctttctctttagtctttataccatttcgtgcaaaagtcctcatctttcttttggccacattaagcataccagtgtaaattttacaggaaagataccccactcccccctcctggtggcactttgtgtttgttcttgcacgaatttctttattgcataacttttgtgctaattcttagtcttcagtggatgccaaactactgtctttttgcaatactgttctctcccaatccttgctcaaacacagctaattttggttttctgaatcgatggagcagagccctg

SEQ ID NO: 13790 - DNA, 636 bp, Brachypodium distachyon
  Intron number 1 from transcript Bradi1g35170.1 (locus Brad i1g35170) derived from phytozome v7.0 (chr-ID Bd1; pos 306 87418 to 30688053)
gaaggcggcccaaggacccggccgccgacgccgaggtgagcagctaattcgctaattaggtcgtctcccctcccctttgaggcgagctccccccaaagcctctcaagtcgccacgggaacgaagggagctatgccgggtgattttgttcctcggtgctactcgtaatcgagcgaatttcccggttgctgcttcccgtgttcgctttgctggttgtgtgagcgtgaggtgttcgcttgtttttggcagtgagttggagaggcagtaatgggggatatcttcgtggttctgaggtcgaatttccaaacgccgtgctccttttgcttcggcgttattcggaatcgagcgattgctttggttttaggggttccggaggttctgtggctgtggaatttctcgggcggccaggccagcctccccgctagggttcggtggattgggggacgctcaatttgtttttaacaacttgctattgggaagtaatccgaattttgaacaaatgttaagtgaattcccctgtttctcaaagcaatttttcttctttcagaccagcttgctatgatttatctgaaatgctttaatggttgttggttgtggcggcaggagaacggtgagaaggagttcggggaggagatacc

SEQ ID NO: 13791 - DNA, 746 bp, Brachypodium distachyon
  Intron number 1 from transcript Bradi1g33450.1 (locus Brad i1g33450) derived from phytozome v7.0 (chr-ID Bd1; pos 289 80126 to 28980871)
tctggtccgcaccaatcctgcaaccccccagccagcgtatattttcttgcgaatttttttggggcatttttttcgggtcaagctttgcgtatggaggtatttgcataggtgtcgattcgccggtcggcgttaggcggccgattacgactccatcggaactgatctggccctgcatgttttattggtggaatggatcatggacttaccctgcaaattattcatgttatatgtgatttattgcaatcatattatgagtatgattttcaccagcatttgtggtgcaatgccatcttcttctttgttacctgtgtgaaaaaactcaaaatattgctcggcaaggacatgaccctgccagttgccttattagtactccctccgttcctaaatacttgtcgctgttttagttcaagttttgtactaaaacagcgacaagtatttcgctgttttagttcaagttttgtactaaaacagcgacaagtatttaggaacagagagagtactatacattctttctagctcggcagctaatatgtatttaggtgagtaggtacctttaatccagggaaattaattacttagtgtttaggaagagacctgcaatactcataatatttattttcttcaccatttgctgggcgacataatgttggttaccagtttaccactactttgaggatgttccgaattttttgtgagcagtgaccatacctttttgattctccagaatttattgccgatccaattaa

SEQ ID NO: 13792 - DNA, 840 bp, Brachypodium distachyon
  Intron number 1 from transcript Bradi1g45270.2 (locus Brad i1g45270) derived from phytozome v7.0 (chr-ID Bd1; pos 434 92638 to 43493477)
gtttctcagcttcggtcgacatccaagtgaggaaaacttccacagcggcctacgtttcagttatattttccatattagatgatttgacctttttcttgagggaaatagcatgcttgcatcaactgaggatagcaaaagttgcatcacttttctcatttatccccatgttggaagtgatatacagtttgtctctttatctcttgctaataagccaattattcgagtgaaagggagcatacatggggtatgtaagagtgcaaagctaatagtcacatcttagttgtaatgtatttgtatatattatcgaaggaacaattgaacataccatcttactcgtatatgatagttttgacttcttcatttagccattcggaagtcattcctaggtattctcttggtgtatgattaatttattactgataaagagaacctgggatcaatcctataactagcatatagaacacatataatatctttgaatgtgcagggtatctaaagtgatgtgtaactcattacctcctcggtatatcagttctctttttgtaaagtgatgtgtgcaatcctgttaactaaactttctcttgacgctttattttatagtgcacacaagtaatttctgtttaggaatagcatcgctctataaaagattataaaacctgcaagccgttgcttccactcactctagaaatcattggtccaccactctgctgcatgaattagtttgtatacattttccctctcagaattagaactcatattcttttctcatgtgtatttctattttattatgttttcttaattgcaggtactacactggatatcccaaggatctggggccat

SEQ ID NO: 13793 - DNA, 474 bp, Brachypodium distachyon
  Intron number 2 from transcript Bradi1g23570.2 (locus Brad i1g23570) derived from phytozome v7.0 (chr-ID Bd1; pos 189 68814 to 18969287 reverse strand)
cttcaaaggtatgtgttgcaatataagtcttccctcagtctcacttaactggcgttgacgttgggagactcttttaaattctgttcattgagggtatcaaggatgcacttactttaatactgttcattcaagaggttaagtgggtctggcatatcatttgatatttgtatgtatggtcatttttcatcaacttctgtgtagacattggtttccttggttggtctgtgtaacaaggggagtatagtagtaatatttgataaaaaaaaatggtgctgtctggttatttctgctgtcctgttacatcacctttagagtttggcttatcttctgctgaacagaaactgatagtcaaagtctgagctattcttgcaattcattaatgtttttctttcatggaatttgataatttaaattctgttatcataattctggatgacttgctaacacctagttcttttctgtcaggtccaatac

SEQ ID NO: 13794 - DNA, 754 bp, Brachypodium distachyon
  Intron number 1 from transcript Bradi1g34470.2 (locus Brad i1g34470) derived from phytozome v7.0 (chr-ID Bd1; pos 300 68680 to 30069433)
ctactgctcaagtgctcatcttctccggtttccaggtgaggctaaggttgctgagatctatcatgcgtttatctgcacaccgtttgtcccattaattcctcggcttcaatctaggagccaatagttctcggtatttttttgctaaatttaactagtgttttattggagagttgtaggaggaatcttctataatttgtatgggaaacaaagctcatttcctgatttgccttttttccatttctggtcgatgtgctgtgtttgtccccattcaggtttttcctttcttgtttatcctttctcatttcctgtgcattgagaggaaaaattcatgagctgtgattgacaatgatgattttacttgaaatcatatcaaatttcttctgaatgttccaaggaactgcctgctattcgtgtcccccttcacctctgatgctctgaaatctgaacctggggaatgtatgggttatgtagatatgtagtatgtgctacatgcaggtaagtattagaaatcatcactaattaagatctgatattcttgggaaaccgtacatttatattacttagccggaggacgtaacattgtgtaaattgcacgtagctcaagcatagaatggattctgtggtcataatcaagcttcttctacatgtacaatctttttaccagaaattatgtatgtacattttctgaacagtatttagattctgaactgtttgtttggataagtattgacaagcatcaattgtttggcagtgt

SEQ ID NO: 13795 - DNA, 496 bp, Brachypodium distachyon
  Intron number 2 from transcript Bradi1g16550.1 (locus Brad i1g16550) derived from phytozome v7.0 (chr-ID Bd1; pos 133 84306 to 13384801 reverse strand)
gctacatctgaagttcacgaggtatggttcttcctctaatttctttcacaaattcctctgctacaattttgaactaaccacggttttagatgattcttaaatcggattgccttgaatttaatcttgaagtgaataactaatctaaaaaaactgttgaaaacagaaaaggaagataagaaatgcactgctgtataggtttggaacatgctcttagcagcatagacttccattttatgttttcggttcctctccaagcagtataacccatcttttctgatttgcttgactttatgttttctgaaggatggtggtttagaaaattaagcttcagtagcagaagctcaaacttcgatgtcactctattttgctttgtgcaccaaagttattggttactgctctacaaccctttctctgattatgtgaattctattaacagaatgtggattgtatcttactgccagaagcattcccttctccggtgtgtatttgcaatata

SEQ ID NO: 13796 - DNA, 703 bp, Brachypodium distachyon
  Intron number 1 from transcript Bradi1g17230.1 (locus Brad i1g17230) derived from phytozome v7.0 (chr-ID Bd1; pos 138 07584 to 13808286)
ttcgtgccccaggtcagtcagtcgtcgatcagccctcgcagattcgatccaattaattaatcctcccctgcgttaaattccctcccgcattctcgattcgattcgatcgcgctgtggttaattggcaactttgtgacacaccgattcagtttaatttcaccctagctagctatatatacgatcaaccctgttcctagaaatataaactgtatactaaatcatgtctaaatacatttaagttttgacaaacttgagacatcttttgttggacggaggaagtagtttttgttaattcaaatttcttaaatttcatccaagtatatagaaaaatgtactgagatctaccataccgaacaagtatacactacaaagatatgtaacgggttggatttttctatgaatttggttaaactttaaaattttgatttaggacaaagctggaggtactatctgtctgttactgtccactgttatctgaagacgtgttagtctgaaactgaagaaacttcatgtacgtctgaacgaaggagactgttgtacttgagatgttgtggtactcccttcagttcagactagttggctgtctctgcatatcatgaactaattcttcttacagttcatgcattgatgtgtatatacatttgatgttattgatttgcattgtgcagagtcctgtgactccgctgcaacgagcgacggacgt

SEQ ID NO: 13797 - DNA, 925 bp, Brachypodium distachyon
  Intron number 1 from transcript Bradi1g06910.2 (locus Brad i1g06910) derived from phytozome v7.0 (chr-ID Bd1; pos 485 0423 to 4851347)
gacaaaccagacctgtctccggcaggcctgctaaggtaaattgcttacaccttgttattagttgtgatggcgatgaaggatatatctcacattgcaatgttgtatatcataatgctggagtgcagagtaagatgtatgtaggcatcattgatacttgttcatttgaaaaaagataacttaggtacttgagatatcaatatttgtgcctacccattttgtgtctttcttcatcaagggaatgaaactgattttcacatatgaaatatttgtgccacattgcaatgacacaaaatgtcagtatatagatgcacaaaatcctcaaaaaagctcttctcaagtaaataattccaagtaggggaatgtgtactctggtcctaatttccgctcaagctcagtttgctccctttgttacctggaagtcaggaagcactgtttgaccatggataaaatgggtgttagttttcttgtaaaacgtgaaagctgcctattctggcaagctgataaaagacactcatgttgcaagctcattgactattctagccctcatttgatgtgggtaacgatgattgcatgtagccatccagcacatgataaacttaaggtgtgtgcatacaccatgtgactccacatttcattttctgtgatgaaacacaacagaagaaaccacaagtcctagtatccaaagtagaggggcatgaagtagcagaatcataagtgcacttttttgtttcaaagcatgtgtgctgtggtacatatgtcaagacataaacatgtgttagaatgttgaagtatcaaggcaatgggcatgtacctactaaagtaattgcacatataatattgtgtcattgtgcttagtttactttgtaagtatttgtgcttgtcctttttagattgtctcgcgccaagctttggcggaaagacgtaa

SEQ ID NO: 13798 - DNA, 1021 bp, Brachypodium distachyon
  Intron number 1 from transcript Bradi1g00460.2 (locus Brad i1g00460) derived from phytozome v7.0 (chr-ID Bd1; pos 394 534 to 395554 reverse strand)
gaactccaccacaaacttcctccaggtaccgtaataccaatccatgccgattttaattaattttcatttcagttttctaacgtttttttttatagctagccttcctcgtctgtctgaaaatataaagtgcgtgcacaataatccaaaatttatactctctccgtttcataattcttgtctcaaatttgataaaaaatggatgtatctatttctaaaaagtgtctaaatacatgtaatatttcgacaagaattatcaaacggagagagtacaatccaagcgctactatgtcatggcatccattttgtaccaaacaatttattctggtcaaagttaaattccatttgaaaaataaacaaactcatgtttttttttcgaatgagatgggtacaaatcgtgtgcttgatgggccgggccagttattactaggagtaaaaggaaaatgatttcttctctcacacaagtcaatgtctcgcttggatttggttgcaacacaagaacgcccgtagatgggtagggtagggcggccgccgtcggcgaggaaaagggagtctggtacggcggcggcggacgagaagaagaagatgcggcggcggaactactacagcaggtccatccatggattccctaccgccgctctgcttctgcatacatctctctagctatctatacacaattcctcaccttctccatccaacggaaatggaacgagtgcatctgcatctgcagctttgatgagatcttcccctctcccctccccacccagcatccccccatcgattcctatcactgccttttgcttgtatgcttctgataattaagagcaccagtacttcttaattaattaatcgacgaacctagcagctgctcattgtcacattttttactgtaagcatacatggattgctttgattctctatgtgtgtcatggttggattgagcatgacgacgatgctgattttgcttaattaccttacgacgatgacagggtcttattggacgatttggtacctcaaacaagag

SEQ ID NO: 13799 - DNA, 799 bp, Brachypodium distachyon
  Intron number 1 from transcript Bradi1g19920.1 (locus Brad i1g19920) derived from phytozome v7.0 (chr-ID Bd1; pos 159 64756 to 15965554 reverse strand)
ggcgctctcttcctcggattcgacagctccacccagtgagtcttcactgctgcttcttctccctctcttgcttcccccccttcttttcgcctgtttagacacttcggcttgttcttttattcacttatttatttggggttttgattgattgatgtgaattgggcgctgttgtggtcgatggatcatggagtattaggatttttaggacctcgtttctaccagggatagataaaccagaagttgttcttaccaactgagtaactcgttgctatgttatgaaattagtacaaaaccgctgatctgatgtgatcatctggtttgcgtggtgtctgggtgtgtcttgcttgtcgtgcggctgtattccgttcgatcgtggtttcaaaggaagagactgatgccgaaattccctgcagggatctacttggtatgcatatcatatattggttcagtcgaagttcatgctattgggtaatgggtgctgagataggttcctagttgaaagggtttctttccacgcaattgttctatggtagaaatggcaatggtagccgtcagacaagaaagaatgcattttgatttttggcatcgcctccgctcgcttgatttcctcttgttttgtaccctgcatattgaagtcatatccatgagcccattacagtatggtccatccaccatttgcttcttatgggcttatagttatactttggattttgctattagacccgtagattaataccacagtggaatcttaaatcgacaatctcttctcacaggtctgtgaaagctactgtgctcaaca

SEQ ID NO: 13800 - DNA, 665 bp, Brachypodium distachyon
  Intron number 1 from transcript Bradi1g16750.1 (locus Brad i1g16750) derived from phytozome v7.0 (chr-ID Bd1; pos 135 09479 to 13510143)
cacaacaaggtacggattcgcgcgcctcctgagtttttttttgttcccccctttctcgatctacatgcctggtggatttgtagaggagattcgtcagccatagcaagtcagatttaagcttgttcagtctaggatcttttagtttgcttagagaattgggatctgcgtactctgaagtggaatcggggtatctggtgaattttcccccaccaggattctgcaattcatgtaacagagaacttgggatttatagtttcacttcagaaacctaggataactgcagatgtgagtgtcatataatcactcaagactgactatggccatgtgctatcccaaatccttctgctacccaaacatgcttttgtattcagtgtctgattaaccatgaggaagggtgcagtatttgattgtcttcagtcagaaaaatgaaatcattgctatttccttcatagggattcagagaattaattatcctacactatccatagctactagatggtgcccattgggcatttttatagatagataattatcattttcttgtgctcgaccatgtggatcgattgtaccgtcatgcagctagtaagaagatgctgaagttacattgctcacaaacatatgttttcccaggttctctccgtggttgggattttgcaagacgaagt

SEQ ID NO: 13801 - DNA, 1004 bp, Brachypodium distachyon
  Intron number 3 from transcript Bradi1g13590.1 (locus Brad i1g13590) derived from phytozome v7.0 (chr-ID Bd1; pos 104 67302 to 10468305 reverse strand)
gaagagtgagtagcagtggaagttcttgtactgcaaagtgtgttcggctgctcctgcaaactacaattgtatttccacctagcaatgccggtcaggtatcatattctgttagttgaagtgaacacatcctcttgagattgacatattggctgaagtgaatgctgacagtgtttcagttttgttgttgtcattgttagttctgcttgtcgataatataacatgttgctgttgccctattggttgagttacgtgtagcaatttgtggagttttgctagctgaaacatttgaatttgaaaggcctgcttggctctgggtcgacatggacatggaagagatcatgtgatcgagcctctgtattccaaagtacagatattttatcttgggacactagtgtagcttaattggatacatgattgtttagatttgaagtcttctgttgtcatggtgcttggtgaatgcacattggtcgagttaaatcatagctttcttgtgagttgtagctcacatgattcaccagtagggatgcaagtggatcccacttatttgacttgctagttcaaaaaatttgcgtaaaatttgacttgaagattggagttaggcctagaagcgggttatatgctggatcccattcgcatccctattcaccgggcaactttgctttatttagcttgtatatcattccacgttctgttcctaattcctactccctctgttcctcaataagatgttctagctttgtcctaagtcaaacttcttaagttttgatcaaatttgtagaaaaatctaccaacatataaaactcgatattagtttattaaatccgtcatgatatatatcttcatagcatacttatttgatattgtagatattagtatattttttccattgatcagttgtccagcatacatttccacttttgaaaataacatgcatctcagttaggtactcaccatagtatgctttaccatctgctgtcttactcgctacaggtgggggaaaactc

SEQ ID NO: 13802 - DNA, 844 bp, Brachypodium distachyon
  Intron number 3 from transcript Bradi1g13830.2 (locus Brad i1g13830) derived from phytozome v7.0 (chr-ID Bd1; pos 106 72450 to 10673293)
ggggttacgagaagaaaaacataccaaaggacgaggtatgacttcatgaaagtttacgtgttccgttttaatcctattagattcttttttccgtattgggttgcacttttgcttcaatggatatctgacctaaaaatgctaagatgcttagctttaaagtcagatttgactagcatatcctgtgttccctggataacctattaactctcaaatctaacttgcaagtagatacattgttaattgtagaacacgtaggataaaatatgagagaaaaataattggataacagatttttcctaactttcatatgattcaagagtcttcttatcacaagttacaactttatttttcacagcatctttaatataatcatacttgtgataattggagatataccctacttctatatgatttaccatacagggtaatagactaatcacaagaaaaatatattcttcacagcatctttaaaaataagtgcattattgcaaccccgagctaagcctatgtgttggtgattggagatataccttgctttattatagtcgttttgctctcggttatattttattgctcattgtatttgcatatcatgaaaacaaattcaaacagcatatcattgcattaaataaatgagaactaaatttaatggaaaaaaaactgcaaagcatgctgtaccctacttattttaagtgtttgattgctccttcatacagctgtcggaaaattaccatatttcatgtctggacagcagtggtaaatatcttgagtagctggagattcatgcttacttgctattgtcaaatatttgtcttttgcaggctttgattgtctcttgttgtgg

SEQ ID NO: 13803 - DNA, 312 bp, Brachypodium distachyon
  Intron number 2 from transcript Bradi1g01660.1 (locus Brad i1g01660) derived from phytozome v7.0 (chr-ID Bd1; pos 110 1974 to 1102285 reverse strand)
cttcgcggcgctcactggcctcgtcttcaaagaaggtaagtacacagcagctctgcttagcagttggagcatcacgtgtcagtgatgttgctagtaataatctttgatcatgtgtttgttttcttgtcctgctacttacattaagctgaatgaaagcagcgctgacatcccagttcagctgattgccattattgttattcctctagtgttacctcaataagtcaacatcaagtgttctgtttgatttggctgatttgataaagctttgcacttgcaggtctgtgctacgggaaactggaagctgggatatta

SEQ ID NO: 13804 - DNA, 632 bp, Brachypodium distachyon
  Intron number 2 from transcript Bradi1g16030.1 (locus Brad i1g16030) derived from phytozome v7.0 (chr-ID Bd1; pos 129 55244 to 12955875 reverse strand)
tctcttgttcctgggtatccttgcctttcttcctggtacgtcattgtatatcgcttcagctttcttaaacagattaatatgcaaccatttcatcttcaggaatgaatattgtcttcctcaaattattccatgaacattctgttcagcctttgttaccttcaaaagtatagtgtagtttctcttcttattaaacatacttcatgtaaaaagaagccaatggccatttgcttgactggagtaaatttatgcaagataagctacattgttgataccattactgttagtagactcttccatttgaaatttgcttttatgggcatctcagttattatacttaacacgttaaacaaaacaggttctttgggcatctcagttattatgctaaaacagaactgatcctatgcatttggcatctcaactattatgctgaaaacactactcccacgttttagcgtctcaattaatatgatgtgcaacagtagaaagttaggtgctcggttatggttgtgtgaaaacatctatagaactgttccgtttttcaattgactacatagttttgacttttttttgggggggaactcatagttttgacttttgacatgcacatatttaaattacttccgcaggattct

SEQ ID NO: 13805 - DNA, 668 bp, Brachypodium distachyon
  Intron number 1 from transcript Bradi1g35480.1 (locus Brad i1g35480) derived from phytozome v7.0 (chr-ID Bd1; pos 309 92900 to 30993567)
ctatacctcctggaacagcccggcgcagctcaccggttggtcggccggcggcggcgacccctgcggcgccgcgtggatgggcgtctcctgctcaggctctgctatcacctcaatgtaaaagatcctcttgtttactgctaaatgtttagtgaggaaatggaaagcaaacaacttggttcttgccgtggacatggaaaacagctgttgaaatcctaaaatctgctgatttttgcatgttcgcagcaaagtttctgttattctcttgctgtctttacaattgtgtgcatgctaactattatgagctaaatttgaacactggaaaagcttataagaacaactactgtacatactaactaaaaaaatcgatgttcataacaagctgtgaggattagtgattgatgtaattctgctctgtccctgatttatgttttttgattaaccttttggtacattttttttatgaaatctttatgcttttatttgtttcctattgaaatgtggtttacagtagaaaaagggtttatactatatggattagcagcgtgccttcataattttattctttccaatttatcattataatttacaaaatttaccttcaataaatacagtcacactggacacttaaatacaatgtttcttccctattttgcagcaacctttctggt

SEQ ID NO: 13806 - DNA, 730 bp, Brachypodium distachyon
  Intron number 2 from transcript Bradi1g12880.1 (locus Brad i1g12880) derived from phytozome v7.0 (chr-ID Bd1; pos 976 7270 to 9767999)
cctcggtgctcattggagttttcttgtgcaaggtaattttatccatctttctgatttccaagttgggattggtgactgcattgacgtactgcttgtaaccggcgatccgtatttcttacttatcgattaatgagaataagagtttcattttagggatttggcaacacaatgttctttttcaattgacttcaccacaaatagcagaaacagagatcaactgtgtatgcaaaataaaaaatcactacctttttagagtgatcgggtacaggtatgtactgttgaatataccggtttcccgttcgttccacctattctgaatatcattgcaatttatcattcaactaaattttaacaagtgactgtttaaataagtttgctaaagcttaaacaccataaatccattttgttaatctcaaggtgaatgaacgtgtgtccatttaagggcacagaacaagacaaagatggtatttggagtttgagtagttatgtcatataaccttcaaccagattttgtttgttctgtctttgtcaatgacaatacaatcttctcagaactttcagatgcaacacaattttcatcagtatttgctggcttctatccatatcaatttggagttttggaccagcatcaaccactttttacatcacataaaccagttcgtgattatgtgtgagcatatttctagtttcttcctgtgataaatggtattttttttatccttgtaggctt

SEQ ID NO: 13807 - DNA, 609 bp, Brachypodium distachyon
  Intron number 3 from transcript Bradi1g18540.3 (locus Brad i1g18540) derived from phytozome v7.0 (chr-ID Bd1; pos 148 74536 to 14875144 reverse strand)
gatttaaggtcagtaggagtactttatgtttgttcttgtctgttcttgccactatggactaagtacagtactgagtactcctctagttactcctttcatgtctctactcctctagttaagtaggtgttctgttctttactgcatctgagttagagaaagcatgccctgtaatagtgcaccaaaaaccttgttgttactctgtttttggttccaaaatgatccccttgttgttactctgtgcatcatcagtttagcaggagtagattagagcagcagcttttgtataccactgcataatcatttaagtgttcttcccttggtcatgttttagtgctcagattctactccatccgtatagattagcatgagtactctgttcttgttttattttgatctgtatagatgatagcctgatcttgctgttgatcttgctattcttaaaagaatgtaacttaaaggtttttttcttcaacaccatcttcaggagttagttgctgttgatgtgaagtgttttaagctgctggtgtacctttccattgtcatgcttatgatattttacattttcttttactaggaggagcagcagcggctcctggcggcagtgacgat

SEQ ID NO: 13808 - DNA, 1017 bp, Brachypodium distachyon
  Intron number 2 from transcript Bradi1g44950.1 (locus Brad i1g44950) derived from phytozome v7.0 (chr-ID Bd1; pos 430 67362 to 43068378)
ccacggagttaccggcagtgagctccccccctccctccctctctgtttttatcttttcatactgttagggatgtactactttggattttgcctgccttttgtgcttatggactcgtggtggttagtgaaaattagatttgattttagtagtagtagcgataagggactttgcaaatatggattcgattttacaaccgacaacaatttgacctagctactgcctaaaatatattgtaattgcttaagatttgggactttagatacaaattgctgatatatttgcttgataacatagatataaatgtctatctgctgtcaattcacaagtgtataacactaccttgggaagccactactttgatggacgatgttcaatctggtgtgttcatgtaggctactatctgtggttatcagctttgagcttgctagattccattaccagaatattgtgtggtttgcctgcatttctttttatttagttcaatctctttttcgaagaaagatcactggttgaatatagttgtgcaatcgtattccagttcatatagaaatactaaacatgtcatacatgttgtcccctttctcattctctcagcctgtattttaaagcattttaaaggactgattatgccagctcccatataacactgaaacagctatgtgaacttcaaaacaacacgaaccatagcttttgaatttggtagacttaaggcttaatgatataaatgttcatttttcttaaatatcatatagaccgttataggactgtatggaaacacacacatgcacacttatgagaataaatgagcagaaataactcagtttttgttctctatggtggttatgtcattttgaaatggtgataatctatattattttagtattttaacaccattcacatatcattagaattcaagcatcgtactgcagatcaattggtaggctacaattctttaactgcagttcctatgtaaaattgcaggaagccacttttgatttaaagcttcctagaagaag

SEQ ID NO: 13809 - DNA, 593 bp, Brachypodium distachyon
  Intron number 2 from transcript Bradi1g16670.2 (locus Brad i1g16670) derived from phytozome v7.0 (chr-ID Bd1; pos 134 73640 to 13474232 reverse strand)
tggagcacgcgtgggggtgctcctgttgatcttaggtgagtgccttgtgtgaatctgcatcagcatcagcagcaaatttcatgagttcttgggcagtactgtataactgtaaattgcttggatgtcatgtgggagatagcgtaagagagaagttctcgacatgatctaattttatcaaccggtaggtacataggtggcacaaaattattgtttctttggtgagagagaaggtgggaaagaaaaggtgccgcgaaattattgtttcttgagagagaaggggaaagaaattgtggcgcaaatctggggatacttgaatgcatttcttctggtattaatcatgtgaatgtctaaaatgaataaatcggcattaacactgttttgataccgtatacagctcgagataaagatacgcatagcatacctgaatagttgttcttacatacttgtatcgattcatgatccaagtgtttttctttcttttgctgtaaggtatcttcagcgtgaacataagaggcagtaaaatatactcacattttctttattttgattcgtgtccagaagcataagaagtttgcattcgagaagactactac

SEQ ID NO: 13810 - DNA, 292 bp, Brachypodium distachyon
  Intron number 1 from transcript Bradi1g36700.1 (locus Brad i1g36700) derived from phytozome v7.0 (chr-ID Bd1; pos 323 43330 to 32343621 reverse strand)
tcaacctcgccaaggtgaagagcatgttttgtttggctgttttgaccgagtgttggggaatgcactgttccttcgtttgttttgttctaaaaccctagaaaagctcatcttcatctctatttgttccttgttattgaagacttgctttgaattagtttttctgtatattctttgtggaattatattagatttattttctttccgttgtggaattttgttttctggtgtctggtgtgtgtgtttttggtaaaatccgaagctaatagttgtagtgatgattttgcagaggtac

SEQ ID NO: 13811 - DNA, 454 bp, Brachypodium distachyon
  Intron number 1 from transcript Bradi1g06810.1 (locus Brad i1g06810) derived from phytozome v7.0 (chr-ID Bd1; pos 464 0522 to 4640975 reverse strand)
caacccaggaggtttgtgctgtgggtagagggcaggtatatttctcataaactcccgctgccttaatagtttagttcatttgcatgattgttgactttcttttactgtaaaattagttgcttgtcagcttaggtcctgataattgaaaaatcagcttaggtcctctgaaattggtagcacgctgtttattggacctgctatactgctttattttcttctgttgttcaaaactacaatttaaagtgaaattagatggtgtcttattcttaccccatatgttccacgtagcctagcagtctggctagtttatgctagaaagtaattttgtgtgtttaccccatatgttccacacactatatatcatatatagacaccaaacaattttgttacatctgcttgcttttgatgcttttttttgtttggcaggctactgctgtgtacaaggttgcatctt

SEQ ID NO: 13812 - DNA, 923 bp, Brachypodium distachyon
  Intron number 5 from transcript Bradi1g29840.1 (locus Brad i1g29840) derived from phytozome v7.0 (chr-ID Bd1; pos 253 40467 to 25341389)
gtgtactgtgaaggagagtttaagtggaactgtgggtaagagacttgctcctgaatggcaccgatttcttttactcaactgtcctaccatgaaaatgtctcattctgctacactgctattgtagtactacttctgctctctttagattccttctaatatattgcatatagatccattttaaactttgagtttcaatgtacacaaaatttcttggatttgtcctgtgcaaatcttattacttgatgtttcgttaaataaaaatactttaatctcattgtattcttaaatcattctaatggtcaaaggtgtttaagggagtctttgtcgatttacgaaacatcaggtaaaaaaagaatgaggtattccctccgtccaacaaaggatgtcttaagtttgtcaaaatttgaatgtatctatacactaaatcatgtctagatacattcaaatttagtcaaagttgagacatcctttgttggacggagtgagtagtactattttgttcaaaagtctttatccagttgtggttatggcattctttttgcatcacctcctgtgtcgtatatttagttgccctgcacccttcattcagttacaacttggaacatcctgttaccatatatttttcatactcctaatatgaggcttgattttttggcatgaactttccttgttaggctcttattagatgaatcttagaagctgcatgcatgagaaatttggaatacatttatgcatatcttctcttttgccttttctatgcacatgcgctcgcattgtctaacaatgttcatgcatccaattatgttttagctaaaagacattgtcttggtactgatcagcgaacctctccatgcattagtttaaatgcattcgcttgctacttatgacttgctgaccgatttaccaggtactcctacaccgcc

SEQ ID NO: 13813 - DNA, 734 bp, Brachypodium distachyon
  Intron number 1 from transcript Bradi1g15410.1 (locus Brad i1g15410) derived from phytozome v7.0 (chr-ID Bd1; pos 123 31849 to 12332582)
cgtcaccgacgacagcctggagaactggagagaaggtgatttatttacccgcacattgaaaatggaaatgttgcgttgcatccaagattgaatgttgagaagagaaattgtgatgcatcatctatatatttccgtcgcctaaatattgagaaatgttgcattgcattctccttgctaaatattgcaatttgagctcctagctaaatattgcatctcttgttttattcctcggtcttgaaatttttgaaatgaactttagttgaactacaaaaacaaatcttgcagtctttagtatttacagtacaaggctgcaagcattcgataaaacaaaattttatgggtgaaagcaagatagagctcacttagtcagcaagaaaatgttcacacactatattggtctacttaatgtcatagcactgcttaagagtatggtcatgcctgccaacagtaccaacaaatcctcggagaacatggacatgaagtacaatactattgttgcgagtttctccaatagttacggaaatctgctgtgatttttggttgcaactttttatttacaacataataatattgccttttgtgtttagcaccaatcaccagtaatccgttaagagtttggcatgatgtatcttggtacccctgagttctgaaaagtttcgcatctgtagagtaaaaattgttgctatttgtctgtttcagtgactggggcattcaatattggtattttccattgg

SEQ ID NO: 13814 - DNA, 857 bp, Brachypodium distachyon
  Intron number 1 from transcript Bradi1g05520.1 (locus Brad i1g05520) derived from phytozome v7.0 (chr-ID Bd1; pos 375 5966 to 3756822)
agtaaggtagggtgcgtgaagtcgtgagcaaggtcttcgtcgacgataatggggaggaccggaggatgaacaccactcgatctagatccaaaagccaggaaaagtaacatttcttttcgtctactgttaaatgacaactagactcctccaacaagacgctaaaccagcctggcattgtacaactcagagtcatctgttttcttctcttaaattaagcaagaactcactcaccaacagattaggggaaacacaatattaacataataaacacacgggaaaagctgtctgcaattgtcacaccggaaagcaacgtacctcacaaataagaccaattgttctcgtcgtcatttccccaggaaaaacatggaaattatgaaaacttttatgtatgtttgaattcttgagatattgtcattaaatggatgaaactactttgcaaattgttttgcacactttcgtgaagcaaatgttccttcttttagatgagcacaagctgtttgggggtacttctatttgtttttctgaattatcaacgagacgatttagaaattaatttttcacgagaagtagtgcatctcggattcaagattgtacagattggacctacatcgacatcctctgctgagaaagcgacgctcatttacaggcatttcaatttataaacttccattggcggccttgagtaacatttttttgttgagataatgttgccaagtttaaattaaatatattttaagtggtaaaaaaaagaatataggaaaaaagaaagaaagcatcagccaagaactgaaggaaggaacagccctctccatgtatatgcagcaaaagagcacgccacttccaaggtccggcccctc

SEQ ID NO: 13815 - DNA, 594 bp, Brachypodium distachyon
  Intron number 1 from transcript Bradi1g00890.1 (locus Brad i1g00890) derived from phytozome v7.0 (chr-ID Bd1; pos 625 862 to 626455)
tcgccgccttctacggcaccggatctaaggaggaggtaagatatcccgccgcccgctcgctgattccgtcctggccgcctccgcacgcgctcgcttgttttgtcggctcggcccccgggcggagagagctgcccggacttagggtttcgctgatgcttccgagcggtgtgctagatgatgctaatgctaacttcgcttgctagtttaggatgctcttggtgcttaaggtttaaataagggtgagtagcagttgtaaggtttatgctgtgggtagcaggatttggcgaaggtgtagtagccatcatctctctgcgatgaagggcgaccctggtgttccccatcacaccatgtgttggattttctgtagggttgttcggtgccgcatgtctcttctattttgagtcttcgagtctgttacagaataatctaaagaatggttgcatggtagtgcaaatgatcttgttatgcaacattggcgctgtgtttcatcctacatggtagttttattgtttttgtggctgtttataactttgttgatcgaacgatgcccacacatgtcttaaaaactgcatcaccttcttttgtttcagagga

SEQ ID NO: 13816 - DNA, 710 bp, Brachypodium distachyon
  Intron number 2 from transcript Bradi1g00890.1 (locus Brad i1g00890) derived from phytozome v7.0 (chr-ID Bd1; pos 626 534 to 627243)
ctcagaacttgaacacaaagttctttgccctccaagtaagtccttaacttatttccaagtttggtgccatggctgccttgattattaagattcaagtaaatataatttacatccaattactccttgtacttcattgcatacaacaaatttctacttggttttgtcgttctctggttatattaggaaatggttctgctctgaaacatcaaactatttggtggtgccaagggtttggcatatttaaagatacaatatgctaatgtgttgtttttacatacacccaaattatttgttaatcaccaccagctgttggcagtctcactcttatgaaagaggacacatgatacactagagtggttacccttcatgagctaaacatagttcatcaacatagctttctttatctgtctgccagcatagtgaacagtttagattcttctactaggattaatttcaattcccattattctgtgttattctatctccattcaaaatctgagcatgacatcgaaaagatacagaaacaacaaagctaacttaaacattcagcaggaacatatgtggttgtagtgtctgttattacaacagtggacattatgtaggtgcataccatgtatgtcacatatgcactattgcgtttggttttttgtcatttgattgtgtcgcaaatatatttcaggtacttgaaagtgttatcaagtacaggtgga

SEQ ID NO: 13817 - DNA, 847 bp, Brachypodium distachyon
  Intron number 1 from transcript Bradi1g27450.1 (locus Brad i1g27450) derived from phytozome v7.0 (chr-ID Bd1; pos 225 62296 to 22563142 reverse strand)
cctgccgcgcccagaggaccgtcacattcgtcgaggtgagtaggtcatgttgcgatagtttcgagtttctaggactgaagtggtgaggcatatggttagtggtttttcatccgtggaaatgttgatgtatacagctagcagttttgctttatgatctaagaactcgtgagttggataaagttacgtataattatatcttaattttggacagtttggtgttgagatggatcgtcgtttgacatttctagaacatcatgcgttaaacttaccatatcacacctgtgtttcctggagagagaaaaaaggattgtcagcttaggagcagatggaatgtagatcacagagattgggttgcaatggcttggcaaatcattggatgatgaatgtctactagaccctattctatattgggggcctcttgtgctgtagaatctgtagaatctagttagttagttaatggtaccacacctgtgattctgccaagtcaatggtttcttcatgtatccaaaaatagcaaaacatctaggaaccaataccactgtatcttgagtttatcttggcaggtgtaacagtttattttaattttttgaggaaaacagtaggcaggtttctattgagagaaatgtgattaataaattaaattaactgtatggaggcaagaccaaaattaaaaggaaactttataaagggagcaacaagtcctaaactgcatattttctttccgctgtattaatttgctagtgttataacaaaatgtagtcaatttcttgcattggaggctgaaaaatgggtgtattatttttccttgaaatgtctaatgcatcctaaaactctaatttctaggtta

SEQ ID NO: 13818 - DNA, 1011 bp, Brachypodium distachyon
  Intron number 2 from transcript Bradi1g29800.3 (locus Brad i1g29800) derived from phytozome v7.0 (chr-ID Bd1; pos 253 03345 to 25304355 reverse strand)
gaacaacaacaacgcgctcaccgtcggggaacgaggtatgtacggacaggggactgactgactaactaactaactggccgtgccgcgaaccgagtggcctggtttcctggtggtcgaccttcccatgccacgcgagatctctagtttagactccctgctttgccttgctccgcgggacgtggcggtctgcgttagcttggtggagctctttttttttttttttgctcatggtcgtagagggtgatggtctctcgatctgtcggaagatgcagattgcccctgtagtcgttactcttgtgattacaagtctctatgtacaccgatgtttctttttcagctagctatttgttgagactaattttgttatgctgtccgtgtatgttttcatgcgtttgattcgatgcaccttgcggtaggaacagaaaagaattaacttgtataaattttgtgtttatgctgcttagctttaaacttgccgtgttcctttattcctgcctaagaaaacttggtgagttccaacctgaaatcttgatatttttcgtcaatcactgtcatgccataaagttgctcaagggggagatgataacgatgaggaacttttgggatcaacatgtcatcgtccagtcacagtgcttattggattatgtgaggtgacaggaagttccacgatagcgtagtggcgtgtgatttgtctagttgatctgtggtagatttactgatgtaggaccgggtttactcccagcatgaacaaaatcctaattcatctataattcagcgtcgcccaaagttttaaagtgattcgaagtcaaaggtttgattattctaaatgaaaaatgctaagtctcctgtcaatgattataagttgatccactgtgttcttctttttgtatctgtagctacacaatggtgcttctgtctttaatttcttgttgcatgttgatttgtggcttgatgtgatgaattgttcatttcgcaggacctatcctccttgaggattatcatctgattgaa

SEQ ID NO: 13819 - DNA, 882 bp, Brachypodium distachyon
  Intron number 1 from transcript Bradi1g04800.1 (locus Brad i1g04800) derived from phytozome v7.0 (chr-ID Bd1; pos 319 0204 to 3191085)
ctcggctccgacgtaatacccttttccctctctcgctctctcatctgttcgcttggctcgtgtcctgcccgcccgcccagggtttagctggggttctgctaagctagcgcagaccactgtcttctggctactgctgattcgttcaattgggaacgaatttttgggcgaattgcttcgcaagcggagtggttcattccttttttttttgttcagttgcttttcataggtgacttaacggtggaataaatgtcatgaaatgcttctactgtatcaaaaaaagtattactccctttgacccatgctacttgtcgaaatattgcacgtatctagatgctttttaaacatagatacatccatgtttgggcaaatttgagacaagtaatatgggtcggagggggtactagttttctttttgatttggaatgctcaatttgtatgttctagtgaggaaggcttcctcatgaacggtgtaaagcaaactcattagattgctgtgtcgattcaccatgccagcctacggttgtagttcctctggcgcagcacacgggcgccaggagcctatcctataatagatttagctgagtatttggttgatcagcttgacatagatgcaagatttagaagaggtattacgtgtcttgtcattgaagttgcattcaacaattagatttagcatgaaggtctccagccttcctgtggtcctaaaattaccgcaaaaggaattttagttgtgtagcttttatgatacgctgattatatccttaacctgattttgataatgtttttttttatgttctgttctttactaatctttgcagaagcacataacgattcttgcactaacttgggactgtcttcgtatattctaggtgaaacttggaa

SEQ ID NO: 13820 - DNA, 522 bp, Brachypodium distachyon
  Intron number 1 from transcript Bradi1g10890.1 (locus Brad i1g10890) derived from phytozome v7.0 (chr-ID Bd1; pos 792 4480 to 7925001 reverse strand)
actgcttacgagagtccggtagattttctgataaggtctgaagatcacatgtttaaaattgtgtggtaccaaccaaataggaaactagaaatctaaatcaccgacgtcccaaatctctcgtcagattatttttttttgtttgttttttgaggggaaatctctcgtcagatgttcttctgcacacacgcagtggcccagcttgagcaaaatccaagcaggccagacagcttagcatgtgctggagagtaaatgggctttacatgggttctctgggaagaaaaatgccaagggagtttacgtgtttggaatggatgatgccatttaatttggattgaactgcgtgcatgtaactgaaaacagtgttctagcgaattgttttttaaaattgtaacatcttattatttaatactgacatttaaacaggttattatttcctgatctggagccatcaaactcgtccgtccacagtaacattttcttattttgtgtcgcaatgaacaggaaatattgtggggaatcaaa

SEQ ID NO: 13821 - DNA, 944 bp, Brachypodium distachyon
  Intron number 3 from transcript Bradi1g11730.1 (locus Brad i1g11730) derived from phytozome v7.0 (chr-ID Bd1; pos 872 4269 to 8725212 reverse strand)
accctttgattgagaagttcaggtacttagcttcctgacagtaaattctcctacatgcattgatacgactctccaagcgatggagtttcttgattttagttctttgcttaagtgctcaatgttatataccatgtgggcgtagtctagagttccaggaatcggttgcaatttcatctttaattttaaagagatgccatttaccctgtgttaactaaggtgacagcgatagttgatatgaactcaatagtgcaaacggtaggtactctggatctatttgcattgttgtttcacagctggtagtctaatctgtttctatggaactttccgaatgagatttgagtgtttgatttatttttatctacttagtactaacgagcttgtcgttccgaggaacgcaacaacgaattagtgaccttgggtggagagctaaatttagcaacatgtagttatttgatcgtcagtgactaaaatctttgtctgtttgttttctttgtatgcttaacaatcttgacctatggtgtctaactaagctgtatctaatatgttactatggaactttccaaacgagattttggtatttgatttatttttatctactcggtactaaccagcttgttgttctgaggaatgcaacaacgagttagtgaccttgggtggagagctatatttagcgctctgtagttagttgatcatcagtgattaaaatcttgtctgttcgttttgtatgtgtgcttaacaatgttgacatatggtgtctagctaagctgtttttatcacatggagcagataccgtatgactacatagactgggctgttcctgagttattgttgtatgatataatgataactccttgttcatagctcagaatttattaattgtaatgctatttctgtcatgtttgatttcagggaaatcaaggttcacagaaagaaagttaaaaaag

SEQ ID NO: 13822 - DNA, 768 bp, Brachypodium distachyon
  Intron number 3 from transcript Bradi1g22210.1 (locus Brad i1g22210) derived from phytozome v7.0 (chr-ID Bd1; pos 178 61869 to 17862636)
gcaaggtgagttttgcagatacgctatgccactcacctatcattttccttgtatactctgtatcactttgctaagatagttccaaacttcaagttacattttctcgcgtgaggagtaggttgtcctgttatccattcattgttcatggtgactgccttttacaagacactgcaattgttaaattgttttgttaacttaatgatgcaatgcaacttaggcaccgttgagtttttgtccttcgatctgcagtgaagttgtctgaacttgcattgatccaccagctaactgttaattgtgcttctctggttggtttaaactaattaacatggtcctctttttttatgcatcaagctgtgtaaaatcattgatctatgttatgttctccccagaaaaatggcaaatatcttcttggtttttccccctttgttcgcatcaaggcttgagagcggttaatccattcatgtaatttgtaagaatcttaagcttctgccacttgcttcctcgacgcaacattctagatgtttcttgtggcatatccacacttgaataacaattcctgtaaatatttgaattgtttttacttaatagggctagggtaaagtgaaatgttgtccaaccatcactagtgatattttgttttgttctgctgtgatgaaagtgaccgtatttctagaatatgcatatacctgttagtaactgagccagttgttctgattattttttgcaaatattgaaatatgtcatctgttttaggaccttcaaggacga

SEQ ID NO: 13823 - DNA, 529 bp, Brachypodium distachyon
  Intron number 1 from transcript Bradi1g30800.2 (locus Brad i1g30800) derived from phytozome v7.0 (chr-ID Bd1; pos 261 50319 to 26150847)
ttcttctccggtgtttccggccgctcctcccgtcggtaggtggctggcgctcagagatcagtgactgcatttctcggtttcctctggatttgccgcgtgtgttcttgccgtgctcacttctctgttcctctgaatttagttgggaactttatctgggatctgcgcaattccgttcgaaagtgtccaacgaatgtagttgttctagctgttgcatttttttccccatttcttctttcattggatttctgaaaaggaaagaaaattttcagtttttttgggatctttacgtttttcttcgaatttttccgaggggggaacaacttttcttgaacgtcactgctgccatcaaacctgtttattccgttactgttaactgtctccaaaattcaaaccggccgtttccaaaggaagattttaatgcaaccctcacaaaaaattccaactgttcatcttgttgagttgtaagctgtgtttgttgaaatgcccaattgcagtgatcacagtggtgaggcaccaccattaccaccgg

SEQ ID NO: 13824 - DNA, 749 bp, Brachypodium distachyon
  Intron number 3 from transcript Bradi1g18920.1 (locus Brad i1g18920) derived from phytozome v7.0 (chr-ID Bd1; pos 151 52587 to 15153335 reverse strand)
cgctcgggtccgcgatcggcttggtttgctccgtggtaagtggtactactacaattggctgtttattattcgtaagttcagaacatagtctggctggaacttgtgttgctagctctaaattgtctttgttccattagttcgctcagttgatggttcagttatgtctatgacgatgatctgttttggctgttgtctttggttggcttgatgggcttgatggtttaaattaatggataacatttcctcttaatcgagcataatgtgaagatgatgataatgcttgtgaattatttgttctgataatctgatatgaagatcacaaccaaatggatgtggatgttggcagttctttgcgcgcttacgtgggtcattgttgtgatttaactaatcgttgtattttatttactggttgccaatgttgtgatgataaacttttggtgtagaaagagtctggtctgataacatttcttatttgggttttgaatatctttagcctaatttgatgtggtgaaagcatagtggaccatggttatatctacagttaagatcctaactatacatcataactttgtttctatacaagcatatatcgagcaattcaaagttccttaatgtctcttccactacgaccaagctgcttcactattctctctaatgttgattatttctgctcattataatttgaaaatgcaatttgctgtgttttaatcatttgcccctttttgcagcttgttggaggagttgatcgg

SEQ ID NO: 13825 - DNA, 857 bp, Brachypodium distachyon
  Intron number 3 from transcript Bradi1g28300.1 (locus Brad i1g28300) derived from phytozome v7.0 (chr-ID Bd1; pos 235 00619 to 23501475)
gctcgtcaaaggtaatcttacaacatctgagattattccttgcactctctttataactttgtttcattgttttaagtctgctggtttagatagtctttggcacaagtgtcccgagtccacatcaggtgctactggcactgctttgaggtttagatagtctttggcacaagtgtcctgagtccacatcaggtgctactggcactgctttgagataatccctccttttcagtttataaggcctatctcaaaaatctcaaattcttagtttacatgcccatttccttgggaacaagcaaatttaattacatctacaccaattactatgtaaatttggttcccaatgtggaacaaaccaatgcttgaaaagggcatgtgtgcatacatgcttcattaatgattagtgtagcacctaactaggcactccttggttagtttgaattaggtggcccttacaatctgaaagggagggagtatgattgagccaaaaatgaggtatgagttacgcagaataaattcagaaactaaactacatatccaaccttagtgataacacactacacagcctataattaatgtaacattagatcgataagggtgagttagcagctcacatagggtgttacaacaatatcttattttgagaagttaggctgtacatgatttagtagaagacgaggcgtggaattctggttctttaccaacatatgcagtactgtctgcttgttgttttggactacgtttttgggttaaaacaatcgcttcactgtcatatttgtttgtctaccgaacttatgaatactttggaccttcttccatggacaggctaccgcagaggagagatttaaacgttgcagtgc

SEQ ID NO: 13826 - DNA, 976 bp, Brachypodium distachyon
  Intron number 3 from transcript Bradi1g25830.1 (locus Brad i1g25830) derived from phytozome v7.0 (chr-ID Bd1; pos 209 29272 to 20930247)
aggctttggcaagaacattacaggtcagttgaccctatttgttgtgcatccattgtttaattatcatgatctctatgagaattttgtctaggcaatctttgtgaaaattatatttgtgtgactccatagttattagctgcctctgcagaacaccatgctgttcaatctggataatgcttgagtacgaaaacactaaaaccaatccaagtgacttgcattgcaaattaaaaaagaacaatcttttcaatgcttaggtaatcttaacgccttaatactagtatgatacaatcaagtaaattaggccaggactgttggtttacatgcagatgtaggtcaccaaccatacaaaggaagtgtttcttaatcttttgcattttcttaacgagcctctatttctttatattttctcttgttgttatttcaacgatcactcagttgtagaaaatatcaaaataatattcaaaattgttgtaattttcatattggtaatattaaaacttagtgatggtatatcaaagatgtagtaatactagccgacaacaacactatggtgatattgctatcgttcttttaatttataagttttatgagaaatctatctatccttgactccttgtacataaaagacttcatatattacttttcatgttcttcaaatgccaatgattgtggtctattccaccacggcagaaaagttttctcttgtgtgcactttatgacaatatttcagcacttaccctataaatgatgaggaagcagaaaaacaaaacgatcaaaaagtttcttgaactaagtgtttgtactttatacccataatcacccccttgtatatgtgaatggtgatccttctgctgttgtacagtaaataattctttgtgtgaaaaattgtgtttagagtttgaattgcatgaaaggattagtgttgaatgttgatcctttgctgaacattaatcaggaaagctttgcagaagaaact

SEQ ID NO: 13827 - DNA, 672 bp, Brachypodium distachyon
  Intron number 2 from transcript Bradi1g45060.2 (locus Brad i1g45060) derived from phytozome v7.0 (chr-ID Bd1; pos 432 50741 to 43251412)
ctgaccgatcaagcccgcagagtacatcatccgtccgtatcctgagcttgttcaacaattcagtttgtaaagtatattgtcatctaaccgagtaagtagtatataatgtttcatttttcttttccaatactaccttcggataataatattgttactaccgttcatcaatttgttggtgtcttaaattagtagtgcttgacttttttagcctggattacatcaaatattcttcaatgttcaatgtaaggttcctaatattagactactaatattgggagtaacacaggtggtaacaaagagtgccaactaagcaatttggtgatgtggcatttattaaatgatgagagagttttggagtaactagatatgttaccatcacatcacaccttttaatgtggaatgagtctataagataataaatagggttttctatgttaccacaaatatgttactacccactattaaggtagtaacatagactattaagatatagatgttactagtttatgttactccccactatgactacccttattactacactgagtttggggtccaatgtttatgtcattcagtggacaacactagcaattgttgacccatcatccgtggataaggttcttaaaatttgtctgttcggtttccagggggattttgtggatcagctcattc

SEQ ID NO: 13828 - DNA, 923 bp, Brachypodium distachyon
  Intron number 2 from transcript Bradi1g11800.3 (locus Brad i1g11800) derived from phytozome v7.0 (chr-ID Bd1; pos 878 4226 to 8785148 reverse strand)
cagcgaggattcccagagatcaggcgaaccaaaaggtttgttctgttttactatactacttgcacgaatcaatgaactattattgcgggaaattggtgaagtctagttctctccttttttaactcaaatatctgaattttattgaagtaagggaaacgattacatccagactgctgaagtactctagtctgttcacgcttgttttggctatgaatttgtttgagatggaaagagctcgtcgttcagatgtttccatatatgatatggtacaactgtttcctttattgcatatgaattttgtttgagtagaacgttggaaatttggaattgaaagaagactgcgtaaggtctagttttctgtttctgtttctgtctttcaggttcagacttcagaactgttagtccattagtacgggtagaactctgaaatcttggcaagcacatttagtactaaaacctgcgcagctgattgctcatgcgggagcacagcatatgccgctgagcaatcctgattgagataagaattttcatgatattgtgttcatttctagcttacttccctgcgttttgataaaagaaaaataacttagtgagagtctgatttagctagggaggcttcagcaagatgatgacattactcatatgatatcttgattcgtgcatggtgagcattgaaattttcactatgaagtttttgcgtgcaaattttgtatgtgcagaacataactatagaaaagtagactaaggagtaaacagcttcagtaatttatgcacctgataattgcacctaagcaactcatgccagtggaaatgagcatgctagttgttaccggtatttgctccgttgatgttcttttcttttgtgtgtgaataccttgatgttgttttaatgccagacagaagctttggtgaagaaaagcacc

SEQ ID NO: 13829 - DNA, 958 bp, Brachypodium distachyon
  Intron number 1 from transcript Bradi1g11800.3 (locus Brad i1g11800) derived from phytozome v7.0 (chr-ID Bd1; pos 878 5385 to 8786342 reverse strand)
attggccgccgcctctccctcgcgcgcgcccagtggtcagtacttgcggctgcccttcttcctctcggcttcgcttccatctctcgctttttattcccctcggccgcggctttgattggtgtttgtttgcctgcccttttctttttctgcgcgcctcggttttgatgcgggagactgggctgtttctacttttggatggctgctgcggggtttttgcggataaggaaggggttatccgaattccgcggagttgggagagtgggttggagcttggatctcgcaggtgcttggtggtgttgttagtgctttgttatctactgtgcgatttgaattgtattccttgacgagaagaattgcagctgctgttaagactcaagagtagcggtgccagattagggtgtgatttctgtaggaatttacgggccagggtcttcttttgctccaacggcgaccggcggcggagaatttcgtgcctttttttttcagaactcagttgtccaactgtatctagaattcaaagagtatagtgtctttttttttgctgttcttgtctgtgtttgatttaagcttctggatgccaaattgccaagcgattgtaatttggtactgtaccgcgaatctcgtcggatgactttccagaaaagaaaagtcgttggttcttggcccagagctttcctgttcagcagtaattgcttgtttccgggacaactccgcccatcttttaatgatccgtatgcccatctgttcttctgaggatccggcgcgtggccaagtttcagttttttgaatattttcttgcttcgatcaagccgagaacactcaattgttttttttttcaccgtcagactgttcatctatgtttgtagcgtatcttcattgacctgtgcgtcagtgtatgttttccttgcctctacgtcaaacagtgcaagcttcaatttaccgcggagcgaggcagtag

SEQ ID NO: 13830 - DNA, 720 bp, Brachypodium distachyon
  Intron number 1 from transcript Bradi1g43820.1 (locus Brad i1g43820) derived from phytozome v7.0 (chr-ID Bd1; pos 416 24856 to 41625575 reverse strand)
gcggcggagaaatcgacggccgtggttccagagaggtgcgtgcaggaattcgattccttgtttgtgacgcaccggcaattcagctcctttcggccaattgggattcctcaaaattttggtttcttgttgttctcacttctgcgcgttcgcttggcgcattggtcatcggagtttgtcggtttctgaattgcgttttcgctggccttgagttggattaattttgtccctaatttatcgaaatgccagttttattttaacattttgtttgatttttggggagtagccgatcttttcatatactgcatgtttgcaaattggattgctggaatatctcattttctgaagaaaaaaaaaagaactctgaagaatttcacatgaatgaactgaatccctacaggaatttggacaagttggaatgattgcctgataggatactatttggaatgttgcatttttttttgtcctacagaactaacgtgtacttagatataggcatgtcgttagttgtataaataaaaaaaggaagactcacgctgtccaccttctaaagtcaacatttggtgttcagattactcctcctgtttgcctgctagttcttctatgattctatcagaatgcagtgaattctatttctaagcactaacatggcattgttcttcttctggttgttctgccctttaaataggcagtattacacttctataaacattgggaatcctc

SEQ ID NO: 13831 - DNA, 590 bp, Brachypodium distachyon
  Intron number 1 from transcript Bradi1g13210.1 (locus Brad i1g13210) derived from phytozome v7.0 (chr-ID Bd1; pos 100 18162 to 10018751)
ggattactggagcaccacctaaggtgaccgcaccatcgatcgctaattcaccatggcctcaacctcacagcccaccccaacgtatggctctctatcttgatctctctctggatctctctctctttctctctctctctccctctctctctggatcgatctctctctctcagtttggtggttgtgttctagctgtccatcttcttttgaactttccaagaacaaatttatttgtttttaggttgttttaattatggttagcataggacaccacagtttgttgccttgattttcttttcctcgagtattttcatacacagtatgtatatcagctgcatgtccgaattaagtccgaacatatccaagccggccgagcaaaacaaatgcgtccctttcatagacgtcaacccttcctttgatttgctacaagccgttgtgtggtagctctgatttgccgaacatctttgttgagttttagattcacagatctcctaatgaaaacgtctatagattgaactgcctataaattgccccgttctttgcatcattccagctagctgatctttttatataatgtagagtgtacgacgctg

SEQ ID NO: 13832 - DNA, 936 bp, Brachypodium distachyon
  Intron number 1 from transcript Bradi1g24730.2 (locus Brad i1g24730) derived from phytozome v7.0 (chr-ID Bd1; pos 199 74700 to 19975635 reverse strand)
agagatcgcttcgtctcgcttggtaattcactagtccttggatcctctgtttttttgttctcgatttacagcgtgcaattccatgatctcctgcctgctcgtttgggtcgtgtttggggtttggctcttggtgcgatttggatacttgaagatttccatttctgtcgtggtttgagagatcgggttagtgcttagtgcccgatcgaggagcgttgtggacttggtaggaatccgttgacttggttaacccagataattaggagatttcattggggatagggaggaaacagccccaaacaagcggtttgattcatttcgttaagttaaaagctgacgaaacgagttctagataggagccatagatatgcacagtacgcaggctcaaaatctttcttgctattcctgtcgtggttgcgtggacgcgtgtcccgggcagctctgtttcatgctttgttcccaaaccgtcaaatgtccatccagtcttgtagttgcatcgtgcttgaattttatgcttctgctgagtacggctcctatgtgatgcttctaaatttagtgctaacatatgtaggtgcacgaaccaatgctatggaatatggatagtttgtttatagacccatccttttctgctttatttctcagtgctaatgttgccacctatggcaccttggagtgttccgttacacttcaagaaaagaaatgtcagttggactctatgttttcgtgtacttctgtaattctgcacgatagctccaagcatccaaggattttacttctattaaactaagcattaagtaactcctgatcttggtttgtgcttgtctgcatttctgagcacaagcatgtaggagattgaaaaaaaaatgcttatctgtttcttgcacaatatggcattggataataggtcggccgaagagattgttcatcatagtgaaccct

SEQ ID NO: 13833 - DNA, 777 bp, Brachypodium distachyon
  Intron number 1 from transcript Bradi1g05100.1 (locus Brad i1g05100) derived from phytozome v7.0 (chr-ID Bd1; pos 339 1989 to 3392765 reverse strand)
cggcacggccggatcccaggctctccaagctcgaggtttgtgggctaatcccttgctatttgcgtttgattgtgaattgcttgaccccgcgtatttaggactggtctcgatttcgtcttgacaacggcattgacttcggaatgctcgttctgtgttcaaacatatccgtaggtctgactggtcgcactgcttgttctcgaacaggcaaatccgaaaatgcagttagcaaaacatttttaacagtttctttattactggtgttgaaatgctaatcgtaattcagagaaataggatcttttgcatagcaactatttatatggcttcacaatgctggcattgttctggccagttgttccaagtacaaagttttgcttagctctgaattttcctatgaagtgtactggctttctggatttgtttgtgaaagggaagtgctggctttctgtttgtctcatgtgtaatgttcttgaatttccaagctgttgctgccatcgcaagcaatccgcgttgtgcaaaatggaaagcaatcttcatcctagaaactctgcttttcagttctgtatcatcgggctagaatatataatgagacacacataacttactgtaaagaattgctacctttttatcttaaagaacttgcaagttgcatctacacattacagatgtctgtgttattttatcattattctgaatttctatggtgggtgagaaaaatattaacactgaacttcctcgttgtcagtcctccaattctttctccgccccattgcacaaggt

SEQ ID NO: 13834 - DNA, 1001 bp, Brachypodium distachyon
  Intron number 1 from transcript Bradi1g35370.1 (locus Brad i1g35370) derived from phytozome v7.0 (chr-ID Bd1; pos 308 71267 to 30872267 reverse strand)
tgggggccgaagaggccacgcaaagggcgacgcaggtgaggggttgcgtccccacccctcttggtcctccgtctgtagcttctgtagatttttgttgtttcttccaatttttaatggatatgcacttgttctggaagaagatatattcgatttataattgtgcgtcttctctgatggaaattagataggggagttggctgttgagaccgcaggttgttcgttcagagcacaggcaaattcgcatgctactatctcatatttatcaagtgacgatatgaccttcaacacttttgcattaatatctgtggtctgtcaaaattatttcccgttagatagtttgcttgttcggtcatatttaatttaagatctcatttccctaaaagcttgatggcttttgatgcgtatttatcttttgaagttgggtcgttgcgtgtgaactgtaaaggtgaaatatctgcttttcagttgttctatgttcagttgaacacttgaacagctgatggtatgtgctattgtgtgtcttattctgagtggcctgtgtaggaatctttgaactgtaaagagtaattttttgcttttcaattgatttatgttcagttcaacagctgctgctatatcatatattcatatatgctattgtgtgttttattctggtgtggcgtgggtaggaaactttgaactgctacagtctatatgccgtatgacctgaataggaatctttgagcggttcattcttgacctgagtaggaatctccagaataccatgttggctgtgcaactgcagtatagtcaatgcatttagatatgcctgtcgcatgcctgtgttccatatctgacatgactagacgactatggtcaattccgaccattgttcaagatgcaaacaataaatcatagattttgttctttgatgtcagaatgctgtaatatatttggttttcactaatgatttactgccaggggctgtttttattgtgctcgtatagtttctctgcggatac

SEQ ID NO: 13835 - DNA, 873 bp, Brachypodium distachyon
  Intron number 1 from transcript Bradi1g01460.2 (locus Brad i1g01460) derived from phytozome v7.0 (chr-ID Bd1; pos 961 010 to 961882 reverse strand)
aggattatcagcagtggcgtctcatctgccgagtaacgaattttgactttgctctgcatttgcagtttgttttgatgctctgctttggtcaagtagctcttagcctgacagcaacttcaagttccaggctacctgatggaacaaccttattcctctatgacctgcactgttttgcagcattgtagatgcccttgttcctctatcatgttgtcgaagaggagagtgatttctcctgttcgttgcaaaatgaatgtcaatgtgcaatctcaatattcacagtgcaggattgttgtctattatcttactccctccgtcccataatatgaggcacgcacgcatccctggatcatcaatttagctaactaaatataaattaaataattaaaaaatatataagtagaaagttcttttaataacgaatgtaatggtgtactttttgctaaaaaacatgcatatttaattaatcaaattgaggatctagggatgcgtgtgcgcctcatattatgggacggagggagtactatcattgcactcttgtggttcggtggttctagccaactgtcaacttgatttacatatccggcacatagtttttgttcaattaaatttccctgtcggatagcttgataacctgagtttttttagaaatgcgtaatgtacaagatgtttatttgaagagttctttttttctcttgaacaatcattctgaatctgatctgatggataccttgtctgtttctgctttgatgccccagttagactttttaagcgctatttctatcagctcagagtatttacagttgtttctgttactaagatatccttatgttgttttcaggttcgtgatcttgattttgccatagagataatagg

SEQ ID NO: 13836 - DNA, 909 bp, Brachypodium distachyon
  Intron number 1 from transcript Bradi1g30150.1 (locus Brad i1g30150) derived from phytozome v7.0 (chr-ID Bd1; pos 255 52220 to 25553128 reverse strand)
ctgagaaggatccaaaggtaacactttctttctatgtttctatatcaaatgtgttttcaagcatattcaagtcatacggatttatccagtgggaaatgcttcaggctttgggcacatcacaagttcatactaagatcagcagtttaattcttgatacagtgtgccatcatgtgtatctcattcttctgtagtggtgtttcatttgagttaggagaaaattatgataagtagggatagcctctgcaaatcactcgtgtaatcatggtggtgttgcatgtatttttagttgttctgttgtttggcgctcctggttctctgttaacttttgcaaagctttgattcaatgtttatgtcatatatgtagaatcctgaccattcgtgaagaaagatcacatgattgtagctgcattgttacgattttttcacgtagacggattttgatgattttatttgcatatcaactaacttaaaccgaatgattgttttgtttgtatctactaattttgttttgttttgaaaatgtaattgctttactaccaagtacattatgtgcacataatgttgagcagctagtatagttatgtccttttagcataaggatgcatttgaatgtatacggagtttaaacccagtgttgggtgagtatggtcatagttcttgatcagtggtctcttgttaatctctagttacgtgatgtttcaagtaacttgtgctacttggttcagttcagctgactgtgttgtctctttggaatttcttgtcttttctaggctttcatgattcccatgattttagttttccttaagcttagttgcataactttgagtttgtacacttaaaatatcaatcaaatacgtctaaaagaatcgctgcgcaccttttgtttacagggttaagaaggtgacaaaa

SEQ ID NO: 13837 - DNA, 984 bp, Brachypodium distachyon
  Intron number 1 from transcript Bradi1g39930.2 (locus Brad i1g39930) derived from phytozome v7.0 (chr-ID Bd1; pos 364 47913 to 36448896 reverse strand)
gctctccaaaggccttggctccttatcttgacaaggtatgcattttttgcgcattgaagttttcttataaatgattgttgtagtcactatgcattgtggcttccaaccttataagaacagttcttaggaaacaccaggtagctaaatagttggcacatatggttgttttaaaaagcaccctagttcgaatcgacctttttcattggtacaatgtgatattgtgatatttctagacctcaaatgagtgttgggagaaataaattggattgcttttgatcaaactagaatgtctatagtaagctatgtgcaaacctaactgaattcctttttctaacggccgaaacaattggctaagatagttattttaagggtcaaccaacctgatcacctgttccaacaaactcccaatctggcagttgatgaagctgagggattttggtacattatactccctccgatcctaatttgttgttgaaatattacatgtatctagatgctttttaagaatagatacatccatatttggacaaatttgagtcaagaatttaggatcagagggagtagttattagtatctcagtactagttaagggttttaccaagttagaagctttccatatactctcctatttttatagttgtttagaaagtttcagtggaaacccatggaaatcttctaatattttagaaaagtttgaacttttcttaccatacgacagtgacatgtcgtgtccacacactatatactcccacagtttcgaaatttctgtatacttgggtttgtcctaagtcaaactttgtcaactttgactgagtctgtaggcaaaaacaccaaatacataggacaccaaactagcattattaggactaatatcaaatatattttcatattgcatttgtttggtgatatatatgtagactttaataatgcgcaaaagaaaaccctttctttattttacaggcaatcagctatattctacacaca

SEQ ID NO: 13838 - DNA, 920 bp, Brachypodium distachyon
  Intron number 1 from transcript Bradi1g37180.1 (locus Brad i1g37180) derived from phytozome v7.0 (chr-ID Bd1; pos 329 60116 to 32961035 reverse strand)
tacggcttcacccagttcaccaaatcaggattcgcgtaagcctgatttccacccaatcgtctcacagattctcttcttgtagcttgcgcgattccgtggaatcgtgtctcagttggggaattggagtttttttcaattcccccatccgtgtcgaaactggttgctcctcgtgttcaatttagcacagcagttgaggatacgattgattcccgtcacggttttttttagaaaatagaagctttattagccccgacctctgcatactagaagcatatatagcctataattatgcattacaacagtaaagtcattgatgaaataaaaaaccgtgccaggctacaccgagaaccaaacaactgctgtgaacccagacgctcttgttagctgctgaaaccttgtagtttaatgtcatccagtagtaaccagatggagaaagatctgtttgcttgcaagggattgcgcacttctcgcggcactagagaggatcaatctattttggaaggtagaggatcaatctatttgagttcatgtggatcaaactatttcaaaatgcggctctcacctccaaggatgcccccttgctcatgcccaaggaaatcaatcaatgatagtgcttgcagctcctttgagccatagtctgggaagtagcccaaagcctattgttgttgttgccattctatgagattgtaatagtttttttcctttttaatatatgataaccgctctcctacctgggttctaaaaagatacagggaggtatttacaagtaggaattgagtattctgaccgagtagcgttgtatccgagtcgatgaaaaggattttaataattgttcccagattagtttttttagaatatggacaccgtagttgctttcgtcctcattgttcaaataatcagactcaaattactcagggaac

SEQ ID NO: 13839 - DNA, 850 bp, Brachypodium distachyon
  Intron number 3 from transcript Bradi1g18750.2 (locus Brad i1g18750) derived from phytozome v7.0 (chr-ID Bd1; pos 150 18266 to 15019115 reverse strand)
ggtatgtggcagctcatggtttctctgtatctccatgaacttgtttggtcattcgcttcgccgggcatgctagggctgctcgataatgtccagtgatggaaaatcatgttgatattctgcaaacaaaaatgcttgatatactgtttccatgctactttatgtctgaaatgattacaccgcacttgatacaccgtaaattgctcttctgggtgactgggcttatctgttttactatacactggaagttctgtcgttcacaagtttactgatattcgaaagtttgacctagcttataacaaaaattgtcaccatccatgataccaaactaatacaccatgaaaacatgtttcatgatggatctactgatattcatttcgtattgtaatgtttatatctttttctataaacctggagaagctttaagaattttgacatacgacaaaatcgatatgcactgtatttttaatggatgtgccttatagaaaaatatcaaattgatatcgtttctatattaagtttctgtttgttcttactcaagcatgatgatcttccatatgccttaatttgttcttgcttttaccatatggttagttaatttgtcgctgcttgttccatcgatgctcgattcaagtatttccgtataagaatgttgtcttttacaccaaatcttctggtaagtctatctcagacatggctcttctgctagaatcaccctttgttattgtagagaacttctgacgaatctttactatgctgccagttatttgcattctgaacaatctggagcacttcacttgtgagattatcatgtgccagtaattcatgtttcctttattttctgttgtttcag

SEQ ID NO: 13840 - DNA, 823 bp, Brachypodium distachyon
  Intron number 1 from transcript Bradi1g22510.2 (locus Brad i1g22510) derived from phytozome v7.0 (chr-ID Bd1; pos 180 42107 to 18042929 reverse strand)
cgtgaggtcgaaggcgctgagaagctcgttgaacggtcagttcattgacttacttgatatgcctgtatactggccaactgcagcaagctcctttttttatagggaaaactgcgatagctaggtagtttaggacaaatttattatagaatggagcacagcagaagttattgtgaatgtgacactgacacaaggatttggtttactgcacggttgtgttatggaaactacttatccaaatcctcctgtctgttatagtatggtagggtggtggactgatatcctgatctgactcttgtttggtgaatcagacatagttttgaatacttacttttgtatagagcatgatttgttgtgctcaaggccttttgatccatgctatctgtcgagagcctgggactacatttataacatgcattgtttgatcaactcttgtacataaggttgtaccttaagttggattgtatcatctggtacagtatgaactatcaagtgcttgcggaattagaagaggctacatgcttgctttataatatttaggaattcatatcttatattcagatgctagtacttctgtaaacaaattgtgtagactattgagttctggtaatttttaatgttaacacaattgtttgtttgtagtattgaatattggtttctagtgttctgcttaagggcttatctttggtttttgcctatatgtttagcatggcaatagtgtatgctataatttgtaccaatttatactaatttaaggtcattatagattcatatgactactgaataaatttggcttccaaatgattatctgtctgttgaaatcagg

SEQ ID NO: 13841 - DNA, 898 bp, Brachypodium distachyon
  Intron number 1 from transcript Bradi1g10490.1 (locus Brad i1g10490) derived from phytozome v7.0 (chr-ID Bd1; pos 757 8327 to 7579224)
acaccctagagcaggggctcctcgctattccggaggtgagttagttgcccttgaaccttgatggatttgtctgtacatgccgtccctcccgtgcgattggagatgtcgtcgtgctttggtgcgaacaccaggtctaatttagttcaaaagagatgatgatacctttgcaccatggagcgcgtatgtggttcatgtttctagaaaattatcgagtggaatttatgcgttgatttagtgaagattaaagcgtaactaaggatcgcttaattcggaaggaaatacgtcccttttttatgaccttgtataaggtactgtattcactattctggtgtttgatatgccgatgtagtagttgaagagtctcgacattctgatcgtgagtcgaactagttaaatcggcaattctgtttcagtttatttcaaccagcatgagaaatttgctcagtgtttgcttaatttatacattactgggcctaaagaaaccctaccttctgggcattgaactcttatagcggactgtatatgggaaaagacatcctttccctggtgatttctagtaatcttggttatccagtttcttaaggtaatggagccacgacagtcaagcctactgttccctcgtatgccggcatagtgctacagctgcttccttttgcacatgaagctatgaatcatgacgaatgttaaagccagagatatactctggattttggtcttttaatcagtacatagaaaaagacagcaatgctttgctcacttaaaatgaagtgagtctatctatcaatgtgcattgacttctaagtcctaattggtgttaaaacactctatggtcattagatgacatggtacactaaatactctcgatttcaggaatccaaccaacttacgtacactggag

SEQ ID NO: 13842 - DNA, 571 bp, Brachypodium distachyon
  Intron number 2 from transcript Bradi1g02120.1 (locus Brad i1g02120) derived from phytozome v7.0 (chr-ID Bd1; pos 143 8339 to 1438909 reverse strand)
tacccaagattctgcacaacgaagcgtcctggctggtaagggcgatgtttgtctgctctgttttcagttgagttcttaagttcctcatacaaactcgtgtacaaaacagtaaagttgcgtttgcaatcggtcatatgttcaggctgcaatgtcattgtagttttggtaattccgttgcagattaatatatgttacttcacattcgacaatacttatctactcagtacttgttttggataaattcatatgtcaatcaaaccgaactcgaagaatcatgttctggataccatgctgaatttatggtaaacttaactaatcatgttttaattgatattctgttgcagcttcttttagtacgcttgtcgtgttaaattcgaactacatggtcaaaacatactgttttgaatcatgcgatatttactcggtttatcaatatctgtagcattttgacaatcctacatcaaagaaaccatttcagccataaaccaaggctcgagctaatcctgacttttctgtggattcacatctcactctagcttgcagttaaagagttgcagaagattaattcctt

SEQ ID NO: 13843 - DNA, 841 bp, Brachypodium distachyon
  Intron number 2 from transcript Bradi1g24080.1 (locus Brad i1g24080) derived from phytozome v7.0 (chr-ID Bd1; pos 193 18936 to 19319776)
tttggtggatcagacaccaaagagttgcttcagaggtaactgtaattgtagcttcctgttctgattttcatgagtcaagcacacacacacaaaatacctctttgatgctgatttgtggttgcaaacaagctggctgcaagcctgtgtttgtactacgcttgatttgattatagttctcactgcagctctgttttgtgttacggttgtcaagtttgagttaggattaacaagggaaatgaatcatccatactgttatatattgtttcatactggatctagaaatacattatgatgcatattaaatgaatctcttgaaaacttggaaccataggttttttgttaggttgtgtgtaatctaattagcatttgttgtgctagttggagttcaggttgttacaattatgttaacggaaaatttacacactgaaagatcgcgctggagttcttttcttgaccataaacgctggtgttagtaatccaatgagaacttggagttgttagagacctgaacaagttctaaataagtgtatgaagtttcatactaactgagatttcccattctggtgctgcaactaagattacatgcccagatctgttagcaaatcaatagctattatttaatctgccaatttagcctaaaatattcagatcatatttactgaagtgtgtctgtcggtttacttgaatgctgctgctctatagctgtgttaaaggcttaaatcatactcctattgttccaatcttagcataggtatgtccattaagttaagtgatcagaatctaattttgtcatctgatcttggcaccttaatcttttgcagctttgtttcacttttcaagg

SEQ ID NO: 13844 - DNA, 1061 bp, Brachypodium distachyon
  Intron number 2 from transcript Bradi1g01530.1 (locus Brad i1g01530) derived from phytozome v7.0 (chr-ID Bd1; pos 993 808 to 994868 reverse strand)
agatcgccgtcatcgagaacctcggcgccaccgaggtacagtacaacgccccacccaccactggacttgcgctgtgtgctccttcttgttctaagtagtagcggcagtagcagtagcatcggttccttaatcttcctggattatttctgattgctactctgatgctagccgagtaacatctctttacatggatttataacccttaacatgtagcaagccgggaatttagcctctaacagaacgtgctgtactgtaattgctgtgcctgcgagtacgaagcaaatgcatttttcagttttgcaccacataggctgtttttgggacttagactggcaatgggttgctggggatgtaagacgagtcacgagtcctgtttgagcactttagcgtagtggtatccaaagagtgtgtactttgttgttattgttcagggtagtggattttattcactgttacaccagctaaaggtgggtggaatgcagtattgaagtgctttatgataattgtataagggggtgcgtattgtagtggtgaagttggaggcctttctcgagaaagaatagcacccttcagtatgagctgtgtacgtgtagaaattgctgtttggaagtttagtgtttatgtgcttcatttccatgtctttagggctcttggtatttttgctttcttctatcgagtaaagttgtgaagataataacagttctatgttagcctctgttcgttgttgttgttgtagtagcaaaagtactgatatgttgataagtcaattcgggcatcaaatgtccattgtattttctaacttgttatactgttgctgtcctactttatattactgtgggtctacgagtgtcacaccttttggtgatttttttttatagcaagggcttgatattcagtgaattatcatgatttgaatttgaaatgatagggttttctgtatataatttggaatacattgtgtttcctctggttccttttctaactgtttatttgtttataacaccgtctttgttccttctttttgtaacaggaccaatttgacacgattgacttgtcggaca

SEQ ID NO: 13845 - DNA, 681 bp, Brachypodium distachyon
  Intron number 1 from transcript Bradi1g42800.1 (locus Brad i1g42800) derived from phytozome v7.0 (chr-ID Bd1; pos 401 59547 to 40160227)
tcgtcttcctcctcgctcgagcgcctccaccgcaggttgatctccccttcgattctctcgctcccgaccgtttctcctcccatcacaccacgaacggattccgccctttagatccccgtttcataagcttccccaattcgtaactgaggcaaaaatcaaggtagggcgcccgccctaccttgccctactgggtcctccgcccgtcatcttctggatgaactcgagttcttggtcagatgtggccggtcaactactggcggagttacgagttttggtgttagatttaggggtttggggatgccattgctgggtttaagtttaaatcttctcagctcctgtcactgggatcccctaaagtttaggtgtttaaatgcaattattggtggcaatgatgaggtgttgtagttcagtagggccagtatggagataggttttatttctactaatatgtcaaaggggtcatcaacttcggccttgtcgtgccttatttgcggtgcatgcaagatataatgctagcggtgttggccgaattgacagtttattgttggggtgtactagcatttggtttgattaagcattcatgccgtcaggttgagtagtgcattttgtgttacgagttgtagttatataagcacgaacttttctcaagtgtcgctgccttacaggttactctgttccgta

SEQ ID NO: 13846 - DNA, 427 bp, Brachypodium distachyon
  Intron number 2 from transcript Bradi1g20560.1 (locus Brad i1g20560) derived from phytozome v7.0 (chr-ID Bd1; pos 164 53752 to 16454178)
gccgccggtgccgtcgggaggcggcacgtccaagggtgagttcttgtggccctgctgcgtttttgtctcctctttccgagatcgaggaaccagaaaaatgaactggttttcttgatgggcgacttgttttgcatcaaacctttgaagtagaggagccaaatatgcatgtgtagcccctacatgatccttgttttctagttaactcctactactacttgggacatccataaaaataacaatgttttggttgtggaagagggattcagttaatcatcttctgttcttttgagttctgagaactacaaatctaatgcgtgccgccgtaacttcggatccaacaaacttctcccacttcataccgtttctgaaaccaaccacgtcgctgctggatgctcccactgatgttcgaacactatgcaggcctgtc

SEQ ID NO: 13847 - DNA, 1049 bp, Brachypodium distachyon
  Intron number 3 from transcript Bradi1g13880.1 (locus Brad i1g13880) derived from phytozome v7.0 (chr-ID Bd1; pos 107 28485 to 10729533)
gatcacacagaactaccattgctaattacatagaggtttgcatccttgttctattttcgtttcgtttctaccactacaggtatatattttctgatctgtctacaaatgtactttcttattgtctatcttcttgcttatctcctgttcacattctttcacggaaatgcttacaattttctaatttccacttttgtccatttctatttagtcagcccaaggttttacttagcatgagagcttctcatatatggattcagtattttgacttcaccaaaactctgaaccatttgagagttcacggagaggcgttggtttccatggattagttccacgaagagagagaacagatattttcattgaatgatgtgtgtgcctgaaatgaaatcctaagcaaaaacagtgttttaccaaaagcaaaagactatgcctagcctgattccactatctaaatgaggataatcccacaataaagttagtgtgggacctagatatcctgcatttgtttttgtgcagtctactgccgttactccctttcacctgctggctgccccatccagggtttggaaacatgccagaactgatcagtaaaccagaactagactgcttatggttctctgaaccttctccctgttacctgtatccccacccactccaccccactctctttcatcacattttctactaaaatatggtcattagtaataatttcaaattttcttttttgtggggagccaatttcaaatttccaactctgacagaaaaaaataaagttggaatttgatatgcagcatgagcaggatcagttctttggctggagatcggccaaaaaataacctgaatgattatgggtttgtagatcctaggttctgctgctgatccatcttcttcttgttgaattgttgcgccctttttgttgccttgttgatctgaaatggttgctcctttttgctaataaaaatcttgtagagatttgttacacttcctcttatttgctttcatgtgatcactttcttaacccggttccatataggagcaatatcgtccatctg

SEQ ID NO: 13848 - DNA, 981 bp, Brachypodium distachyon
  Intron number 1 from transcript Bradi1g26110.1 (locus Brad i1g26110) derived from phytozome v7.0 (chr-ID Bd1; pos 211 90637 to 21191617)
ctccaattccctcttcgccaccgtcctacagaccggtccgttactgctactagccctactactgctcctcttcatgctccccttcattagtcaactccctatcgactatcgagaattggagaattgagatagcgatgccctatgcttggtagaacgggagagtcgatgctgttgaccagtaatgctgtaagattgtgattattgtttcaactttatgcagtgaaatctgatactgcgagcagggaagggatgcatcctgcatttacattgaaatcatggctagatagatgaaattgtttgaatgcagtatcctaggacgtttagtagttttgtgttctcaatttaattagagtatttcggtagcaactaggggtggaattccaaaggctgcacctgcacctcctgtaatccacaagaacaatctaaaattcttagatgagcaagaaatttgtttacattggttggagccaattgacatgcatcaccaatagcgaaaaatatacagagattttttagtagagtatttctagaaagtgattggctgcgccatgcagatcttttaaattcctaaaaagattttagtgcctgcggcaacactgcagatgcccattaagaaaactcaaattttaataaacttattgttaggattttcttttgcgaatttctttagtatttgcctacctacctttttttagtgccaactctatttaacattccaattcggcattctagttggatcctttccagtgtgtgtatccatgcaagagggaaaaagcctaatattattggcaacacttatcttggggatgccatggtttctgggattattccctactggatggacatgttgtagttttgattgaagatgtttcagtgtttcaccagtgactactctaaactactgttttcttttcttagccatacttaatcttatataagatttgttgttgaacagtttgtgctgcagcattaacaatagct

SEQ ID NO: 13849 - DNA, 866 bp, Brachypodium distachyon
  Intron number 1 from transcript Bradi1g25660.1 (locus Brad i1g25660) derived from phytozome v7.0 (chr-ID Bd1; pos 208 24748 to 20825613 reverse strand)
aggaggcggcgaagaagaagccggccctggcgccggtgaagcaggagcagggcgttatcgtcctcgactccgatgacaacggcaacggcttcaacttcgacaacgacgacaacggcgactccggcgcgtcctggatcaaccgcctagacgactagtttttttgtcttttttaattttaattatctaaattattgcaagtttgaatatgtcgctaaactttatgacatgtcacctaatttaatgaaatataccaaaattaaatttgtttcgaatttagtagcggggcccggttaggacgtgccagacccccaaattttcttttgcaccggcgtcccccatatggcccgcaaaatagaagaattggtttcttttctatggcgtcaaacttaaagaatttggtttgggtcgatttttttccatgactaattggacaatattactggacttcattatttttggaagtcttcagaccgcgttgaaaagaattaagcaaagaaaattttgatagagcaataccaagcgtagcaaactccacgcaggaataaagccttctggcatgcgtcggtgcatctaccctcacggtcacggcgacggtcgacacaagcctatcaagccatcaaggccgacagacaggcctgtgttgacccaacacgaacatgtgtgtgagccccgcgcgcatttagagacggccccactgtcaagactgctaatctagtcaagtcaaactcacagggccccatcacccggcatcacccggcaccccctcgtcctccgactcgatcttcttcgccttatttcatcgtctctcggggttctccacttctcctccagacctccgccggtctacagactacggctcggcccct

SEQ ID NO: 13850 - DNA, 1045 bp, Brachypodium distachyon
  Intron number 1 from transcript Bradi1g34140.1 (locus Brad i1g34140) derived from phytozome v7.0 (chr-ID Bd1; pos 297 47374 to 29748418 reverse strand)
ccacgacgccgccgccatctcccagtcccagatcggtaaatactccccccccccccccccccccgtcctcctcttacagcctcttgtcgctttccgcccagatttccctcttcctcctcgcgcttctcgtgccatggagacttgctttcttttctcttggtgatggggaaattttgatccaattatgattgcatcagggccgggttgtttcaagtggattgattgctttcgatgttaccctctcttgatgaaaccttttggtctaatcatgtttgaaatttggactgattgactacagtagactagaacaagaccagtgtccgtcttttgatggtaacgtgctgccagcctgccctgtcgccggcccctcctaattttctgatgctgccgtggaaaccgacttcgccgtccttgctgatccatgtctggaattctggatcggttctacgtgtagtttagcttgaaaggaaggatatttcgaactccgggaagaaatcatttcttttgtcttctgtctctgttctttctgaatttttatactacactctttcctttcctgtactcggttagtagtggagtctgatttttttgatgccgccgtctctgatgttctttgtctggagttctggatcggtgctagagtagcttgaaagataaagaaatcttagtttactccaagcaatggaaagaatatttcgaactccggcgaaggatcagtttcttttgtttcctgtctctgctctttctgaatttttatactgcactctttcctttcctgtcctgtcctcggtcagtggagtgtgattgttctatcaaatcttcccccttcttgtttttcctcaaatgttcaccatgagatcagcctccagcaatcctcctaatctcgcaggccaattaacaatctcttattattattattctctgaaaaaaaaatctatatccgcacttcccgcagaaaccgccccaatttgtggatgaactgatttatgttttaatgatttttttttcagtcaaggcgctgaaccaggcgaggctggaggcgtcg

SEQ ID NO: 13851 - DNA, 521 bp, Brachypodium distachyon
  Intron number 5 from transcript Bradi1g02810.2 (locus Brad i1g02810) derived from phytozome v7.0 (chr-ID Bd1; pos 190 1551 to 1902071 reverse strand)
gatcaggtaatggcaccatctgtaactgattatgtaccaatgtagtggtttctgcttagctcatgctgttcaagtaaaatcaaactagtttgtaaacaaaaatgccttgtatggaactagcttgtggataggttatttgagtatcttattttagtaaatatctctgtattagaagaacatcatagagggatcctggaagcaggttagaatgtttcgtgtggcttattctttgtagaataagaagaattgcctttatttcctgaatagattttttgcataccatgcttacatgcaatacatccttgggatccgtgttattactcatggagtcatgggaggaagatgtatacatgttaaataaagcttgcagttgcagatttggtatatgactccattcacaatgtgtactgtttaagattctttagaccaccttttattttattttgagttactttttcttttcttaatttgattgaccttggactcttaatatcattatattgttctaggctatatctatc

SEQ ID NO: 13852 - DNA, 373 bp, Brachypodium distachyon
  Intron number 2 from transcript Bradi1g14610.1 (locus Brad i1g14610) derived from phytozome v7.0 (chr-ID Bd1; pos 115 87522 to 11587894 reverse strand)
ctcgattccctcaaatccttgaaaactccagtaagcatatctgttccatgcacttattttcagacatgaaaaaaaaaacaagttgatatgcaatgccagactactccattcagacttcagaggttttggaactgaagcaaatttcctcttcaatgcaactggcattggcgataacgagatgatatgaccatgtttcttttctttcaagttatagccaaaaaataggcatgaaaggattaaatgcatgaaactaacaaaatgtagattcgttgctagagtattgatggacttatgaatcgatagaatgttgttgtccagatgattattttgatttaactctttgtctttgttccattgcaggctgtgatcaact

SEQ ID NO: 13853 - DNA, 630 bp, Brachypodium distachyon
  Intron number 1 from transcript Bradi1g43310.1 (locus Brad i1g43310) derived from phytozome v7.0 (chr-ID Bd1; pos 410 04901 to 41005530)
ctctcccatcccaggtatgcttcttactttctcttcttgtgttctgctcttagacctgaatgcacgaaacgtaccattgtatgcgtgttttgtggttatagcaattgattgggtctaggtattcagagaaaagaaaggagaataggttagcgctgaaattcaaccatgtatatattatacttcctccaatcctaaattcttgtctcaaatttgcccaaatatggatgtatctattcttaaaaagtgtgtagatacatgtaatatttcgacaacaatttaggatcggagggagtagcttttattgttgtatgacaagcacaacttatttccattcataatgaaaaggactcaattctgtatttttaataactagccatgaaaactgcacatgatatatacctaaaaaacattgcacatgatatttacctcaaaaaacctgcacatgatatttttctagttatcgcttaaaatacgatccatattgtcgttatcattctgggtcaagcaggcaaattagcctttaatgcgccttctgtttgttttggtttgggagttgggacataaagcttcaccaagtctctcttcttcttagcaggcttctttgctcttattgttcagaaccatccttca

SEQ ID NO: 13854 - DNA, 827 bp, Brachypodium distachyon
  Intron number 2 from transcript Bradi1g15300.3 (locus Brad i1g15300) derived from phytozome v7.0 (chr-ID Bd1; pos 122 46296 to 12247122 reverse strand)
ccactggctgcatccacctcagcaacctaagccaggtatgcccatttaaaattatctctttgatttgtttcaattatgctctctaaaaatctctcgtttctcagatgtgtattctttctctgatatctcggtagatttctgcctttttttttcttaatttgcggtatcgagttaggggttgactatgcactcatgagtttacatgttgttggaaggtgcaatatccttaatgttttgttgcttttgctgattcaggactttgatctcttctcgatggtcctatttgattagctttggcatgcaaaggtttggtgtgcctttggcgcttgccgcgtagaggtttggggcttattgctccagttccacctaataatccgcagtacacaacttttctgactgaatctttctattaacaaggatcaaggatggtgctgagtagtgatccgccagatactggcaagcacttgaagaaatatttatgaaaacgatatgtagatcaatgctattgaaaagaacaatagcgtataccaaaagaagatcaaaatctgtaaatttattgtattaagaaatttaatcaaacttatgatgcattcttggatgtgttttcatgaaaaaaacattttttgcacatcttctccagaatactcctctattaatttggtgatggtttacgtattcacaaggtatagtgatattccaatggacattgtttgatttccatctgtgagtcatatccatccatccatccatatttgtctcttttatttatatcttgatccttttgaaaaaccaagttttaactaatcgttgacctggtgtaggtgaag

SEQ ID NO: 13855 - DNA, 836 bp, Brachypodium distachyon
  Intron number 1 from transcript Bradi1g03870.1 (locus Brad i1g03870) derived from phytozome v7.0 (chr-ID Bd1; pos 259 5622 to 2596457 reverse strand)
gtgagagcggaagcatcggcggcgacggcgacaaggtatctcctaggtctctctagagcgtaagtgcttcgggttgtgggttttgcttctgttttgtgcagcaatttcttcttacctcgatcgatttgtggggggtggggtggggtgggggtggggggggggggatcttgggggcggtcgatttaggcggctccgttgattggagatttttagttatgcctagatgcgtggttgctgctgtaggtaaaagatccatccgttatatgtcctttaggcgtcagatgatcgtctgtactcttggttgtcatgaaataaccttagttctgtgggatgtttcaagtttgacggttgattttgcaaattagaactgtttaaagtcgaatatgcagtcactatggggcttcaaaatgcttatcttccagtactttattttgatctttgtgtcctaatgaactcattcagtttggggatttttttcagaaatagtaccaagtccactgctaaacaacttatgatgtgtttttcttggagagaaatgtgggatgtgttcgtgctctgtggagtagacataagatcatggttctacaaaataatcataggattgtcaaatatttcaagtaatcatagtattgtcgaatattccaagtttgggttacaaatttacaattagtctttgtatgggggtccttctcaatgtatattaatatcggattctcctttattaggtttgattcataagtaggatttatgatgtagtagtaattcccttggggcaattgcataggagatgaagtaaactaacattgtgacttgcttttcattgcaggaaacaaaac

SEQ ID NO: 13856 - DNA, 1019 bp, Brachypodium distachyon
  Intron number 1 from transcript Bradi1g35770.2 (locus Brad i1g35770) derived from phytozome v7.0 (chr-ID Bd1; pos 313 63082 to 31364100 reverse strand)
caaagtatgtacgcatacctatgttgatctgattatatactactccctccgtccggaaataagcgacttggatttgtataagaatctatgcaaatccaagtcatttatttccggacggagggagtagaattctttcccagtcaaaaaggaaccactagaattctttgcattttcctctttccatcaatattattgttccaatgagtattgatataccaaaatgataacggaggaggttagaattgatattttaggaaactacacttactgacagtatacatgacatttcactttatatatggtatctgctcctgtagtcctgttggttctgtgtagtttgtttgattgactgtcctataggttagttgcatgagaatttggctggtaaaggaaccattggttgtgatcttgtggatttgattgtgtttggatgacatatttatactatatatcattgatgaattcatgaaacatgataaatgttagaactactgatatttgtgagtgttgtgacagtactgatggataacgaaccagattatccagcaagagtttccttatcaactgatgctagcctgtatgggactcaattttagttcatttcctatgttcagcaaataatacatgaaaagaaaaaataacgtaatgaaggacccaagcaggtaggtgactgtgaaacgaatatcatagctacagagcatatgcgatgtagagacaccatttgaggagggagataatgccacttggcactaacaaagttatcagtgctgctgattaatgatttaaaacagtatttatttgtacgggaacaggaaatgtatcaaatacacataacacaaaaagaatccatactggaagctgtttaggtcagttgatcattttaatatttcatgtaggaatgtttaattgacaattgagcatcaggttcaacagaaaggaatcccactaatatcggtgttcttttttttccctctaccgatgcaggtatcttgaagcaattaagcagtacctttgtttat

SEQ ID NO: 13857 - DNA, 701 bp, Brachypodium distachyon
  Intron number 3 from transcript Bradi1g11220.2 (locus Brad i1g11220) derived from phytozome v7.0 (chr-ID Bd1; pos 828 3185 to 8283885 reverse strand)
gccaccggcgtcccggacaaccgcctcaagcttgggtatgtttatttgctttagcacttgagcaaccctgctgttatcacttctgccaaactggtccataggcaggcaatttagatgcaatccccatccggattttagatggactgatggagtaaatagagatttcagtatataaaacatctgactctggtatgggagtactccagtacgtaattagtcaacgaatgcccaacaaattaatgtggtgagtaggtagccagtgctgaacgtggtgccccaataaaaatattcagatggtgcgctcgtggtgagcggatcatggacatttattgcttgctgatagtcatagtagcatggagtagcttttgagtgtttgttgaacttgaacctcctgcgtcctgcgcacatagacgtgcctttgtcttcagttcttcatcctttttgtagctgactccccagctactactggctaaaccgctaaaatttcggtgctgtcataccatcacggtcacggtaggccaagaccaggtcggtaggtggggttcgtcattgatagtttgatgttttctctcgataatgaataatttgatgcgatgttaagtcagtttgggagtttttggctttatgacagtcttgttttgatcgaagtggttgttctgacttcagattttgtcgactaattctctgttggcgaacgctgg

SEQ ID NO: 13858 - DNA, 548 bp, Brachypodium distachyon
  Intron number 1 from transcript Bradi1g14480.1 (locus Brad i1g14480) derived from phytozome v7.0 (chr-ID Bd1; pos 114 11796 to 11412343 reverse strand)
agagtacgttcatccatatagaatactcactcaattgttcgatttgctgtttcgatcggttaagatctagaaggcttttgattaagctggggcttgatcacaatcacatgagccaatttgcctagctagctacctcatatatctaaaactcaagtgctcttggtcgattggttgtctgaatttctcacaaagtcgattatgccgatggaaaagtgcacaaatcttattgtataatctcattacttgaatgcgagcatcagtgcatgacttctttctgcacagcatgcatccttttgttcccatttcatttcttggtcgattctatttccaacagatcacaaaagccttctctgactaatcaagatcttgcttccttgttttcctattaattttgcttcagtaaagtcaccgtgatctaagtctggccttatctttgaccacaatatgtttgtaaaatcgtatggatttcaagtacaacaattttacgaaattaagctatatatgttttctatcttcaaggagcaacaccaaaatcagtcttggagttg

SEQ ID NO: 13859 - DNA, 959 bp, Brachypodium distachyon
  Intron number 1 from transcript Bradi1g04340.1 (locus Brad i1g04340) derived from phytozome v7.0 (chr-ID Bd1; pos 295 1423 to 2952381 reverse strand)
tcgacaaggcctctgcctggctcaagaagatcgaggtaaatctgaacttttttttagatacagtcactagctagaaggagaaaattttatctagtatgttaccctcttttaatttcttgaaaattagtgggcagtactaagttgcttcgggcttaatttgcatcttttcgtgactacctgctgctattatcttcttgtgccatctttccttgcaatcaggggggcaattaaagtatcagcaagcttgacaatcgttccaattagaacagaaaaaaaaaaggagagcagagaatgacaattacagtaactgattaaattgccaaaaacatggaaattgtgtcgcaatctgcatctccgtggtatttgtatcaactgatgaacaaaccgatgttgccgattgtcccctcaaagcgaaaacaaacaggaattagctcaggttagctagcaatactagagtagcaggcagcctatctgtcttccttttgagaaaaagttaatacgaaaggaatcaataatctccgggctaaaattagacagaggtgttaacatcagagttttctcgattgcccctttcctttgtccctttcctttgggtgcgggcggcatgtaaacatcagttcgttacagctcaatgttgcaactttctgcagcgaaaggcactacaggagtatctctcatggatcgttaccacgttggtttcagtgataggaaagcggtctttatcctcgagaagcactaccagttcagaaactccttttttttctttttttctttttgaaccttctgctagagctacgtccatgcaatcacaacagtgctttataatcaacatctatgacagtacaattttcagaatctattcttttctactccagcttttcttatgtccatgttaattgatcaccaattgattgtgtatcgcagaggaagctggacgagcagcgtgccaaggcggtgga

SEQ ID NO: 13860 - DNA, 1044 bp, Brachypodium distachyon
  Intron number 3 from transcript Bradi1g05670.1 (locus Brad i1g05670) derived from phytozome v7.0 (chr-ID Bd1; pos 384 6671 to 3847714)
ctcagggacgacctcgagaggctcaagaagatcaggtttgatgaatgcgtccttttttttgtttctgcctgctactgttactcatattggttgttttatggtgatgtattagatactactattgctggcagtcgcacctgacattgtagaatgcttaagtagcaatagcatttggtgcgctatactatactatacagtttagctcttgtactaaattagcgagggttgtgtataggcatcgtgggctgctcgaggccaatcttgcaaaaattataatgcctgaaatgcgtgggtagtgaatctgactttcttcattttagagtgtgttctgcacggttttagacatgcatgtgttagcatttgagtctatgcttccatctacataattaagctgtgatgcaactacatgtagttcctggaggtatattgtgcgattgtgtgggtggcctggtgagttttcacctgtctgatattatattggtctcaattatgtcatgtgtattcattctagctctagctttcgttaataaaagttcaatttggtcattggttagactcagtttgagcgcattacttgtagatgcagacagccctatatcccagtagttcagttctgtatcggtgagggatggctgttttttgtgttcgatccatgctgtaatataagaaaaaaaactggttagcaacataaacaatagcatagaatcaacaatccttcaatgacgaatagataattacccagaaggttgtgaggacagtcttcccgtggacatcctcggcaacgagtctgatcttactggataattgataattatgtttgtttgtcaattttcttcatgcatgctcttgcagtatcctttgtatgtgaatatgtgatctaaagtccccattgtttccaagagctgcatgatgttccctgtggcccaggccttgaactttaggatgccagtcacatgacctagtgtgtaattatatgagatctcttatgctcacacattgtcttctccaggaaccatcgtggtctgcgtcactactggggtgttc

SEQ ID NO: 13861 - DNA, 696 bp, Brachypodium distachyon
  Intron number 2 from transcript Bradi1g24130.1 (locus Brad i1g24130) derived from phytozome v7.0 (chr-ID Bd1; pos 193 81272 to 19381967)
gaggggctcgcgcacttccttggtgagcgtttcgctctggcttgtcgcgtaacaaccagcggtatgctggatgctgctgtttttgctgctgatagtcgctttccataatcggtactaatcatttagcatggtgctagtgatggaaatttaactgcacctgcgacctaaggactacgatttctctgtgccgtgatactgctctggttgtagttttaggactgttaggccacgaattgcatttttgctagcttgttacgaagattgttttagaccgggtgcttgttatagaatatcctgggatcttgaggtttgtgttcttttcggttgttcagtggtaaccgctattactagtgctgcattgatcatggtcttgaggtgtgtatgcttttgggttgttcagtatttaccgctagtgctgcactgatcatggcatatgactatgagtccatgtaacataacaaagcaaggagagagacaccaaatatctataggttgtaattcttttagtattaattcacaggcatgtactgtcatactgtatagtcagtataaagctcacagattttcttttttggcctgattgtactgacatttgaaaagtttcctagcaagtacattgcagtactaatttgtcagtaattttgtattgtttgattcactaatggagcaatgcatgcttctccttttacagagcat

SEQ ID NO: 13862 - DNA, 1032 bp, Brachypodium distachyon
  Intron number 3 from transcript Bradi1g33260.1 (locus Brad i1g33260) derived from phytozome v7.0 (chr-ID Bd1; pos 288 39490 to 28840521)
ccgcagccgtcgtcgtctacgacatcaccagcacggtgagcacgataattcgattagtgtggattgtatgtccagatgactagtatattaatttttccgataaaaggtgatttgtgttttagaaaaatagtctatgtactaatccaacgggtatgacgcgtcaacttatatttaaacattttggttaaaaatcagacaaattaataacgacaaacctcaaaaaaagatatagcgacaccctttatcaacgaggtatcactacttgtcgtatacatgtctcaactctgaagatgttaaaatgaggtatagcgacaccctttatcaacgaggtatgcgagaagactgtttcttctttaacagagaaacaacaaggttttggatattgtttgactgctgccaagaggagattctttaaatctagaactatttcctgagcctggtaataaaatacacaaaaattagtcgtgtggccagaaattatattgatccaaaacatccccaattgcattggttagaattttaggtaccaacctgacgaatgaagtcggatgatgtgtagcaggctattgtttgcttataaaccagatccatgataactaaagcccacatatcgttatattgcagcacaacataaatctacaggttcatatgtttgtgtggcttttgagtaataacaaacttctaactagagataatctaagtaagagacaagaagtgaaagataagacatgcctcttttgtactgaacctgaatcgattactcatcttttctttgaatgtgtagtggccagacttttatttctagaacttggttttgtgttgaaagcagttttgtctctgacgctgtaaactaaagcatctagttgcaccctatgactttgtgttaactaagaaattttgtccctgacgacgttaaccaagcccttttgtttcgaatggcgttataatcttcgtgttcgttaatttcgtcgattttttttttgcatgggcgtgtcaggattcgtacattcgagcaaagaagtggatagacga

SEQ ID NO: 13863 - DNA, 853 bp, Brachypodium distachyon
  Intron number 1 from transcript Bradi1g21550.2 (locus Brad i1g21550) derived from phytozome v7.0 (chr-ID Bd1; pos 173 54356 to 17355208)
ccctttccgcctcgcctcgttacgcagatccgcgggtaattatgctttcccatcttcaatctcttcgcggctagttatgctgttgcatcttcgatctgttcgcgcgccgatacgcatggttttagttcttcatttatcagccgtatgtataaatttcatctgaatttacgatgttttggtgtgatctggaggcgaaggagggcaattcaatgttttgtttcggcagatcttagaaatcggccgcctggggtgtagatgcatcgcgtgttttgtccctgagatccgatatggtattagactttgcaagactagttttccttcccttagatcagtccagagttttatattttctagctacttatgaatgtctagtgaaataaattagactattgcatgttcctgcgtcagtgaagttgatcactagcttgccatgcactgtataaccgcttctattctcaaaggatcgcgaacttggattatttgtgacttgcatgtttgtttatctatacctagttggtttacaatgcaccgcggacttgtgggagattcgtttgtagaactgtataattttgcctcggttacaaattgtttacaatgcaccgcagacttgtgggtgtatctgatttgtgcagcatgtcaattgttttgactcaccgaaaacaaggtttcttcgtagcaggatttagagttgtttggtgttactttcttttcttaccattgctcttaatatccttttgcagtttcgttgtttattgctcattgatcagctgataccatgatttggttttgtggctagttcttatgccattctcttctgtgcctatagatcacctgtgacattttttgaggcgcg

SEQ ID NO: 13864 - DNA, 556 bp, Brachypodium distachyon
  Intron number 5 from transcript Bradi1g09300.2 (locus Brad i1g09300) derived from phytozome v7.0 (chr-ID Bd1; pos 667 8588 to 6679143 reverse strand)
ggaggctttcaatttggacccagagaagtggggaggtaaaatcttgtgcagtctattattgttccttgttatcttgccttgtcatgttttgtccagttgcactaatgattttggagaatatttctgtatcaattaaaaattacttttttttctttcgttgtttcctgcttttggtgatgcaaatgagagaggtggaggaaacaaaatgttccgaataagagaaagtgttctgatccagaccaatcttgtaaatttccgaatgttgacaaagttttcatggtacttgatgggaaatagagtaatctaaaattgtctaatcattaagttcgtgactaaagttcactgtaggttcttaattccttaaagttcagattaggttcttaattctttaagatcatttggtaaattttaaccaatatgctagtcaattttaaagcctacatatggtagacaactgggattatacactactttgatatcttcaaaatttgagttgcattgccaccaactatgttcttggagtggtaacttcatgcaatttctacctatgcagtga

SEQ ID NO: 13865 - DNA, 870 bp, Brachypodium distachyon
  Intron number 1 from transcript Bradi1g32650.2 (locus Brad i1g32650) derived from phytozome v7.0 (chr-ID Bd1; pos 280 71788 to 28072657)
ccgacgtccagaggctccacctgactgccaggcaagtatatgacaccaccgacgatcgattgcctcatgagtttttcggacttcggtgatactacttccatcttgatttgatccgcggagtagggaagtgagctagcgttttagttcgtcgcccactttgggccatttattcggttagtttaatttgacgttttgattgagctacaccgacaatttgttttggggactaaattggtggttcttaatggaagaaaatgacactttgtttacgatttgggggttcgagtggtgacctgtagagctgttcctgtgaagtgtgagcggtgaaattggtaaggactgcgtaccagttatctctgcaaagctaaatcagacagacaataaaaatgttcggtcgacagatcaaagcgatcacggtggggcaatttatttttgggactaattggcgttgcttaatggaagaaaatgacattttgttcaagatttagtgacctgcagagctgttcttcgtgagcaatgaaacagagctgattgttgactgatcaggactgcgtaccagccaatctcgtctctgcaaaactaataaggagtaatgtctaatgaaagatatctcaaatttgttaaagtttggacatgacttagcgtatagatgcattcatggataatgattgctcgagaagatcaaagcgatcacgctgggactcgaacccagaatctcccgctccggaggcgagcgccttatccattaggccacgcgaccacttttgatttcggttacgtattaataaataaaattaatattgactgaccattcactctttcgtgccggcggcagcttggagacgaacacacggctgcaggtcagaatca

SEQ ID NO: 13866 - DNA, 855 bp, Brachypodium distachyon
  Intron number 3 from transcript Bradi1g13950.1 (locus Brad i1g13950) derived from phytozome v7.0 (chr-ID Bd1; pos 108 10190 to 10811044)
gaggtatgtagttcatgtcttcatgacgtgttttaaataactcaagattttttttatttctaaacataaacagcaagcagtgaccagatgttgctaatgttctttctacactcttagctcttcaagaagaaatgaattttgtgttctagagtgtgatagaagtccctctgccatattggatcgtaatagaataggtttcaaggtcaagctcccaccacacactagaaacaagactcagtagagatttggtggcgctgctatcttgccagtgtatgaaggacgtgaaaacatagttatttccagtgccgaggtgcttctgtttgcaatagtcttatttgatttggattctttttccaacaattaaagcatctaatttcaaatcttctcaatgctatattgaagttgctacttcattttggatgatacacaacaatttatcttttgagggaatacaaggcaaaatatgacatgtcatctccaaaaacatcctaataaatatgtcttatcatattcatcttcatgttataaaacaagcgaaaattgtgctgttaatatttgtttgcaactaaaaattttaaacagtaaaaatactcctaataaaggtgtgaggtgcctgaaactcctggaggcttttgatacactcttctgatgccatacccccatgctagagtgcaaaacttatcagtctggtccaggaatcagtgttactttggaccattgtttattattagatcattatggtagtttcactaccaatctgccattgaattgtgtgtattgtatcgtttggttttgtaatgccataatgataccctttcaggagaagaagctggttgccgagatcaagaagactgc

SEQ ID NO: 13867 - DNA, 656 bp, Brachypodium distachyon
  Intron number 1 from transcript Bradi1g31430.1 (locus Brad i1g31430) derived from phytozome v7.0 (chr-ID Bd1; pos 269 26285 to 26926940 reverse strand)
tgggcctccggttcatagcaagattgctccagattgtaagccgattagatttgcttatctgaccataaaatcttactacttcagtttacagcaagatcagtttttccttttcctgttatgcgtagcatgttattaggtctccagctcagatcttctcgtcacaaaacaaaagcatactcgcaattttttgaattataatccacccaatttgcatttcttctgaaagcttggatttttgggttagggccacacaggaacaccatcaaatagattaaattgggaggagatcccaagagaaatatgttgttcagttatcaaataactatacttggccggctataattgggtggagctccactggaatgttctgtttgcattaaacaaatttgtttagatgaacggtttgaacaaatctgaggatactcaaccgtttttgcagaggatcaatactcatattgaagtatcttttgtcccatgctgaagcaaactgcagttttagggcattagcgttcttgctctgaattagttggattaacgtggatccaacttggatctgtctatatgtagagaaaatgccagcttcgtcttgtattcatgcttcccaattcccttagtgcatgtctgtacttttccataaccataatgttgtgttgcag

SEQ ID NO: 13868 - DNA, 741 bp, Brachypodium distachyon
  Intron number 3 from transcript Bradi1g26680.1 (locus Brad i1g26680) derived from phytozome v7.0 (chr-ID Bd1; pos 217 06670 to 21707410)
ggtaagcgttgggggttctatttctaaaatttatctccgactcaattatgataacagtttgattgtgttctgtggctaatgaaagactgcctattcaagctcgatttattgctgaattctatctcttgttccgtgtttggcttatggaatgtatgcctgctttggtttgtttgtccagtgtggctgcttgtcctgatgccatgttggagtcgccgccaacggtagaggaggagaaagcgtcgtccaagtctttcgagtttcccctgtcgaaagacttggttgccaaatgtgggttgttaactagcatttttttttcttggatgagtgccggttgggaattgttgttcctcagttctgatcaatattgccgtggttttagcagctgatggtgggtctagcacacctaatattcggaggcagcctccacctgtggagattgtcgtcactgctccgcctgcccgtgtcaagtcaacagtgaagaccgaagcgtgcactccaaaggttcaggctaacgcatccaagggaggtttgacagactcaaagatcatgcaaaccgtctgatctgaagcagtcttcgctgagagtcaagaaaaagtgtgatcaaagtaagaaaacatatactgacccgtagaaaacatatacttgcacctgttgtccaatctttgatatgcttttattaatcaagttttgggttgttggtacttaggggtgcttgtgattcggtggccagaaaggcatcta

SEQ ID NO: 13869 - DNA, 987 bp, Brachypodium distachyon
  Intron number 1 from transcript Bradi1g13150.1 (locus Brad i1g13150) derived from phytozome v7.0 (chr-ID Bd1; pos 996 6008 to 9966994)
cacaccaacttcgtgcagcaggtgagcctagccctccccgtttgagggaaaattcgcttgcctagccttctgcccttttggagtatgcgattaggacagggcttatgttgaattcgtgctaaccacggtgatttggtttcggggcagtgctattgcgttcattggcggagctagccatttaattgagcctgggcaaattgtatgctcttcatttaggccagagtttgcccaaataacctgttgattaaccccttgatttaaccaccatgcttaccttgttttaaagggagtacaactgaggagcccgggcggggtagccgggcggtggctccgcccctgattgcgttgccaattcgatgtaaaattgggcaaaacaagctaacactgaggctgttgacgatttcgtggcaaagatattaggagctaatttgtttccgacaaaaatctatgtaaaattgttgccggatgagtccagtgttagttactgattaagatgcttttataacttgaacatcaacttatgtcctgctcctgcttcattttagttaccctgaatatcatgcattctgacctactacagcagaaaagctcaaatttacttttatttttgccattcatcaattcgctagtttggtggtttcatgtctggactgccttttgctttctttccatcttttgcattcttcataacaatgttttccaaacttgtgtaccttggtgcttatgtttcgtggtacaatttaagcatacctaaaggagaaaatttcaagtactgttctattagttaagggcaaggtttaaaattgcggttttcttggcttagcgagaaggatatcaaaccgttctatttggtgctcagtctctaatatttcgtttttttaattgtttggaccatagttgtttagtctgcatgtgtagcctctcatctttgagttgtctttttcatgcgaagcccggctgctcgagtgagttttctgggatcgaatt

SEQ ID NO: 13870 - DNA, 472 bp, Brachypodium distachyon
  Intron number 1 from transcript Bradi1g14850.1 (locus Brad i1g14850) derived from phytozome v7.0 (chr-ID Bd1; pos 118 02752 to 11803223)
cgctcccgcacctcagcattaaggacactcccatcgtaagtgcttcttcttcttcgtgctactgtccttttcgccctctcttagatttggtccagtcgtgtgtgttcgtcgaaatgcccgagtcaaattttttcttcgatgtccatgtctgggttctcttaatcttgaattcatggtcctgcatacagtaaatacttggtagtcaggattacggtgctgtaaaaaataatccctcttattttgtgtctactgtgctgtccaatacgtatgtggtctactagtaatcttgtttccttaggataaaggagcgtaaaattttgtcgccgaggagtttatttgattctgggatgtcgtatatgtgcagtaaaacgtggctatttactgttgttaagaggtgtgtaattttttttgttcttattgcgcttttacatgtacaggagacctcgtcggcgcagtacattctgcagcagta

SEQ ID NO: 13871 - DNA, 916 bp, Brachypodium distachyon
  Intron number 1 from transcript Bradi1g14110.1 (locus Brad i1g14110) derived from phytozome v7.0 (chr-ID Bd1; pos 110 20243 to 11021158)
gagcggatcctggcgcagtcggtgagccctgccttccttccgttccgtttcggttcctcctcctctgtttccctccttcctctctcgaaaatccaaaccttctgttaaaaactcacgatccgcttacaaaattgttttgttagacactccagttcagttggtaaccggagagttctgtgtggcctgggggcatcttggcctcgctctttttgttttttcttcaacgattaacaaaaaggcatgtggtttggtcgttttttattggggatttcgattccccaatttcattttcccatctgcattctacggagaatcgtttcgtaatttttcagagacctttctgcagggggctggttactctgttatgtgcgtttctctgttgtgagttcgtggtttctttctctcccagtctcctgtgaaccccgtcagaggcttcttggcgtacgttccagtacaaaatccagcctctttgattagaagtaattaattgtccttaattgatcttattaccctcacgagtcggtttccttctctgatcgtgctcaaactcattttcttcgtttcccctttgaccccatgtttcgacaaggagaaacggccaaaggcgagatttttctctcaggggcaattagaagaggaaaaatgtaatcctcatctttttctatctaaccacccacttcggtcctagtagctttttttctactcgcttaatgtccagggcaaacatttatcaccaaacaccaatttctctcttcttgaaattattcaattttttgggtttatcatggaaaggaaaccaaagctggatgtttttgttttacccttttctcagttatcacaagttaaagtaaatcgatcctgtgttgcaattttggctgcaggaagtggcgcccctcacatccggccggctctcgca

SEQ ID NO: 13872 - DNA, 1024 bp, Brachypodium distachyon
  Intron number 1 from transcript Bradi1g13340.2 (locus Brad i1g13340) derived from phytozome v7.0 (chr-ID Bd1; pos 101 07555 to 10108578 reverse strand)
ccgacgacgtaagaccaacccctgaccacaatcaccccctgcctctttcgctgggagcttgaactcttgagagatgtggtcgtgttgttcactttgttcatcatacagcatgtgatttgtttgccattttaaaagcttgaaatcttgataaggttgctggagttttgatgtaatttttctcaattttattctatattttgagaaaaagactggagacaagagattcttgtaaggtgcttccacattatcataaatgtttttgagaatgatttcgcacagtttttggttaatttctaagaatgtttcaggatgtgtgtgtgatgtgtgatacaatttgtactgacattaacagaaaacgagacaactaaatccaggggcattatagatttctcctaatcaaatgaggcaataagcagcaatcctagaaactgaaaagaaggcattagaatagcttctcaggcctatcagggcagcttcagctgaatttctgagggaagctgcagctgaaaagaagggggcctgtaacatgtggttgtctgctgaacgtggagactcacacatggtgtgctagtaggacattaagcttgttattattgagtcgtatgatggcattgtataacatgagggcaaacgttttgactaggatgtgcattgcatcatatagtataccttcttaacattttgactatgtcactatttgagtagtgcctcttagtatgagttaaatatttcaactgtgttgtggagagtgttgtggagatactaaactttgttgctacagccattctgttccttttcccctgttcaaagtgaaatttggttagaaatcttcaacctgtttgtctcttagaatattatactgttgtatgacagaagaataggacttctgcatcagaatttctgtggcagtttttttcaatttgtactgtaattctgtaagcaactaagtgcatattatttcatggggtgttatggcacaatgtgatgcattttctttggcatgtagtcgtcaacctgaggtgct

SEQ ID NO: 13873 - DNA, 945 bp, Brachypodium distachyon
  Intron number 2 from transcript Bradi1g13290.2 (locus Brad i1g13290) derived from phytozome v7.0 (chr-ID Bd1; pos 100 70054 to 10070998 reverse strand)
acaaggctgtctctgaatataaggaggcaaaggcggtatgttgcttcaaccacttcattgtcttggccatttttagcttaattcatcatctcattttcatggtagtttgcttactgtatggtttagtagtagaaaaaatgttctgacctgtgctattatttatgtgcttgccatttaaatccgactccacatacaaagctagtttagtagttcttgatttactctctacgtcttaagttctccttcgtttgatgtttttggtttaaaatagagcttttagcgacatttgcaactagtgtgtcatcatctcgtagttgactatccatatgccaaattgaagattacaattaaacgataactagtgattttgcatgatatatttgaagtgatagtcctggaatgaacattttttgttatcatgcaaagaattatgcattatgatccgcacacttgataaaactttagttcaaggaccttaaatttgaatttaattacttgttatcagaaagcaccttttgcagcaatactgtaaattcttaatgggatggattatgacaagtttttttttatttcattatctgggagcttcggttgcttaattgccgattaatttgtcttaattagactccacattgtactacctcattctgtgtttcatagtagtagcgatgacacactagaaccctccctagatttatactgtgatggtaatgtttaccctgtaagaaaagtggattattagactccacattgtactacctcattctgtgtttcatagtagtagcgatgacacactagaaccctccctagatttatactgtgatggtaatgtttaccctgtaagaaaagtggattgccatgcctcttctggaaatgatgcctgcctgcttacatattaccttccatgcagctcggtgttgacactgttccagtgctggttggacc

SEQ ID NO: 13874 - DNA, 859 bp, Brachypodium distachyon
  Intron number 3 from transcript Bradi1g18760.2 (locus Brad i1g18760) derived from phytozome v7.0 (chr-ID Bd1; pos 150 22411 to 15023269)
ctaccgtgactggtacatatatgctctcttctctctgcagtacttgtattctctagcaaaattcaatatcagccaacattgccttttgttcttgtgacaataaagcacttttgtgtgatcaagatgaaatgttagaccctcagtaatggaacacatgagattatacttaaccaccatatgaaaatgcttggattcttatgtaagctggtttcttgtcaacctatagttttattacagtcaaactgaaaataaacatcagcatgttcatctgactacctactgggaaatgattgggtccttttttgtgctggcatgaactcaaagttgctataatttaacctcatttgagaaaaggcataatggtttgattagattatgtcatgacatctacttccttcttgcatttgggttagatttcttttctctgaatctgaagcaaaactaatccttgaggaattcaagtgtgagatcatttcttactgttatggaaagtttatcctggattagtaacacctccttcactgtattaagagattcagcactacgttgatagttggtagtaatcctgatttaaggttttctctgatactgcaacagtggtagctcgagcagtcatttctgtacctgcttaacctggtcattgagtgtgtgttttagatgaaagatacttctgtttatttggttctgaacatgtcattgcagcctggccacaaagtttgagtcttttagtgttacagtctgtcagtcaactgtgtacatgttccgatgacctctaagattcttctatttatatttctattgttctaagtgtggcctcactgcaggagatcaagatcccagtcctgtccattctgccgcg

SEQ ID NO: 13875 - DNA, 658 bp, Brachypodium distachyon
  Intron number 3 from transcript Bradi1g31680.3 (locus Brad i1g31680) derived from phytozome v7.0 (chr-ID Bd1; pos 271 43701 to 27144358 reverse strand)
ttgttggccgagatattcacagtgacgcggtaatagtttgcttatgtccttcataggtttggattggtgttctatctaaacttatctgctttatcagggatttgtcaagtaaatctgtgtactctattttcaaagttatgtatgcacatttaaatggtctgtttctcaactgtcgaatgtgtcaatgacttaaatgactgatattggtgcccctgccataaaaaacttatgctttcattaaggtgtttactctaaggtagcaaacgggcaatggctaaacagttgctacatacgacatgacatgacatagtagtttgcttatattgatttttattgggaacataacttgatctgttgcttgcatgaaagagttttagtgtaattcccaattttttgtggcgtgctatgtcggatacattatatgccaacaaaatggggtttttcgacaaaagtgttgtgttatttgtatcctcagggtcaatactagtatcatgaggtccagctcttgtaagaacactactagcagtttgaattgaggggcttcttatatatcacatagttttttgtgggtttctcttctaactgattattctaatgatttgtgttgcatgttctggatgttaaatttgaataatgtatgtcttgctatgcaggtagt

SEQ ID NO: 13876 - DNA, 980 bp, Brachypodium distachyon
  Intron number 1 from transcript Bradi1g17400.1 (locus Brad i1g17400) derived from phytozome v7.0 (chr-ID Bd1; pos 139 34354 to 13935333)
cctgctgcagtcaaaaggaggtagttctcaagctctgctgcagcccctcagcccatgttcctttaccaggtgtgccccctgcttctcaacatatgcactggacctaaactgcagcattttttttatttcggttggtgtctatgttgtgtgtgtggttgcagataacatggaatcctagagaatgctgattgaccacagatgttgccatttcacttcagcactgagagaggcccagaaaatgcagtggagacgctggaatttggtttcctgaacatcatgtaaagatgacactcaaggaatctaagagaagaggccctgcaagttctcaggcaatagattgctgcagaccacagacaacccaaaagttgccatgaggaggaatgaggtgctccccctagtttctctaaagaaaagatcggcgcctgctttcgggctttcgcgctgctcacgcgccacgtaatttcagccaaagttggcacaaatgtatgctgctcacacccggagagattgttattgtagctgcaaaggaaaagatcagcgaggaggaccatagggggtccatggggtaccaggaaggaataaggatcatatctcttttcagttgctggaagatagggtggtcaggctttgagtgtatttgcttgctgcaatgattctacattcccccctctgccttataatgagagactccggttaagatcgatctctcgtgcaaggagatagaggtagttgagtttcaggggggcaaggttgtctcactcctgaaggaccattaacccagtctttggttactagaaatagaggcactggtaaagctgcaaaggatcttatcagtcaggaacaaactgaacatttcagtacacagcaggacctgaacaggtatggactgcacttcctgctccttggtgtctttgtactaaggaagagaaacctttcatgaacctttgatgtgcattcttacatgacatgtttgatggcag

SEQ ID NO: 13877 - DNA, 877 bp, Brachypodium distachyon
  Intron number 1 from transcript Bradi1g28280.1 (locus Brad i1g28280) derived from phytozome v7.0 (chr-ID Bd1; pos 234 88119 to 23488995 reverse strand)
ctggcccccacatcaggtgagctcgtttaccccttccattgaaccccactcgctttgcggtgctctgcttgcctcgcctcttgctttttgggtatgatagaggccgtacagagtgaagaaatggattgttctacggtcttagaagctttcttgtagctggaaaccgttttggtttatctgctagcatcttttcagctcttcttgttccatactgcaattgagtagggaagaagaaagagctggccacaatcgatgggtttcgtgtgtgagccacacttaaggcgtatttagataaatcttggcacaactagttctgcatggtgccctaccggattctagggtgctctggagtggaaggaagcagcttttgcaaagtatttcgtcttatctgttactctctctgttctaaatatctgtacatttggggtcgtctttaagtcaaattttgtcaacttgaccgactttgtaggaaaatgcacaaacatatgcaacaccaaactagtattattaggactatttaagtatattttcatcttgtatttatttcgtataacatatgttggtgcttttatctatatgaacggtcagaagtgatgaagtttgacttagaacaaccccaaatgtacatatatttagaaacggagggagtatgtaataatgtgctgtggagtttcatcgggattagcaacttttttggggaatctatggtgtaagtgatctatcactttgatagggctacacggtaggcgttcaaatcttatggcaatctttatgcgattcagcttcatagtaacctgctgatatgtcatgtacccatggtatttgactagtattttgcttgtttttgcgaacagctccgaactacaattcaacgacg

SEQ ID NO: 13878 - DNA, 813 bp, Brachypodium distachyon
  Intron number 1 from transcript Bradi1g06430.1 (locus Brad i1g06430) derived from phytozome v7.0 (chr-ID Bd1; pos 433 1723 to 4332535 reverse strand)
ctcaaggagaaccgggaggccttctccaggatcctgtaagcttaccttatctcacgttaattttcttgatttttcaataaagtaagttgtattagcctttgaatagttgcataatattgctttgtttcttttcgaaacggggttacatatatttaaggctgcgaagaggttatcacattagggtacccacgaaccctttttagttcgaacagatgaaccagtttgcaaaaagcgatgtgattttgaaatttttgttcatttggtcgaactaagtagtgtcggagggtacctctacatatattgctttcaggtgtatcttttttcgtgattacaagggagatgaacacatgcgcacgtatcccacacgaccgtgttctccgttttgctctcatgtgcttcaaacgtcactttttgagaaatgataaaaattcctctaaagttggtgaacctacaaatatggttttatgattttagagattataaaatttagtagccggtcctggatgttgttccatttgtcatggctgcttttcagttttcagagctgtattcagaaattcaatgcaaaaggaaagaaatcggttcacaagtccagtagtaaaatcgcaacaaaatgaatcctttaaagagctctagctagctaatatctatctactacctctgatactatatttttgttgttgttttagtacaaatttaaactaaaacaacgacaagaatttagaaacgggattacctaacaattccaagatcactaactgtaatatattctgcccaggttccgccctcgcatactgatcgacgttgccaata

SEQ ID NO: 13879 - DNA, 559 bp, Brachypodium distachyon
  Intron number 1 from transcript Bradi1g14950.1 (locus Brad i1g14950) derived from phytozome v7.0 (chr-ID Bd1; pos 119 38589 to 11939147)
tcctcaagcggccaagaacctggaatcgaggataggtgggttttcttctgtgtttcttttctttcttttatggaggagacgggattttttttgtatgaaggaggcgggttttcaagggtccgcacagatttttagagttattgattgttcgctccgtgttaaagatgctagctttcgataataatgtggcggaaccctagctgctttcttggtggttgaagtttgaaattttcaggattctattcttttacctccaaacggttccatttctgcggttcttgttttttccccacgagtagcatctatcaagtttttgtcttccgtttgtaatccaatcaaatagtttccattcagttataagcggaatctacaagctcaaagattttaggtaaaaattccacccattctccttttctgccgccatagaagaacccctttatagggaataaaaataacccttttagaagccagatttatgaaccagtatgtagcatttcaattcttgctggtatcatcttgttatgtcaattcttacttaaattcttggcactatccagac

SEQ ID NO: 13880 - DNA, 959 bp, Brachypodium distachyon
  Intron number 2 from transcript Bradi1g13650.3 (locus Brad i1g13650) derived from phytozome v7.0 (chr-ID Bd1; pos 104 96942 to 10497900)
ccgagagcagtgaaactgtaagtcatggcattcaccttgggtttgtatcatgtaattgtactgattttctttggacattattttgatcgacctaactatactctgaagtatgtaactatgattattttgttcgccttttgtttctgttttcttctcttgcgagcaaagcttgataggtgcatatgcttcttatttctgtctttttatgtgggagttggaaacatgacaacccttaaagaatgagcaaaattacagaagtggatggttcaccaaatttggtttgccggatgccacacaagtgctgttgttgacatgtcttggtcataggcttgctgctcaacaactctgttccactgtcagtagctccaatgtggagaaacaatgttgacattatgtggttaatatctgcatattaaatgctctacactaatttagcaattatatgccattactgccagaatttatgtgcttcaattccctcacctgcaaaacaaaataaaagcatcttggacctaagttttttgttgagcacttaatgtgatgtttaggtttttaatgtcttaattaactggtctgtcagtgatgggtacctgtttgatttatgcaccactagatgattgtattgctttactcttttaatttcgggcaaccttattaatattacttctcaaggcgttagtatgtgaactttactattgtaaaagatatcatatagttgaaccttaagtttgagtatgatatgcattcgagtctgtcatgcagctctgcaagatggtgttactttgtaagcatgaaatcgtaactagcatagtacattattagttttttttaggacatcttactacttgactattagttcgctgatgtacttcatatattggctcttccatcctgacaattttatttttttcataaatattgtagagctctgctgttcgacagctacacaaacgaaagca

SEQ ID NO: 13881 - DNA, 359 bp, Brachypodium distachyon
  Intron number 4 from transcript Bradi1g35000.1 (locus Brad i1g35000) derived from phytozome v7.0 (chr-ID Bd1; pos 305 30064 to 30530422 reverse strand)
tcgacgctgctctcaaggaggttcgccagaggaaggcatgcacccacaaacaaccctagctagctcatcgattttcccttaattagttcgatttctatagctagatctgtctgattccttgacgacctatctgccatccagatccgtatgtatatttcatgcttcttcatagatctatttatgttctttttctcctattttcaaacgaaatctatatatgtgtattcttcgtctctaagagttatcaatctgcgtgattgactttattacttttaaagaattggctgtgtatgtcttaatcaagataatatatcttcgtatatattgattcattcttccggttttgattttgcagtatc

SEQ ID NO: 13882 - DNA, 368 bp, Brachypodium distachyon
  Intron number 2 from transcript Bradi1g08890.1 (locus Brad i1g08890) derived from phytozome v7.0 (chr-ID Bd1; pos 628 7854 to 6288221)
aagtcttccgctgattggtggtgatcccctaaattggtccagcactagcttcagatttttggacacattttttgctcccgttttacaccgtttcttcagaagtaatttccccttcactttacagcaatcttgggtaggtttctgattttgatttctcgcaagtcttcgatatttgcttcagaaaggtcatttacgggtttaatctgtttattgaagggcgacattttttaagaaaacatcgccctatttagccggttcttggttgctggttcgatcagcggtactctggaatccattgacttggttgtttcgcttaaccatgtatccgttcagcggcattgtgaaagaggaggaattcgacttcgcgg

SEQ ID NO: 13883 - DNA, 724 bp, Brachypodium distachyon
  Intron number 1 from transcript Bradi1g19360.1 (locus Brad i1g19360) derived from phytozome v7.0 (chr-ID Bd1; pos 154 79868 to 15480591 reverse strand)
ggagctactggtatgtatcatgctaattgatggtggcagtcgggcacttttcttatatgtagagcgatcttctaaattttttggcaaagatttcgaacttgtggcacaaaagcacaataacagtgtgtagacatgttaggacaattaaatttacttatcggtggcgtgtgacgacgcacgggcatttagctagtgctgtttaaagttttcaaggtgtaacttcgactactagctggtttctgttgtagcatatgcttggtattcaagaaaattatattgttctttataaatatcttttaaacaaaactatgcatataattataaaattcaaatccgcaaaatgcaaaaacgacgccgacagtcaaaagtttcaaagttgagcccaaggtatgtccaaaactatttaaattttgtgaaactgatcgaaggagaccacttcttaactcttaaacctggtactcaacgtaggggtttctaaaagcatttacacattttggtgtgaataaacagggaaaatttacaatttagcttaattagtccagcaaactaatcagttttatatactagtataatttcttggaaaatgttttatagcgtggacatgcatatggttcagggagaaggtaaatcccaagggagaagggcttcatcctgctccaaggggacggctcatggaacacggccatcagcttcaacggccacgccccggcccccaacggcaccg

SEQ ID NO: 13884 - DNA, 924 bp, Brachypodium distachyon
  Intron number 1 from transcript Bradi1g13890.1 (locus Brad i1g13890) derived from phytozome v7.0 (chr-ID Bd1; pos 107 37385 to 10738308)
ctttcagaaggcagggtcaggcgtatagttcttccttacttatcaagttcttccctattcatattcatcccaagttctccgcgttagtgaaatttggatatacatgcccccccctgtccgggataaagaattgggtgctgttgtcttcttcctgctgttcttttgctagccgaaacctgaaagaattaggggagaaactaggcgaagattatgtggatgttgttgtgtttctggccaaattggcaccaatttggcgttctgtctggaagtgtcattattcagaagtcaactaggttggctggacggcacttctgcactgtacacgcgctttccttccgtgattcatccgttgcagttgttcttttctgtaaatatatagccattttcaaagaaaatttagggacattaatttcgaatgttatgccagtcgcaaagtaaataaatgaatttcgcatatttctcaagaaaccatggaatacacctaacttggttcctcatagcacatgctagatgcattttcaccattaaagcatgtcgagatgttatttacttattgtatccacaaagatttaatttgattgcagttgactgcttctgcaattaggttgtggtggggataccttggagcttttcatggatccacatcacattagctggcagtgggatgctatcgctcctcattatgtaggaagatgtaaccatcatgtaattatttagtagggagcaggtttatatttgctttcagtggaaacttaagcttcccatgtttcatgaaatcaatctcattcagcatcactgttcgtgaccttgatggacttgtattttaaatctgctcagtcaaattttgtattttaatatctccagatgttgacttttcttctgcttttgaaccacctaggttctgcacaactgggctacccagtg

SEQ ID NO: 13885 - DNA, 925 bp, Brachypodium distachyon
  Intron number 1 from transcript Bradi1g12980.1 (locus Brad i1g12980) derived from phytozome v7.0 (chr-ID Bd1; pos 984 1058 to 9841982)
tagacatctttaacaagggtgagtgtttcatctgtttctcgtgctccactgtttgtgcatctttggtttgtgttagcatctcatagcctccttttctcccaagaaactataagaaataaaagcataagtgattgaagcaattcaagattttcctactgatgttcatatgaattgtcgatcagcattacaggatagggttggtttactcttgtttttgtatagagctagtagtctttgaatgatcactttgttatcacaatttagttaaagtgcttgtagcattaacattgactagtttcgaagaaataattgctgctatagtattcaatgttgcatcaggtaatacctactacaaattaccgtctattatttttcgttaaaaggggtatcatctggtgtcagtgacgttaccaaaggtacaatggcacagggcttatcatgggtatgccccaaggcacataatggggatgaacaccatcatgcagataaccgggcgaagtttttttgttcgaatgagggtagaacataggcgagggtggcgacattccgggaggatactaaggttctcattgcttaattgatatggatggaccagcccatttaggtttatatagattggactcctgccatgcagacagtaactagcctaatgtaaccaagttctaattaataggcactattctaatactacgggcgattcactaacttatgggctattcacatattgtaatgctggctgccccttaaccctatccatcccactccctatcaaggtgtctcagtaacttggtcagaaaatgctatttttgatggaatgtaaatccttagaatgctctgtttatcactcagcatgaggtattgctaccatctgtggattaacatcttaaacttgtttcagttattggtttctatatacgttttgaag

SEQ ID NO: 13886 - DNA, 766 bp, Brachypodium distachyon
  Intron number 1 from transcript Bradi1g11940.1 (locus Brad i1g11940) derived from phytozome v7.0 (chr-ID Bd1; pos 887 0934 to 8871699 reverse strand)
tgctcttcaactcgtttcaagagttagagtgcgaggtacgtaagtgtcggccgccggttttgagtctagcttccggacacaaataaatgttgtttggatatgaaagtgtattgcgggaaccgcttacattcatacatgcatttggtcctataccgtagagttcacccattccgaagttcccaagaagagtgaaaaatttcacagtacatacgttactctacatgcatgcttgtttcgtttcgaaatacttgaggctttgatcatgaatacggtttttgagatgtaattttggacatttgtttgatatatctgaaatagtttcaagatagagctagaaactgattgactaattttttatggcaatcttttttagaataatttttttatggcaatgtagtgacgttacttttgtgttaccgtcatagaatatttttatacatatatagtaaaagttaattaaatacatacttttatagtcatttattttgcagaatctgcacgtggaaattttcatagtaatttgctgaaaatttgcacgtggaaattttcacattaatttgctaccgaacaaggcagattattgtagaacgttctagtgtttttttattttaacatgtactcgcatcgacttcaaagagttgtaagcggatgggcctaggtgcagatcgaaaggcttttacaccagcaaatatcaggcctataccgcgttcaccatttgtttttgctcacaggtcttggctgggctggctagcaacttcaaggcccg

SEQ ID NO: 13887 - DNA, 603 bp, Brachypodium distachyon
  Intron number 2 from transcript Bradi1g04950.2 (locus Brad i1g04950) derived from phytozome v7.0 (chr-ID Bd1; pos 327 8705 to 3279307)
ctcaggtcagatcactgctcacgcttgatcccacgcctctttgcagtcgttggttaatccacgcagggttaggtttatgcgccccttgttgtgttctctcggatctgtcactgactaggtttgcggcgaacataaaatttgtacgcgatgcgctttttttgcttagatcgatataggagaagatgcattgaaggatttatagactgtctgcttagatgtggtgatcactttactgcactgctgtaatctagaaatgtgctcacttcggtattagtagtaacatgatttttgtatgatgtgttatgtacttggctagttccacgcaagtgtagtggtattgtcagttttgcatgattttgcagcagaaacattcaaacctgccctttaggttgtcccgtttagattgaaacagagatactagtatataagtagatatttgtgtaggtttgtacatttttctggctgggtatagtttgatttgttcacatttctgtagtacacttccaataatattttttacctttagttcaacttgttagtgataaactaatactggtttcgcctacaggacaaggagctggtgcagcttaagcgtgaggcccg

SEQ ID NO: 13888 - DNA, 700 bp, Brachypodium distachyon
  Intron number 2 from transcript Bradi1g13220.2 (locus Brad i1g13220) derived from phytozome v7.0 (chr-ID Bd1; pos 100 22056 to 10022755 reverse strand)
cagaatataatccaaaggtatgacaattgtccagtttatccttgtgatcctattatcacttggaagggtattttttgcatgtattaatgcatgcccagtttatttttggtgccatgtagtaacatatatgagctgaacattcatttggattttctatgctacttaggataatacttagatagtatcttcaatcatatctagtttttctgctaggtggccaatgggtgatctgctatttgagctgagagcagtactgaaatttcactaatgccattttgagcaactctgtaaatggcgccaggtgttctagttttatagggtaaatctgaggaaagatagtgaagatgcaccaccagcttttcccataaataagaacagactctatactgtctgcagttcagcaaatatttaccgttggacttctaattagtctggaactaacaagataagcttgactgtactgcaagtctgtttaactaaatataattttgtaaatcaaatgttggctattgttgccctccaataaggcatatggagaaaatgaagtaaacagagactatacattttactatgcagcactttgattactctgctttctcgctggtactatgttttatgtaagttgttgttttgtcctatgtatattttatgatttagtttgctaactcttcgcttcatgcagcgtttcgctgcagttatc

SEQ ID NO: 13889 - DNA, 897 bp, Brachypodium distachyon
  Intron number 1 from transcript Bradi1g13220.2 (locus Brad i1g13220) derived from phytozome v7.0 (chr-ID Bd1; pos 100 22792 to 10023688 reverse strand)
tccaagcacccctccggcatcatccccacgctccagtaagtcccggatctgttgctggaagagaaagatccggtcttgggccgcgagctggcttagtcacctttgtgttagtccgttggcctggattagtttagatctttgggtatgactgcgataattagtcaaatcacttgcagcataatctcatgcagcatcagatgtgccccaaatactggatctggatccctaaaacctcatgaagagggctaagggtgtgtttggtctggcccaaaccaaccataccgatctttttgggtaatacaggaaaatttggccttgtttgcataggtgcgattttttgcatgttggtcaatacttggccaaacttaggcaaccaaaaccttcgtcagggtgggtttgggtaccaaaagcgtgagcttgtgtgacgatggagttatctcaagatgatgggattatatctgcacgcgatattatggtgctcgtgggattaggtgtcatgagttaactcatatattgtgcgtcgaggtgatatttgattaatactttatattcctctacgagcaaagcaggttaataatccatttggagttttaactcttggtgtgacttcagtatttggaagtttacgtggtcaagaaagcaaaagtcaatattaatgttatttaggtgttgcatgctatctgatcgatcgctgcagacttatttcatgtgtacttgtgggtgactgatgtgcgttgacaagtgaggaatggttgttgccctgttggattgtttatgttatgctagtttttatttctttgccattcacagtaagaaaattgaattgttttctggtgtatcctcctgtttgttttgatgacaggaatatcgtgtcaacggtcaatttggattgtaaat

SEQ ID NO: 13890 - DNA, 410 bp, Brachypodium distachyon
  Intron number 3 from transcript Bradi1g14360.1 (locus Brad i1g14360) derived from phytozome v7.0 (chr-ID Bd1; pos 113 05902 to 11306311 reverse strand)
gaggctattcagctcagcacacgaagtcatacgtactgctcaattctagccttttcttcttgatgcaaataactcacagtaaaatgcacatttataaaaatacatagaagtaaataatgattcttcaaattttgattctcactgtgatatattatcatctactcatgcactttcctgtttgtgtatcctctcaatttaagttgctcttttttgtgataaatcatatgggttaaaaaaggctgggcaaatttaagtttgcaagctgtaaagtgacttatttcattttatataaatcaggatccacaggttggtaattgattccaagataaaaatgagaagcactggatgttgctttacttccctgttgctaatactgtcctaattactgtagggtacgcctgacagtgaca

SEQ ID NO: 13891 - DNA, 772 bp, Brachypodium distachyon
  Intron number 3 from transcript Bradi1g20360.1 (locus Brad i1g20360) derived from phytozome v7.0 (chr-ID Bd1; pos 163 17585 to 16318356 reverse strand)
tatatattccaagggattactatactcggtaagactatctatctggactattgttagttgcctctacatctggagctacaagcattttattaatctagtggcagttttatagttgttatttgagctgggtaggatagcataaattgctttagccctatgataatgttacatacagaaccactcattgttatataatgcactttgtttctcaagtacaaaatagtaaagtgcactttggagggtagtttttctctgtaaggtagttgtttgcgctctagttttattggcagaattagatacttctgtcaatctgttgaaattaacagtggaaataattttttgaagacaagtcttaagagtacccttgaagagaagggaagcatagagaagttgcaagttaagtaatgtgctgttaaagattattgtggaagagaaaggaagaaatagatttgcaagttaagggatgtgcaagtaaggttactgttgaagagaacagaagatatagttacagatttaagagttaagaagtgatgaagagtttgaagtccgtattagaactgtggacagtgcaaggtcagcagccgattgactacattgttaatttgtctgtgtttgcagtctttgagaatttgactctgctttggttgctctatattcggaagagcttctgttatattgccatggaccagaggctttatcctttttgaaggagagatgatttattttcttatttacagggagccgcgaggatttggctttgtccagtactttg

SEQ ID NO: 13892 - DNA, 849 bp, Brachypodium distachyon
  Intron number 1 from transcript Bradi1g14240.1 (locus Brad i1g14240) derived from phytozome v7.0 (chr-ID Bd1; pos 111 36357 to 11137205)
gtcacctctgaccccgagaagccgcgcgcacccaagtacgtttctcgtccgtaaatcctcgctaatttgcagtctgaactcgcttaatctatgtacgttatctccgtactagtacttttacatacgcatgtgtaaatatgatgttcttgtcccctgttagaacaacattctgagtctcaagaaccatttcgtcttctcaaagacgacgagagaggatagtttataagctactccctgacacaatgttttaacaaagtatagtactcgtagtactatcagcatgcatcgttcgatctagtaagagtaaagttcagctgtggaaatctagaaaatctttccgtgattcgaacacaggcatgagcgggaggcacacggattgaagtggcgtgcttgtgcgagcacgaaagaaaataaagtacttttgcatctgcgttttttgggcaaacatttggatccaaactggatacgctggtgcacggatcgatgagtacaacaagaacaacatgtgggagcaattcactgggacaccgtagccaagtgccgggcctgccgacaagatagaaagggagctcttttttttaccctgcaaattgtctctccatgtccactttttcgccttcttcgtcatcatcaccctgcaaaagattaccctgccgtatttcgtatccgggtccatacactgtgtagtggatcaaaattcaaaatgccccatgaaaatggctaaatcctttcttttcttttttcctttgcgatgaaaaacagctagaaaaaacactaacgaatacattttcatgttcttacttggtgagcccagagcgcaggcggtgggctggccacccgtccggtcgt

SEQ ID NO: 13893 - DNA, 777 bp, Brachypodium distachyon
  Intron number 1 from transcript Bradi1g31510.1 (locus Brad i1g31510) derived from phytozome v7.0 (chr-ID Bd1; pos 269 85720 to 26986496 reverse strand)
ggccgcccacctcgtcggcggcgaccgctcgcacggtgaaaatcctagaccctttccattgtttggcgaaattaacgaaatgtgtttgtatgccagtttaacccatcgcatcgcatagattagatgcttggttctgcagaattgcagatcgtagaaaagatttagccatttataacgtgctattaatgtacaggggaaagtgggccaaataactaaaatctacaaagcaatttggtcatgggagtgatatacatccattcgatgtcatggtgaagtgacgagaaagtaaaatacggagtaatatgggctgagaatgtctgcttcaacaaagaaaccaaaagccatctgtgcactgtaatgtggatccatgtacagatggaattgttattgcacaacttactggcactcaaaagctcagcaatgtgccaatgcccactacatgttgcagaagagttactgagttctgtagaaagtagaaacgttttctttgtttcagtaactggatgcagaatccttttgcataacgctggcaagcggtgtgattccgataaatgcaattcaatctgtaaggaagggctgatacctgatagcatacgagcttgcaagccattgttgcaatttgcagatattgtttagtactccaaatgttaacctcttagggagcactgccaccctattttattcggagtacatacataaacaaaattttcaacatctttggcttttgctgatcttcttttggatacagggatcttcttcaccgtgctgggcgtagta

SEQ ID NO: 13894 - DNA, 721 bp, Brachypodium distachyon
  Intron number 1 from transcript Bradi1g42710.1 (locus Brad i1g42710) derived from phytozome v7.0 (chr-ID Bd1; pos 400 12289 to 40013009)
gcaaaccataccccatttcgagtgagaaatctttatccctcgtcaaggtgatatgttgttcgagataattgaataagaatgagttaattgtttcatgttaactgctttcttcattatgtcaacatcatatgccttcttactccttgcagatgttatgcccaaacttttgtggatttacatcttacataaggattttctttcattccgcaaaatatatgactaggttttccgggcaagcaaataagcttggtgtatgtgatattttgatttgctaaaattgcactgaagaccatttgagcaattgtttgcatttttgggtttgtaatcttcatgtgtacttatataagcttagtgaccatgaaatttaacaaccatctaccgctgaagaaagcactgtgaatgttttacgtacagatgtcaagacgtccaagatttggatgataattttgatgtttgccatgactcaaatatctactttcttcgttccataattcttgttaaaatcttacatgtatttagacactttttagaaatacatacatctaattttaatcaaaattgagacaggaactgtgaaacggagggagtagattacaaatggcttcaccatcgtcatgaaaacattactggagtattaaccaattcgtttaagttatttagatgacctgcatatttgttgcgcgcagcaccacccaaacgtacaagcccgagtccgtgacgt

SEQ ID NO: 13895 - DNA, 994 bp, Brachypodium distachyon
  Intron number 1 from transcript Bradi1g08970.1 (locus Brad i1g08970) derived from phytozome v7.0 (chr-ID Bd1; pos 633 9398 to 6340391)
tgccgctgactgcttacctggtgttaatttaaccagtgtgtcaaatggttgtggttagattagtgttctcctgtctaatcacgtaatgctactggtttcctctgtaattttcagcttcactacgggctctttcttgcggaatttctagcggaattctttgctaatttcagtactccctccgaccgatattacttgtcaaaatatacatgtatctaaacgctttttaaacatagatacaccatatttggacaaatttgagacaagtaatatggatcggagggagtattgtggttcaagcagaaattgatgttcataacaaagctttagtggaatgcatctggttacaataaattctggttttgtcgagtattttcttgcccactgcctaatagcttgtggaaatcataatgcttttgcaatgtattaaactgttaatacagtatttgggctacttttaaactcgcactctagcctctttcactatgccaacaatgctgactgtctctgtaatttagttggtaggtgcataccgttgttgaaattgattagctgttgtgaatttctatttcggcagtcgttactggtcaggcattcgtcaacttggttatgtagtgtacttttggttattacagctaactgagtttgtcttaacactgaaaatgctgatctcatggttggtgcatctgttcaatgttcaaacacttgaatgctgactaaatgatgactaaatgttcaatgttcaattttgtggtctaaatttagctgtaactatatggtgaactttccagtttctggagtgaaaatattgatgttccacggcctattaggctacacctatattaagtgccatgcgatacaaacacaatggcgttggtgtaactgttttatgaaaacagactgatgtcatataaaatatacatatacacatcttaatgcctatttgatatctgattagcaaacgattattactatcttatgaacaggagttgttgag

SEQ ID NO: 13896 - DNA, 1010 bp, Brachypodium distachyon
  Intron number 2 from transcript Bradi1g03730.2 (locus Brad i1g03730) derived from phytozome v7.0 (chr-ID Bd1; pos 251 9269 to 2520278)
gggcaccactcaaatttgtcgtccaaggcattcaggtcattttgtttattagctctccaaggcctttgatttttgctactccctctgtccaataattcttgtctcagatttgcccaaaaatggatgtatctattcctaaaaagtgtctagatacatgtaatatttcgacaagaatatggaacggagggaggacaaaattagttgagcttttgcaaattgctagcttcctgaatagcgtatgtgttcctcagtgtgcatggcaatacattgagggattaatcctcttgctattatttgtttatctggacaatctcagttaagttgattatagacttacctgcaactacaaggtgccaccgtcaaggaccatcacaaccagctcctaatttgtaggagtaaagaatgttttcatctatcttgttttgaatcctacgcagctctgccatgctagtttcagattcactcaacctgggaaatactgaagtattcacttcttctctgtgagaataatttcttttaacctggagttgtcattgagtttgttttgacacagtttatgttttgccccctatcgtgtagacagcttctttaagcacattctggactaagaattgctatcagatcaagaaactgcaaatatgcatgacatgtagcttcatgtctcaatgtactttagcactaaccatcacagcatatgtgtaccaatttactatagatcattgcagatcaattcgtgtgatgctgtggccatgtatgctcaattgaacctctttaaaattcttttgattgatggttcaaaactttgttgaactgcctagtataacacacttgctccatgaaattttaagtccttgagtacttttggcggtcctttagtgttttgttgaattggcttgtataacacatctgctctatgttgtttctcaaatggttgttttaaaaagtaaaaatacatttctgtttgtcttgtttgtgagcactgacgtttttctccaatgcagaaattatcc

SEQ ID NO: 13897 - DNA, 992 bp, Brachypodium distachyon
  Intron number 3 from transcript Bradi1g17710.2 (locus Brad i1g17710) derived from phytozome v7.0 (chr-ID Bd1; pos 142 94003 to 14294994)
tttctggcttagcagtgaagtattctttttgttgagaatactttttcttgatcaatccaagcatagttaatatgtactcccttctttttcctgtaataccggtatccttgtgttcttcatgtcggtgttggaacagtcttatataaaattgtgaatcacattttgtttcgttttgtggggattggctgagtacagattttgtgtgttaagatcttgttactgttgattatcccctccatactagaatttggaaacttttggatgatgctacctgctatgttgtagttttggtcggattgttttcttattgtttgctattatatggcatgctagcttttcttatcttctactccctccgttccttcttgtcgtggtacatcaagaatttatggatggagggagtagattgcattttgaaaaaaacagacgttctgaattatgtcgctagctcttttcttatgcttaagttatttcacctactccctccgtccctttttatctgtacatgtagcattggatagtttgacggaaatgtttatgcatttgctgtcccgatgcaatcatttacttatacttattaatgcaaacacttccgaggcctccgcagtccacaaactttgaccagtgtgagatcaatttgttttggttaaacgtaaattaatgaagtagtaataaatttgcatggggatgtgagaagctgctgtggcttggacggccagggtcaggacacgtgtgctactctgatagagttaaaaaaggaaagcagtgaagggcatcgaggtgacccttgcgttgccgtttgcttatttcgtctgataatcagcgaacgtacagataaaacgggacggagggtgtaccgagacaacttcttttgcatagaaaatttgtcacctggttttttctaattttctatatctgtttgttatatttattcttattatttcttgtcttggttagcttggctccacttgtcaagaaggttggcgaggaga

SEQ ID NO: 13898 - DNA, 772 bp, Brachypodium distachyon
  Intron number 2 from transcript Bradi1g20410.1 (locus Brad i1g20410) derived from phytozome v7.0 (chr-ID Bd1; pos 163 50192 to 16350963 reverse strand)
gtggtcgaggcctacgagcggctctccaaggagtggtgagcgcgattgaacagactttgctgatggtttctgacttttaactctccgccgtgctttcttcgattgggtctgtatctgttgtgagcaactggcaagcgcagcccatgaggtcttgtttgggaagtagactgtaattttgtgcgatgtggtgatagtggcgaccgggcatctgtctggagcttaccagtttgctagtgttgtgtactttgttgatggactgtatcacaattctcaaagctttgttagcacaaaatttggtctagttttatctgttgtgtatatgggaggctgcttgttggacatgttcagtgcttcactgtgctttaaattctcaacttggtgataatgtagaattattctcttttcccacctcgagtctgttattgagatactattttctaggaggcttagtaagacagtgtaaaggaatggtgctgtttgtctatcactagctcatttaggctggtgtgtgttttggcaccaagctcatgagggcgaacaacaattttcgggcaacagtctggagttagtttaggtgacatatgactgatgaggccctgcacgtgattctgtaccctaaaccgtttttttgtgtgtgtgtcagttatgcttctcggctctttccatgctttgctttcgttctttcatttactcttttgcaaagaacaataataatctttttctcggtgttaactcaggcttgctgaaacgaatcaccagtcaactgttgata

SEQ ID NO: 13899 - DNA, 608 bp, Brachypodium distachyon
  Intron number 1 from transcript Bradi1g00420.1 (locus Brad i1g00420) derived from phytozome v7.0 (chr-ID Bd1; pos 370 791 to 371398 reverse strand)
gttgtgtgctccagatgagcatgtttggccttaagtatgatcgtaagggagaactgcaaatcatgcgccaccgcacggactcctttgtagtttcaaagcatctcctgacagtttctcctgtagtgttctggatgtaaacctgttttatgttaaccgtgtcccagtaatgtaagcgatatttgaggcatttgatgaggtgattattttacacttcacatataaatttttccaagattctctcagacactaaaaaaaattaagtagtaatgttagttttcaaggtgtaaaacatatactccctccgatccataataggtgtcttagtacaaaatctgagacacttattatagatcggaaggagtaatatagtttcatcatatataggattataaggtggttgtattgaagaagatatcagaaatcagttttggtcaaatcaaacacgaagtaaacaagtgttacaacttcatcctgaaatttctatgaagcatttgttcaccttcctggaacaattgtaagtagccaggtcccaagattattatcagacaaggaataaactgcatgatacctcagatagaactcttaacactttatctaccagaactgga

SEQ ID NO: 13900 - DNA, 849 bp, Brachypodium distachyon
  Intron number 1 from transcript Bradi1g22180.1 (locus Brad i1g22180) derived from phytozome v7.0 (chr-ID Bd1; pos 178 38723 to 17839571)
gcaggggagcacctcctccggcatcccagaccaaggtacatatacatgcttcttccttacttctagaactatttattgcagccagctagtaattcctgctgtttcgagcagatttgttacttgttacttgaattcttcatttgtctgtgctggttgctagctactgtagttcttctcgacgattcacgaaggtcgttcttctttgagcttgtgcaagtctttttgagttcctcccttagggaggagatgcttcatgcatgggagaagagattcagagatctaatggtcaaagagtattttcgccatagatctggcttagttgttgatctctagtgtttgtgattttacttggatgagatttgttaggcgtccctgctgtttgctttcgtgattaattaggagccctgttgctgcttcgccaaatttcgatgacagctgctcctcctgcggcaaaagtttagaattcctttttacacgtgggatctcgtgttctcttttccttggcgtttgtttcgagtgatgtcattcatgggattcttttgagttgcggtgttgttcgtagggtctctcaagagatgccttctacggcatgtttctatagtttccaagctttgtgtcattaattaggtagcgtcagggtttgattattcagactaatcattgtccaagttggtgtccttgatttgaattctctatctgaaagctccaaaagaactgacgactagtaaatgtaaagaagaaattgggataagaatccttcttataatatctgggtatcaaaatgtgacattgttctcccctgcatttgctgcaggcggtagtgctgctgctgctgctgctgctgaggcg

SEQ ID NO: 13901 - DNA, 691 bp, Brachypodium distachyon
  Intron number 1 from transcript Bradi1g13850.1 (locus Brad i1g13850) derived from phytozome v7.0 (chr-ID Bd1; pos 106 89893 to 10690583 reverse strand)
acccttccacccggcgaggacttcgatatcctcaggtagccaccccccgcataccatctctgcttccgaccgttaaaccgtagctcatgctgttctgcgctttttggtagatggcatcacctgttttatttgcgttacacatctttgtttcatccggactcaagcctctgctctaggatagttagcttttgtgcggcggattctaacggttagtagtttttatataaaaaatgcttgctttgctaactgttaaatagtttctggcgtgtcttcactgctttatgttcgctgatgcgattgttttgatatatttatatatagaagagtttgattgcatgtctaactaggttctgatatggttagccccttgcgttatctagctgtgtttgcacaaacatgtgttgcggttttggtaatgcaattggtcttttactgctttaatgcagtgttgtggtgctgatattcttatcttccactaattttgtggagtaaggcatgatcagttaaatattaggctagctacatcaaaggataagcaggtttgaggagaatgactatatctgctatccattttctgcacaacgtgtgaaactaaatctgcgtcatcttcacataatatacccatagttttcctgtcagagcatttcttgattttgttatctatgttgccatttgatcatgatacgcagtg

SEQ ID NO: 13902 - DNA, 327 bp, Brachypodium distachyon
  Intron number 1 from transcript Bradi1g45700.1 (locus Brad i1g45700) derived from phytozome v7.0 (chr-ID Bd1; pos 439 80136 to 43980462)
gtcataaaaaagtggacactccccttgttaagaaggtacatatatagccaacatggcaaggtagagcttagagacttctgctcagagacttgatacatgtgtttcattatgttttgctgaatactcagacctcttctgttgccttagggcaactgttattttgtcagaccatgcatataagcagctgaaattttcaagtatattatgtttgtctgattatgctgtttactgtccagacttccatttcattgtaaatgctgtataatgatgtttgattattgtaaaatcccaggtatatacactatataaaacagcggtttaaaccag

SEQ ID NO: 13903 - DNA, 766 bp, Brachypodium distachyon
  Intron number 2 from transcript Bradi1g36050.1 (locus Brad i1g36050) derived from phytozome v7.0 (chr-ID Bd1; pos 316 43286 to 31644051 reverse strand)
agaggaaccgcgtcgagggccttcttatataccaggttcgtgtctcggtgattctctgttcgtcttgataattatttggctttcttggcatgttttgttgtagtttgtgtccttttcttttgtggagcacatgttgtgaaatttttcctatgaggttgtgaacattttctgggtggtgattgtcccaattcgtgtagaattagacgagccttcacgatttgttggtataatgttgaattgtgtagaacagggatgaaccgtgagcgaactcggtgctctgatgtaaaggcgcccacctcctttacacgtattcggtgtgtttgtcgcagctagttgatggctgctttcgccaaagttaggcgcagatatggttgcctgctttacggatttgttgccgtgtcgcgtaaagcggcgtaaagttgaggcctttctttagaattaatttccccatgttttgatgctgttaggtgattaggctgttggctaataataaggcaggcatgttggatcgttagtaccttcaactgtgtaatattagacaaaacagcctttaatcttctgtaagatggttctagagtatattcactttacatgagtttgattcattaggccgcaacatgttttaagattatcatcatatttaccgagaaatggctatttgttaactgtcggcgattgtttgaaatgtaactgagcctctgctgtctactcttttggacttgttgtattgactctgtgttgtgtctgatttctagttaaccaagcc

SEQ ID NO: 13904 - DNA, 1018 bp, Brachypodium distachyon
  Intron number 1 from transcript Bradi1g06570.2 (locus Brad i1g06570) derived from phytozome v7.0 (chr-ID Bd1; pos 441 2328 to 4413345)
cgctcctgccggtaaaaagcgatccgatcaccagggtatgcctgtgccatgtctcttctccagtacatgctctattacgctgcaagcctgctgctgtgttttttgtggtgcctttttttggtctctctctcatttgaccgtgctcgatttgaacccgggctgtaccgttcgtgcacctgcactgctgtgttgattcgatgacggaaatttcggccttgttggtgcatgcttgctcgtcaacatatatggtggcaacacacttgtggggaggatttgaaaactctgctttgttcaagcaccaaataatcatgaaaaaatcctaataactcaaggatttagctctgggttgatcgaacggacgtctctttattttcatgttttttaaacgtgaatgaaaggtgtcagggatttattattttagcttcgctcgacagaaattgaaattcgactttaatctttcgaagggatatttgaacggttaagcacctttttcactattttgaaatttaattttctgtcgatttggtgcttgaaccaaagaatttagaatctcgtcgcaatttgagttttcagctgattgttcagttggctcacgccacagccttgatccaacatcgcctaattaaactgcgcatgaaatatttcagaatcagttatcagttttctatcgtgtccaatgattgattgtattctaaaacaattggttcaatgattggctgctttttagatcaatattgtttctcatctttgaaaccgggaattcatgtgtggatagtggtaccatttcattacagatatgaacgaaatgatgaaatcaaatgatactagtagcatatttatcagtttttaagctttatttcctgtgaaaaggcaaaaaccaccattcttatgctcaagtttaaatttactcatgtgttcactaatttttaatgtcaacattaaaactggtgtcaaactgttaacttgctcttcagatgttaaacacccactaaaatccgtgcaggcgttgagtgaaaga

SEQ ID NO: 13905 - DNA, 447 bp, Brachypodium distachyon
  Intron number 3 from transcript Bradi1g12250.1 (locus Brad i1g12250) derived from phytozome v7.0 (chr-ID Bd1; pos 918 4729 to 9185175 reverse strand)
ggtatgccattttgtccttcaactgctgtacatgctttctggaatggcacgagtcacatatcacaccattctattattatgtatgccgatcattatgatctttcattttattcttcagtaattaatgttaaattatcagcacggtaaaatgaagtatgaaagaactgaaagcgtgcaattattagtttttttagacatttgagttttgcagaataacccatagtaccactactgccactaaggttattgaagtcaatgcttaggcaaacaggaggttgagtaggttgtattgggttaaaagaatagaagcaccattacacacagagtatttgcaagggtgtgtgcctttgattcaggaacttgcgactccacaaaatgacaaactattttctgtgttctctttccaaacattgattcttttaacatgtaagaccaacaatcaacagg

SEQ ID NO: 13906 - DNA, 972 bp, Brachypodium distachyon
  Intron number 2 from transcript Bradi1g23940.1 (locus Brad i1g23940) derived from phytozome v7.0 (chr-ID Bd1; pos 192 43383 to 19244354 reverse strand)
ttgcgttgtttggattacaggccttagcggctcaggtaattaatgactaatttatccggaactattgtgccgtgcgcttcatgaaatgctggtacattcgtttggttgttgaagtgtggattattgcaactgcaattattgtgtacagactggcatttctgcactttaggtatattctttcagttcgactcaactaattaaggctctggtatacttcgtaagttagttgttgatattgttatttacatcatattcaagtattaaattcattaagaaataacttccacgttacgaaagggcaaatttattaaattttcaagagcactgtaagtgaatactccctccgtttttctttataaggcatataaattctagcgctaatattaacgaaagctaccggacgtaccgaactgatcgagggaaggcatggcgcacgtctggctcccgcacggcaactggcccttgttgactcccgcatggcaactgcctgattttttttttagaagaggcaactgcctgatgtgaatacatgcatgcaaccacaggctgcctccttttctccacgggagcaaccgcgcgtgtgttttttgagttagcagccaaaccgctccagcacgtgagacgggcagagaattcggcaaatctcgccagtgcatggatggggcagttgtgcgccttatattcaggaaaacggatgaaaattttatatgccctatattaaaaaacagagggagtactatgctatctatatggctcttgttcattgtgagtgttctgttcgctcttcactgtctaacattgcaatatatcacaatctattttctgtcatttgaaagggcaatttgcaaatgacagatttcccacaattcagcattattctcgtcaagttcttttattttactgatgcctttatcttgttttactttaccttgtgaaggtaaaagcaccttggcgtgcacattaggtcgagag

SEQ ID NO: 13907 - DNA, 702 bp, Brachypodium distachyon
  Intron number 1 from transcript Bradi1g08220.1 (locus Brad i1g08220) derived from phytozome v7.0 (chr-ID Bd1; pos 577 6269 to 5776970)
ttgccgtcctcaacctcctttggtgcttccttcaggtccggctcgctcgctcccattactctttaactctctgttctcagactggcgggccatggaaccccatacttaattctcgtattgattttgagaagaaaaaaaaacactgatgcatacatgcgtcaacttcaagtgttgtttagaatttcttctagtaggaactagcgtagtagggtaagcgagtctgggtggaatcagctgtgagaaggttgcagctactgaattgctagtttgttcgccttgatgagaagcacaatgttgtaatgtttgattgaggagtagaataagtgggtacaagttaggtgattgtttcgttagacaagttcttttgtcgtacacttgcaattgaagtagtggaggttggattgtgaacttgtgatgaaaccagacggtaggattggtaggttgtgtgctggttatagcatataataattattattagctggtaaggtctggtaggtaagtattgatgttcaaaactgcaaacaactttagtacactttgtcctggctattaatctttggtaattcctgaccatatgcttctgaacctacctacttaatctttgataatgttgcccatgtgttacattgtatactgttcgtttctattgatcttgtactcttgtatgacagtcattttattactaaaatggcaggtgtggca

SEQ ID NO: 13908 - DNA, 979 bp, Brachypodium distachyon
  Intron number 1 from transcript Bradi1g28700.1 (locus Brad i1g28700) derived from phytozome v7.0 (chr-ID Bd1; pos 239 95877 to 23996855)
ccgcctggaccgccgtcaacctcggccacttcgccgtaagtcaccccacccaccacccctttctgctgcttactgcttccgttggtcgcatccctgcttattagtggttcggttgtgctcaagctggaattaaactaattattgttccgctcgccccttgcgctctctttctgctcgagaaccgtttgattcgtgctaccatcactgctcggcgcgtacacgcttagcaaactgaatcctgtggctcttctgttcttggaatctttgattatgtataatcgctctactgtccaatctagtctactggccaagattttgcacgcggaaagattagtactccctccggccggagtactataaagagtcttcctgacacactgacttgttctgttagtttattcccacatacagtatattccttctttgcaaaagtcaaaatagtataagccgaaacgcaagtaatttggtgatggaagaatttgttacatctcgcagtatctctgtctcttcccgcaagactttttggaagtcaatccatgtatatcatcaaaaaagcaaaacgtagttgatgaaagaattagttctcgtcattgctctgaatttactctttattaagtatcgtgttcatgtcctaatatatatgtacctgcagcaaacggattatgcatgtattgagtattgtcatactgagatcgatgcagtaaatactttgctgggttgattggacctgtgtttgaagtttgtacagttttttctgcttcacaaagcagggtagttcgaggccatcggcaatttgatagcacacatgctttagatgtttttactcgatgattggtttagccaataatgacttctttgtgttggtaggcagatctaaataaaatttgtagaatttctattccttgaacttcagctaatagctatattttttattgtaatttcagatcacttaccacttcttccattggaagaagggaac

SEQ ID NO: 13909 - DNA, 1012 bp, Brachypodium distachyon
  Intron number 1 from transcript Bradi1g35830.1 (locus Brad i1g35830) derived from phytozome v7.0 (chr-ID Bd1; pos 314 20230 to 31421241 reverse strand)
catcaaggagtcccaggggcacccgctcagtatgcggctatgtgatcttattaagtcatttttccttgttaatcgtcgcatcaagaacgttgggaacgtccggcctttctctctcttttttgtccccttccccctttctttctgcattttctctggatggagtttggagatggcgaatgttgtttgcaaggatgaatgggagtacatggtgctgtattaggcagatccggcgtcgtttgctcatgtattcgctactgagaaagttgcaatagaaaaagattcgctgttgaaacttgttccctttcacttatttagatggattttgactcttttgactgaacattccttgtatattctgctgtagatgataggagtattttattgtgatctgtgaaagggtagaaaagaaaaggggtatatttaaaaatgattgtaatgctaatgctatccttacaatcattccatcaatagtttctttatgatactttgagtaatcttttttgaggtgttagtgcaccaaatgttgccttggtccggataaactagtgctgtcctaatcagccgaaagaaaaagaagaacgccctttgcgtaagttgtgggaatagtaaggacacattgaatgctttgacaatccaatttatgagaggcaagctagtacaacatgagctcttcttgctgtcactgcctgtacactcaagctatgcagtgtaccttcacagtcattgctccattgaaaatctgaaagactgtttttttttttaccttctgatttccgaagaaccatcaaaatggactctgaattctggagatcgtatgcccttttgcctagtttcttcaacgaatgccgtttacatccacctctgaacctgaatttagagacacccatatttacattgtgagatcaacaatgtaaatcctttctatgtttcatgtgacttggaaatggaaatgtctttgtctgatgcaatggttgtttcaaactccgaatcaaaggtggtggtgcctgcggat

SEQ ID NO: 13910 - DNA, 868 bp, Brachypodium distachyon
  Intron number 3 from transcript Bradi1g29970.1 (locus Brad i1g29970) derived from phytozome v7.0 (chr-ID Bd1; pos 254 34212 to 25435079 reverse strand)
cgcacgcctacacagacggcaccgtgttcgttcaggtatcgctggctgcctggcttgctgctgttactgtaatgttgattgttgtataacgatccatgttgagctgatcctaactctggtttaaacaattggattgagatgctctttgttgtctttattcggtacaatgataagagttgatgaatatgcatacagtagtgtggtcaacaattggtgcttattaccagaggacatgttcttgcacataatttgcttttgacatcagtaatgtcgaacttgaagtaggttgctagactgctagtccatcttgtaccagaatgacatgatgtcgttccccataagaagatggcctgataagtgataactacacagataagaatagcagggtatgctgtttcagcgtggtaataaattcaggttaatgttttcctttacaaaaaaaatcagcttattgcttcagtataagatcaaacagtccagacgagcgtgcagtatgagttcagttcagcaataggcaggtattaaccgcacaaaccttttacctccactatcccaaggaccaaggtactgtattgacattaccatagtggcccttttgcccccacaaactcaagcttacttatttattcaactatcagtggtgtgttattgggttattgtggttttatttatttgatgcactcaatgcatattctaaattattacctccaaattatgtttttgcccccacaagttcttcatttttggatacatattcatatcaatgatatcttcatttctttcctggctcgttactcctttcctggattatatcgaagtgcatcttgtcaaattgttgtgattttgttgcatcagtgctgcggttgca

SEQ ID NO: 13911 - DNA, 688 bp, Brachypodium distachyon
  Intron number 2 from transcript Bradi1g13870.2 (locus Brad i1g13870) derived from phytozome v7.0 (chr-ID Bd1; pos 107 09675 to 10710362 reverse strand)
gcaaatttggaaaaggtaagattcttaggtactacaattcttcttggtttatggaaaaaggaaacaccattcacactaatcttatgatgaagcatgttggacagataaaaaaagcatcgagtgttaacaaaacatcgagcaatacatattgcttcaatttgttgccctgattagtactgaaagttgagtttgtccagaagaccatgttaatattgtgtcttcaactcaattaaaaccgcttcgtcatgtgtcaaatctattgatctgtcataggctgatagcatggaagttggcattctaccacatgtattatattctgttttgagtagataagttcatgagtaccatatgcttagaacaatatgaacaaggctgcagtattcccaccttgtttgacttctaacattgagccaagttttatcattattcagttaagtaaattgttgttatatattcattgaatttacacagaccttatgacttctccaacaaagcacttgcatacttgctactgaactgattctgttcagaagttcccattcctttatcaattttgcccccgaaggcctgaacttttgttattgcttgaaaatgctatttgctgaaagaagtctggactcttgacgcaccagattgctttcggtgtttttcaggtcctcgggagctcactggtgctgttgatttaatt

SEQ ID NO: 13912 - DNA, 616 bp, Brachypodium distachyon
  Intron number 1 from transcript Bradi1g26820.2 (locus Brad i1g26820) derived from phytozome v7.0 (chr-ID Bd1; pos 218 90128 to 21890743)
aggtgagacgctgctggattgacgggtttgcaagttgccccctaattttaatttcacttcagggttttaggggaattgaaccctccgactagagcaattagaaagaggaaaatcgacaaacatatctgttttgagcttaagttgtgtccatacttgtaacttatcatggcgcattatactcgtgcttattattcctgggcttttttcaagtttatcatggtgcaacatcaaaactggtgtttaggttcggagtccaactagtcttatctagtcgaggtaatttgatgcctgatcacaaaaaagaaagaagagataattcgattgccatacatgtcctattttgactgtaccaatcgaccccaggaacggtggaactagaagtctggcatgtatggactacttattaggtttcaatttgtgagcacaatgactggtccagcaagcaaaagaatggcaacttcattttagttctatttcaatttatgatgttagggttgttaaaggatgagtgtgccggcatatatttatctggacctgttaattcttattatatgtatgcgattgagcttaatgctcatgatctccatgtttatgcagcacacgttcttcaagaggg

SEQ ID NO: 13913 - DNA, 565 bp, Brachypodium distachyon
  Intron number 2 from transcript Bradi1g26820.2 (locus Brad i1g26820) derived from phytozome v7.0 (chr-ID Bd1; pos 218 90772 to 21891336)
gaatattacaggaacatataaaggtaactcctgtcatacctctgtctttctggtgatagacatacactagtttattttacctattgtttaatcagagttttgtgtcctagctggcgatagtgttaacctgtctatctgttgataattttgtgttgtcactggtgcacaacacatgttaggatgtgtagctaccttgaggtctggaggaatgaaacatgttatgttatgtacgcgaaggtcaaatactcaaatgtacaatattctgctttagaataactatgaagaataagcttggttccgtagtcacaacgtacaatttggtggtgtagtatcctcattggagtttcttttgtttactgcagattctgattgaatgcataataatttttattctagttgcaaaccgagcctaatgaaacactgcaccttttcatttctgatataccttatatttgtttcaccataggatgccactgcttacttaactgccagtgtggtttatgtatttatgtaacaagttcactattttatggtttaggaagttggagctttgctggtgccacaa

SEQ ID NO: 13914 - DNA, 921 bp, Brachypodium distachyon
  Intron number 4 from transcript Bradi1g34750.1 (locus Brad i1g34750) derived from phytozome v7.0 (chr-ID Bd1; pos 303 41458 to 30342378)
ttgtcctgcagagaacttccgggcgctttgcacaggtataattaccttccacccatgtttgaaatgttacccagtctgcttggttaaactttgtgatgattaatcccatggaaaccttgtctgcctgaataaattctgcgccatccaatcacaatttcttttgttatgttggcataaaataaaatatttagaatatggcaatctgtaagttggtcacatcttcagtaagtttaaccaatcaaatagacgtgctcctccaaaagttacagcataatgcaggcatatacttgtagcataaccgagttgctcgctatgttgtttggaagaataagaagattcctatcttattctcactttcttacattatttcgtagaatggcaatgttgtcctaataattggtgaggggggtctaagctccctcaagaatagcagaatgcttgtacgctgtatgttgtccacagtggctaaaatagatctcttagtcacatgagtgccaatacaccagtgagaaaatgaagagaaatttagtaactagtttaaactttatttgatcctactctaaacatgtcagtgcatatgaatatcaattacaaagagaatctaattatctagttgaatttttagttgagtagttcctagtatgcaattaatatgaaagtaaatggaaaagtattgtcgcattattcatatattacaaataaaatactaagaaagctgttgttagttgatggatatatttagagagacctcttcagtaatgcaatttgtatagtagatttctctctggtgtctgctgatggttactcagtatgcaaaagtctattgtttgttgtgaacccatgtagtcatgtatctttcttaattttgaactttaatggtatacaggagagaaaggaactggcaagagtggcaaacctctc

SEQ ID NO: 13915 - DNA, 461 bp, Brachypodium distachyon
  Intron number 1 from transcript Bradi1g05210.1 (locus Brad i1g05210) derived from phytozome v7.0 (chr-ID Bd1; pos 351 9223 to 3519683 reverse strand)
cgcacttccctccggcgtcccagattcggaacaaggtccacctctctccctcccattctcctcaccgtcccgcgcggtcgcggtttccgtctgattctgaatcggtccagccagctgcggaggtgcccgcaacgtgtttgtgtttatgccgagtaccgtattgccgcggggaaatcctgcggaggtcgtcttcgtagctgcaaactgtcggtgtacacaccaattagtcaccactgatgttttctttccactaattttagtaacgcaatgacaactttaaatgagggacagtgaaactgatggacttgtcagttcctaatgctagtattggtcgacaggcgaccatgcctttttgagcttcgtttatctagttgtcattgcattgtcagatttcgcctaagtaagcacttttttttgttttttcaggtccctaaattagcatcagctgctgaatatttctt

SEQ ID NO: 13916 - DNA, 786 bp, Brachypodium distachyon
  Intron number 2 from transcript Bradi1g29080.1 (locus Brad i1g29080) derived from phytozome v7.0 (chr-ID Bd1; pos 246 04344 to 24605129 reverse strand)
tccactaggcagaatcgaaactagcacaaggcttggtttgctacctcctatgtccaatttagtttgatattttacagtaaattaaaactcttgagtcgccgaacttgctcaagtgtgcgaaataggttggcattcttttagttcacacatttagatcactaaactaaatcaagtgtgtcactgcgcaccaccagcacaccatatcatcacaagcacgccacattggatgggtgggtcagcatagttatgatttatgcatttgaccccctatatcatctcttttttcttttttcaacttgcgggcctagcaaactcaacatactttatggttcagtcatttgaatcaattatatactcctagagaattgattccgaagcagctagcgtcctgaatttttttgaatgggattagagaccttggatggtcgtgctgtctcaggaaacatacggtgccacctatgatataacatgttagtgatgcgaaatgatatgcttagtttggtttagtgaccttaatgggcaaatagggaatgtttacctatttgacactgagaacaggtttaatgatctagaaagtagcttaatccctgtcttacatcattctagttgttgcattagaaaatcccctccagaggcctatttttatgttgttaagaagatgctgtaggtggaaaatattgcactcagttattgttatacacctttagttgccaagaagtctttataacatctaacaattttgatgatgcagaggataaccttacattcagtgacactttgatagct

SEQ ID NO: 13917 - DNA, 779 bp, Brachypodium distachyon
  Intron number 1 from transcript Bradi1g40360.1 (locus Brad i1g40360) derived from phytozome v7.0 (chr-ID Bd1; pos 370 18602 to 37019380 reverse strand)
cagaaaggcaacggaagcattcctgacaatagctggtacaaagttatccttttcatttgactgggttatttttgtagcttctagtaatgaacatgggaataggtgaactattcaattactcatgccggaaagttgggtgtaaaaaaacatctttgtgttttcttagtttcaagtattaaatttcttatacatcaaccagatggctcaactacactcgtaaattggacatggatgtaggatttcatgtatactagttaacattttgggacataggaaaatgtagtaaagatggaagaactccattttaccccccgccccccccgaactcatcagaaagttcaaaaatcatccggaactatgaaacccccctgaacttgaaaaccgcttttcccgaccccctctttccactgagaaacagccaaggggggttaggtaggatgcccggttttcaaagttcagagtggttttatacccagtttcatagttcagggtgtttttttgaacttcccagtgagttctgggggataaaatggacttctaaatgttgtatagaaacttctgaaatatcatttatacgagtttgtctagtttcaatttaaaaattctgcatgtagaataatagctttgcttcgtcaaggacatatctagcttgaaccatcattttgttgcaaacctgaaatactttgctggtttgagcaccaaatgcaggtagcagtgccactccagatttattttcagctaaagtattttcacaattgcagatcacaaagtagagatcg

SEQ ID NO: 13918 - DNA, 433 bp, Brachypodium distachyon
  Intron number 4 from transcript Bradi1g17490.2 (locus Brad i1g17490) derived from phytozome v7.0 (chr-ID Bd1; pos 140 20311 to 14020743 reverse strand)
ggtatgatgctcgcctgattgatccatatatgctctaaatattactactttgtcccctgattcttacagatgcctgtcaactttttcattatataaggctctagattaacaaaattagtatcaatgcattttttataagactaactgccaaaagcaaaatcttaagaagaattcaaattaattatgcacacaaaggtagtgtaatgaggcaagagggcatgtttttattttaaacaatgggctctcctccattgaattctatcgaagaaaccgcaacatggcatgtcctgatacaacattaatacaactttgtagtgcttagaaataagctgtgatacttttgtttatttttagtgcagggacatgtgacattctatcactcttttctgttcttgtaggttaccattaattatctgctgggaaaattgggaaa

SEQ ID NO: 13919 - DNA, 555 bp, Brachypodium distachyon
  Intron number 3 from transcript Bradi1g12680.1 (locus Brad i1g12680) derived from phytozome v7.0 (chr-ID Bd1; pos 956 1763 to 9562317)
gaggcacatatcagcacgtctgcactaggtgcgcatgcttgattgcactaagtttctcattgtattttttttcgatgcgctaagttacacttaggagatctctacacttagctattcttcagttgggcagtagtcaaaaagaattcctcgacaatgagtcaatgaagccaacatgcaatattttgttgataaatagctaaacacatgaacatccctattctgttcatgacatacttttctcgagcaccatttcccatgattgtgacaaagattatttttgatagggtgtggctatatttgaggcatctatttttaaaatcaaaacacttaaatctcaattgacgcattatagccgttagattaatatctaagttaccagtttcccactcttccctctctcatatgctaactaaaggacacgtgacttttccatagcaaaacagatatgcgtggttgcttgttattaaatgtgcactggatttgctgaccacctctggtaatcaatttgctggatcggcaggcgataactgcgaaggcgaggcttccaccgaagac

SEQ ID NO: 13920 - DNA, 845 bp, Brachypodium distachyon
  Intron number 1 from transcript Bradi1g41880.1 (locus Brad i1g41880) derived from phytozome v7.0 (chr-ID Bd1; pos 386 07574 to 38608418)
gtttctcagcttcggtagacatccaagtgaggaaaccctccacaacctcctatgtttcagctctatttttcatctgttgtctgaattttgagatttcgcttgagatgatttgacctttttctttagggaaatagcatgcttgcatagactgagaatagaaaaagttaaatcatcacttatctcatttatccacattttggaactgatctacagtttgtctctttatcccttgctaataagccacttattcgagtgcaagggagcatacatggggtacagaagagtgcaaaactaatagtcacatcctagttgtaatgtatttatggaaaaattgaacataccatcttgctcgtatgtgatagcttgtgacatttagccgttctcaagtcattcccagtcattctcttgtgtatgattaatttattactgataaagagagcctgggatcaatcctattactagcacatagaatgtacataatatctctgaatgtgcaggggtatgtaattgatgtgtacaaactcattaccatctctgtatatcgaattctctttttgtaaagtgatgtgcacaatcctgttaactaaactttctcttgaaactttattttctagtgcactcaagtaatttctgtttaggaattgcatcgctctaaaaatattataaaacctgcaagccactgcttgcactcactctagaaatcatcatttgcaccactctgctgcattaattgtatacattctcctcggaattaaatttatcttcctttcttacgtgtattgctattttattatgttttcttaatcgcaggtactacactggatatcccaaggatctagggccat

SEQ ID NO: 13921 - DNA, 482 bp, Brachypodium distachyon
  Intron number 2 from transcript Bradi1g14980.5 (locus Brad i1g14980) derived from phytozome v7.0 (chr-ID Bd1; pos 119 83971 to 11984452 reverse strand)
gtgaaatacccgaagaaacttccgctgcctatttggtacgtacagattagtccttgattaccaacatcaaatttttctcaagtagttttaaataaagtaatatcgtcaattccaattaattaataaagtgatatcgccatagtatctgtagatggatacattttaatgacacatgaaactcaactgtactaagtgttgaccttattagttagttagttttttgcgatcagaccttattagtttacagtatccaagaagattataatattttctatggtaacactgtcacatgcccaaacacaataaaaggaatttatcataaagcaatatcttggagatcatgtccagattattagtagtatgttactttgtactgatagagattctttgaagactgaaattggatatcttactccaaacctgaataatatgcattggttcttgcagagggctattgaggaaggtgcagacttcatagagac

SEQ ID NO: 13922 - DNA, 689 bp, Brachypodium distachyon
  Intron number 2 from transcript Bradi1g22260.1 (locus Brad i1g22260) derived from phytozome v7.0 (chr-ID Bd1; pos 178 86520 to 17887208)
ccaccccgctgcagcacagctccggcaactccaaggtacaattccatatacgtggataataatcaaacagttcatgaattctctccctccgtttcggtcccgtgaatgcaaagataataatactcacaggggcccggggccgggttgccgttcccggaaccacggttccacgcccacaaacggacaaacccggccggaacctgtctgtcctttttttttgcatggcacagctaccatttgctgtaagaaaaaaagggggaccacaatcaccacatccttcgcatcgtagcagtttcatccataaaaggacgtcctcggtttctctaggcaagatctttttttgcacgacgtaccggagccattcatctttggaccgttggacttggacacctccatcttcttcttcttcttcttcttcttcttcttcttcttcttcttcttcttcttcttcttcttcttcttcttcttcttgtccttaattggtagtactgtaggacgtatacgttacatacgtatgtgcacatcagtttacttgtgtcgacacggctgtcgaagatcgggacctgcagctaaatttctacacaaatacagtaacgtcgcttttggctttattgggttctagtatcttctatgtcgtcgatctcgtgcatgcagtacaaggacaccaccgaagcgatcgtggacgcgac

SEQ ID NO: 13923 - DNA, 920 bp, Brachypodium distachyon
  Intron number 1 from transcript Bradi1g19740.1 (locus Brad i1g19740) derived from phytozome v7.0 (chr-ID Bd1; pos 158 08694 to 15809613)
gccgcagacccctgcctcgtcttcctccaccgtaggtatctatctccccttccattctcttgctcccgacctcccatcaccccacgaggccacgaaccctttagctccccgtcataatcttccccaattcgtaactgaggcaaaaatcaaggtagcgcctccgcccgtggttccggtgattctgctggcgtcgcaagaggacagagagagcgtggggaaactggggaggaaggagagaagcacgagctggaatgctggaccggctatggtctagccaataagcaggggcactttggtcattttcttttggtgtttagagagggattaagtcaaataaatggagtataaaaatataaaatagtgaaatggagcatttttatcaaagtctgcaagtctttcttgacacaaatgagcgatgcctaggaggaactggtcatgaaatatattttggcaacaaactagatatcaaaatttagttaaggtagagcaggttcgaacccagggtaggtcaaatccttcaagtaaatgggtcatttggggcattgcaatgaatttagtcctattgcggcattctatcgaataacccaaaaatcgatctcaatgggcggtcatcaatttcgccattctggatttcttgtgcctgttacctttatttaatatcaccaataccagtatgtttcaattcaaagagaaaagtggagggatttagctgtatactgactcttccagcaggtaagttgtgtatgatatgggaaatgaatgagttaagttgaactcgtttgttctttttcttattttgtcaagcatatgttcttaaattgtagagattgaaatgcgaatgctatccttatttgctcattcattttggattcttaattattgcagccttcattgtgcagaggaactctggaactttcctt

SEQ ID NO: 13924 - DNA, 581 bp, Brachypodium distachyon
  Intron number 1 from transcript Bradi1g32560.1 (locus Brad i1g32560) derived from phytozome v7.0 (chr-ID Bd1; pos 279 48979 to 27949559 reverse strand)
aagcactcctacgacgacgtcaaggagtgcaacatgtgagatccccaattcgctccgatacccccagaaaaaattgttggaagtagttaagtcataatgattgcctggtttctagctcttaagatatagctgatggtatatattttctagttatggtggaatttagcgatcaccatttgttagcttggggaaggtactgacttaggggtgcccatctccttgggtagttgggggtttaggtctcaaggttgctctgttcataaccccctggatcagtctcagtcttggaatgatatgttgtagttcaattcaatttcctgaaatttagtgactgaaatacagttttgattgctgctgatcgaagctactgaggaaatagtgcatgaatatattatacaagacagtttgttggaaaagaaaattactgtatggcttctagagatggcaggatgaaagatgctaatacactaatgatctttttatgtgcagttatatgttgttaaaatgtcaaaaatcgattaattacaggcatttgtcgtatctgacatttgcgctatcgcatggtggtctacaggtacaag

SEQ ID NO: 13925 - DNA, 721 bp, Brachypodium distachyon
  Intron number 3 from transcript Bradi1g43200.1 (locus Brad i1g43200) derived from phytozome v7.0 (chr-ID Bd1; pos 408 05122 to 40805842)
ccaaagtcgtttagtgaggtaattctggtctttataagacctaaccgtaccaactgtcggacatgggtgcagtgctaatccttttttctgactagtcattgaagaggggcagaatgtgcatggtcaatgtatcaaagaatgaaagtaagaggggataggacaggggagaaaatattagagacccagaaaatgctaagaacgtttttagaatatcagtgtaagaggatcagctgacgatgacagaaggttgtagcccaattttgccatcttagtgtgaagcaattcattattaagcatctaatttgcctggtatctgaatgtgtgaaactataaacttggtcaatgcaggatatgcttttggttccatttctcatttcgaagtaactctttcgtactgttgtttgatgtctcttgtttaatgcaaagtactcttatgactcattttttgtatatcacttcattaacatttatgaaccaaacgttgtatgtctcctcatatcatgtaactctaaggacctgatgcaagttaaggtccatatcacttattaacagatttcaattttataggatgcttgttccttctatgggctctagaattaagcttctcaaagattcagaagtattgctattttgcctcgtatgggatcaatatgctatctggatttccttgcggccatgctgaattgtctgaattgtttctcctttgtaggtgcaaaatcta

SEQ ID NO: 13926 - DNA, 800 bp, Brachypodium distachyon
  Intron number 2 from transcript Bradi1g10640.1 (locus Brad i1g10640) derived from phytozome v7.0 (chr-ID Bd1; pos 770 3941 to 7704740 reverse strand)
gcaccaccgccaggtggcgacatcgtgctgtacaggtaaatgatgtctggaatggtgacttcgttgctcttgttatttccggtgcatggctgtaagaagataggcttttggtagaaaaatatttattcagagttatccgggtcatgttaagagcgcatagcaattgtataaccatcatcaagttgtcaagaccagctggcacggtgcctctaagcgcagataaatcttttttattgatccttaacgacatgattaaacatcacagaagtttacataacagatagagatggtgtaaaatgttttaacattagatatgccgattatgtgtcctgtagggaagaaaataaaactgaattctagcctgtttgattgagatagagcaatcacgttcattatgaattgttttgggagtaagagtcttacaaaagcgatggagctttcatggtttgggtgagaacgagagacatacagtacacttgggccttggcgctctcggctccggttcagatgatgtgccttggctatgttttattatttttcccgctctgtaccctaacttcaagctctcatgtttctattttaagcgtttcatatctgcactcctgtggtttgaatctttccaaccatctttggcaatagattgctcgctgcagctgttttgtaaaagaaaaacgttgctcgctgaaaagtcaatccttagttaattctaacaagaccctccaagttagagaaatcttgactaatatttcttttctggattaacagacggattgctcaggttaaagaaaaggagaagaaaa

SEQ ID NO: 13927 - DNA, 668 bp, Brachypodium distachyon
  Intron number 2 from transcript Bradi1g12910.1 (locus Brad i1g12910) derived from phytozome v7.0 (chr-ID Bd1; pos 979 0432 to 9791099)
tgctccaggggcccctgctgaagcgatctgagacggtacttccccgatcatctttggggtgatgggttatatgggggtcacttaggcgtgtaaatgttcgatttcggtgatagattcggtctagtgtagggtttaggcgtcaaaactcaatttaatgttagggtaaccggtaagtcgttcaatttaatgttagggtaagtggttgatttaatttgttcttggtctgatgagcagagtgtcttatctgttcaaattcccaatataatttgattgatatactatttggattatactatgagatttgagagtagcagctaggagtactgcattgcgctaatgcgctgtatccttatgcatcaattagtgtgttgttgtattagattcaagcagggagagaaactggaccttattccatgtgtacaaggacgttttctgtcgtaggtgaaactgatggaaatgcttgttatggtattatgagatgtaccgtgagatgatagtgatagaaggggcagactgttagggagacctaccatacaagggaggaatttctttggccttcacgtacttgcgacatacctagagcatacaatttgatagccagcctgtgaaaacttatctactaatttgagttttgaatgactattgtcttccttgaaacagctacggaa

SEQ ID NO: 13928 - DNA, 830 bp, Brachypodium distachyon
  Intron number 1 from transcript Bradi1g44660.1 (locus Brad i1g44660) derived from phytozome v7.0 (chr-ID Bd1; pos 428 09990 to 42810819 reverse strand)
tagccgccgcggccaactcgtcgctcttgactctggtataatgctggtgcttttcttagcagtaggcgagtgcttactgtctttgatccgattaactgtctgaaattaggctactaggggagtcaaaggtggaaacttgacttgctgcttcattgcgaaatctggcttggcattagagtggttttgggtaatggactggaaggcgcagaaaataggaaaatcctcggagttgtaatgctaagctagtgtttcacccgcttaaaaattattgttatgtttgtcaattggaagtttgtaattttacatctactgctacaccatactataacttgcattaatactgctaactaggtcttattttctaataatttatccagcaactccaagctcaaaaagcccctcttaagttgaaaattttcctaaactatttgatccatacatcaggaaagaaaaacaaaccagcaggatttcctttttgttttctcaatttgttagtcgaatttggattcacaattttatgatattgtagatgcatctgtgtcaatgctggtaactctttttttcccagaatttttcatggcctttaaaaggaattttttggtcttggtagcaccaaagtagtggatacaacatccttatttcagttatggcatacatttatcagtttagaatgatgcaactccgggatgcccattgactgcatctcattttgggggaataaaagctacattttttttgtaaagaggataaacaggtatgttgtttgacattgtgtaatggttctgaggaatgatttttgttgttcaaatatttcaaggaagaggtgaggc

SEQ ID NO: 13929 - DNA, 851 bp, Brachypodium distachyon
  Intron number 1 from transcript Bradi1g45830.1 (locus Brad i1g45830) derived from phytozome v7.0 (chr-ID Bd1; pos 441 12018 to 44112868 reverse strand)
ctcgccggtgaagaagcaggcaatggatcaaggaggaggaagaagacgacgggcaatgcctgagagaagccacctcaaaggggatagctagcctgggccggctcatatgtcggctcgagccgtttccttgcacttgatctagtaattaggatcctttgtatgacatgtgggccacgggcgattaacttggtccaaccggccactttcgggttttttgttactcgttagcgtatgattagtgggtatcagttaaaaacccttgggttcgtggttttttgttacaagagccactagatatgtgtctttgtgcaatttactcaattataaaactagatcatatagtaaaccagtcataaagctatagctatattatattgtaaaataataataaacctggacttatttattacagacctgctagctatagcttctatacccagattaggagacctgctagctcaatcctaacagcttctgttgttgatcatttccccgctgatgttcaacactaatttaagtggagacctatttgcatcatgttacattttagtcgagtagttctgtaacagataccgctgttgttcttttgtttaagttcggtgctcgtgcttcatagctaccactcactactgctgtcatctggagtttcttattatgctatatttatgtctatgtttttctattttttatggttaagcaagataagtcaagttccgagcattgtcacttttcctaattatttcacactatgagcctatgacatcaatttctttaatgatgtcttcattttgcttatgtcaatttttacgaacctttgaagttttccctgccttgcttaatgtagaaattgc

SEQ ID NO: 13930 - DNA, 941 bp, Brachypodium distachyon
  Intron number 2 from transcript Bradi1g12340.1 (locus Brad i1g12340) derived from phytozome v7.0 (chr-ID Bd1; pos 924 6917 to 9247857)
tccgtcgtgccgccgccgccgccatcacgatccaggtaccacgagcctctcctaagccacgcctgttaggcgctgcttattgcgtacccaccaacaccagcctacccacgctacctaatcctatctgaaatctgattgctgctctcgtccgtggagctgtgttctcaaattatgtcggttttttagcagatctggtctatggcaaacaattgatatgaatactttaggaacactgatttgattgacctgaaacgcgtggccccgtgctaagatatttctcggagttcgctaaaacttttgttcactggatgcaagtagatgttgctgttgccaaatttgggagttggattcaggtttgcgcatgaccatcctaatgaaatgaggacgtcaggttttttaacctcgaattgagaatggaaagtcagaaaactgtgaacaaaccctaaataccaagttccaagtacacagcgattttacctccatgttggataaactatccatttgccgacgagtaccattcgtgcccccaatatgacaaataacttgatatattatttttttcgttcatattttttaatcactcccgaggcacctaaagtttgtagatctacaggcctaatctaatatgtttcctggtgattcctttgtgtaattttttctgctaactattgagagaaaaactaatactccctccgatcctaaatcgttgtcgaaatattacatgtatctagacactttttaagaatggatacatccatatttgaacaaatttgagtcaagaatttaggatcagagggagtaataaacaaagcacaatggacatggcctcaaactgttaatgtgaagagccagatatttgttgtgctttgcttgaatgatttttgtgttgtatacccattaatggaccatatcctgttgttcttgaaattgtgccagcgagt

SEQ ID NO: 13931 - DNA, 873 bp, Brachypodium distachyon
  Intron number 1 from transcript Bradi1g02950.1 (locus Brad i1g02950) derived from phytozome v7.0 (chr-ID Bd1; pos 198 6279 to 1987151 reverse strand)
ccaattgtccacccaaatcagcaaatccccaatcggtagctccttgccccccttcgctgcctcacctctctcccgtttgatgctattactcttctgtaatttgttgtttcaaattaatatcacgggaggacaagatgaatgagaggaaatgactcattttttcacaggaggacaagatgaaaagggtttagatgttttcatgataattcgtacaagaatcataagggttggttggaatatagtgttgataaaaatgcagttgtttgcttttattatttactcttgaagcaaccaagagctgaaaatcattgtatttgaagcattcactaagagtgggtttatatcttggaatgatggacctaaagttcttgatcggcatgttggcaaaacatgatagtagtgctcataacaaagctagacaacattacgaggctttcaaaaccagagataaaatctgccacatgtgtttgaaccattgaatattgtgtccaaattactatcaattgtcttggaaaattttggtcaaagctatttcggcccggggcgtgagcaaatcctggctccgccgctgatcatacctgccatgccatattgttttagtgaagctttcagcctttcagtaccattttcgatgtgttgtttcaaatttcataccaattgtccgcttgtactatgctttttcttatgtatcaggtgtcgtttccagcgcttgttaggtttcaccccgggatgtggattaataccatttgttgagtcttgttgccgagcatgagcagcttctgcataccaattctgtgcagtttcttgcttcttatgtttcttcttgtacttgtgattcttaggtagcagctgcttgtcagtggactgggcaag

SEQ ID NO: 13932 - DNA, 385 bp, Brachypodium distachyon
  Intron number 1 from transcript Bradi1g14560.1 (locus Brad i1g14560) derived from phytozome v7.0 (chr-ID Bd1; pos 115 23070 to 11523454 reverse strand)
acgggaagaacaaacgtctcagcactgcaggccaggtgccccctctcttctcctccgtcttcaacttcttgtttccaccacttgcaggatctgggcgctgagctctacctctgtgttctacttttgccaagtttgaactgcggccgttaatcgaccgtgccttctttttcccttcgtgttcattcgctgtcaaaaaagcagtgcttcttttgttgcagttctttatctcgagaaggttcggaggacacttcttgaactccctactggaaggtacgtactcctccgtacatattttagtactcccgctgcaactcgtataactggacgaatagtttcagagtaaatcaaatcaagtttgttaaaattggtgcagaggtggcgcgag

SEQ ID NO: 13933 - DNA, 1021 bp, Brachypodium distachyon
  Intron number 2 from transcript Bradi1g11820.2 (locus Brad i1g11820) derived from phytozome v7.0 (chr-ID Bd1; pos 879 7695 to 8798715)
gctcaagtggttcttcgctctactgatcggcgtgggtgagagctttctcgatgacttgcttgtccagtgtttagcctcgtatctccaaacactgcaatgctggaaatcctattccagttctccaattccaccacctatttaaatgcttcattagaaatggcatttttctatcctgtaaatttgttaattattccctttgatccaaagtgtaagtccttctagagttggagacaagagttatggttataggaaaaatgccaatgtttcccttcatttatttctacagtttctcttttcctcctaaatacaataaatgctagtaataggctcaattgttgatgaaattaaggagtggctaaatacaagcaacatgagcaaaagtgcattttgagtgtagaaagacttacgttttggattgcatggagtactgaataggcccatgaggaaataagtaacatgagcaaaatctgatgtggaacgctttcacctgtcccatcttccatgtttctgttagcagatagttatgctgaaattgggattatgcttaatgccctataatggttcttttagagctcatttgtattaatgtttgtttctagaatagacgggacacagactgggttagggcccctgcagcgtgggggaaatgacagggatacacaagtgagaacgtgtagccccataccctatcttaggttcactaaattcaaaacttgaaacataaaatcatttaatatttgcttttgtaaggttccttgatgattgtagcaaaagcctctccgtatcgctcaagttggatattccttttatgaggttatacgtatgatttagttgataggaaaaataataagtccaagcatggaagaccatatacctgtcagttgaaaccgtcttttacactcacattttgccgtctttgttcccacgatccattttgcaacaagtggatttaattttggtatgtgatatatcctccctgttttcaggtactggattggctgctatattcataaatttggcc

SEQ ID NO: 13934 - DNA, 898 bp, Brachypodium distachyon
  Intron number 1 from transcript Bradi1g27380.1 (locus Brad i1g27380) derived from phytozome v7.0 (chr-ID Bd1; pos 224 44889 to 22445786 reverse strand)
ctttgtcttgctgcggcctctgcgacaattaagtggtatgtgtgctcaacgcatcaaggcaacagtaatttggatgttaccctcttcatgaattgtcatgacatgtctcccatgctcataaatcataatacagtgttgtatcaactatcagtatgaatgcaaactagtattgtatacccaagctgccatatttatgacttaattatcaaattattgaaattattgctggggcaagagaacttactacaactctatgtatatttaactaatttcgaaaaaaatgcacgagtttccagctcgagttacagctcctttcttactgtttacactagtagccctgtcctacaatgccctcaatatctattactgcatgtttgattgaaagcgagactacatttaagccccaatctccataaagatttgaaaaaaaaattagaacattataaaatcaatcttttatttgaacatataacataaatattcaccaaacaccttatttttgttgtggctatagataaggaagcatttttttttcgattgaaaagaaacgagggtgagatggcatgcattttccttgatattactgtatgtcatgagcagtgttggtcccttgttttgaccttttttaattcattacatagttgaacttgtgttgaaagctagcactaacatccgtttgtttattgctttaatcacatcttgtttttcactcgtcttcttttatggaatctttcaatcaaatatccctttggggtatgaactgcatctgtggcctaatttctggaatttctatcattcactacaacaaggttacccagcatcacatgagttttatgacatttgctcttatttcttttttacaggatagaatcagaaaaaggcgtaattattactagcc

SEQ ID NO: 13935 - DNA, 1008 bp, Brachypodium distachyon
  Intron number 2 from transcript Bradi1g24900.1 (locus Brad i1g24900) derived from phytozome v7.0 (chr-ID Bd1; pos 201 35326 to 20136333 reverse strand)
cctccgtcgaacgcgcctgccgcctctgcgtagacgtgagttgacctcatcccttgatcccttatccctaataatgaggtaaaattgacaaagtcagccacaaaacaaaacaaaacttaaaaagactaaggccctaataagactgtagacctgtagtccggagattttgagtttgttggcaaaatacaatgacagaatagattttagaaagccttaagtattctgcccagaaatgtctctttggtgtaatcaagtaaatattgtgttgaaaattctgcagaagaaaatagttgtggaataggtggagcaacaaagtgtcaattcagtgcaatgccaacatggaaatgcattcataaaagaccaaatatgcgtaatgctaaaatcacacaaaaaaaatgtagttaattcagatttcagacctattcttcggtagcataggtcaatccacccaaaaaagtttacactggtcacaaacacatcgtgcttttggttgccatgcaatgcaagtatgtcatccacattgctaatttatcatatgaatatataatgcttaatttagtcaattttacctcattattattagttaaataggtcaaagttatttgcaaaatttaacatctatgcctggagaggaaatccagatcatgtcaagaactagactcgctatgggttacttggaaaatcaggaaaaaacgggccagtgaaagtaagagaattattttgtgtaccaggtcttagtttatgttcaaataggcaaacaccaaatttgttgaaagagaacatacgtacaactagaagccccagaggtttcagcagcaatagactgtactaaacccaaatgtgagcttggtgagttacaaatttattatccaattgtgatgtgatatatttaattattttgcttggtatgtgactgcaaatttattcaaagacctgatctgcatgttgctggttaaattgtatgccttgacaggtgaagaaatcactgctttcaggtggaaggaagat

SEQ ID NO: 13936 - DNA, 775 bp, Brachypodium distachyon
  Intron number 2 from transcript Bradi1g43160.1 (locus Brad i1g43160) derived from phytozome v7.0 (chr-ID Bd1; pos 407 19836 to 40720610)
tttcccctctactccatctacgccgcctccaaacggtactgcaaattctgtaagagagaattccatatttgtcattgagaatttgcccgtatgtccaaatggcactgaaaattttcctgttccaaatatgtcattcaaattttgtacagattacaaatatgccactaccgttagttgaccgctggttgacccttaagtaaaaaaagaaaagacaattttgcccctatataatatgttgacgctccgtttacaacaaattactcattttagaaaacttagcttttcaagatttttaagatgcccgtaataccatttcgtagtaaatttcagcaacaatgattttagcatggaaaattggaaaatttcaacagcacttcccttgattttaattaacatcacaaaagtcatcccgttcaaattttttttcacaaaagtcataatagatttagcaaattaatagactaaaactcatcataatttgtggagaaagagaccgagagggtattttagttttcttgtttctttttgtttttttctgacctgtggaccaggggtatttcggtcaatatgaaatgacttaacggtcaactagcggtcaactaacgacagtgacatatttgtacctcatgtaaaatttgagtggcatatttgaaaccgataaattctcagtggcatttggttggcaaatatggaattctctcaattctgtcatgctcactgtctggaatgcatcttctcccctgtttctataattctttcttgaaaaatttcaggt

SEQ ID NO: 13937 - DNA, 687 bp, Brachypodium distachyon
  Intron number 4 from transcript Bradi1g44060.1 (locus Brad i1g44060) derived from phytozome v7.0 (chr-ID Bd1; pos 421 64168 to 42164854 reverse strand)
tagtcatctggagaagttggagctgaagctttcaggtaaaatgttaatttgtgcatcacatcacctattcacgtcgttggtcatagtaattgctgcgctaagaacaccaggactgtaaagaattagaaagctacacatttgatttagcaactaactgcatgtttaattagttgtcggttttcatttgacttaatttgtttgggagactgtatctgataaattgaacaaaaattgtacctgtggtgaaagctgtgagtttatatgtttaatttgtttccagttttgatttgactcaatttgttcaagagggtgcatctgaaactgcttacctagcatgaaagacaaaatatacatatttcatatttactgaaatgtgaattagttttactgcaagtttatcactaagcatcatgaaaaaggttcatatttcattgttggtggcagatcaaataatatcaggtgtttcaataacataagttatttaggtaactatgtgaatcgataattggtagaaatgaaaggatattagttgtttctttgaccttcttgaacattattaaaaaaacaattccattccaataaacagggtgcactgacactggtgatgaatgagtgtgtgcaacaaattttctattcgaagtttcgaacaaacaagtactagataattcagatttctttatcctgcag

SEQ ID NO: 13938 - DNA, 814 bp, Brachypodium distachyon
  Intron number 3 from transcript Bradi1g19800.1 (locus Brad i1g19800) derived from phytozome v7.0 (chr-ID Bd1; pos 158 43459 to 15844272 reverse strand)
aaatcgaggagtctgtatctgttggtttcttcttttgaactatatttatactacggagtatattgttcattaatgtgtatgtgtatctttaatggcgctgcaagtgtttctaacttaccattttctttttgctcaaagaattcttcagctagagcaaaatgcatcggcaatcctactattgttgccgagatgtcaagtcaatcctataattacaaaactacatgccctactcttgtttagattgtttaccgtggggcctaaactcatggtgaggcgttgatcctctcacgtggcactttgaccacgtacacttcggtggagaggtcttggcgggacattacccattgctagaagttggtcaatttttgaaaacaaccccctctctcaaaaggccgcgtctggccccactggtgcaggttcctgtggcagcagcggcaactgcacagttcctttcttcttgccccttttccttgctgatgagctagcacgtgagctcccggacatggctgcagcgacggacgacaagctcgagaggagaggatatggagtggagagcattgagcatggcatggccttctacaaggatttctttttggaaaaaaatgactcactgcttgtggagggaaaatctcccgccaacctctctgctgacgtgtccagagtcaataatagtaggatcgcgggtgcattttactccttcggctatgtggagtatatgaaaaaaatgatcccttttcatgtgaagtgtgaacgcattaatagtttgatactttctgtaggtggatattttagcagtccagctgtccaaaagaga

SEQ ID NO: 13939 - DNA, 941 bp, Brachypodium distachyon
  Intron number 1 from transcript Bradi1g02360.1 (locus Brad i1g02360) derived from phytozome v7.0 (chr-ID Bd1; pos 161 0361 to 1611301)
ctacaggtactgttgttttccatgttgtaaacttcactttgatcttccaaacagtatctaccttgtagatattctcaagtatatgagccatagttcattatagatgacaagtttttatggaacttctttgaaagaactgcttattatatggtgaactgttcatatccttccaataactgattcttgcatcctcctggctgctgctggttctcatggagtcctgcaattactgattctgcccattcatgtgattttcttatcactgtcgcacctatttacaagaaagtccctcattcatgagtctgaaataaacctttcgggcttacacaactcataaatgtacaaagtcctggcattcttacttgcatgtgtttctcatatttactctcatccatacctaaatcctaccatttacttctattataattaatgatgaactagtttatttgtacctggggcagaaaacaatttctgtatgttctgttgatctgtacatatttagtctaaacaatcaacattttgttttgttgccaaagtttgtcctaatagatttagtcaatgtggcatctttgaaggtgcttcatgttcctgttgccttgctatggtgttggacaatttaatcacactgacgcgtgggaattaagaaaacaatagtgacccagtacttctttaatgattaaataatagccatacttaattagcaaggcaatgcaatctcttgtgcgtaggttccagtttaagctactggattttaacgggtctgcactgtgccttgtcaaattgtttctcttgcagtattacatgtgattcgttgactgttcctaatcttttagcgaaagctagtattatgcgcaacatgcagatatatgacagtcagttcatgtaagtatcgccgtctctgatcagttattttcttgcccacaattgccattggcttctcg

SEQ ID NO: 13940 - DNA, 437 bp, Brachypodium distachyon
  Intron number 1 from transcript Bradi1g02280.1 (locus Brad i1g02280) derived from phytozome v7.0 (chr-ID Bd1; pos 155 2505 to 1552941)
agcctactcctagtaatttcatttgcgtttgtttggtaaggttggattttaagaagaacggttttatgcgattctcccagatggcgtgccaaaaatgcaacctcatcggctgatttgttggcttggcgagtagattcttcgtgcttgcctatttcaagttggaattttccattttgttggggttgttctctcacatgttttcttggatctattcaagttatccagcatgcataatctgggtgttctcttcacatctcgcgttctactccggccagtttgctttggggtctatgctgcaaagatgcctttttttgtgtgtgcctttcattctgatttgattaacatggtggtaaatatagtaattcctactcctgtaatgctaattttcgtttttgtgccgagcagatcaatctgaaggtgaagatttgcaaggattc

SEQ ID NO: 13941 - DNA, 1046 bp, Brachypodium distachyon
  Intron number 1 from transcript Bradi1g10700.1 (locus Brad i1g10700) derived from phytozome v7.0 (chr-ID Bd1; pos 774 5457 to 7746502)
ccgccagaggcgcctaaccgtcttccgcctggacagtgagaatctagtcgtttgcttttgatatattcacccattttcttttcattgctatggtttgacaatttgctagattggtgtttcgttagagctaggaattgcccgtttcagcctcgaatctgagaattgtaactctgggggttatggattgcgaattggtgctcagagttggtaactgtgaaagtaatggttctcgaatttagatcacaagctctggtctcgaagttggacccttgattgggtatctcggaaagaggacactcaaataaaactttgcaagtctagaggataagaactacggagtagtacccaaatgctgaatatttctgtgatatacaattgcagttttcgtaaatctatactgtactccatcatgagattttaattactaagtcgattaaatttggaagcctttagtgaagactttaaaacttttgatttctccgtcaatatactcatgaaaatatccaaggcaggaaatacacctcttttatgttttttaagtttatgcatgctgtgcacattataatatttcaagatcaagttctcttgatgtagtgctgtaactgctgttgccatatgatttagtatgccacaagatgatgtctcctatttaaccataagaaacggtattccttttaaaactttagttgttgcaatcttgagactttaaaacatatgttctatgatatttttttctaatttaagatgcttgtattttttttgttggcatgggaaattggcagtagggaaaatttcctgcagagaaaaagcttcatagtattttcttaaaggatggttcatagtgttgtaagagcaaggtagagaagactaattgtatttagcaacattacctgtttgatagatttgtctaagattgtacggttaaataaatattttaggaagatgccaattgccaaatggttaaatgatcttgttctgaacagttaaggcaactttatttctgtttgtcaggtggacgagaatttgtcgaggtgaaggaatttgga

SEQ ID NO: 13942 - DNA, 921 bp, Brachypodium distachyon
  Intron number 2 from transcript Bradi1g10930.2 (locus Brad i1g10930) derived from phytozome v7.0 (chr-ID Bd1; pos 794 4647 to 7945567 reverse strand)
cagacgtcacaacggatcaataccatcgctacaaggtactgatctcttctagctctgttcctaaatgtaaagtcttagctttataccaagtcaaatttcttcaagtttgaccaagtttatagaaaaatatatcaacatctagaattccaaattagttttattaaacgtgaatatatattttcatggtatacttatttgatattgtagatcttagtacatttttctgtaaacttggtcaaatttgaaaatgtttgactcaagataaaggtaagacttcttgtgttttggaacggagggagcacgcctgaagtaaacagagacaatatgttgtagtccttgtgcccacgggatacgtttcagccgttacattagtacttatagcaacttgccgtaatagtggtctttcatgatggctatgtatagcggttttataacttgttgcatccgatggtcctactatacaaataggatcagaaatcctacctctcaaaaactagttttcctgaactattctaggactaggttgcaatttgcaagtttctccatgtgaaaagtttagtcacaactcaaaatggcaattttactggttttatggattctttgaagcacacagaagatggctatcatgttctatttgtcaatagtaggcaatggcaatgtctatcttctttcggtagtgaagagatgcctgaccaagttctttttacgagtgaaatttctgtacccattcaaattacactgcatagctgacaattcacaaagttgagctgattgcactaaaacagcgacaagtatttaggaacggagggagtactatataagcatagttttgtttgggggaaatattaaatattcacaccacaattgttgagaaaaaactccagggactcctgtttaatccatttatgctggcacaggaag

SEQ ID NO: 13943 - DNA, 664 bp, Brachypodium distachyon
  Intron number 3 from transcript Bradi1g31680.1 (locus Brad i1g31680) derived from phytozome v7.0 (chr-ID Bd1; pos 271 43701 to 27144364 reverse strand)
ctttgtttgttggccgagatattcacagtgacgcggtaatagtttgcttatgtccttcataggtttggattggtgttctatctaaacttatctgctttatcagggatttgtcaagtaaatctgtgtactctattttcaaagttatgtatgcacatttaaatggtctgtttctcaactgtcgaatgtgtcaatgacttaaatgactgatattggtgcccctgccataaaaaacttatgctttcattaaggtgtttactctaaggtagcaaacgggcaatggctaaacagttgctacatacgacatgacatgacatagtagtttgcttatattgatttttattgggaacataacttgatctgttgcttgcatgaaagagttttagtgtaattcccaattttttgtggcgtgctatgtcggatacattatatgccaacaaaatggggtttttcgacaaaagtgttgtgttatttgtatcctcagggtcaatactagtatcatgaggtccagctcttgtaagaacactactagcagtttgaattgaggggcttcttatatatcacatagttttttgtgggtttctcttctaactgattattctaatgatttgtgttgcatgttctggatgttaaatttgaataatgtatgtcttgctatgcaggtagt

SEQ ID NO: 13944 - DNA, 760 bp, Brachypodium distachyon
  Intron number 1 from transcript Bradi1g12120.1 (locus Brad i1g12120) derived from phytozome v7.0 (chr-ID Bd1; pos 901 2727 to 9013486 reverse strand)
acctcgacgccgtcctcaaggaggtcgtcgacctggtaattaatggcctgctcttgcctcttggggtggtggttcttgggatttttggtgtagtgcccgggcggaggctgcaccctggcggtttccgttcttggatggattagcgcgggggatttatgatttgtagaactcttggcgaaaatcggcatgtggctggggttttagcgttgcagggtggcgaaattggtctgctagcttcgctataggtcaaatattgttattatctagtacaatcattcttcggctcgtgtgaatggttcttgtcaatatctgtcaattctggaattccttttaacaccccaatcaaggacaagaatgatttctttattatgtgtacttaatttaatgattcgtgttagttcactctttgtggtaatgactaatgaaatcgtgatacgccctggttgaaggccggattttagtactccgtattttagttgcacggatgttgacgccttgctttaaagaaaaatctcgagtttttttttttgccggtaggaaatttgactgtttggtaaaattattgtgtttatgtggtgttcaaacacttgttgtattggaatttgtctcttagttcactcgagtagtaggctccagcgtacttgcatgttgaaacgtgcaggttcttggttaccttgtgttgtgtgtcgtgttgatgggacttgtttggtttctaaagtgagttttcacaaacaaaaatttcaggagaacatcccagttg

SEQ ID NO: 13945 - DNA, 648 bp, Brachypodium distachyon
  Intron number 1 from transcript Bradi1g18800.1 (locus Brad i1g18800) derived from phytozome v7.0 (chr-ID Bd1; pos 150 58231 to 15058878)
ggcgagatcacagtgtgagtcacgattacaatttcgattcgttgcggtgtgccctgtgtttttaggaagtagcgtctcgaatgctgttgctctagtgtacattttaactcgatttgagcgtctggcgtcaggattttaggggaagttgttgccttggtatctgttacaacttagattcatggtgggaacgtaccagaagcgatttcagcttagttgaaatgaatgcattgggtattagacctcatagtggcataggctaaagtatagactagctgttttgctgtttcagttccataatcagggactacaggctctattgggataacatcttaattggatttcttcaataatgaatgttttaacatatttgatttgagatctttccttcgacctctcaaaataactgctcaccttgttataattttctctttcgtatatgaggaagtgggtacattttactactgaaaatctgtcttgttttgggggtgggggggggggggcgcaactttaaagtatttactgtatgcctctcacatgaatttgttaacatgatctgattttgaggtagtgagtttgcgttcttgattgtttaaacattttacttgttttgcaggcctgagtcactaggcattgttgttgggattgtct

SEQ ID NO: 13946 - DNA, 706 bp, Brachypodium distachyon
  Intron number 2 from transcript Bradi1g27980.2 (locus Brad i1g27980) derived from phytozome v7.0 (chr-ID Bd1; pos 231 33578 to 23134283 reverse strand)
tgcagccttcaaagacactccatttgctcttcgtggtaagtgctcttgaatgtatttctattgttcttttccttcggatgtagtttggagataccaaacagtcaccacatatcaaaggtattggtggtaccgatgtgccgtggtagcaggagcatataaacaccttcgcaaatgcactcttgctctgtagggtgtgtaatagactaacagttgagatagtagcttaatattgtgccaggttatcactgtatgctgctaaaaacagaaagcatgtcacaatatagatattctagtctgtcaaagctcaacaagttcaattatgggcatatatcattggtcactcacaccattatttggagataaagagctgttattggtcaataatgaattttgtgtgggggctatatagctcatacatgtctcatgtggctcattttcagttgtagatctatttttgttggacatggactcacggagaatcatgctatctagtaaatcatgtaattactaaactgatacgttaatactgatataatcaacagtgtttccattatcttttgtgaaatatgatgagaggcccaccctttttttaattctgctctatagaagtttgcagttcatttccaaacaatcttgccacatttgttgtattgatggtttcagaatttcaggtgccctcggtatccccaactcatctttcgatagc

SEQ ID NO: 13947 - DNA, 1043 bp, Brachypodium distachyon
  Intron number 2 from transcript Bradi1g02520.1 (locus Brad i1g02520) derived from phytozome v7.0 (chr-ID Bd1; pos 171 1652 to 1712694)
aagggcgtggaggggtcgctcttcgtcgtcaagaggtttgtgcagctgccagctggggccctaactgatggactgtaggctgcaacactgggttcggttggttggtgtatactctgccattggcatgggttcgggctgtttggtggatgcataactcccagaattacttggccgtgcttatgttttggagttgtagatataagagaactgaattggccttctagaagaaagggtaatggaatgtgatggtggttttgcatttttaccgtgcattgtcatgtgattcagcaattccctacatacctaagatttataggatctggttactagtggaagcatcgccaatagctattttctgttgtttgttggataaatgcagaattcccagagagttacttggttgtttacttgaatgcggtggtgatttggcattgtgtattgatgtatggtagtgtgattcaggaattccctatatagtgaacgattgtcgggaatttggttgctacgggaagtattgcttgttgttttcccgctgtttttgaaatatttacggtgttatttgtattacaagtgaatcaaaggatcaacattgacagaagtgaatcaaagggtcaagcatattgatgtggaatttttaggattatttattattgatattttttggtagtttttagtattgtcacaagttgtcagttattggtcatagatgctgcaagtattttgcaattggtttctgcacgcctatgttgaatcttttgtttctggtcctacaataggtggcatgtaaattcaatcatgtatgcttaatttagaatgctttggaatagacaattggttcaggaaaatatttttatcttctaaacattagtacaaaagggcatcatgtattgtgcaagtaccatggtgatgattttcgacatatacagttgtactcttgagattgcaaatttgttgttgggtctataagcacttaacagtatgcatttcgtgctaagacttgataatattgcaggaacacccaacccaggttccaatttattgtc

SEQ ID NO: 13948 - DNA, 875 bp, Brachypodium distachyon
  Intron number 1 from transcript Bradi1g31360.1 (locus Brad i1g31360) derived from phytozome v7.0 (chr-ID Bd1; pos 268 49857 to 26850731)
ccgtccacgcagcgagggttactatagcggtaccggtaagcaccttgcttccacctcaggttgtgcttcgaactagctagcgccttaatttcatttcatccctgatgccgtgagtgaggccgcattggtttcattccagattcgccagctagatcggtgactagactagtttggcgtggtaacctcgtatgcattgctgcgaacaaaacggtttcccaattttgagttaatcgcttgcacgttaagtttcgtggagctgtcccccgctccacggtagaatggagaatcggatgctttgcgcttgcatatttcttacctgcatcgaaagcaaagttttattcttcggttgttacagtcatggtagtgctactcgtgcatttttcatttcattggtgttgcagacttgcagtgctccttgacaaaagtcaatccatgttcactaatataaaactgaacgtcagatcatggacctgagtgcattggcactactaagtcactaatcaactgggtttatttggattgcaaaaggaactttgtagtgtgtaccgaacaatacatattcccaaatttgcatggtcagtgtttattgtctgttatactccctccgtccaacaaaggatgtctaaactttgactaaatttgaatgcatctatacactaagtcatgtctagatacattcaaattttgacaaacttgagacatcctttgttggacggagggagtagttcatttccccccagtaaatgaagtgttttgcagctttattggcattgtattcagcaactcaactgtgaataaattatgtgatgtgcttgtctactgatttattttatttcacagatcataattatttcctgcccttttcaccagaaaat

SEQ ID NO: 13949 - DNA, 770 bp, Brachypodium distachyon
  Intron number 1 from transcript Bradi1g20340.1 (locus Brad i1g20340) derived from phytozome v7.0 (chr-ID Bd1; pos 163 03975 to 16304744)
accccgacctcgccaaagttttcgcccgcaccaaggtttggcatcctgtttttatcttttagtggctatacgcgaatataggactagttgctcaacctacttgtgcctactgcttgctcccatctgcaaactgtacattgaaatttctcctcttaacgcaaaatgtatgtggcttggttgttattggaagggaaaaaagaatatgccacatgacttcctgtagagaattttagttgatgtgttatcttgcaacggagtggttgtgatcttttgggattacctgcatataagaacataggaatattatttattttttactggaaactgtaggggaagcccctacagcaatttattaaaaccaacataggaatattgtgctgcttattttcagtgatgagcttatatgtatatatcccttggccgaggtgtttccttgtccttggtaccgaaatggtagcaaactatgcatagcacattaatgtggatatgtatatattgtgctgcttattttcagtgatgagctgatatgtatatattccttcactgaagataaacacatttcttgtacttatgtactatgcgtgtctccttatgtggatcttttcttgttatgagtggtagttcatgattttgagtgttatgtgtttacactttacagtaaggaatcaatttcatcctaatcaatatttacacttcttagtacttcctcttctggtagtttcagattactgaggtgtgttattttttgctgtcacagtttctggtgttgg

SEQ ID NO: 13950 - DNA, 843 bp, Brachypodium distachyon
  Intron number 2 from transcript Bradi1g35780.1 (locus Brad i1g35780) derived from phytozome v7.0 (chr-ID Bd1; pos 313 70533 to 31371375 reverse strand)
tgtggcataaccaggttcagcatttcattgaagaggtacccttttggattccttgttatccatgtttctctagttcgcaaattttagtgtgcttttgcactattgaaggcccttcagtaatcatcaagttagctattttacttttgtcaagaattaatgcttggctgcaacatatttttcagcatatatagggatttatagatgctactgcaggtgccatgattctacttagttagcacacgtattacacctgcccacttcgtgcaaatgcacttgttaagcagttttgactccagtaccaagagggaacaaataccaagaatggaattccacaacaattttgttatctaggcattcttctattttaatactatgcacacaaacttgtgaaaatcgggttatgtgtggtaaaatcacatataccatgtatatacaaatagctgagttttagtttattcaaaaatctaccgattgtaacgctgtgtgaacttctttggtactgacaaagtgttcaatgaaggcaaaatggtctacagctagcacatcatgtctgatcaatgttttcttttgttttggtccatgccattggggcggtcctttgtatataattgatctttgtctcgacaggtctagcttttgtggttatgaatgctaatttatcttcacatgattgttatgtcaaccatggaattagttatgcctgtgtactatttaaaatcgtcccattcacaatcagttggacaacatatcttcaagtattcgatgtatatctcatttatcttatgctatgtttataaccattttgcaggttattggtgaaccagtttatattgtgggaaactc

SEQ ID NO: 13951 - DNA, 628 bp, Brachypodium distachyon
  Intron number 2 from transcript Bradi1g21410.1 (locus Brad i1g21410) derived from phytozome v7.0 (chr-ID Bd1; pos 172 12763 to 17213390 reverse strand)
gtgacggaggaggaggccgagagcctcaacaagaggtgcgtgagtgagatcgggagctcgtcgcgtgctggtcttatttctagatttcttgctctgtttttctctcgtgcgcggagatttttcttctgttttttctctcgtgcgcggagattttgggttagatccctccagtttcacggctcctccttggggaaaacgttgctttccagtctagtctaggttgtttttgccgatctgcgactcctggcatctcgggggaaatacgcctgatttgaatttcggttttggttggtgtcttggtgtgcggcgagttttggtgctgtttgatacgactcttgtgtcgcgtggtttgtgtgttcttgccacaacgttctcacccactcactatgtcacgcctttttcgttcatggacttgttgcactagagtttgtattttctatttttgcatttattccgatcgctagacccttgatttccgcgaatcatctgtagttttctggataataatagtagatcttaggtagataatctactcatatgtggcttaactttctagatttgcttgtttaacacggtgcagtgtactcaatgagctgtttcatgttataatttttgtcctcaggaaaca

SEQ ID NO: 13952 - DNA, 879 bp, Brachypodium distachyon
  Intron number 3 from transcript Bradi1g16590.1 (locus Brad i1g16590) derived from phytozome v7.0 (chr-ID Bd1; pos 134 17732 to 13418610 reverse strand)
agaacgaaatccaggtatggcactgagagagaaacctttgtttgatattgttatccatttttgttatctttttgtcccctttactttagagactaccactaatcttatatttagaagaaataaggcctacaacacgctaactctcatcgactggttcacactccaactttccatattatatattgttcaaacacgaactgaaagcattctagcatgccataatgcatgatatttatttattcggggaaaattgctggtgtcccctcaggacctcatgcctctctttgatagcgcctaaagtaccgttaggtactgatactaattcttatgagagtatgaactcacagaaaaatatcagataattaatcaatctgaatcctgaaatatcatggaaagggatcaagctaagcactgccccttgctgattttgaagggtggggtacctataattacctacctgtatggggcaggaacacatcaagtacacaaaaattgctaattgttcagtctttgcagaaggacgtcagaacaaaatagcatgcatttgcactttcttatgataaagcatgcatttggaaactaatcttgttccttatatttcagttcttaaacccagactttgttagtccttcagtttcttttcaagaagactatcaacttcttttcttttcgcatatttgatcgttctttttttacaaatctttttatgtcagtggactagtgctggcaatatttgcatgtacctttgatcaaataacatgatctaaccgtatgaagtttcctttactttctcctgatttgtacagtataataatggtttacacttatcatgttttacaagtttgcgtataatatgtctttccttttactcctgtaggt

SEQ ID NO: 13953 - DNA, 982 bp, Brachypodium distachyon
  Intron number 1 from transcript Bradi1g08850.1 (locus Brad i1g08850) derived from phytozome v7.0 (chr-ID Bd1; pos 620 7136 to 6208117)
tctgctccggagggcgctttcgtcgttccaccgtaagtgcctgctttcccttatggcctgttggattcatgggcgtggcccatgttgtttcatggttgttatattttgtcggaggtctgcagtgtctgttcggcagaatgccacaaccaggcgcgtgatgtgcaaggtcactgcatttgtggtgtcggagatcagtagatggagatgcaattatttgggaaaacgaaagaaaaggtcaaaaggagataccttttcctgctcggtgtgatagtgaccgagtgtttctctgataatttgagtgtagttattgcagattaaccttcttatgggatatgtagtacaacctccgttccaaaatagatgacgacttcaatcaaacttctctaactttgaccattgatatatgaaaagattttttagtactgacgctggtcaaatgaaaataatatcattagatttgtcatttaaatggtttcattatgcaatcttttattttcttactaacatattcatactgaaaataatggccacaagctgcatcttagagatcatgtatgtatctaaaagatcatgtactttggacagatggactataaccttatgtccttatgtaattactgttagacacaattaggactattctattcgagtgagcgtgccagcaatggaagtgcagttctagtatactgtgattgaaacaatcttactcgctgttcaagcgtgtttcgctctaagtgccgccagtcacacatacagcttccttctatgtgcatctccttaccacgttcggaagaaaaatcagagtcggaagttggcgcttgcggcagtgttttggtctcttgttgtgattatccggtgtttactgtaactttgtacaggcctgcagtgtccttatgcagtttcctgggtactttactttgataggttggtccattctacagttgtccattcactaagaatttgtctaacttttatggtgcag

SEQ ID NO: 13954 - DNA, 701 bp, Brachypodium distachyon
  Intron number 2 from transcript Bradi1g36860.2 (locus Brad i1g36860) derived from phytozome v7.0 (chr-ID Bd1; pos 326 16603 to 32617303 reverse strand)
tggttagcattcttgtttttcaccacatattgacatttgggcaaggaaatagagcaggtgtttcgcacttgaggttgttgatcgattatattatgttccatgaggtctagtatggacttagatggtctctagtgtttgcagatccttgttctaaaaaaaaatccaagacttccaaagatgaaggaaatatgttaagtatacatgcttaactagaagttaaaggttacacatttctaacattagtcaatgcaattaacttacccgtggatccaacagaaggaaacaatgaattttttatcagttattctctgacaaagtgtcagccttttttctgcttattcactctccttatgttgcatctgtattatcaagtaatatcttcgttatcaaaaattcacaagagaaccctcttcctataatccaattcttcaggttcagcctcactgcctgggccaaagctctgaacttattagtctgcatacttaccgagtccaacaccctcttaattgtcagtttttgtgatatgccacaacattttttaatatttttctaggtccattgtgcatatctgtgaatcaaaactttaagataaaacagtaattgtacccaagtcatcattaaatagtgctattgtactttctagtttcctgatatgctgaactgcaggatatttgggattcaatacagaacaacgagtactt

SEQ ID NO: 13955 - DNA, 798 bp, Brachypodium distachyon
  Intron number 1 from transcript Bradi1g31380.1 (locus Brad i1g31380) derived from phytozome v7.0 (chr-ID Bd1; pos 268 58024 to 26858821)
gccctgcgccgccgccgccgccgcccgccggcgaggtgagtgcttcgacacccctcctcctccgcacgctcctcgtgatattattattgttagctccttgggtttcagtttccttggctagaatgctgctctgctggtactagtgcgaatggatggatgtgtaggcgggggggggggggggggggggggggagggggggtgctcgaccgaaagcgatgtcccgggatgcgattcggtgggatgggataggaaccttcataagttccgccgttttccggatcagaaaaggcaaaccaaaaagggatgggagatgaggcagcagaagctttttttcttctttcctttttcaattcgtttttgagaaaacgttttctgtagttggaaatcgattttctgttttgattgaggtgatccgtgatgatactcatggaggtctgtgaagtatgtattgtgtctgtgttattgggcacttcccatctttcgatgaacttaatcaaaactgacctgatggaaaatggagtatgtaacatgcagaagtcactttcttctttgactgatcctgttgagtagtggcgataatataatggctgtgccggaggcttgtcctccttttcgaaaataacaagagtcacatagttaatcagataatagatccaccgatttttaggcttacatatggtcgcataccgttgctttctggataaagtttttcaatctttgtgtcctgagtgcttgatgtagttacaaagtgttgattttccagatcatattctaccaccatttcgtcctatccaacaa

SEQ ID NO: 13956 - DNA, 636 bp, Brachypodium distachyon
  Intron number 5 from transcript Bradi1g16490.1 (locus Brad i1g16490) derived from phytozome v7.0 (chr-ID Bd1; pos 133 51114 to 13351749 reverse strand)
gcagtggcacccaagtatgatgttatttacttcttcaaatcttacttttagctgtactagttgtagttcaggattgaatagaggagtggctagcaacttaggataagaaagactttggagataaaacggaattgtccataactcctagcttctctcaattcatacgaggtcaatctgtccgcatagcagataaaattatttcggaacctgtgtctatagcaggagagttagacagtgttctattgtcactaattccaccgtagccgcatataattaaaaaaaaatcaaaatcaatcgttgaatacctttgtcttggattctattttcccacttaaatggcaaagttactgtaacgtcttgcataattaaaacaatatagtttgtttagacaatacaaaaaaattattaaccagatttacagaaagccagtactgtccaggatacaaaactagtataaaaataatacgtgcctcttattaattccactaacagtccttttttgcttaaattatagcaaactgctgcacagtaaaatttcaaagcagagctactttcagtccattttgaaaaacagctgccctaaaagtatatgcatttggctgttttctcatcagtctattttaactcacagagctc

SEQ ID NO: 13957 - DNA, 553 bp, Brachypodium distachyon
  Intron number 1 from transcript Bradi1g16490.1 (locus Brad i1g16490) derived from phytozome v7.0 (chr-ID Bd1; pos 133 52696 to 13353248 reverse strand)
ccttccgcttccgcttctgcttcctcctcctgaaggtgcttatctttctccttcttatttttcccgcacaaaaaaagcatgcatgtccgggatctgtgttgtttatatccagccagggcagggcgccacagaaaacagggcttcgtttcatttcttattctgtctgttaaatgatggagtactactgtatgatgtgcgatctccactcataataatataataatatgtgtcggctcaaacgaatttgacaagatgatttaatcgctccattcttcccttgtctgctactccactctttttagccttctccgcacgcacgccgccaatcaaaaaaggagttgcttcactgactgactgcatactgctagtaattttcttttttttacattttcttcttcctcttctgattgatttgctgcgcacgctctacgtctgggtcttggattcattggacgccactgagcacggcctactgtattatcttctgctactgctccttggattggaacccaccaccaatttcatctgcagtcattcacacataatatacatc

SEQ ID NO: 13958 - DNA, 716 bp, Brachypodium distachyon
  Intron number 2 from transcript Bradi1g31540.1 (locus Brad i1g31540) derived from phytozome v7.0 (chr-ID Bd1; pos 270 27526 to 27028241 reverse strand)
agattgctgagtccaaggcttatccgcaaggcaaggtgatggaaaaaaattgctgctgttattttgaaatgtcctgttactcgccggcataagcttgcctacaactgttaagatgaagttattcaatctcatggtactttggtttggcaccttacccgtgactagattattgcactttgatgattctgaggggaaatatgcatgattcagtttggcaccattaatagttctgaagctgtcttaagccaactccatatgttgccacttcactttgtgacttgaatcagtaatttcttttgtagacatcaagcactgaatgcattctatgcgcagcataatatttttcctatgaaatatacattaacagtagctttgagtttttaacattttgaatcccagttgtttccttgctccaattgggcagtgcttttatgctctcacgggaacacacaaatctcaaaggcaatatgattggagcttgagttgggtggttgcaagccaggcgaacaattttctctagaaagtgtacttctaactgtttcttttgaccgagcacttttcactttttttaatcgtactgaaacacttttatatggaattttatgctgcccagcttatttttgtggttgcaatattcttttccaacttattccacaaattggataccctcttattagtttttgaatttggataaaaatgcatgcaggtcctagtgg

SEQ ID NO: 13959 - DNA, 849 bp, Brachypodium distachyon
  Intron number 2 from transcript Bradi1g13450.1 (locus Brad i1g13450) derived from phytozome v7.0 (chr-ID Bd1; pos 102 23561 to 10224409 reverse strand)
cgtggatccagtccagcgagatcaaggacaagaaggtgagctcttaccgtcctgaccaccctgagcaatagttttgcttctatacatacatggatggaagtgcacatgatgcaatgcgctgctttttgctcagaattatgtactgtcaggctgttctgtttagtcaactgtacggatacatgtatatatgttatatcgcacaatgtcggcggcaattgagcaaataacctatttagatggtgattggtcatgaacctttattggagaattttcctttaatttatttacaggctgtttggtgcttagctgcatcggtgaccaattgcgtatgtgttattttgtcaaggaagtagtatgagaaggttttccttctgctgcttttgtcgttagtagccgtgttgtcgtctagtttcttttgtagtaactagaaatgacgttacatgttagtacaattaatacgagtgtgctggtccattcctgagctggtttcagaagatgccactgtactgctaagctatctgggaagtatgtatgtatgtttgattcgtcaactgtaagaattgtttgctttatgttgttgtttctaatctaatttgatcatttcaaatttcatactactactactatatgatgcacggtttatttgagaacaaaaggatgttttactgaagaagtatggtagggttcttgattttagttgtccgtttacagcaccagttgtttcctctatttcttgtggttttcttgccattgtgttttctttatgtgccaccatttttatggagacatagcttattgttctgggtttaatacatttgtgatatatgttgacataggttagtgcctctt

SEQ ID NO: 13960 - DNA, 233 bp, Brachypodium distachyon
  Intron number 1 from transcript Bradi1g17520.1 (locus Brad i1g17520) derived from phytozome v7.0 (chr-ID Bd1; pos 140 47318 to 14047550 reverse strand)
tctgagaagaaggtcagttgagttgcctaggcatgcatggtactgtgtttcatgcgcagctagaatatttgaagtactccatccaaaataaatgtctcaattttgaactaaacctagttcgaaactgagacacttattttggatcggagatagtacttgtaattaatttgttttttcttctgccatatacgatcgatccaggccgttaagttggtcatcgaagccaacttgga

SEQ ID NO: 13961 - DNA, 769 bp, Brachypodium distachyon
  Intron number 2 from transcript Bradi1g36830.1 (locus Brad i1g36830) derived from phytozome v7.0 (chr-ID Bd1; pos 325 74666 to 32575434 reverse strand)
ggcaagtcgaaggttctagtgaaggtacatcttgtttcattattactcataagctgtgcttgtgcacttctgtcatattttgttggcaaaccctcagttagttagatcgatactttatatattttatattcaatggagcattactctatgtagacaaaagatgattgctttctttccgcaacacccaaaaatatctacttgaaaatatggcatggaaactagaaataactttgcgatatactccgtatattctctgactttctgatgtgaagagccgcatatgctatactttcacttagggctaaccaggcagtgggatattattatttttaaaagcactgttgtatctatgatgtttgacatagctttcacaaccgtttaatcgtcatttcacattacactgttttccttacttgaaagacattaatgatgcagagcttacatataggcatgacaatggagttcgttaaaatgtttgtttgcttgcttcgttcagtccccctgataatctatttgttcgtgcctatcatggtccagagggcatgctagtctttgcaatcttgattttgtgtaacttaacacatggatagctgttaggttgtcctgacaatcttgattttgcatactgtatgcagatgctataatttcacaaacacctcatagtatcaaaattatttttgatctgtttgctgtaagtgggagctctgaatttctagtactgtgattaaatggttaaatgcattctctcaggtgcacccagaaggcaaat

SEQ ID NO: 13962 - DNA, 601 bp, Brachypodium distachyon
  Intron number 1 from transcript Bradi1g36830.1 (locus Brad i1g36830) derived from phytozome v7.0 (chr-ID Bd1; pos 325 75504 to 32576104 reverse strand)
cctcgaggcccagcgcaacgacctcaactcccgaggtatggccccgatcctcagtctcgcctccaatcccctgtttttaatttgggcgactttgcgtaaccctagttccctccgcgtgtgagttatgcccaacttacgatccgcatgttctagtgttggattgcgagcactttgattaatccaagtggctctagtagagcgcttcatctgatgatgtctagttagtttctccgattttaggcctcttttgatgcgagggaatagatgatgtttgctcatcgcatttgtgtgtgtgggtgggtgggatttgggtgtatgtgtactcctgattgtacttatctatctttttcttcatcgaaattcaacagcttttgggacatttatattgacaatttaaatgcccatcgatgattcactctccgaagtttatctgtatgttagctcttggaggtgtaaaatcctttctgttgttatgtgaagcagtggtgttagctcctttttaatgtatataagatgtacactacaaagaactctgctatgaactaaaccattattgttaacatcattgaccatcctcaatttttgtctaattgcagttaga

SEQ ID NO: 13963 - DNA, 907 bp, Brachypodium distachyon
  Intron number 1 from transcript Bradi1g24110.1 (locus Brad i1g24110) derived from phytozome v7.0 (chr-ID Bd1; pos 193 66517 to 19367423 reverse strand)
cgccctctcctctgcgcgtcttccccagcggccaggtcgtcacctccttcctccgcgcctcccccgcctgcgcgaaattgcagcgctgaaaacccctcaaatacttcccgtaatggttttatcagttgtgttgcgcgtaggaagtactggagagctaagacggaccacaggtccggaatgcggggtgatgctaatgccgatatatactttcatcacttctccttccacgacgcaacctgttccaccactgtagttactttgttttgtaatcgcacggttttagacttttagtagtaaacgtctgagactagacgctcgagccaaactaagattgatttagatttagaattgctgggatattctaagctacatatgacatcttcatgaagcaatttcacgttctatttgattaggcttcctttcagcatgtatttcatgatgcttgtgaaagcttatagattatacttgtgctttctaagtttatttccacttaatgggtaaaatatcaggaaattattgatggctgtgaaccttctcccaaagttctggatcgttcagagttcagacgtgattgaggccatgaagcaattgatgcatctcatgaaattaatcacttgctatttgttgtttgtcatggaaacccggtgaggcagatgtagctaatgtggctataaaggggctagagtctagataagatctgtctactgtattcacaaaatttcatcagccatgaatagtttggcagggcttcgtcaaagaatactgcattccgcattttgtggctatctctcagtactgccactaccttgcatattttcatcaggacttgatatttgtggcaatatctcatcagggcatactgtaattcacaggttgcggttgtctctcaagtcgttcttccctgctg

SEQ ID NO: 13964 - DNA, 829 bp, Brachypodium distachyon
  Intron number 1 from transcript Bradi1g13170.2 (locus Brad i1g13170) derived from phytozome v7.0 (chr-ID Bd1; pos 998 9526 to 9990354 reverse strand)
cgaatccatcctctcctggttctgcaactccaagggtacttactcctcctcctattccgcatcctctgagaattttcttctagaagaaacggaattccggccatggtacgatagtaaaggcgtatctcccttctatcggtgttaatttagcctcctcaacagtttcttcttgaggcggctttagggattcggtggcagaaaaaaacggctatttgatttgtagttctggttcaaattgaatagtttatagttctatggattatagattatattctatgccattagtctgaccaacatccaaaaaatggcatatccatggtatggaccgatgaaacaatttaatttaggttcgagctaccgagctttgttttaccaataggaaaaatatctacctttgtaatgatttgcatctcagcttactaattctgttcatcctttactttagtggtcgataatattgatctttctgttctcaagtacttatattatgcataattcaatttatttgtacacttttttaattaagaatgtactccctccatcccataattcttgtcgttgttttagtacaaatttgaactaaaacaacgacacgaattatgggacggagggagtatttttgtaaggaaaatcaaatatcttctacgttatcagtttattttaggtagtctggtgatttcatctagaccataggttggaaaagtgattttggcatggtttacatgttttgaccatatgcttgtgggttcgaatttatttgcgtcattcttttttatgtttgcatttacatcaaatattgttcatgtttcttttccaggtccatattatt

SEQ ID NO: 13965 - DNA, 811 bp, Brachypodium distachyon
  Intron number 1 from transcript Bradi1g03010.2 (locus Brad i1g03010) derived from phytozome v7.0 (chr-ID Bd1; pos 201 0602 to 2011412 reverse strand)
ctacgccctctgtgcccgtccgctacttgcgcaaggtatcctgagtctgtctatgtttgctgctcaacgctttgcaggttacaggactgcctgaaatttaatctgttggccgtgagatctagtttacttccctacttatgagttatggcgttcagcttttgaggacacatttcagaattactctggactgcctgcatctagctttgatttgtttgtggttttagaccatcggatgttcttaatggtagtaattgtggatagaaaacagcaaccactcttcatttccaacatgactctaattctagttgatgtgaactttattgattaacttaattttgtcgccatgggctccaatagatgtttgctaaaacgtgttcccagttttgatgtgtaatcggccagtattggttggtacattttgagatttgaccactagtttggtaatggtgttgttagcgaatgaaatggataaaatctgtctgccgagagcttcttactttgcaatcattgcgcgccatgtaacttagatctagtataatcagttactctggtttttgtttgtcatctgcacatcactgtactatatgtatcttcctttttgccaactacaagacattaatttgtcggaaggattaaatgacatagtgatatttgcatgatgttctattcacttacaatggattttaattttcagctgaaggcagaccacttttatttgttaaagaaaagaaccatattgctttggcgctgccattaaaccgtattggttttgttctcttgcaggcaagcacagggctgtggaagagtggtg

SEQ ID NO: 13966 - DNA, 590 bp, Brachypodium distachyon
  Intron number 1 from transcript Bradi0012s00200.1 (locus B radi0012s00200) derived from phytozome v7.0 (chr-ID scaffo ld_12; pos 624 to 1213)
atctgctgctgcaacaaggtatatttgatattcaatttctctatgcgtctgtatgttgctttttaagattgttctaataaatttcatatccctgcttaagcgttgttatccagttgataaggacttcagaataactttgtaaatgttcagtaacattcagccatgtaatgctttgctatctacatgatgtgaaccttcagaatgacttggccactggcactatagtttccttgaaaattgagcaccatttatcttattatgagttgtctgctttcagagtagcacttccctgtgtagttagtacatcactgtttatcttccttccaaaagtcagttgattttatctcatgactttactgtgttgttagagcattggtgtttatgttgtgtacgctgctgacctggaatcataatattttcctacagaatgcaattgcttgtgtgctcagtacctcttatcctacaatcaaatgtttatttgtactatataaatgttatttcttgttttaatgcatcttcttttcattagctagtacttaatttttgcctgctgtatttaactgatgggatgctctgatgatctgttctag

SEQ ID NO: 13967 - DNA, 812 bp, Brachypodium distachyon
  Intron number 1 from transcript Bradi1g07300.1 (locus Brad i1g07300) derived from phytozome v7.0 (chr-ID Bd1; pos 512 4714 to 5125525 reverse strand)
aggagaaggccaaccacgtcttcggcggccgcactgtgagaaaaacctcccttctttcgatttcacagaacccgctggattgaatcatgactgttgcacttacattgagaaatcggactgcttgaaagtttaggggcgtgcgattgaatgtacctttttcctagttaatctaattgctcatggttggtgtgaggtgaccagattacattcgtttcctgttaatgcggtttaccatcaaattgaattggggcaattcaattctctaggctttggtacttcctctaattcctcttaagaattaagatacaaattctgtagataatttgtaatcgtgctgctttgatttatcctaggacagtgggtgtgtatagtaagttgtaccaccggtttaaacgagattacaaaatttctgacttccagtgattcctcgagcatctgaaggtcctgagaagaatttatggtagctgcttgtggttagaaaaaagaatttgccacagtatttattctgtgcaatgtgaagcttctttagatcttggggtgttttagggttttcacatgtttttatttttcctcttagcctcctagaaaatgagtttctttattgtcataaatcagttgaattatattccttttttgctacattgtgtggttgcgtgttctgcagagcttgcttgatgtgtcttctgcacaactctgctccagtccaacacaattttaccattctgtgcaccatctgttttgttgcaaaaattgtttcttagccacacatctgaactacgtctatgttgttgatgatgtatttggataggttg

SEQ ID NO: 13968 - DNA, 686 bp, Brachypodium distachyon
  Intron number 3 from transcript Bradi1g41970.2 (locus Brad i1g41970) derived from phytozome v7.0 (chr-ID Bd1; pos 387 09387 to 38710072)
gattgggcaccaggtattgataatttttgggtacaaagtttatattagtaggttctttatgtgttccagtgtgataacctaaaatcaaatcttgatcataagtttgggagatgggtaagttcagtggttatgtcagtttgtgtttgctgaactgttttgtgctgaacttactttatactctgttacgagcaagcaggcgatcgaccacttcatttaagaatagtagaaatcataaatattatccatccagcctaagcagcacctgggcaaagagaacagaacagacctaaggagctatacatattaacaaaaatgcgatcttgcaagattattttttcgctgaacaacttactcatttagtgtgtacctgtaattctgagctgctgtaattcaattatttctaaacagcaggttttcttttgtatgtacacgaccacaatctttttgtttctgcaccttcttttctgttcagccttaacatgttatgtcagttactttgaacttgtcatcttactgttgaggtgctgcttaggatttgtaatcactttagtttttggttgtactgcatcctctttgatatattgtttttgtgtttaagcatgaaactgagcatttgttacatttaataactgaaggagctttgtcatgtaggtgctcggtattgttctctggttggtgatttcaat

SEQ ID NO: 13969 - DNA, 850 bp, Brachypodium distachyon
  Intron number 3 from transcript Bradi1g29540.1 (locus Brad i1g29540) derived from phytozome v7.0 (chr-ID Bd1; pos 251 08949 to 25109798 reverse strand)
cttgtactggttggatctattgagaaatttgctttgtaagaactgttgtgctatctgtcgtattctgaaattagacatcagtgctagaaattatgtctgtagtgattttattctgaaactaggtggtgattttattctgccgtgtgattctcaagtaagacagcagtggcttgtttgcggttaatttgttccttcatcttagagtattaatttgttactgattttatcttccatgtagcaagttaaaattatgtgccactgtcacctgtatattaatttgttactgattttatcttagagtattagcaagttgtagtagcaacatcagcaagatcctctgcctcttctagttgagtgcagtactgctgctacttaatttgggtcttgggtgcattcatgtattatgtgagcagtagcactgttaaactgaaaactggacatggtcgtccaatttttgcatgatcatcttgattttgtcttcttggtccgagtttgattgattgtatcattgtatgtatattcaccatcttttgtcttctcactctgaggaggataggtttggcccatgacagattgtttgtaacaatagaacacagtgggagtgtttcttttacatgatattggaatttgccacatagtataatgttagccgtcatgatatacgacccagttttttgtttctttgtttgttcatgtactgttttgaccaattggatagcttctttgtttgttcttaggtaacttattggatccagtttcttctactgattttagttgtacatgttctaatccgggccttctatttttattgcaaggctttggaagcttcggtctgcatctcctagaccat

SEQ ID NO: 13970 - DNA, 790 bp, Brachypodium distachyon
  Intron number 4 from transcript Bradi1g30440.2 (locus Brad i1g30440) derived from phytozome v7.0 (chr-ID Bd1; pos 257 90891 to 25791680)
gactgcattggtgcaaagtaagtatcagatttgttttcggttttgcttcttcacacatatttttctagatgtatttcataattcatgcacatctgattgattatctgtttctcactgtttactgtattgctttagtgattacggtgcctgttttaattgttcttcatctgagtcaaattccacgttgtaggggaagtatattggtctgtcaacgttaacctcgtaatggcctccaattcttaaaaaaaattccccacacgactactcttgatgggatgcgggagttggtttggggcaaccaccataagcacctcgagattattgtttgtaaatacccactacttcattactagccatattgctctttttctagggaaaacatagaagcaatctcagaatataaattctgggtttccagttattatttgtctgattccctgttccagcatactcgaacacaatgtacacaatgtctttgtgccaatcccatgtattctgcccattggtaagtttgtattcaacttacagaattgctgcctttgttttttgttcctttttgaaagcgacaataaatcatttcccccgcatctcatttcatatgtactgaaacaaaactttggtgcttctatatttcataatacaccacttaattatgcttttttttgggtacctatcttctgtgaaggcctcattatgtttcgctctcatatagtcatcttcgtgtaagctaattgtagacatttaatcatatgcagggaactggccaaggattttgttgtctcagggacag

SEQ ID NO: 13971 - DNA, 717 bp, Brachypodium distachyon
  Intron number 2 from transcript Bradi1g07360.1 (locus Brad i1g07360) derived from phytozome v7.0 (chr-ID Bd1; pos 518 0394 to 5181110 reverse strand)
cgttcttcgaatcttgaaggtctgctctagttcaattttgtatgtctttttttcagtaaaaataattatagagagggtaaaataagataagggtagaatgattgaatttagtgcaatatttgctttagtacaagaacctttgcttccatcactgcattttttttttaatatctagaagcttctcctgcgtacaatctacttaaaccaaagttaatattagcttggtatgtctacctaagaattttttatttttttggccttacaacagcataattatttcttcaaatagtcagctgcataatcatgaactaccactagtagcaaactaatcattcctccatgttcaactgacaaagaaacattgtttaagcataacgagtactatatgcatgtctgtttcaagctgttacatcaaacggatattgctttctatatatagtagaatgtgtcatttaaccaatacaagtcaccgaagagggcatagcccataaccgataatacaccttgcatgtaccagctggtgggggattgaaacaatcataccaatcaggcccatgataccatggaccttggacatgccttactaatatggtacctcaatcaggaagatggaccaatcctgaaactaaagaacaaattcacttaagttctgctattctctgtctaacttagcttttatgctcctctacaggtagcagaattactaggtttccgagc

SEQ ID NO: 13972 - DNA, 956 bp, Brachypodium distachyon
  Intron number 1 from transcript Bradi1g11300.1 (locus Brad i1g11300) derived from phytozome v7.0 (chr-ID Bd1; pos 834 3587 to 8344542)
ctcgccgctcgccgtcgtctgcaacttctggaaaggtccgtgtctatcttacttcccctttgttttgacttgatgctgattctggttcggcgagccccggaggcaggttgggttggatcgtgggcttaagctgcggactatcgcgattcccagttgcgcggacccggtttggcccgtgattgcaataatttgtgcggttttcttactaatcgcgagtaaagagatcttaatgtccttgaaatgctggcttaggtagttgcatttgttacttgcattcatatgtaccactagtatttttgcgtgtcacttcctcaagtggctgcgagtccttctcttaagtccaaacggatcactaggagtgaaaacttctgggagagatcatgcgtatgatatgaccgtgacaggcagacaagtgcagtttcagtaatgaaggcctgttctttgtctcaaacttaaatttgtcatttctgtgaaacttggtaaagcttttactgtcctagattagttcgttcgctgatcagaaatagtaacaagagggagatagtttttgcataggtagttttacatagctactccgcaggaaagcaaagcaaagctatatagctacatcatttgcatagggagtcagtgattggtcacaggcgccatgaacttttggcatctgctttaatcattttgagtccatactaagtagggagggtagctttgaggtaccatgccacttgatcttcgctgctttcactttcatgtagtgtctgaaaaagttacaatgctgaaatagcttccaagtttgaatgctcatgcactgtagaaagttgattgattcattgcatcattcttgtatgtcgaacctagtatcttcttcatgttaatatgctacccatgatcaagaatctgactgttgtttcttgtgcaatttagactttgatttggagaaagaaagaagtggtctggat

SEQ ID NO: 13973 - DNA, 717 bp, Brachypodium distachyon
  Intron number 2 from transcript Bradi1g20530.1 (locus Brad i1g20530) derived from phytozome v7.0 (chr-ID Bd1; pos 164 13708 to 16414424 reverse strand)
aaaaaaaccaaattgattaaggtatgactggttcaagtgtcgtaagttggcagaaatgaccattttaagttgaaaagtaaggcggaacactttcattgttatagttggtgtgcgaaccttgtatagaaagtgataaactttatatgttatacccgctcctttccattttattaggcagatgatagttgtgggaggttagagaattagtttcatgccctttaggtgcataggagatggggctggaggctgcatgcagcagaaactcagcaatcaccatgcaagaaaagggaaggagaacagtcaccatgctcgaaaaaggaagaaatgcatacaggtcattaacggtacattaacgggaggaggaagcgaacatcctaggaaaaaataatcagcctaaattgaaaaacggaaaaaaattcatctgcctaataaaacagaaaggagggcgtacgatataagagtaaaaatggatgtatctattcctaaaaagtgtctagatacatgtaatatttcgacaagaattatggaacggagggagtaccttttgatattctggtttatcgaaaaagttaccggtgtttcgttttctggatttcatcatttcatgtggaactttgaatgctgtataaaattaattgctcataaaacattacttggtacgtatttatcccttctcatcagttccctaaaagaccattattttatatagacagagaa

SEQ ID NO: 13974 - DNA, 893 bp, Brachypodium distachyon
  Intron number 1 from transcript Bradi1g06480.1 (locus Brad i1g06480) derived from phytozome v7.0 (chr-ID Bd1; pos 435 5846 to 4356738)
cggtcgtcgtcgccgccgcccaccccggtcgccaggtacggtctccgtcgctttatggcccccctccttttggttgtagattcgccgcggcagtggccggcgaatcaaagcgaaagctggatttatatttggcggggcacgattgtacagagacctagcataggataggattggaggtggtgttcgcagggagcgtaggcagactgtgcataaatgttcgattaaacaattgggctgaaggggggcgaccggatgatgtacagccagtcagccatcaagttgtcactttcctgtgggatgtattattgttaggtgtaagctggcgatatttggtggcttaattacaagcaacagggcgaaaacctggtagcaccttacaaatatctacagccatatagggaaattaccacgagtaacaaatggaagagacataactaaccgtatcacgcatcaaagagatactgctaccaccttgaacatgggttttggctgagtcctgagcatcttgaccatgaacttattgcagcgccttctgcataagatgatctgtccctggctgcgaaccatacaatttgtgctgtctaatggtggttggctggttgcctccgtagatctcggacaaattgatgaactgtgccattggaataggatgatgcaaaacattatgatgttcttggacagtgaaggctttattactcacatatatgttctgaggggcggtttataagttttttcatagacctgcttgctaaaaattgcttcagtatgaaactatgaatttagaatacttccatgatattttgttgacattcttgtcttaaatttgtaatttcaattgcttgtacttaaacctcttttgatttctcagttctgctggtgcctcatcacctgct

SEQ ID NO: 13975 - DNA, 1056 bp, Brachypodium distachyon
  Intron number 1 from transcript Bradi1g12420.1 (locus Brad i1g12420) derived from phytozome v7.0 (chr-ID Bd1; pos 930 6688 to 9307743)
tccaggagaaggccgtgcagatcggctacaaggaggtgagcaatcgatcgatctgcttgttcttcaatcgggttttttttcaggagtgtacagtttggttatatacgtgcagcctaattttatttcacgaatttggtgatcgatttttctaatgctcacacacacctcgaagttcttaaataatcagcaagtgaggagattaaaacgtactagtccgcacatgactaaaaaattgacaaaccaatttttaccttgtttttttttctctaaaaatggctttcgtccaactttattactacgtacaaatcttaccatgtttaatggtgctacataaggtaccaacagaatgcattaacaatacacagtacatggacacccagaagttatcctgcattttctttaaaccaaatcgacattgagactcttttacacatggcaaatcgaacacgtacgtgttattatctacctgcctgagagcattggcaggtctagaatttatagaatgtagacgcagtgggtgcaaatagcactaattatatcaatttatatacttaaaaacacataaaacttgaaacgttatatagggattgccaaattctctgcgtgcagctatcacacacacaccctgtaaggccgtgtttgtcacaactgtttttatagtgttttctagtgtattatccatttcaaattggaaacactatgacaccgccaaatggttgtggggattattcctagtttgatccagaaaagaccgcatttttgtaccaattgaaaacaattttcatactagtgttaaaaaaacactagcgttttaggttggaagggttttttgagagttttgagtaaacagtcaaaaccctcaaatacgaaaacactggtgactaaaaaaatacagtaatgataaataaggcctaccatggatcttgcctgaggagttagaactaatggtactaggaaaaaaatatagattaatatttcataaaattgactctcggttattatttgaattatttatttgcagggtttggagaatttgaaggcttcactgcagtccaa

SEQ ID NO: 13976 - DNA, 696 bp, Brachypodium distachyon
  Intron number 2 from transcript Bradi1g12030.1 (locus Brad i1g12030) derived from phytozome v7.0 (chr-ID Bd1; pos 893 7804 to 8938499 reverse strand)
gcggagcttgcccaccgccttcaaactcttcaccggtatgcaaaaaatgctgctgctgctgcctgctgcaaatttgtccatggatttactctggtgcactgcatcccatgatgaactttaatgtttgcgctacggcacgcgcgcgtggatgccaatgtctcttcctaggaaaatgccatcgtctccgattgtcacatagcaagttaattactggtattaattagattaggttctttctgctgcgtagtgtttgtcgccgctgtgtgtccactttgacacgatacttatccctgacttcgtaacctaagataattaacttccttgtactaatcattcaggaccaagtcgccagctgcattccggttacaatattgtttcatttgtggtttgcgcattagctactttgacctaagaaatcatggtgcggtgcacgttgcatgtatactacagaagaacatcaggattcgatggcaaccacatccaagaattaaaacatcttgattacagcaactatcccatactagatcgattatatgcgaccagaaaactatttgatctttggatatgtaaacctatctttttacagcagtaaacagtcaacacacttcatccataaactctcccctgtgacagaagttccaaattcagaagacaactaataagccctcctctctgttttttccaggctcagcgtgg

SEQ ID NO: 13977 - DNA, 872 bp, Brachypodium distachyon
  Intron number 1 from transcript Bradi1g20450.1 (locus Brad i1g20450) derived from phytozome v7.0 (chr-ID Bd1; pos 163 68023 to 16368894 reverse strand)
cgacggccgctccttccacgactgccgccctgcttgtaactactcccctcctccatatcaatgttattccgcctccgttgaatgctctgctccgtgcttaacagtctttgttgagcgcctcctctaccttgactgctgcgcgcttgaggtgttcgacgttatgcgtgaccagcgagcgcatgcctaatgccacactggcatacaattaattccttgggtccagcggtctttgaggattctcaccgtgaaatgcctggattaccatgcctgtctaagttgtttgttgtttgtcctgtgtcatgtatgctgctgcatctagtgaaaaacatggtgcttgaccgcgttactttggacttttgtgcacactcttgagctagtgatctattccaagcaaaaaatcattagaattgatgtttcactgttatgcttctgtagccggttcttgagttaaattgatgttgtgtgtatctctgctttgaacgaaaagcacccacaagtctaactcgcaaagtatcgagcatgactggtatacattaacacttagccttgtgtcatttccatccataaggtgcaaaatatggcgacttgtagatacatgctagaccagtttgctattagtaaagcataacacgatctttagggcatagcaacaaatttcttctgtgtatgagtattatggtgtatgacatgcttgcacaaacttacttctttgatatattatctgaaaatgtgctttgctgtctctccctgttctcttgatcttggccagaaaatattgcttattgttctgtaacccatggagttgaatcttgaaactagtgcgaagcagttctgtattggagtcatttctgatttaattgtacattgcagtt

SEQ ID NO: 13978 - DNA, 903 bp, Brachypodium distachyon
  Intron number 1 from transcript Bradi1g25650.1 (locus Brad i1g25650) derived from phytozome v7.0 (chr-ID Bd1; pos 208 10176 to 20811078 reverse strand)
gccggcgaacgcgacgccaccggaaaccggaggaggtgagcctggagaaataacttccatctcatttgcattcgcgtgcacgactcgtctttatactagaagcaattgcgcgattcagggagaattcgatctctgaagaaactcaaggtgaattgcgtcgagtccatttacacaacataattctaacaggttgcccaatttgatccgattccaaattatactagtaatatgtagtgtcaccgccaatcaggtgtttttctattggttgttttaatttattaaaaaggaattctgaagcacttggttgttttaattgtattaaaaaggagtagcaaacaacgaaaaagagtcagagatcattttcaagaagcacttggctttctcctttttctgtatttgtgacttccttgcagtcccgtagctatcagttgattgactggagaacagggaacatcatagaagcccctggctgcctggtcagtgttgcattctggctgaatgctagccataaaaaatctcatgtgaagagtgcattttgaaattagatcgtccttctataatttggtctaagtagaaataaaattcttgaaacaagtatctccttctcatctggtattcagttactacataattgcacgtttttccttcttacttgtcgtattcacacaggctcttgtaagaaacactcctgtccatgtattaattcaaagcagaaagatataaaactttgggcactatacacatcaaaggtgttgatagcttcatcaagtaaaagttgcatcacaacaaggcagatgcatcatcttcttcggaatattttagaactatattctgtttgtattttattaatcattccttttatttaaaggtggaacaacgaacagtgctggtaggattttagcg

SEQ ID NO: 13979 - DNA, 484 bp, Brachypodium distachyon
  Intron number 1 from transcript Bradi1g24250.2 (locus Brad i1g24250) derived from phytozome v7.0 (chr-ID Bd1; pos 194 64759 to 19465242)
cggtcttcctcctcgctcgagcgcctccaccgcaggttaatctccccttcgattctctcgctcccgaccgtttctcctcccatcaccccacgaacggattccgccctttagatccccgtttcataaccttccccaattcgtaactgaggaaaaaattagtggacctccataatttctgggtgtgccggtgcacacgcagcacaccagctagattctcccatgcgccacattccccacatcatgaccgactctgcattagggaggaaaatacctgcgttcccccggcctcttaatttcccctttttgattggaattatctcttgtccaggatggtgaccggttattttaagaagacgaattaattctttccaagagagcaaactaagctgtacttgatgcaattaatagtttttttgtaaacctgtagtgctaacttcatttacatgcctctccagggaattgtgcaaggccatttttatacaaa

SEQ ID NO: 13980 - DNA, 673 bp, Brachypodium distachyon
  Intron number 2 from transcript Bradi1g06870.1 (locus Brad i1g06870) derived from phytozome v7.0 (chr-ID Bd1; pos 475 7832 to 4758504)
atctgctgctgcaacaaggtatacatgctatccaacttctgtatatgtatgtaaaatgctgttctagattctatagaacaatgctcagattcatgtattatcttgctatatccacttgatattatcattaaggatgacttaaagtatgttcactgtccaacaccattctccttacgagttgagcaccatttatcatgttatgtgttgatcatgtaacagaagatactgttaattgttatgtttctgctcaatttaatctgatattctgatttgactcccttgtgaattgagcaccgttatcttgcaatatccacttgatcattaagattgacttgatacatgttcactgttaagcaccattgttctctcaaattgagcaccatctatcatgttatgtgttgatgatgtaatgtaagatactattaatgattactttctgctccatttaatctgaccttactcctgaactaggagtagtgattgcatccttcatatcttccttgagtactcgaactacatgtttgttcataaccacttcactgttattttttagttatattttctgttaatcatgtttgatggcatagtcagtccaaatgtcacttccttaactagtgcctgttgtttgacttgtcctgttaaactaatgggatgctctgatggtatgtttcag

SEQ ID NO: 13981 - DNA, 307 bp, Brachypodium distachyon
  Intron number 1 from transcript Bradi1g26310.2 (locus Brad i1g26310) derived from phytozome v7.0 (chr-ID Bd1; pos 213 61160 to 21361466)
cttttcttggacttggttgggagtacagagaggtcaactttgtgtcaaaggcaattgctgctgctgctgctgcttcttttttcctttcagctatgtttgagtcgttgggttgcttctagatccagttttggcttttcagtttgatttacttacttgaataaattgtgagtttttagattcatgggtggattcgtatttaatccagtataaatgtttcttgattgttttgcttgatttttgacagaggttgtcttcttgggttttgcttgcaggttcaggttttggttggtttcatctggtcggctac

SEQ ID NO: 13982 - DNA, 528 bp, Brachypodium distachyon
  Intron number 2 from transcript Bradi1g29050.1 (locus Brad i1g29050) derived from phytozome v7.0 (chr-ID Bd1; pos 245 46316 to 24546843 reverse strand)
ttcaaagcgtgctacaggtggcaagcgtgataaaggtaaaagggtgaggcgtgatgatgtggttgaagacatgacacgctctctacgtggtatgtccgaaaccatgcgatttcacgcatgccacccacccaaatgagaatttattcaaaatcattgatgatatggagaggagtaccctctcttgatgcgactcgccctacaaacagctttagccaccaacggagatgttgctgccatgctaaagggaagaccaatgccttcgatccaagagtatgtgaggcaatggatgcaacaaaattcatcttcgatttaatatgtttttagccaaactttaggataataatttgttcttggtagccttttttccttgaagggaaataacacccttgcatgatgcgtaatttgattcagtctgtaataataagcttgctcatttatctttcgagataaaataactgtgacgttgaaatatttgttaaagaaaattatcttgaagctgcaatgatttttttgtcagaacctaagtaa

SEQ ID NO: 13983 - DNA, 753 bp, Brachypodium distachyon
  Intron number 1 from transcript Bradi1g35600.1 (locus Brad i1g35600) derived from phytozome v7.0 (chr-ID Bd1; pos 311 59001 to 31159753)
cgcttccatcgcgcttcaccctccacggctccaaggtgcgcccgtggatcttgattctttgttaattatcggttcctagattggtaggagggcaactgggcaagaaccggcgggttctgttctcctcctcgctccacaaacacacacaagaaagatgtgcttctgtgcttggatctgaaggagtttgtcgtgcttgttgccaagtccaagtcctgggaagtaccaccgcaccgttctttcaagatgaacttgtccaagtaccccctcagttttcatctaaaaaaagtaccccctcagctggtggtcatcctttttttttccattcatcaagttcagagtatagttctttgccagacctggagtctcgagatgtttagccagtccggattatattagttagggcctgttattgaggtgttgggtaaacatttgctttaggtgtcgacagcactctggtccaagttagttgagtgtagatggataagcttaattgctgccggtattttagcaacgaaaaaaaccccacaaattcaatggatcgatcaactacgtactccacatttaacgcagcaacgtactagaaaaccacccaaattgagaggttgaactaaattcaaaccagggtttcggctgtaaattttggttcaattcaacgtggtaatggatcgattgtttacacatccgtcacattttcctacttctgcctacattgcatcaggcccagggaaagctgcactccctcctcgcatacca

SEQ ID NO: 13984 - DNA, 999 bp, Brachypodium distachyon
  Intron number 1 from transcript Bradi1g26840.1 (locus Brad i1g26840) derived from phytozome v7.0 (chr-ID Bd1; pos 219 06651 to 21907649 reverse strand)
gcgacccctacgtcgtcctccgcctcggacaacaggtgatttctcctcctaattcctacctctagtactctctcgagcctcctgatcatgagccaacatggatgggtcggggcgcgcgcaggagggcggaggttgggggcttggggcaaggccggacgtaaaaaaaaaaatactccctccgatcctaaattgttgtcgaaatattacatgtatctagacgctttttaaatacagatacattcatatttgggaaaatttgagtcaagaatttaggatcagagggagtaacgatgaatgagagtgtaaaattctcaaatttaaatgtgcgtctctagcttgtgagcaatttttggagtagatgaatcaagatgaccatattaccatttttgcgtactagcgcaatagtacatgtttgaaaagaatgttgtactccatagtatcatttgttcttgtctcatggtcgcggatcaaatgatttttacccatatcttctatcatctcaatggtttgaaagggacgggcagccaccaccaatccgtctgtaattgagacttgagatctatatgggtgtaaagataggtagattacggtgaggcgattgtgtactacatctgttcggatttgtaaggcttgtgtgtatctccgggtcatcaatttgatcagctaaatatgtattccatatcgtattgcacaaaataatatacaaaattcgtaatcaaatgaattttttaatgacaatactttttatggcataaattatatttcattagtcaaattgatgacataagaatacgctcgggctttataaactgaaggaaggagtatttgctttcttcagattagccgcgcttctttcatttcataggataacaccttgtgtgctgatattattccttgaaggatatgttgattcagatcatcccctttctctcttttatatgttttttttccttgaaatgtgcagaaagtaaagtccagtatcaaatataaaaccatcaa

SEQ ID NO: 13985 - DNA, 991 bp, Brachypodium distachyon
  Intron number 3 from transcript Bradi1g35080.1 (locus Brad i1g35080) derived from phytozome v7.0 (chr-ID Bd1; pos 305 93576 to 30594566 reverse strand)
gcagaggaacttccagcacccagatccttacatcggtatgctttgaaatgctcgcgccttttgttcctgctgtcgctgcctctgcttgtggatccagtattgcgtagtcaatcatgtagggtggtggcaattgttgtttcatcccgcggttgagcaatgagtaactgatcatttagtcgaaggatttctatctattagaactggtattgccaatgagtatgtagggatcaccgaagttgtgagctgaaccttgctttgttctattggactgcctaattagaatggtttaaatggcaacatttcatgtctagtcatcacttccgtcatcaccttatcttgctatttccttttgctggtttgtaaaactgcttattagcattcagtagcagccggggacgtccttttctttaaaagaatattcatgtttatctaagatttctacctgtctacgtgtgaggtgtgttgctagtcacaactactaatgtgatgagttgatctgttgatgtgataatctttgtttgttactcggtggttacttcttgaagccagaaatgcacaaacttgttgcatgttcattttatctgcatgttattcccatttaggataatttatttttaccaccaattaattcctgagaacagaggctggttcaactttattatcatatacatctgtgcaaatgacatatttgagtttttttgttgctgtggatactttccttcatgatcaatgaatcaatgtgcttagagtaaactgaaaaacatgccattttcttagaacagctgttttcaatactgtagtatcttactgcctataacgaactactcatgtgcatcatagttgtgctttcctttgatgccatcactgttttaccatatggtacctgtttaagaaatgcaatttgtgtttttttatcctgtgactcttcattcttctgatcaatgagattaagaaatttatcttatatggttgttcaaatctctgcagttcc

SEQ ID NO: 13986 - DNA, 687 bp, Brachypodium distachyon
  Intron number 2 from transcript Bradi1g31890.1 (locus Brad i1g31890) derived from phytozome v7.0 (chr-ID Bd1; pos 273 30291 to 27330977 reverse strand)
acgagacggtgcggcggctcaaggagctgggccaggtcagattgttgttgttgatcgattgattactctgttgctgaatccgtgacctcgtgggatattccggttgctggcccgcttttccggctcgagatacgggaatccctgtttgattgctttgctgggactgttactgttagttcgctgttgagtattcgatgacgaggatgccctgcttgcttactatagtgtctcctcctagtagacgcctagatgcaaataagaatgttttgtaggggctgtgtgcaagagcaattattacacgaaatcgagtggccagatatgatttgggttcgtaggtgcagattttttttttccgtttctgaattcagagattgctgtacacaacagtgatgagctgataatatctgcgacctcaaagagagcatgaatagtggatgtttcattttgtaagcaagattacactgctcttagagaccatctcatacaagacaagctaccaaagcaaattcatgtaaagtaatgagattgcttttccacgcctatagctagtgttattaaaatacccaaactgagcactttcttgtttccaagatgtgtgctgcatcttctcttttacttgtcatgacaatttagttccgcatccatgcgtttctaatacggcgttgatttgtgtgaatcagatatctg

SEQ ID NO: 13987 - DNA, 875 bp, Brachypodium distachyon
  Intron number 1 from transcript Bradi1g44730.1 (locus Brad i1g44730) derived from phytozome v7.0 (chr-ID Bd1; pos 428 54271 to 42855145)
gggcgtcctcaggttcccccacccatcccttctgtcttccttttcttgtaatcaattacgatttgttgcctgagttctttagcaatatgtggtttgatcgaattggcgattcgtggtgctggtaagagtgggtactaactgttcgaggcctcttagtttgaggaaattgttttgatcccataccttgttgctagtttggattggacttccctaaaaaaaagtttggagtggactttggagtcctgtatagatgtctaaaatcagatattgatttcattgtccggtatcatacttcagaattcgagaggtacaattgtcttggtttacatcatgttatgccaattggataacaaggactcgcggttcactaaaactgatgcaaagttgaaaccctccagccaggtttcgacggttgttatgccaggctcaacatagttattcacttgctgttaccaagaacaagctgaatccccacgctttgatgcagaactaataatttaatccaagcatgtgatgcctcaatctccatagcccatacaaatgtaatggccacatcttttcgagaaaaatgtaatggccacaaatagtgaaaccataaatataaccatattacataaattgcaaaggtggagatcatggagaggtagttcgtcttgtcagcaagttctttaagtggaggaccaccatctccaatatctatagaagaaatgaattttaaatttgcaatttaggtgacatgatgatttggtttttgctaagattattatagtttctcccatctgacactattgatgtctatttgactggccactcactaatgctttgttatttcctttgcagcacaatatcgagtgatctaagtggtgctccatttg

SEQ ID NO: 13988 - DNA, 836 bp, Brachypodium distachyon
  Intron number 1 from transcript Bradi1g17820.1 (locus Brad i1g17820) derived from phytozome v7.0 (chr-ID Bd1; pos 144 46449 to 14447284 reverse strand)
gctcgtcagttcgccccagccgccgccgggatctggtacagactcttttctgctgttttgttttgttaaattgttcttttttatggcggaattgtagtttgtgtggtgtgcctggatcgtgtgcctgtgcaaagcttaattccttattggcgagatccgtagattcttagatttagaggaagatccagtcttttttttaccgttctgttatactcagtggttagatcttagatgggtctttccatgattattggttgtgagaaatttaggagggcttttggtattgcacgtgtctgcgggggaagtggttgattgggctgttaaacatgttcctttctggccgggaaggcacaataattctaccacgagagattgagaggaacatatctgttcttggtcgtgtttgtggaagataacttttttttctgttgcctaaaatcatgcgtctaatttttgtctgatttgttttcgctcccaagtagctctatgactaacgttgtgttttttcttcttggcagtacaagtcttccatcaagaaggaaacatcttagggaatgcagaaagatgtgtttgcatgctagagaactaccttgcgaggcaattggcagggtagccacccgtgtttctgctttgattgaccttgatgacattggttcacaagaacatacacacctcttgttccatgtgctttcgcacgatggggttcgacgtcgcatctcaaccatcttcttagattaccatctcggaggtgacggttgaaggtcatctagcgcttgcaggctccttgaaggttcgggatcactgcttctctgtgtgcatagcatatatctggcaag

SEQ ID NO: 13989 - DNA, 652 bp, Brachypodium distachyon
  Intron number 1 from transcript Bradi1g05070.2 (locus Brad i1g05070) derived from phytozome v7.0 (chr-ID Bd1; pos 337 6844 to 3377495)
ttccccagccggcccgcactcagtcaacgccagctgtgagtggttcctcttcccccctccgctgctctcgcgccactcggttgcttgctgagatttagggatccaccgttgctggaatggatcgctggggttccaggggattggcatgggacttgatttgacttgtacatttgagtggtacctggagtggaatgtggtgaccgtcctcactgatcaatagggcgttgtctgcttttctaagtttctaactggttagtaactgaggatagaaattcttgctgtgaggggccactcggcgggttggatttggtagagtgctgttctgtgtctaaaggttgctgcgtttagttggattcaaaatggtattgcgttgtgaaatttagcatctttcacaatttttggtttcttatagaggtattattaggttttctcgtatttcactattcttgtgttaaagttttgtttgcaaggatatcctagatgtctgtgctagtggcagatgcatgaaaaagtcacaaaacctgctatcccaagtttggaactggagagtaacagtgggatatcaatctagcttactagctgctaggtctttaatatctgccacaattgattgtgattgggtttcttttgttgatcccagatcttcaacttc

SEQ ID NO: 13990 - DNA, 470 bp, Brachypodium distachyon
  Intron number 2 from transcript Bradi1g36950.1 (locus Brad i1g36950) derived from phytozome v7.0 (chr-ID Bd1; pos 327 41287 to 32741756 reverse strand)
ctggtatatttcagagattagcatttattctcatgtattatttgagcctaggttgttgctttttcttgacattatgattattctttcatacatgctggcaatttggaggtacatatgctttgcagtaatcatgaaacagttggttcagttaaggggactttttgagttatttagcaaatgaatgtgaaagagatgctccatagtagtctgctttctgtcaatttttattaggtcagcaattgccatctgtcactgcatgtacagccaccagactttcagtaattgatgcaacgagaccttctttgaacctcttaatgccatgtgttgcatttactgacagattacaaatgtttaatttggtttgctgaaagtggcatgctgccaaaagaaggttttcttttctgttttctgaattagtttctcattgttctgcaggggtgacactgttgaggtgaatacttgggttggtg

SEQ ID NO: 13991 - DNA, 331 bp, Brachypodium distachyon
  Intron number 2 from transcript Bradi1g28600.2 (locus Brad i1g28600) derived from phytozome v7.0 (chr-ID Bd1; pos 238 98873 to 23899203 reverse strand)
atccccgaggtgtagtgtttgagaaatatttgatactcatgcatttactttaattactatcaaagcaggtaatgcctgttatgttgtaaactgcatctccggtcgcgagagaacttatttatgtattaaactgtagagctttgtgtatctcaaggataaaattctccgagttttatcatgtaaaacttatttttgttcttttctccatggggctagttttttcagctttgtttttctgttttcttatggtactctagataagatcttttaatgcacctttttcgtcatatataaatatgcagttaaggagtggttgtccgtgcttctaccc

SEQ ID NO: 13992 - DNA, 874 bp, Brachypodium distachyon
  Intron number 1 from transcript Bradi1g01730.1 (locus Brad i1g01730) derived from phytozome v7.0 (chr-ID Bd1; pos 114 5462 to 1146335)
gccgtaagttcttgctcgattgattgaattggttgatagaccaactcgctgtcgtttccgaggaggaggaggaggaggtgggcgctgctccctcctgccatgtggaatttcttggaatcgtcttcgatcggaagaaatgtttgtggatttgccatttcttttcttcttctccttcccctaatgctagggttaatcaagttggcatgtcctgcttgctgatgcgggagacagattggattgttgatttttgtttttcaccatgaaatgtcgaaatttggtacccgaatggtcgccttgtctgcctctttttgttcagttaattaatacagctctagcagtagccaagatccagtctttgtgcatctgtggatgtggctttgttgcgtgtgcagtgttacatgggtaagcttttgggttgattcgtcgagttgtttatttgatttgatgaaaatatgattggttgaacaaaactgctatattggcatgacaagattgcagtaaagaatgtgcattgaagcaaggtcaaatgacaatgcttattttagtgagagtgataactaatcaaatggattaccaccgtatctttttttttcctgtgttacatgaaagaacacatgctccaggtgccaagatctagtagatcccacgttctgtttgctctagattcttattttagtggtggttaatcaactggagtacctctgcatcttaccaattgttttctggagttcacttaatatgataggtgttttgcctaaaaaatgctaggtgttactttaatctgcttatcacattttgataataaggtagtactgtgcttctttgtttaactgtgccaggagcataaaggagttcctaaatttggaagttggga

SEQ ID NO: 13993 - DNA, 743 bp, Brachypodium distachyon
  Intron number 1 from transcript Bradi1g34470.4 (locus Brad i1g34470) derived from phytozome v7.0 (chr-ID Bd1; pos 300 68691 to 30069433)
gtgctcatcttctccggtttccaggtgaggctaaggttgctgagatctatcatgcgtttatctgcacaccgtttgtcccattaattcctcggcttcaatctaggagccaatagttctcggtatttttttgctaaatttaactagtgttttattggagagttgtaggaggaatcttctataatttgtatgggaaacaaagctcatttcctgatttgccttttttccatttctggtcgatgtgctgtgtttgtccccattcaggtttttcctttcttgtttatcctttctcatttcctgtgcattgagaggaaaaattcatgagctgtgattgacaatgatgattttacttgaaatcatatcaaatttcttctgaatgttccaaggaactgcctgctattcgtgtcccccttcacctctgatgctctgaaatctgaacctggggaatgtatgggttatgtagatatgtagtatgtgctacatgcaggtaagtattagaaatcatcactaattaagatctgatattcttgggaaaccgtacatttatattacttagccggaggacgtaacattgtgtaaattgcacgtagctcaagcatagaatggattctgtggtcataatcaagcttcttctacatgtacaatctttttaccagaaattatgtatgtacattttctgaacagtatttagattctgaactgtttgtttggataagtattgacaagcatcaattgtttggcagtgt

SEQ ID NO: 13994 - DNA, 774 bp, Brachypodium distachyon
  Intron number 1 from transcript Bradi1g11080.1 (locus Brad i1g11080) derived from phytozome v7.0 (chr-ID Bd1; pos 816 8546 to 8169319)
atccttaacgctctcaccgtcatctgtatacactacatagctttcttgatctctctccaattcgtacttaaggtgttcaacaatggcgaccaaaatattaatgagcataggtaacatgtttcactacttctttgttttaaaaatggttcattacttagtataagatgttcttagctttgtcccaatcaaaccttttaaatttatagaaacatctaccaacattacaactcaaattagttttgttaaatctgtcatgatatgtctcttcatagtatatatatttgtttttgtaaatattagtactccctccagccggaattacttgtcgcagatttagtacaaagtgagacaagtaattccggccggagggagtacatttttctataaatttggtcaaactttaaggagtttgacttaggacaaagctaaaacatattatatttaggaacagaggtagtacattgcaaaaagaaagatcctttatttagtgagagatttagttatttgccacttcaaaacaaatgcaattcataagaacctactcacgtgtcactgacaagtggccacatgttagagacatggagtggcactttgccaataccatttatttggagtggcaaatgactaatttcccttattcaatattgcaaccttgctaggggaactctttttgatctcaggatcaatcatgaaattcagtgtttaacaactttcttacctttgttcctattttctgcagcaagtgacatcccagttctgaaagaggttgaagcc

SEQ ID NO: 13995 - DNA, 736 bp, Brachypodium distachyon
  Intron number 1 from transcript Bradi1g31970.1 (locus Brad i1g31970) derived from phytozome v7.0 (chr-ID Bd1; pos 273 80413 to 27381148 reverse strand)
gctcacgttctgagatttcgtcctgatactgaaaagtatatgcaaccatatgcatactcttctttcactgaatatgacagcttagcgtttttgaaaaatctgtgttcctgtcgctttaaattccaagcccgaaagtcatggtttctgtgataactggtaccaaatctctgaatgttatgaaccacttgttaggttcttcgagaaagaaaggtggatggcccattttagcaaactagatgatgccccgcacgttgttgcgaaattttttagttaacataaagtattcaaaattgaaaacatataataaaattgtacatgttcatttagtggggatagctcgatgaaagtaacatgcatgcatgtgcaaaagtatgagtttttcactaaataggtgtgaacaaattaattatgtgatgatgtggcatgcttgcatgtttagaaaaatcaaatagtgggttacttctatttagatatagaagattatcgcagtatacaacagggggcattcctacactaagacgaacacagatccatgtcaaagacaccaatggacacgcttcagctcccctgcatccaaatagccatagccttgctcttgttcactcaagccaagagcaccatagatatatctgctcatacaaaccataccaacgacagctgtactgccggcgagaggtctgcccttctggccttcctggcaggcctatatcaacaacccctgcaaacctcctttcat

SEQ ID NO: 13996 - DNA, 1020 bp, Brachypodium distachyon
  Intron number 1 from transcript Bradi1g33380.1 (locus Brad i1g33380) derived from phytozome v7.0 (chr-ID Bd1; pos 289 39681 to 28940700 reverse strand)
ctacccacgccgcaccaccgccagcggcagggccggtacgcttctcttcccctcccgatttcctttttttggttgctttccacgtttctgcccactttgaatcgatcggcgctcctcaccaatccacctgtttgtgtgattcggattggattttggaaaggatttcgcggatgccggttgttgttctgcgggattagaggctgcttttgttttgttccctttctgacgcttttggtgggttcgtgtgatttttagagctcggggtttaggctgtgaacatactcctgtagcatgatttggtgggctctgtcccgatctcctttgcgcaaccggtgggcggggctcggagccctgcgcagatgcggattggaggagctgattggaatttttgattggtttcgatcagtgcccagatcgagttttatgggagattgcttactaatttccaattctattgtacttggaggccggaatattcgtgttaggatttcgattgatgggctattttgtttaggttcgatcagatggctatggtggtggtgagggggagtgggggttgattttgttgcggtcaggggttgaactgtgactcttcatagtttgagaatgaccggaacaagctttatgaaatgattgcatagatgagttgcgttagcgcttatcagctctatataggctaacaagcttacggagaataaataatgattgccttcattgattgggtacctaagatgtctgtactgtgtcttagactatcatcagctatcatgttctgtattgatggaaatgctagcatgtctaacatgcagttttgctgtgtggaaaaggtatcctatatttaggaaggagtaactagtgcaagtgggatcctgcttaattgacttgctagtttgagattttgctcaaaatttgacttggagatttggaggttggcctagaagtggaatatacgcgggacctgtttgaatccctgtaacttacagctaattatctgtttgtttgttgatgccacaggttgtt

SEQ ID NO: 13997 - DNA, 634 bp, Brachypodium distachyon
  Intron number 4 from transcript Bradi1g02380.1 (locus Brad i1g02380) derived from phytozome v7.0 (chr-ID Bd1; pos 162 9424 to 1630057)
tactgttactcctgcaaccatttccttcttcagaggtatgattctaaatctaaaatggatatgatatttcgtatatcaaatcagaatttgaactagatgtttcttactgtatattgttgataattcagaaaggtcaatcccttttgttggttttgacagctttttagaatttaaataggcatgctgccaccttttaagtttgtctcacgagctatttatacctactctagattgcttttataaccttaaagcgcttcactcagaaccttatgctttccaatattagctaagtcatcggcacacaatgctgatcatcatgcaatattcagctgagctgcgtgccttgttgagaacctggaacttcttgtctagtaagcacaagcacagatgctattgccactgttgatctatacatgctcatctttccttttttgccaccagttgcatatttttgcaaattcgattaaattttctgcactgtttgttggagtaaaaaatagaacacttgcagcatgtagtctgataattttgacaccatgaacattccttattatgtgttcatagctacagccaggatactgttttatttaacatttttcatacatgcattatgttgtatggcagatattggtgc

SEQ ID NO: 13998 - DNA, 1013 bp, Brachypodium distachyon
  Intron number 1 from transcript Bradi1g13440.1 (locus Brad i1g13440) derived from phytozome v7.0 (chr-ID Bd1; pos 102 10596 to 10211608)
caaggagctcaacatcctggagttggtcgcgatcggtgcgccgacttctctctctctctctttctccatgttggccgtcctgtgaattccagcttccttatttctgtaattgagggtggagagtcctttgtggtactgcgaaattttagtcacaatgtggggttgcgagtttttgtggtggaatagattattttttttgtttagtgtgcttatttacaatttataaaaggtttactttgggatagactttttaaaagcttgagaattcaagtggcgaatttgggtttgttcttcgttctgaaatacaattgaaaggaacaatttttccatggtacttcggtactctattttttttcttctgcaaaataaataaatagaacgaacagatcagcctttacattattttttgatgcttatatttgtttgtgacagacgttcagacgagtatcagttggacttgtgttgtggggaatattctatttttggcagttagtttgcttctattttactagtcaataaaaaagttgttgttagttggccactcaaaggatgttatcatgatcctgcaactttggtattatcatgatcctgtgcagcatgttagtttaaatcataagatgatccaagatgaatgatcatacttccacagttccacctagttgtagtgtactatctgcttgtgcgctctttcttaaaaaaaaatctacttgtatgctcgtcaggccctgcttaaagctcattttgtagttgctgaactgtatgtgacttgtgatggacttactttataatctgctaccataaaaataagaagttaaacaaaggttaaacggcaaaaactggtaagacaatgggattatcataatccaccgcattgccatagccagacagagcctgatgatttagattctacagtcattatagtttatctagtccacttcatggagtgcttatatggattaatgaacccttgcattatcttccaggggttggttcgacaataggagctggagtat

SEQ ID NO: 13999 - DNA, 975 bp, Brachypodium distachyon
  Intron number 1 from transcript Bradi1g13230.1 (locus Brad i1g13230) derived from phytozome v7.0 (chr-ID Bd1; pos 100 36316 to 10037290 reverse strand)
agcgcatacaacttcgacggcggcgtcaacatcaagtcagtacccctaattatgatcctccatcttctctctctgtctttgattggggatttcaccccaatttctcatgctgttgatcgatcatacttccgttgtcatggccgatcgagatggttatctgtttctcgtctgatcatcaggaaccttcgtggttgtgcgtataatgatactttctagtatgttgtttctttttgtgtcgttgattctcgatttttaatccacttttcttttggaaacttgaattcctagtatgcactccaaaaccctttttgttttggttgaaaatttacagttgttgatcgtttcaaaagataatttacactacagtggtgcttaaagtgcttgcgatagaaggacgtggatgttcggtcagctgattcattggaagctttcttgtcagcaaagtagcaaccttggcatcagctccttttcgaagaagaaaaaaggctagttggaagataaagatacaatatccatggcatatttgcatttgtcctgtccagttgatgtctgaagaatctaactttcggtacttatctgttagtcgtggttcttctgggatagaaatatttgaaaatgatttggcatacacactagtgaaacccacaggggcgatcctcccactgaattcttgtcgcacaaaagggattggttatcttaaagcaggacatctgatcgaattacagtggccacttaattggcacctagtagacaagcactgagtcttcataacatgggaagaactatgtaatgcaaataaaattaagagcttactttcttccatgattgtcatcacttggagaagaatcttcgcataaacaaatcatccaaatttgtcttgaccctgcatcatgattcatgccatgcctgaaaatgtgtttacattccctacgtgctgcaggtacgttgcggtggggaacgagcctttcctgtcgt

SEQ ID NO: 14000 - DNA, 630 bp, Brachypodium distachyon
  Intron number 2 from transcript Bradi1g42350.1 (locus Brad i1g42350) derived from phytozome v7.0 (chr-ID Bd1; pos 393 94496 to 39395125)
ggaggacccatcagtctcttgctctatcctgcacggtcagtatgcatgtcgatatgctcagatatacttgttaattcagccagttgagggtaaaagttgattaggccagttgctgttcacatgctagctgttaaatatgcataaataagacttttgatcttaatgaatgggaaagaaaatggaagtggcaatcctgttgggcatatctaaattaggccagtcgttggggttgggcgtgcatgcaatctaaatgcatatttagtttcgccagtgaattatcctcctataactcatcaggcatctttgtcactactatctctgttccaaaatagaaacgatgtagaaaacatgcaaaacaaactccatttgtctttgacaactcattagttaaatattattcaagtttttttaggtgaaagtgtatcattctattcgtcatcaacaatttacagcataattttacataacattttgcttacaaattcgtaaaatgttaacggccaaagttgctattcttgtcgctagacttgaggacaataggtaatacttaattgtttatagattgtgacttaccggttaccacacaaaattacaggagatcaatctctcaggggcattgcagagcaagaa

SEQ ID NO: 14001 - DNA, 380 bp, Brachypodium distachyon
  Intron number 2 from transcript Bradi1g29320.1 (locus Brad i1g29320) derived from phytozome v7.0 (chr-ID Bd1; pos 248 24729 to 24825108)
tacagggtaaagaatgaagctttgaccttaccttatgcagttattttggtagctattcgaatgttttgtaggattcacgtttaccacatttactgttctgctttatttaaagtttcataataactttattctttgattttaagaaatgagtaaccttgagaccatattcttttaatctatttatgtttgtgatgggggtacactatagcctaaatgctggattattccatagcatttttctggcccttacgatcaatcaaggaaaactataccatccaactgattgattcttagcaaattataccgatcccattccaataaactggctcgattgatttatagtactgtaattggcattcttggacaggtgggttgagggc

SEQ ID NO: 14002 - DNA, 643 bp, Brachypodium distachyon
  Intron number 1 from transcript Bradi1g10680.1 (locus Brad i1g10680) derived from phytozome v7.0 (chr-ID Bd1; pos 773 3094 to 7733736)
gccgcttcttcttcttcttcttcccctgggccggcgtggcggggcgttcctctcggatgaccgcaccggcgccgtcgtccccatcatcgccatcgaggtcctctctttcacgggtttgtttttccgggcccccttttgggaatttttgcccgtccccccgggcaagtccgttgccccctctttttagggggggtttaattcttcttgtttgggggggggggggggggtggtggtggtggttaggtttttgtcccgagagcttcttgattagagtctgatcttggcgaatggatgactagagttactcttccggatgaatttctgtcggcgtggttgaggataacgcgcggttttcagattagagatttgggatagtgctttcttgcaatctgttcatttctgcgtattaaacagttcggaattgcatcctaatttcggcgaatagatcataacaactgcatttgcttcctgttctcgcatgtgcaactgtagatgttgttttttgctacacattttacctagatcggatttgatggtccaccttgcctatttcaaattgttttgaatacccttcctgaaacagcaatgctggttgcaatgatgacccctagcctattaaagttttatttccaatataggaaaa

SEQ ID NO: 14003 - DNA, 942 bp, Brachypodium distachyon
  Intron number 1 from transcript Bradi1g23660.1 (locus Brad i1g23660) derived from phytozome v7.0 (chr-ID Bd1; pos 190 67791 to 19068732 reverse strand)
ccgtcgtggccgtcttcaggtacgtgggtcagtgggtgcatgttcaatttgtccatgccatgtctttttgttcttccggtatgtcgaggttgctgtagcctagaggcttggctgaaactacaacaaggaacaaggaacacgctttgctgcattcatgaactacagggtcatgctctgttctgaattgatgttaaaattgttttatatgattttaatgaatggttaagaaattccatactatacgtgatgaagttggcgacaatcatggttaagaaattcctcaaaaaaagttggcgagaataatggatcctcacaccagcatataatcttgacctaatcatccaatcaaagttgcttacgaggttacgcttgtcgttattcaggatagcatatgcctagttggattctgtttcctatttttgtggttacgacttatacaactcaaattttttttggcgagaacgagtcacaaatttgaactatatatagacacgccatctgaacagcgtaattattaatcatgtatactaatttaacatctcactttgctacggattaaagaacatacactacattttttattaaaatacatccatttgttgactcaggtaaaataaatccatatatttcccacatcaaatggttttgttccaaatgaataggtacgtactatgatttgaaactaaatgaatagtgcaaagagcacgaaatcaacaattcttatcctacacatgtcaagttcttgcactttttgcttccaataaagcagggccaaaagtctttcctaaagaaactgttcttacacaacatctcaccaacaatgattcgaacttcaaatttgctcagtttttctcaactcctaaacatttttgtctgaccactgtcataattgctctcccgatttcagacggaggattcgcgaagggcagcatagacctcgga

SEQ ID NO: 14004 - DNA, 758 bp, Brachypodium distachyon
  Intron number 1 from transcript Bradi1g35020.1 (locus Brad i1g35020) derived from phytozome v7.0 (chr-ID Bd1; pos 305 51481 to 30552238 reverse strand)
gagttcacaacctgcaaggtaactctcacttaggagcttccaagtcttcacgtcactaccattcgactgtaggatgcccaaataagaacattactgtttcttatgtactcccggagctggaattacttgtctcagaatagttcaatatgcatccaattttgataattcttcaccgttgcaatgggaatcaagtaaaattagataatgtacaaatggtatgctatgctggccatgtcaaatgcatactggtggaatcatatcattgatgtagatatgcagtctggttttgcagtggtatgttttggtgcgtcaatgttgagtaaatgagataaattggttaattgctataacgggtttgctattgagaagtagcttgttttttagttagagataagtcgacatgcttggccgttgatccaatggcaacacgtgggagaggagggagtggagatggcactcagatcttaatccaacggctctgatgtgtcaactgagatttaagcctttttcttaaaaatcaggcgactgagatatagccacacccttgctataattatccagaagattcggggaataacttcaggccataaatgattagaaagtggttgaaagttgttttcgatattatctgtattgtacagttgttgtaatctactattcatttttaggctttggtatggaatgcaatcaagtgaaatctgatcttggttaaatcttatacaggaggatcgcccactttttgttcagttttgtgcgaa

SEQ ID NO: 14005 - DNA, 680 bp, Brachypodium distachyon
  Intron number 2 from transcript Bradi1g13160.1 (locus Brad i1g13160) derived from phytozome v7.0 (chr-ID Bd1; pos 997 5422 to 9976101)
agacgtccaagaagctggctcgcgacttgcagaaggtggcctctttgatctttacttttgttcacgatgcccttgtaacagatattggtctgtgtactgttctgcaactcttggtctcgaaaagggctgcatttggaaaacctctcatggaggggctttggatcagggagtgcatgtgaaatctctgatgacattgattggtcatacagtgtttgcttctaagcctgaacgttttgctgaaggacagatttggactatttagtagactaatttcacatgtgtaaaccatctataacaattgcaaatctatgacattttactgattgcactcgctttttagtactagtagcctagtaggtaggtaatgagttggatttgttctcgtgaaatgaaataccatcaatacaatctgccacagtgttcattggcatagtggcctgccggaataaagaacattaagagggttgcaagaattcatgcaaaagctcagcaaacgagtgcatttcttcactttctatgatacaaaggagaggcaatatttgttcagctaattaagggccaagtcagattttgagcagcttgccaaattatgtttgttagttttctcctctatcttttttatttgacaacattttgaatatttgctctattatcagctggagtcattcaagaggcatctg

SEQ ID NO: 14006 - DNA, 902 bp, Brachypodium distachyon
  Intron number 1 from transcript Bradi1g15060.1 (locus Brad i1g15060) derived from phytozome v7.0 (chr-ID Bd1; pos 120 68797 to 12069698 reverse strand)
tcgtcttccccctcgctcgagcgcctccaccgcaggttaatctccccttcgattctctcgctcccgaccgtttctcctcccatcaccccacgaacggattccgccctttagatctccgtttcataatcttccccaattcgtaactgaggcaaaaatcaaggtagggaggccgccctaccttgccctactgggtcctccgcccgtgactcgaagtactgatttggtggttgcaattacggaattgctgtaaaagcgtcccagtgaatattgtagctctagttcctttctgattagttactgcaaattaaccagttgaatggcctcatcagtgactagtgagcacctgaaaagaaaaaagatgtgaatgtagaggatttctgtggaggaaggcttacatattgatcaaaggtggacgcctttagctaaggtgtccatttcagcacttctttttttcgaaaaggggagggtcccgggcctctgcatcaagtgatgcacacagccaattttattgcaaagttgtaatgagttgtataattcagcggtcggagatcgtggatacaaagataagccagtgaaataaatcaaacatagcgagtctatgcattaagtcgtctagtaggccgccagccagcacggttgaagatatcccgtgagatcctctccagccgggtgcatccaatagccaaaggttcccgctcgtgcgcagggagcaggaacgcccatagccgaatccagtgcatggctttgtagataacctgcaagaaatgtggaactcctgatcgtccattttagcactatagaatagaaaattgcaacctctagaataatttgcattgttttgccgctttgttttcttgatcagactttgtttcttgtatgctctggctcctaaacaagcagta

SEQ ID NO: 14007 - DNA, 732 bp, Brachypodium distachyon
  Intron number 1 from transcript Bradi1g17250.1 (locus Brad i1g17250) derived from phytozome v7.0 (chr-ID Bd1; pos 138 18790 to 13819521 reverse strand)
tcgaaattgttcttctttttctaaatctctgcaaggttggggctttcggtacagtagttttgacatcatttcgagtttgtgagttcgacacgagggctgggatcagacttggcattcgatttcgagtggaatttttgttcaaggggtctgtttgaatggcttgttttgattgtaagcacggcgaccctggtggtgttgtactgcgagatccaatttgctaaattttcttcctagaagtagcacatgttttcttttcttctcgttctgtttttgcgctatccggttgtttacggatagttttggtttatttagttgatggcataggccaggggccccttgatgtttaccttcaactggtaaccctctgcgattaatgccccgtcttaatttttaaggtttcggcagtttccaggaaattccagtgaatgaaagctccgtaattttcaaggtttcggcagcttctagtaaattccagcgaatggaagcctgcacctttgcaatcttcattcagttattttttttgggtctctctctccgaagatttcagacattttagcattttcccttttgctcggtccaccatcgtctgaattgtctcgtacctctgattctatgagaatgttgaattgtaataagttccatgaaaaagagctgttggaattgccgtctgattctgtgttccattgttcaataccaggttcttgaacaggcttgaagccacctaggaactac

SEQ ID NO: 14008 - DNA, 660 bp, Brachypodium distachyon
  Intron number 1 from transcript Bradi1g30660.1 (locus Brad i1g30660) derived from phytozome v7.0 (chr-ID Bd1; pos 259 89095 to 25989754 reverse strand)
gcgaggtcgagcgctttggcggcgggcgcggaggggtgaggcgggagcgccgggtggaacccgaagaggttgatgaagccgagaaatggcggagcgtggaggcggcggaagcggcggaggaaggcgccgccatcggcggtgacgaggctgcggaaggagacgcaggccgcggtggcgcgggctaggtccacggcggttggtagccggaggaagatctccgccaggaggtgatcggggatctccgccagacgcgagtcgccgggaacaatttccgacagccggccgacgggaatcctcgacgagactgggaaggggaggagaggcgacggaggagttggtaggttctagggtttaggggaacggaagagctcgccgccggctgcgtgcgggtggtgcggccggtgctgggaacagtgagtgagtttttttgtttccttttcctttgtgtattttgctgccgaaacgggcctcgctgggctggaaataattttaacgggccactgtcaggctgggccgggccgtccgccgtgcgcagttaaattgagtttttttttctttgctaaattatgaagaaattcaaatttggcccaaggtgttcttcttaatttcttcttttttcaatctttcagatctttccggctccaaaagcacagagaagaa

SEQ ID NO: 14009 - DNA, 998 bp, Brachypodium distachyon
  Intron number 1 from transcript Bradi1g09040.1 (locus Brad i1g09040) derived from phytozome v7.0 (chr-ID Bd1; pos 639 0664 to 6391661 reverse strand)
ggaggccttctcgctcttcgacaagaacggcggtttgtgtttgcttcccagctctcctcgatcgaccatgccttcttgctttccacgcagtgattgtttctttgttgagatcgtttctgtgcttctttgtcttgatcagttgtgctagctggttccataaagcaatgctattgtttgttgtattactgttatggggtaaaaaccttgttcccgttcatttttcttgcctgttgtggggtagctagaattcaggcacatcgttctgtttttcgaaaaggggcaacgattcgcggcttcctcatcaatcgatgcacatagccatttcatgcacaccgttaactgctgagaacttgttcgttgcacccctctttttctgaggcatgatttctgtatagaaaactaaagcaaggcagcactaagctgaactagtttggagctttttttcatgtgttggtacttgtttaacttagggtgcttttgagctgtggatggaattcctatgttcttcgagagttcggcgacatggattcgctctaggactaatttcagagattagtttggtcaaagaatgcttcagctctattggctcacttgtgcactttagggcccttaaaatatttgcatttgggctatccacctaatttcttcagatttttttttcttttgctcggacatgctaatctataggccaagctctcttaagtaatattactagtaatctacagcatggacttgaagaatcaagacttttcgggtggccatgatgatattgtttgtgtcatgcaatccccctctgacagtttagcagttaatcgatcataagcttgcctcaaacgtctcttatctttagtcaaaactcagaacctttgaccgtccttgggcattggcacgtggtgttgtcccctctgggattaggatatttgtgagctaaaatgaacagaaatttgaatctggttcgcatgtgagatcttggaacattggttttggccacacgcagg

SEQ ID NO: 14010 - DNA, 834 bp, Brachypodium distachyon
  Intron number 1 from transcript Bradi1g00240.1 (locus Brad i1g00240) derived from phytozome v7.0 (chr-ID Bd1; pos 995 50 to 100383)
ggagtcaaatattagccgctctgctgtatttgaaggtaaaattaaacacagaagctttgtcttaatttgtctgggcgctgcataagtttacttattttcatttttgttcttacatccaaaccttttagtgttttgtttcctttttttcgttgcttctaaacttctgccccctgctagtgtttctcttgtacttttcttccgggccgcttcgcgcgaccctctatggcaataaatggatcgctatgtctgttttgtcaaaaaaaaattgttcttaccattcacccttatatcctaatgactgaacgtattccatatgtaccttttgtttctcttgagtacgtcatttcctatgaaatgtaaacatggttgtatgtatgtattgctgtatgtatgtattgctgtgttgagttagagagacgactcgatcgggggagatgggcttgggccagatcctttatatatgttttttgattattatttttgaaagtattgtacaattttgccctccacgacaatactcctttgttttgctacttccatttttaccaacagtataaatcaatatgggcctttggaccaactaaaatgggcggctcataatcatttaattgtaccataaaacatccctatttccaacgtgtgtaagttgggctaatttctgattgggcttcactccctcacattgataattatttgatttttacttgttctcctggttcgtgttgaattgaacaaatctagagtaatatgttattctaaaaataaattccaaattatgaatgtaaccatttttgtatttttctttccatgcatgcagaaacattatcgtcttct

SEQ ID NO: 14011 - DNA, 512 bp, Brachypodium distachyon
  Intron number 3 from transcript Bradi1g27310.1 (locus Brad i1g27310) derived from phytozome v7.0 (chr-ID Bd1; pos 223 83978 to 22384489 reverse strand)
agaaggttgcagtaggaaaggtcaaagttgaagaggtccgagccttcacccttcgggcgggcaaaatttacatccagtttttctttgttcaattgtttctttattaattgttccatcaaatacgaagtttatgcttttataacctaatcttttgatcaagactcatattagcgtgcacaactatgttcataaatttcattagaagtctcataagtgagcaatattgtcactagcgggaacttgtagagaagcttttcaacttgattattaacatttccaggatccaggtaggagacatttgttggtatttgtggcatagcttgcattatagggaaatcttcataccataaatgcctgaattaagagcataaccttggatcagatgtttgagttttggctttgcatgcttgctaattccttgtgttaccaaaagtgctccgtgtgacgtgttatattgttttgtgtgcttccgtgcaggctgctaaaaaaactgcagataaaagcaaaactat

SEQ ID NO: 14012 - DNA, 631 bp, Brachypodium distachyon
  Intron number 1 from transcript Bradi1g11020.1 (locus Brad i1g11020) derived from phytozome v7.0 (chr-ID Bd1; pos 800 9963 to 8010593)
cagcctgtaagcggcagaggcctcccagtgagttcagtctgaccctaccctccttcggagttggcgctagttccgtttagggttccagtttatgtttgagcaaatctaactaagcgaaaaggcagttgcgtcaggacactggaaaacggatctccggacttcatcaacttttgaccctgactattagctagtactaagttaactattgtttgccggtggtgaattgtaatgcattgctttgcttattttgtaagctgacgtgaaaaagaagctgtggaaagtctattaatctgtttggttaatcagattaaagtttggcagttttgttatcctttgatttccatgttctgaatgcaataatatattcggccagcttgattaagaagaaacagttagtcaaacacccaagtaatctgaagaaagcagcccaacaaaataagattatcataatcccactgctatgctagagcttcagttccggggatctcccagtgcacgctttaacacattttctagaccttatttaaattagtgggatggttttttggaatatatatttgttttcaacttaatttttctaaactgtgttgttgacttgctttgaatcaaacttgcctcaggttcgcagacc

SEQ ID NO: 14013 - DNA, 703 bp, Brachypodium distachyon
  Intron number 1 from transcript Bradi1g29700.1 (locus Brad i1g29700) derived from phytozome v7.0 (chr-ID Bd1; pos 252 48403 to 25249105)
ttggcatttcttttcctgtagtgatcacaccacaggtagctaggaggaaataatttatatgtatgtggtatatatattggcttttcagatctgagcaaatattgatctgaacaatgtatatatgcagcttcagtgtggcatactgtctagtggtgctgcaaactccagttccagtgacagcatactgggcagactatgggcaccattcagaaacaacaccactctgacctcaaatgccacttcagatcaggtacatgcattgcaatttacatacatacagctctgaatttttggatgatttgatcttctttttcctaactgaacaatgctctcttgtgatcatcaatgatccaatcaagaataaatatgcatggattagcttgcacttcatgaacaaatcatttcccccctttttttgggtagattctaaaggcggtggcggtgaatccaaagggtgcagagaggctaccacctggcattgtggtttcagaatctgatcttcacctgcgccggctctggggatccccaagtgaggttgccttgacttctctgaacctgaaaattcatgacattgtagttaattcacactgactgcaaatcaaaaggattttgtttcatcttgcattggtttcttgataaacttgttccggttcgtgatgcccatgcaggacgtgccgcctcgcaagtacctcctgatactgtc

SEQ ID NO: 14014 - DNA, 672 bp, Brachypodium distachyon
  Intron number 2 from transcript Bradi1g29090.1 (locus Brad i1g29090) derived from phytozome v7.0 (chr-ID Bd1; pos 246 20864 to 24621535 reverse strand)
aaggcatttttggaacgaaacaaggtacagcgttattccattttgcatatgtcaatgtacctatttttcctttgaagaaacttttcaaaatcttctgactttgtatttggattattgtgtgtttgaacatttaaatagaactagataaaagcacatgcgttgctacggaaatattattattattttacataagttggttaattgcgtttttgctcttatgttctcaaattttgtgttaaataacaattatctcaagatatacattcgttttctagctgtataggtgatagcctcaattaagtgaattgatgaccaccaactcgaatctttataagtaaagatatcaaattattgatctgaaatggagctgaaaaatttcaacatacttcaagtggcaaacaacaattcgggtcgtcttctagcaatatctgccttccttctgtagttaccttcatgtttcataaccagtttcttccatttgattctcctctagtatgttaccgttcagtattataattttaacatgccgctccataacaaatcatgttttttttggttacgcaagtgctcttgcttcataatacgtttgtgagacagctgttttcttctatctaatgctgcatcatgacctagttataactgcttttatattgcagtttggaaattttcctt

SEQ ID NO: 14015 - DNA, 899 bp, Brachypodium distachyon
  Intron number 1 from transcript Bradi1g24090.1 (locus Brad i1g24090) derived from phytozome v7.0 (chr-ID Bd1; pos 193 22306 to 19323204)
tccggtgagtgaatctatgcggaccttgggttggacgttgtagcgttgtttgatgacgctctgttctcggagattgctgtccggtttgtttctttgggcttttccaactttagaatcatgtaaagaccttagatattcacggttggttttccggatccttgtgaagaaggcgatgtctttgttctaacttcttgtgcgctatgtggctgcgaatgcgtgtcattaaggttctcccggaaaattggagcattttgttttgatttacgtgcaagttagcggtgatattttatttctcgttttaggagaataacacgatgattcactggagttccttttctgcttcatcaattagagcaccgggtgagctgtttcttccatctattttgttttggaggtagaatgaggatcctattcagtcgtagttgatcgccattttcgctgttttgctgtcgagttatttacgacgctttacttgaggatttgaatcgatatggttatgttcgctttagtgtgcatggtgtttccaagaagtaatacaatagaataagtttggctaggttactattgaaaacaaaaaattgcatctgcctaaagaggtgatcactgatcagtgaagcgtactcggcaagccatggatgggcccctgtgatcaggagaatttctcagtagttattttgtggctgctgtaatcagtttggttgatgttctgttgtagtcaggcctgtttttgagttctggttcatatggtgggcatgttgcctccatactctgcttttaattgtcaaaaatttggagcatgcaactatgcatgccactttcattgtaacatcagatgaagtccgtctctcagtgatctaatagatttatcatatatttcagaccttcgtgaaaagcataga

SEQ ID NO: 14016 - DNA, 746 bp, Brachypodium distachyon
  Intron number 1 from transcript Bradi1g09970.2 (locus Brad i1g09970) derived from phytozome v7.0 (chr-ID Bd1; pos 716 9879 to 7170624 reverse strand)
ccccgatccagcgagaggccatcccgctcatattggtgcgcgatttctcgcttgtttgtgctctgtgcgaatttagtggacctatttgattttagtaagccaattgggtcataggctcgtttgtgaagatttagtgaatgattaattactgtacttataactcaccatgtctgggtctctgggacaatttttagcttcattgtaatagtactgcaattggcacattactgttgaactaagcaagctaaaagttgttgaataagttgacaaaatgccacaccttattttttcctgacaaacagagggcatccctccggtttcattaaaggaaaccatagtgtcttaacataaaaatgctactccctccgatcctaaattcttgtcattattttagtgcaaaattgaactaaaacaacaacaatttaggatcggaggaatgcaactttgtttgtacttcgacacgaatgcaattgccacaccttgagttattgacagcccaggccgcacatgtaagcaagacataggtgtggcattttgtcaaatgaaaaataaggtgtggcattttgtaaaatcccttgaccatgctgaatttatgttagatttaaggaagctctgctcatcattgctttagctatttttttcttctccaaaatgcaacagtcactgtctgttcaagagtttaggttttcagtattatgttgtagtactgatcaacagcctaatggtgtgagtccaggaagggaagg

SEQ ID NO: 14017 - DNA, 545 bp, Brachypodium distachyon
  Intron number 3 from transcript Bradi1g13390.1 (locus Brad i1g13390) derived from phytozome v7.0 (chr-ID Bd1; pos 101 83270 to 10183814)
cattgttctatatagtcttcttacaggtatgttttgatgacatttttatttcccgagagcattccttctggctagatctttcactctctcttttgcgagattattctgcttgcatttcaggctttaatctttataagattatgctgattgttcttctatagttacttgtgttttctcttgatctcccaacttcctagttctgtcggctatttactgatgcatttcttggtgtcaattaaatctgaaattagtacaagcgaagggtatccaaccactgcaagaaatatactttaaatcttggtagtggatttgacttggtgcaatatttttttgcgtatataaacctgtcccaattcttggtttgttgtgtgaaccaaaccatcttgctacatgtggtgtgtctgatttacaatgatgttttttgtttacaaggccgccatgacgtgtctaggaacattttcctttttttgctaaatacagtgattgcaatgttgacatgatgcctaactgtctcattatttatgctacttcagactaagctgagc

SEQ ID NO: 14018 - DNA, 905 bp, Brachypodium distachyon
  Intron number 1 from transcript Bradi1g20690.1 (locus Brad i1g20690) derived from phytozome v7.0 (chr-ID Bd1; pos 166 04241 to 16605145 reverse strand)
cactctcctccttgaaaggttctatctctgctcctctgctcgtctagttacaaggacagttaaggcgtgtgcatgtttcatgatcaatcttgttccagcacatttgagtgtagtgtccagcttttagttttttacattcagcaacatgctccttgaatcacaataacagagtttctcctccctaaatccttcgcaaagatcaactgttcaactatatgttttaaatatggtttgaactgtagttttacctatgtttggatgctaaagaaatattatggtttgtgagtatgccacccataaacaatatagtatgacatgagtataaatttcctgattttttttttgctgccacctcccccaaaatgctcctcattagttagaagaacaggtaaggcatgtgtgcatgtttcatgatcaatcttgtccggttgtcccaccatatttgaatgtagtacggagtatatagtttttagtttttttacattcagcaacatgctccttgaatcacaataacagagtttctcttccctaaatcctcagcaaagacaaactattgacctgtagttacaagaacagttaaggcatatgcatgtttcaaactgaatcttgttgtagcacgtttcacattgctccttcaagaacgttaagagaaatttctcctgccttgaaacattttgctaagattgagaatatggtttgaagtttggaaaagttgaactgtagttttacttgagaaccgatgcaacccagagcatgtaggataggagcagaactcgcctctgaatcctgaacaagaaagatgttgtaaatgacatcaaccgaacatttgtggattagcacttggattaaccatgggatttctgatttcaggtgtccaatcagtggacataaacaggaagcagcag

SEQ ID NO: 14019 - DNA, 397 bp, Brachypodium distachyon
  Intron number 2 from transcript Bradi1g29480.1 (locus Brad i1g29480) derived from phytozome v7.0 (chr-ID Bd1; pos 250 53076 to 25053472 reverse strand)
gttccagtcaaagatcgaaaaggtaaacatctctccattgttgtatttttcgttcgttttgttccgagctgtagtgcatggtccctaagctaaattattgttgattttttgttagttacatcaagaattttttattaatgaactccaatctgttttccgttgacacataaagattacccatttagccttcctaacattttgcgtgtgtggtgtttctcacttgctttcacgtcatgacatttacatgtgtttgaccattttgattggtagatgatacataaataggatggtctttcttttgtcataccaggaattatgtacctactgtaggtgtgcttaagtttattcttcgtgtgttttttcagagcgtgggctccaaaccatcagcaaaacaggg

SEQ ID NO: 14020 - DNA, 891 bp, Brachypodium distachyon
  Intron number 1 from transcript Bradi1g25670.1 (locus Brad i1g25670) derived from phytozome v7.0 (chr-ID Bd1; pos 208 39482 to 20840372 reverse strand)
cagcctcgccggtttccctagcgctgtcgtcttcggtgagagattttccatccttcccttgcatctgctgatttagggtgcgcattggtcttacgcatttagtagcttgggccagcgatgattgaactgaattatctgatcatcacctacttggggaagctaattaagcagatagactggttcggctctgttctgcagctggttcatgaaacttagtcaagtgcatccaaacgttagcaaatttcaccatggtttcacataatacgtcgcttattttgaaacagagaaagtacaaatttacaatattattggtattcgtgtatatattatgctacgattctgcttgctttctttcaccatgttgcgaatttattgttatgtgcagtgacggaccatggtttgccttgaggccaagactgagcacccaagcctaggctaaacagtgtatcatgtgttaaattcgtagagatttttgatttttttttcaatacgtatacaaagaaatttggttccaagcgcaagcctatagcccaggctgtcttgggcgttggtccgtccctgattatgtgctgacattttaggcagcactatttatcagtagattaagaaatagttatttctccgtcgacaattatgaaaatcttcttatgtttttgtacttctataaatctcattaatcaaattagatggttattagcatcgacttagaactaagcctcaggaatagcaaaacctcacattttcctaaaaaaaccataacctcacattctaatgattcccctcaaaacctgtcctgaggaagctacataatgatcagttatgctcaaattgaagttctcttcatttcatttcacaggccagagcagttggtttgagctcttgggtccggga

SEQ ID NO: 14021 - DNA, 802 bp, Brachypodium distachyon
  Intron number 3 from transcript Bradi1g18110.1 (locus Brad i1g18110) derived from phytozome v7.0 (chr-ID Bd1; pos 145 95965 to 14596766)
ccggccaagttgctaccgtggatcatattaagcaggtaataaatcgaaggatgtaactgctgttgttgcaaacatggttattttgcttttatatgcctgtcgcaagtgagtagtccctctgatcctaaattgttgtcgaaatattacatgtatctagacgctttttaagaatacatacatccatatttgggcaaatttgagtcaagaatttaggatcagagggagtactaaacaagtagtagtcacttatcctagagagtggtgtgtttaccagttgtatatctgcaataagcatggcttgcgtcttgagcttgatggacacggctattgttggacttttgaattctgatgaattgcccaggtcatctccggttgatctctcttagtctcttaccactcatgcagtcttttacttagttctgttgttggcttatatttttactgaggaattgatctactgaaaataaccataccgtttcaaaccaaaatagatttaccggacttaagttggtttcttatcttccatgagatagctcggaagcagaagcatgaaaagcaacttctccaatttgtctgaactctacacaacaccagcagcagtattaggcctcactagttaatattaccgacctgcacaaaattattatgcttggcaaagtgttgtttttgcaaatatatggaatgggattttcttcgcacattttgtttgtcattcaaagattggagttcctgcatttgatttaaattcattttgttttgtgtttgtgttcacagacttgtacaaatttgagacctgctacag

SEQ ID NO: 14022 - DNA, 416 bp, Brachypodium distachyon
  Intron number 1 from transcript Bradi1g24820.1 (locus Brad i1g24820) derived from phytozome v7.0 (chr-ID Bd1; pos 200 67730 to 20068145)
acatcggcatctctggtacgcgcctacctcgatctttcattatgattgctcctgttcacgcatgatcaatctttggttgttttcatctcggccaccgttcacctaccaacgtgtcggcttgttttgcacatagaaacaaagctgtgatattccctttccttttattatttccatatttattacttgtacagttgtaccggattcttgctggaccaaagaagagtctttccatgcatgtacctcttgttacctggcacaacctttccatgttcatagtgattatttctttcacgcgcatcatctttatatgttatcagtgctcctctgcatgtccaataatcaaaatcagggaaaagaaatcaagaaattaaccatgtttgcaatggcgtggatcatgatcaggtggcgtgacgtcg

SEQ ID NO: 14023 - DNA, 747 bp, Brachypodium distachyon
  Intron number 2 from transcript Bradi1g35900.3 (locus Brad i1g35900) derived from phytozome v7.0 (chr-ID Bd1; pos 315 24109 to 31524855 reverse strand)
tccaaagaccttaccagggtctaagcagaggagaggtacactctagttatcatgtaaataattgatcagctttctattttatttatgacaatcctgttcatgttgataacataggtgagtattcgtttttggactgttcggcaccctcattagtctcgaaagtaataatttcttcggggcaaacaaaaacatgtaagtttatctcttgttttggaggaatactcttagttctgcaatgttctatttctagattgcttggaatataggatatcgtagatgtacgctacttccattcttacctagtgttgtacgacatgttggtgtaatggaatagcctttactttcagttctacttttttaaactatttccagttgtgctaatcacctggctcacctcaccttctatctgatcttattgacctatctctgtcttcatgtttcaccttacctcaaagtcaagggtcgagtatccattattctgcatgtgaagtcaaacgagaacagtcctggttgatgatttagggatatgatacatgcatgttattcaaaatctctattagtgtcaattcctgtttgtcctagatcttccgtggacaacgaagaatttttcacctgttaatcttatttgactgaaatctctgcattatatgaaatataattatctacactaatttaggaattgcaactctgttgaacaaaacatcttctgcagatattgtacgtctggagctcccaaagattttacca

SEQ ID NO: 14024 - DNA, 876 bp, Brachypodium distachyon
  Intron number 3 from transcript Bradi1g22300.1 (locus Brad i1g22300) derived from phytozome v7.0 (chr-ID Bd1; pos 179 04843 to 17905718)
gatcgaacccagggtatgtctccggtgcgctgaggatttaggtggtcaattgtgaattattttgtcagaaacttagatattcttttctttttattttgtgttaatgtgtgtattagttgccttacgatcctacagaacagatcctgttcaagtaaggtcgttaatctgtgtattagttagatagcacgagcttgtgttttggatttgaagtggataagtgttgcccaaaaatacaataaccatgtccagttccagttcacattagctggtacttgagctcttgaaggttaagtattatggtcagtccgctggcataaatagctctatgaaaactttagtcaacaattgtttagagcatgctgacacttgcttccactgtggaagcagggcatattttgtgattaaatgagactactgaggaatgcattcaaacttgaaaccaagtggtggaattggcgggcaaattcataatcttatatgcttttgtgctcggtccattttgaagaatgaatttggttcatccacatgaagtttgctacataaagacatgtccttagatcttttcttgagggcatgcatatgcctcaagtatatgatatctatcgccaaggcaatgatttacaaagatttctaagaactataatgtgcctatatgtctcacttagccaatattttcagtacttccctaccaagaaggttcagtatagtttagagaagtttgattagctagcaatgcaacatctaaccactttgacttctcaaataaactggttacattgcttaaccttatttttattaatgttttgcttccgtgtggattccagtattgctaaattacttaaaccttttacagattcatattaacaggttgctacg

SEQ ID NO: 14025 - DNA, 874 bp, Brachypodium distachyon
  Intron number 1 from transcript Bradi1g32650.1 (locus Brad i1g32650) derived from phytozome v7.0 (chr-ID Bd1; pos 280 71784 to 28072657)
gggcccgacgtccagaggctccacctgactgccaggcaagtatatgacaccaccgacgatcgattgcctcatgagtttttcggacttcggtgatactacttccatcttgatttgatccgcggagtagggaagtgagctagcgttttagttcgtcgcccactttgggccatttattcggttagtttaatttgacgttttgattgagctacaccgacaatttgttttggggactaaattggtggttcttaatggaagaaaatgacactttgtttacgatttgggggttcgagtggtgacctgtagagctgttcctgtgaagtgtgagcggtgaaattggtaaggactgcgtaccagttatctctgcaaagctaaatcagacagacaataaaaatgttcggtcgacagatcaaagcgatcacggtggggcaatttatttttgggactaattggcgttgcttaatggaagaaaatgacattttgttcaagatttagtgacctgcagagctgttcttcgtgagcaatgaaacagagctgattgttgactgatcaggactgcgtaccagccaatctcgtctctgcaaaactaataaggagtaatgtctaatgaaagatatctcaaatttgttaaagtttggacatgacttagcgtatagatgcattcatggataatgattgctcgagaagatcaaagcgatcacgctgggactcgaacccagaatctcccgctccggaggcgagcgccttatccattaggccacgcgaccacttttgatttcggttacgtattaataaataaaattaatattgactgaccattcactctttcgtgccggcggcagcttggagacgaacacacggctgcaggtcagaatca

SEQ ID NO: 14026 - DNA, 742 bp, Brachypodium distachyon
  Intron number 3 from transcript Bradi1g11220.1 (locus Brad i1g11220) derived from phytozome v7.0 (chr-ID Bd1; pos 828 3144 to 8283885 reverse strand)
gccaccggcgtcccggacaaccgcctcaagcttgggtatgtttatttgctttagcacttgagcaaccctgctgttatcacttctgccaaactggtccataggcaggcaatttagatgcaatccccatccggattttagatggactgatggagtaaatagagatttcagtatataaaacatctgactctggtatgggagtactccagtacgtaattagtcaacgaatgcccaacaaattaatgtggtgagtaggtagccagtgctgaacgtggtgccccaataaaaatattcagatggtgcgctcgtggtgagcggatcatggacatttattgcttgctgatagtcatagtagcatggagtagcttttgagtgtttgttgaacttgaacctcctgcgtcctgcgcacatagacgtgcctttgtcttcagttcttcatcctttttgtagctgactccccagctactactggctaaaccgctaaaatttcggtgctgtcataccatcacggtcacggtaggccaagaccaggtcggtaggtggggttcgtcattgatagtttgatgttttctctcgataatgaataatttgatgcgatgttaagtcagtttgggagtttttggctttatgacagtcttgttttgatcgaagtggttgttctgacttcagattttgtcgactaattctctgttggcgaacgctgggtgcagggggttcaacttcttggcgataatcgggctgatcc

SEQ ID NO: 14027 - DNA, 709 bp, Brachypodium distachyon
  Intron number 1 from transcript Bradi1g45410.1 (locus Brad i1g45410) derived from phytozome v7.0 (chr-ID Bd1; pos 436 16718 to 43617426)
cgcctcggacctggccgcgacaccttcatatacatgtaagcaaggtcggccttgagcccgccgtggttgcctggttaatttacccgtaaaatcctgcatgatcttttcgctgctttgggacgtaaagtcaagatcgaactttttagagcagtttctcgtaatcagattcgattcgtttgggcttcttggttggtttgtgtgatgttttcagacgatctgatgacccggcctcccttttgtttgttttgttttgttttgttttgttttgttttgtagagaaagcaatatttgttgcgtgttccgaggctttaatttcgttggaacgagactgactgacttgatctgattgcctcctatttttggcagaatattcgatgtagcatcatactagtagaagaaaaataaaatgcaagtaggaagaagaaacgagtataggaatcagttgctttctgttgtgcccatgcattactcccttcttttggaggaaaaaaagaatccatttttgtgatgagaaaaagagagtcaaaaacattgagtttgtttccctttcttccagctgtgcaaatggagtagcattctgtaacaacttctgcattatttgttgattagttgatgaaattgatcaactagaaccagtaattaatcactgagattttcctcgttgcatcgtgcaggggggaagtggccttctgcagccttgagtgcaggc

SEQ ID NO: 14028 - DNA, 655 bp, Brachypodium distachyon
  Intron number 3 from transcript Bradi1g10540.1 (locus Brad i1g10540) derived from phytozome v7.0 (chr-ID Bd1; pos 763 1348 to 7632002)
gactggaccggtgaggctttctttcttttctcactctcctcatttgattttgctggtgtattgcttattacgtaccccctctgttttagcttaccaaaacatcttacaattaagaacagagcgaatacttgacattgcttaacgggaaggatgataggagttttgtttactgattgatgttgaattctcttcactagtttttgctcccagaatgataacgcataatctgaccattttaggaattggatgactactccgtactctgtttctgtcttctccattcaagacgtcatgttaattattagtattaggttgaccaaatttgccatcatcacttcagcatcgctcttaatttgtttatgttaggaaatcagcatggctttttgtttattgttgggaaatcaagacaacaaattaaaatttggaatccatttgacactaaccatgaggattttattaactctgaagaccaaaatttatgtaattttcaaccaatgattatggtaagcgtcgttttctttacaatggactattccggttccggtacagtatctcgtatgggatgaaatgaacaacagggttgtaacaaaattttggcatgatttacaggttcatatatcctgtctaacctatcgattttgatctgatacaggtc

SEQ ID NO: 14029 - DNA, 921 bp, Brachypodium distachyon
  Intron number 4 from transcript Bradi1g20380.1 (locus Brad i1g20380) derived from phytozome v7.0 (chr-ID Bd1; pos 163 25480 to 16326400 reverse strand)
attccaggtgagtttgcatatatctatgcataccatgaagtttatatttacagattttcttgcatatggatatatacggcatataatggttatcaatgtgtgcttggtatgccagttcacttcatcatttaatgtgtaaagaaaagtacccttctatatgaatatgcaaaagcctctgtaccactagtgaaacttttggaacttccatacaatttttgcccggtcaatagtagcaatttttccttggggaagctgcaaagagcacttgtagtatgtcggcagggaggacagaactgagttcacaagttgaagtttcccccccatgagataggaaacatgcactagcagtgagtcttctctcaactcgatcaaggagaggggagaagtcctggatccggggtttggtagttcctagaggcaagcccaaataggtaaaaggcagatcaccaatgacccaaccaaaattttcagctaactgccccaccaactcaccatcaacaatcatggggatcaaagaggacttatgataattaacctggaggccagtagagattgcataatcctccaacaaactaaggaacctgatcaacataccagaagcacagaactatttcaaataacaatcatgccaccagaatttccctcagaaggtgaaaaggcaaaactatcaaatctccttgggcagaagcgcctaatataagacctatgagagctgtcaaatttagtttcctgaaggcacacaacagtgcactggctctcttctactttgttgcgaatcacacgatgcttataatcagaattaatagccatatgcccatatgcacagtttatgttgaggataaacctttcatgtaatcatgcttcttagactagacagcactgtacttattttttctcattattaattcattctgtacagtt

SEQ ID NO: 14030 - DNA, 748 bp, Brachypodium distachyon
  Intron number 2 from transcript Bradi1g38230.1 (locus Brad i1g38230) derived from phytozome v7.0 (chr-ID Bd1; pos 343 95310 to 34396057)
agctcccacgctttgccaatcgcattaccttgaaggtttgacttttcgatactgttgcccgtgaccgtcaggttgaagaaatacccttttttatgatcacatgacaacattgctaattaaatgttgggacatataacctgtccaactagttcatttctctaacattattggagatatatgtgatccagttttgagttccacacatgccttaacagctttgagcctttggcatcatatgctgagttccacatttttttttgagcgaatgctgagttccacatattccttgcatctttgattctttgacaccacatgccgctgcctgcagtgcgctcccaaattatgtcgtgtaaatttaaatggctgtttccagagatgagtgtaaattataacttgcattttgaaatgtcaaaggcgcctcacaatcatgaacttcattaattcgattcttacttggctgacggctggtgcctgttagatgcaacatcaagttgattcagagccagatttccctttgtgtttaatcttctaatcttctccacaactcaattatcaaatgcaagaggattctttagcatatggtctctttaagtggtcagctttgttttctatctgatctgcatcaacagaagtaactggttatggggtatttattctcggaacgatattcttggatggagtgctgctgtttttgtgtaacggccatgtcaatcattttcctttgttttctcagaatatttcaccaaat

SEQ ID NO: 14031 - DNA, 603 bp, Brachypodium distachyon
  Intron number 1 from transcript Bradi1g06030.1 (locus Brad i1g06030) derived from phytozome v7.0 (chr-ID Bd1; pos 406 3826 to 4064428 reverse strand)
ggcgccacacctctacaacgttgtcaaggaacacggtatgtgagttatgttgttgttttaaaggaaaattcgtaggagaagctgcaagagtatatttatttcaaataataattaaacagagtagaaaagatgaaagaacgagagattaaactcttgctgcagcctaatttctttcccttctctgtctagtatgtttgtttctgacatgaacattgagcttgacgcgtttgaaaagtgttgtcaattatttgatcttatttacacacaaaaatgactccatcctgctcccagtctttatcgatctacgtcttcttgatgtctctagcatgatcgaattctacattccttattcaacattatttgaaaacatgttgagtgagcagctgtcggatcaaaatttaggagccgctatggccgtggcttgaccagagtgtaaccgaaaaacacaaaatcattgtatttctcaaatgcatgtaactaaaaatgttatattttctgtacatcaatgtatgtgttttctcgtgcatatcaaagattttgttgtctccatttctcttaccgccagaacatattgaattgcattgcaggcaacgtttgcataac

SEQ ID NO: 14032 - DNA, 846 bp, Brachypodium distachyon
  Intron number 1 from transcript Bradi1g35530.1 (locus Brad i1g35530) derived from phytozome v7.0 (chr-ID Bd1; pos 310 89649 to 31090494 reverse strand)
ccaggaggcgattgagggagctttgtattggaaaggtaacgccctttactcccttttccctttccttgagttcttggtgagaattctcttgcctggaatggggaaaatattcatgtttatgtgctgtgctattgagatgtcatgatactgggttcaccggaagtgagttatactggaaaaaatggtgcttttaggacagttgctaatttgctctctgtgtgtgctaggtggcatggaatgtctttctatggttatgcagaaatatttatatttaaccatggttgtgtttgtctgtcgtgtttttgaggaacggtgtttgtctgtcgttgcaaattgttttcaatggattttgggcgagctttggctgatttagttgtgcttcgattctatagttgggagtttatttctccttgtcattttgcctcatctgcaagacatcaataggttttacttcacctgcaaaaaaaaaggttttacttcacggagtattacttagcgattctctaattgcttttgctgtaggatgctttggtgtgtgtactcatatctaatttatgagtttttgtcttctgaatgctatagcagctatcaaaattttcttgtcttcccctagatccatattttttcagtaattcgcacatgctacatttatttgaagagaatattcgaagtaaatacataaaacatggaaatcaagtgaagaagtgtgtctaattcaaagcaagttgaatttcgtcataagaattattcaagagaaaacacaatgatactggtttagtaaaatcagtaatcaattgctttgtaccattgactaacaatctttcatccaggagagtgaaagagaaa

SEQ ID NO: 14033 - DNA, 710 bp, Brachypodium distachyon
  Intron number 2 from transcript Bradi1g27350.1 (locus Brad i1g27350) derived from phytozome v7.0 (chr-ID Bd1; pos 224 20476 to 22421185)
ggttcgtgcgccagctcagcgccgacgactgcgcggtgcggatctcccctgctactcactttttttagttcagtgcagtgtgagctatcgatttgtgctgaaacgcattgaggatttcgctatgatatggtgttgcttccgtgatggtgtttggttcagtggcttcgtgtcatttggagttgtttccatgatggaagttagcgcttctgagtttgaatgtggatagagaattcaattgtttggagctggtggtttttgtgtgaaggttaacagtagtgcgccctcctgtgggttttattcttcgttatgtgtgatggtgtcctcaattcatgcgtgcagttttaaattctcgcaattttatggttgggattaggagtggaaaagttggaattagatgcgtgggatctgtgtaaagtcctcatgattcagtaaacaggaccagcaatgtataatctggtcaaatcgatgtgtttgaatcaataatttataccacaaggatttagaaaaggaaaactggctggtctttagccggttttctctgagaacccaggaccctacacattttgtagagaatgaagaaggtttactcaaaaccttgcttctacttttctgtctgtttcttgttattgaaattatctactggaagtgtaaattattttgtcatttatctggcaggcatacgcattgcagcttcctcttttcatcaattg

SEQ ID NO: 14034 - DNA, 553 bp, Brachypodium distachyon
  Intron number 2 from transcript Bradi1g30640.1 (locus Brad i1g30640) derived from phytozome v7.0 (chr-ID Bd1; pos 259 44596 to 25945148 reverse strand)
ctcgtccttctcctcaccttcacggccaccgccatgtaaaattccttctcttctctttcttctacacagaaaaaaaatccattcttttcttgcatttccctcgattgatccgagatttttcttttttcaaaacgtggaattacaacccgtctaaggatcaattattttcttgtaaataaaaatcctgaggttaattaactcttccttttttactaaggaatgtggatttagttaactattgaaagaaattgttttgctatttctcgggccatcgagaaatgattatttataaatccaaagaagcgtacgatctgatcacagagatccgtataaatacaaacaacgtgagatgattttcaataaacgtcaaacaattatgaattttgatcgagaaattacttttctatttatttctcggtctactcataaataaccactcctccttgcatagaatatttatgtttttttttgcgacaaaccaatatgtttatatggatcaatcaattatgtttttgcagtgtcgggtgtgcggtgctatacaacgggcagggga

SEQ ID NO: 14035 - DNA, 492 bp, Brachypodium distachyon
  Intron number 3 from transcript Bradi1g04520.2 (locus Brad i1g04520) derived from phytozome v7.0 (chr-ID Bd1; pos 303 2477 to 3032968 reverse strand)
tatcatcgctcttacagagcaggttagccagatttttctgtttttacttgtttgctctgtagaccattgctatttgatatacctttttgactagtgaataaacaaaaaatgtgactgtacattaaggcatctctcatgtggtttggggaaaagaacccattgttatggtagaatcaggagagctaaaatagcacattttggtgctacttactttctcgggtggcatggtgctgggatattcccgtccactgattattgcagcaactttactgataaataatcttgtatccatctgtttggtgatgtctgacagctgaatactttcaagtttcaattcaacagaattaggagttcccgattcccataactagaaggaaataaagaaataagtaggtttatttcacggtcctttttgctagtaaagtgatgtttactgtcctactatttaaacttgcagggtattcacgctgtaaatcttggggacagtggctt

SEQ ID NO: 14036 - DNA, 916 bp, Brachypodium distachyon
  Intron number 2 from transcript Bradi1g07590.1 (locus Brad i1g07590) derived from phytozome v7.0 (chr-ID Bd1; pos 533 4307 to 5335222 reverse strand)
gtgtcggccacttctcggagcggaccgccgccacagtgagcatccccctttcgtgctgtgttttcttcttctttcttttgaactcatccacttcctgacggctgccgtgttagtttcccccaactgggtggcattaattggattaggccagttgttatttgctatcgtttgtggactccatatgaaatttgaacctacaatgaagctggcaggttttaagtctgactgctccagaaaaaactgcaaaattcgacagaggaccttttctaactgttccctggtgaagtattactccattgaagtcgtgagagccaggacgatccctcgaaatagcccagctggttcttagtaccttcatatgtgtagtttgtaggtgttctaacttctaaaactacatgtatctagttatgccagtttatttgcattgtttgagttttggagtagtatattgtcttatctttaacaattttgttataagctattcatttcatttggtttgatggatatctgtatctcactgcaaggtgaagaacttcttaaagactttataattataacatcgttagaaacacaaggcaaaaggttccgctcgttcatagacgagagtgaaacaaaacctaagcatttacagaacacaaaaacccacctcaaggctgagacttgcagcagtctcagatctaaaccatccaacacaaagatccaaacatcaaagaaatacaaggaatcatgtttcctgaacatgaacaaacttagcaggacatgtactcagtttgtgaaatactacaacccaagccaagagctaatgcttccttgccacatcaggcagtagaacatgatgaacatatatcatttttcttctgattaccattctttgcactaggtttttctgttaattcagtacatcttttgttttagt

SEQ ID NO: 14037 - DNA, 1036 bp, Brachypodium distachyon
  Intron number 1 from transcript Bradi1g30220.1 (locus Brad i1g30220) derived from phytozome v7.0 (chr-ID Bd1; pos 255 88090 to 25589125 reverse strand)
cgcgccggcaagtgcggcgtccgcgcaggtacgcacgaacgcacgcacggttcccttcccttcctccctagagggaaagttgatccccaatgcgggttctgtgggttggttcatacttctgccccaatccaatctagcgaattcgacgcatgtaattctgattgtaagctgtatccaattcaaatctcgggtttggatctcgatgctttcggtcgatttctcggagcagtggcgtctggatggatgaatcaggcgatggcgtgtcccgagatttgaacatgcggcggcgagccggtctttgggctcacgcgtcgctgctccgtagcctgcgtggttggggatcaggcggctgtgagtcaaagtcagaaactcgcgtgtattcccagcgttcctgtcctcttcggggctgttgctgtcttctggacgccaacaggagtcgtgttgatttagttctgggagacgggggcaaactgaattgtcagtcaatcatcatgtttcgaaatgggtcatgagaatagtgaggcgtcgggaagatgaaagcatgaacgtggagaaatgggctaggtctagagagagccatgaacagaaatgaacataactcgccagaattggaagtatgctcatgcttcggaacatgatatatctaccttgtaagcaggggtcaatgcgagattgatttggagttttcagttcaatacattgcaatggtggtgactcgaatatcatgaactatgttacaacatgcttaaaaagttaaaatagttcatgcttcacaatatttgagtcactcatgaactattttacagcaagcttattttggttaattttctcgaaaaatatatcttggttaattggttgaattgaagaaggttgaaccattctttatcgattttcagatgtcttgccccttattaatgtgcatatggttgtcagacttttgcttggccaactgtcctccagtttcaacttacatggctttattttctctctctaaattacaggtggtggaggttacacctatcttttggagcctctc

SEQ ID NO: 14038 - DNA, 510 bp, Brachypodium distachyon
  Intron number 2 from transcript Bradi1g14340.1 (locus Brad i1g14340) derived from phytozome v7.0 (chr-ID Bd1; pos 112 50085 to 11250594 reverse strand)
ggggaaaggcggcgtcggcaagtccaccactgcaggttgtatttcggtctcttcttttcaaatttactagtgtaggagctgcaaagaatatagaaattgaagatctgaatatgtattgggattctagactttgtagtttcaaaaggggaaaagtaatatagaaattcagatggaagtacgaatgatgctagaacttaatatgcccattaattatcttgaagtagaattggcgctggacttcccctagactgttagacattaagatgctccgttaaggattcttttggagagggattggggcagccagaagccaatgatataggtgaataatttatttttacttgttcagttccatgcaaactattgtgaatcaaacttttgcgggatcgtattaaacaacttaataacttgttatgcttaggcatgcagcttgttccataaaattatccttatccctggtacttgtttcttgcagttaacattgctgtagcacttgcgaaggagtttcag

SEQ ID NO: 14039 - DNA, 835 bp, Brachypodium distachyon
  Intron number 1 from transcript Bradi1g17790.1 (locus Brad i1g17790) derived from phytozome v7.0 (chr-ID Bd1; pos 144 23129 to 14423963 reverse strand)
tcgtccgcctccacttccacgactgcttcgtcaacgtacttacgcactgagaactttcaccattaagcaagctaggccgtgtgtccgttgatatgtggagccatggatgaagtgtttcggttgtgctttggatgcaggggtgcgacgggtccgttctgctggacgacacggacggcatggtcggggagaagacggccaaggccaacaacatgtcggtgcgagggttcggcgtcatcgacgccatcaaggcggcagtcgacacggcctgcttgggcaccgtcgtctcctgcgctgacatcctcgcgctcgccgcccgtgactccattgtcgctgtaagttcttcagtaacttcagtctgtactacaaggactattttttacagccagatcaaatttttagacatgttcgtcagacataggggaaaacatgctgaagattgtacatgcctgcaccacaaagtagtgggaaaagaccactgagtaaccgtaagataagcgatgcttaaagcacctttatgatcagcaagacagcaacacttcttagtcgacccagctgatgacaaaattcaacaagaaaatggttaatttatttatctcatcgatcagattagctctctctgtcttcctccgacaacttgcagctagcaccccttttcaccccgaagaaaccaagccataccaaacttgactctgtccagccaaaacgacaattaatcaatgtaacataatcccatttccagacaatggcattaatgattgatcatctttttatatgatcgtggttcttgcattgcattgcagctgggagggagctcgtacgaggtgccgctaggccg

SEQ ID NO: 14040 - DNA, 281 bp, Brachypodium distachyon
  Intron number 1 from transcript Bradi1g43030.1 (locus Brad i1g43030) derived from phytozome v7.0 (chr-ID Bd1; pos 405 01502 to 40501782 reverse strand)
atcaacacttggggaggggtacagtacctgccagggtatgatcacatatctccccccctctctttccttggttacaatcttcagtatgaaaacaaccatgccatctagagattaaaggtccaacagctaacatgaagaacgagtttgaatctgcaaaattgatgaagaaaacacaaaaaaagagtcatcagtgatatactccataaacccaataatgagaaagacatatgctatataggggctgatttataatctggacatttgttttgcaggaattttgg

SEQ ID NO: 14041 - DNA, 909 bp, Brachypodium distachyon
  Intron number 1 from transcript Bradi1g21550.4 (locus Brad i1g21550) derived from phytozome v7.0 (chr-ID Bd1; pos 173 54300 to 17355208)
ttcgcttcctccagcgttcgtctcgctacctcgaggtaccaaaacccttctcccctccctttccgcctcgcctcgttacgcagatccgcgggtaattatgctttcccatcttcaatctcttcgcggctagttatgctgttgcatcttcgatctgttcgcgcgccgatacgcatggttttagttcttcatttatcagccgtatgtataaatttcatctgaatttacgatgttttggtgtgatctggaggcgaaggagggcaattcaatgttttgtttcggcagatcttagaaatcggccgcctggggtgtagatgcatcgcgtgttttgtccctgagatccgatatggtattagactttgcaagactagttttccttcccttagatcagtccagagttttatattttctagctacttatgaatgtctagtgaaataaattagactattgcatgttcctgcgtcagtgaagttgatcactagcttgccatgcactgtataaccgcttctattctcaaaggatcgcgaacttggattatttgtgacttgcatgtttgtttatctatacctagttggtttacaatgcaccgcggacttgtgggagattcgtttgtagaactgtataattttgcctcggttacaaattgtttacaatgcaccgcagacttgtgggtgtatctgatttgtgcagcatgtcaattgttttgactcaccgaaaacaaggtttcttcgtagcaggatttagagttgtttggtgttactttcttttcttaccattgctcttaatatccttttgcagtttcgttgtttattgctcattgatcagctgataccatgatttggttttgtggctagttcttatgccattctcttctgtgcctatagatcacctgtgacattttttgaggcgcg

SEQ ID NO: 14042 - DNA, 700 bp, Brachypodium distachyon
  Intron number 2 from transcript Bradi1g10000.1 (locus Brad i1g10000) derived from phytozome v7.0 (chr-ID Bd1; pos 718 0182 to 7180881 reverse strand)
aagttcgaagaagtgttgattggttctacactcaggtacctttctaaattagcattagttgttaatgttttggttttttcctatccttgttattcattgaacgtggctctcctaagctagtggaaacggcattgatgcattcttgatcttcatctggttacgcttcttagcttgtttactcaaagtggagtagagttaaggaatccccaaatttgtgtttaagtcttgtgcaataccgttgtttaggtgtgtatttttttaggggaaacagcggagtaggattcttaggtggatgtaatggtctgatgagaatggtagcttgttctctcaattttagtacagtttggtgcttaagattgtactaagggcattctcttgtcattatctggggcctatacttaagatatgccatccagtgatttgcacagcagcacactaagaaaactgccatgttttattttcttgttgttgcaattgtttatttttaaggccccctgttgtattgctagagtctcattgggtcggtggtcattccagcgagagctctgctatgtagacatagagagaaccaagagcaaatgactaacttatcatcccacgactcatttgcttactgtacattatctgttgacttctaaattttcacttatatgatcttttattcttttttcatctgcctttccttcaaaagctgaataag

SEQ ID NO: 14043 - DNA, 928 bp, Brachypodium distachyon
  Intron number 1 from transcript Bradi1g05650.1 (locus Brad i1g05650) derived from phytozome v7.0 (chr-ID Bd1; pos 382 9200 to 3830127 reverse strand)
ggtaatttattcgcactctcttctctctggtgattactactccgtagatgtcttcttctctagaccaaatactcaaatgatgaactgggttagtggtaggcggcgcacagagcatataattgtttgagttcactagatcttgtgttttcgattgtacagggatttttggatttgactctaggttagatttagattctttgagcaagtctttctgaggcagtaattgacaaggaagtttctgtggtagcgtgggggcaacgatgcttgggttagtttttttgggaatgtgacaagtgtatgtacagttgggacaccatggaccatattgactgttgatgaagattaaataggtgttcctccgttccataattcttgtctcaaatttgtccaaaaatggatgtatctattcgtaaaaaatgtctagatacatgtaatatttcgacaagaattatggaacggagggagtagttttcatctattttttgtttatcaaacaattactaggtttttagtctgtttccttatcaacggccagtacaattttttggtccacaattccacatcaaagagttgcacgttctcaccaaatcatgaaaaacttattatatgtttcagcatccctttattatatatttcaactcctttgtgcaagaaagctactatcctctgggtttgtcttgtaatttgtttcttttactgtatgaaactatgaccttagtgggctggataatttcggttggcctgatcgcatatgcatgctaatgctgccttgtacctttgtgtccattggctgtaattgtttattgctcctgattttcaattggttggtcatccttttcaagtgaatctgttgagggttaagctgttttatctgacctgaattgtgtttgcagatatcattgaagaacttgtcactaaggggcaacaa

SEQ ID NO: 14044 - DNA, 643 bp, Brachypodium distachyon
  Intron number 1 from transcript Bradi1g27170.1 (locus Brad i1g27170) derived from phytozome v7.0 (chr-ID Bd1; pos 222 64714 to 22265356 reverse strand)
ccgctccgagatccacggcttcatcacctacgcaggtccgagcgccgccgcttctcctttttttttttttgatcgggttgtgattggagccgcgattctgtagtcttatgggctctcctcggtctgcagtactgtctccgcgcttgaattgattcgcttgggcttttgagttgctatcgttcgatgcctcgctctccctagctctcgtggttcttaagtgtcactgttaatgcacttccccttctcggcttgcactatatgtgcttcttttttctggataatttgtgctgtttggagtttgggtgctcgattgggatggtttctcgaggtatttttgttcggactagtgtttctgttcttggaagtggcagtagatgctgctccgttcattctttgagcatttttaaccctcaattttttttgatctgctgggttttagggcttttgcagctggcttaaaattttgacttctcatgttgttccgatgctattgaacaatcgaattatgtttcctttgtttcttatcttttgctgtcgaaaggaagaagcatttgtctctttagctgagttctcacccgtgtttcttttttgtggtggttggtggacagacttgaactttgagaagctcaaggcggaggcaccg

SEQ ID NO: 14045 - DNA, 807 bp, Brachypodium distachyon
  Intron number 1 from transcript Bradi1g11610.1 (locus Brad i1g11610) derived from phytozome v7.0 (chr-ID Bd1; pos 862 7967 to 8628773 reverse strand)
actccgtctgggacaccaagcctgcttggtatggtttcttacctccctaattactcgtttcttgccgccatgaatgagcggctgaacgtgagaaaaatagcggtggcaactgaaagacaaacacactgattatgtgaaccaaacatgtgatttctttttgcctgcatcagaggaatatctctaacttcatgtcattattatttagtattgtgtagtaatcaaattagagtacaccagtattttttttagatgaaaggcttaccgccctgtttcatttcaggagtacaccagtatataccgttgtaaagcttgaatccataccagattttggaacgtgtatcaaattttcattatgtttcgcacattttttatatatattttgcttgtttgctgtaaacaagttatggcctaattgatgcataccgatttatgctgagtgctcagtttctgtactaaactatagtggactgaacttcaagtaatataatgtgcaaaaacggctcacgattggcaaatcagattataatctaactaactcgtaaaataccagataaaaatacagagctgggaattatataagagagtttttcttgtgaggaattatattagatagttaagaaggaaactgttagatttcactcgatattgttccattgtccattgttgaacattttacagtttcaatctttcttgctacaaccatatactttgcttgtatgcttcagttcttcttacttcgacaagtatttagtactgaatttatctgtttcaggtgtcagccttggacaatcttactatcaggagccg

SEQ ID NO: 14046 - DNA, 869 bp, Brachypodium distachyon
  Intron number 1 from transcript Bradi1g31170.1 (locus Brad i1g31170) derived from phytozome v7.0 (chr-ID Bd1; pos 266 16069 to 26616937 reverse strand)
cagctagcaccagcgcgcctagggcttccatccgggtatggccgtccgaccttctctagctacttcgttttatggatggcgagataggggaacctatctaggagagtgcaaaatttgtaagaccgtagatcagttctcttagatggaacagtagaatcagctgctcctgttcgtgtaaacccgctagaacgcatatctcggaaccgttgatgctaaaactcctcaatcttgtgttgctgaattgtaattgtgcatagactttttgaccccatctgcgtgtatgagcaattattggtagatgcttttgttaatactactccgtagtatatgtgaaacgtcaaggacaagatcactagggtgatccagatgctgcagccttccattacaccgtatcggcagtactgtttgcagcttagtctgtaggttgctgcacatgatttgagtctagtgttagaatcagccccccgtagggctaatttgagatagatcttttgatgcttctctgaagccattctgctcctgctgttcttttagtaattcacctagtgacacccaacatttggtctacttattctgccattgctgttgagtggcaccatgaatctttttttttctctgtgttgagacacgttacttcactactataagtaaatctcataattacaaccatttttagttatttagccatggccctgcacgatactttgtatgtgtttgtaaaatgaagaccttgtgaatttgtcatcctttgtgtttgttttgtttctgcatggatgtgcttgtacaattgcttagaggttcaatttctttgcagtcatcttatatctttctttggcgcaggaacttggaagttcactacagacttcaag

SEQ ID NO: 14047 - DNA, 804 bp, Brachypodium distachyon
  Intron number 2 from transcript Bradi1g35670.2 (locus Brad i1g35670) derived from phytozome v7.0 (chr-ID Bd1; pos 312 37510 to 31238313)
ggttgtcgctgcacagccggtggggcggggctaaggtttgtttcatctgaatttattatgaatttataaattaggaagctgatttttttaaattggactgcacgcgattactgctggtgctcggaaaggtgcttggttccttacttctgttgttaggttttgccagggtggctatttactatttagcggcacaaatgatgcagggtatatgatcagtataataaatgtgcattggctatcagtagaagtgtaaaacgttaagtgctacttgcattttttgtttgatgaaatgtgaagctaatagctgagcttcgaattttgatgtttgtaggatgttttctactgcaaatattgtaccaagtagtctgtgaaagagcagttctatgttggtatttgaatatgcagcagtctaaatgttgaataaaattatattctgaaattagtgggacgttttgtactgcaaatcattgtacgaagcagccttttggaaggatagtttctaatgtcccatgagcatcttgggtgtgcactgcaatctgataatgttggaagatttacttttcgtgtttggaaaattcttactttgtttgcttggtctgacatgttttcctatttactagaagagtcaatgctttagttttgttgtaagaaaatacatacaagttttacatagtatttcgtatttacaggatatagtgtgatcacattatccacacgttcccttgttcttattataaaactgatgagttggttttctgacttaatgatttgatgatttttaggccaggcatagtcatatattac

SEQ ID NO: 14048 - DNA, 474 bp, Brachypodium distachyon
  Intron number 1 from transcript Bradi1g14590.1 (locus Brad i1g14590) derived from phytozome v7.0 (chr-ID Bd1; pos 115 53602 to 11554075)
gtgcggttcccgcgggcactcggttggcccccaaggtgctgatacctccttctatcttcttctttctatcctacgacaagctttggcttggaggcgtggctgatttgatatgatcggtgcctggtctgctctggctatgtagattggtcctttgatttggtaatgagtcaaaagattccggttttcgcctctcttatgcacatttcgctacctgtcagctgaacctgaccagctgttggtgcgataggcctggtccaatcgaaacaagattttagtgaagttggtttcttcgtattactcgctaggtttgattcctgggaactatatggtggcatcttaaatgggaccgcgaattgtatcctggagtgaattggtcataatgtgtggtcctttaatcaaattgcgggattgttctaacaacagcaacctgttcctttgagaaattgtttcaaacatgcattttttatgtgtaga

SEQ ID NO: 14049 - DNA, 778 bp, Brachypodium distachyon
  Intron number 2 from transcript Bradi1g43520.1 (locus Brad i1g43520) derived from phytozome v7.0 (chr-ID Bd1; pos 413 19649 to 41320426)
gaaccaagaacgtcctttgcaacggttgccgtgaggtatactgaatgaccttttctctttcaaattaagttgatgatgcgcacgttcaaaaaaaaattaatttgatgatgtgtggcttttaagttcaagcatggaaagaaattttggtagcccgtttagttttctgtcaattcctattgtactatcgtatcccactacccttgtgtttttacctatgttttgcattgtgacacttcattatgtttaattgtttattaacgtatgtaactctgtattgggcatatgaaaatggtataagtttgtatatatgaaaactcttgatatttataatatgtatgcacagcaagatcctttctactatttttgtttgaaaaacttccgtttagattgcctggaaaaaactcttgtaacattaatatttcattagaaattggtggtcaaagttcattagttatccatggatcttagggagacaggttacctatctagtcatatgtccggaagtaaaaggaagactgcagcttgaaagtcagaaaagaccaaatgtagcctgcctgccatactaattgcataggtaaagccagcttataaatcctcacaaaccagtaaaccccataagcctcttattacttttacattctgagtgtattggaacttaatcatagtaggtgagaacaactttttctttgattggatgggtgacattgatacttttcttgctctttttatatgttaacgtttatgcttttcaacatgcttactagggtgcccaggctaa

SEQ ID NO: 14050 - DNA, 971 bp, Brachypodium distachyon
  Intron number 2 from transcript Bradi1g44830.1 (locus Brad i1g44830) derived from phytozome v7.0 (chr-ID Bd1; pos 429 38960 to 42939930 reverse strand)
cgaggggcctgaggcctactacgaaggctctacaggtcagtatgctcctgatcagattcagaacaggttttcgttggtcacatgtgatttgaagcagggatgtatttttttttacctgaacaacggcggacctaggccagcctgcacaagcagggatgtgttaattctatggcattgagagcagtgtcaattaggaactattaggtgtcatgtttcatactagttggtgataaaagtgccacttggatttatgctatgtgtgtgtggctgtgtgcttgatttacctatgtgtaggaatttagcctcacccgagacagagttcttgctttattgtggtcttgtcatttttctgcagaatcctaacatgaaggccacttgaattctagagttgatgttttctaaagtaccatctagtatcaaatattgatacaggccatgatttgtgacttgtgacttgtgagtcgatcaccgcaagcccttcttgctgatgcttatgagtttagtcaattacaggatttatcattagttatgcttctgaaggataggcaagcttgtcattgtgcctatctatgtttcagctgttttgctgcatgttttttgttctattatttgatccatcccttgttcaaccaagttattgcaattataactgtttttgcactcctgcgttaagttgtgcaaatgtggttggtgtataaagttcattatcttttttaattgtaatttcatttgccattgaggcatcagaaatctgaaagcacaggaagactttcagacttccatatgtgtgacgttcaaataataaatacaggtgatactgtggtatagtggcatatcaaagtgaaaagtaaagtggggcatatgatcaaacctactgctaaatggcatgctcatttcagcatcattgcactcaacgttttcaatttttggtggcagctgcactgaaagttgcatcatacctgcctcttccc

SEQ ID NO: 14051 - DNA, 1047 bp, Brachypodium distachyon
  Intron number 1 from transcript Bradi1g28660.1 (locus Brad i1g28660) derived from phytozome v7.0 (chr-ID Bd1; pos 239 56078 to 23957124)
gcgctgctcgcattcacgcaacagaacgtgacggggtaagttgggaaagctgaaatgccttctggtttgtccgttcagtattatcgttttgtatataactaggaattcggcttcagcacacggaagatggcttgtaagaatatatgaaaaaaattaaaagaaaaaatggagcatttgtggacttaatatgggacggagggagtatctattaagccaactaaatcaaaatgcaacggtgacatcgtgttctactgttctatgggtcctctagccttgttctgttggagatttgattgatgtattcaaggcacataacttcccaatttgtgtccccctgaaataagctggtgccgagtaactaaagtaagacatacacaacggtttaagttgttctttacttaagttgacacggaaaatggaaataattgtcaagtgacactttagaaccttaacatgtgatacacatgttttaacgggagacacatctggggttggcaggaggagatgaagctgccagttctagtggatcatggatgtaggacagtgtagtataaacgaggcaatgcagtgaagtttatgtcgttctacataatttgtgctaactgtgtgtggatttttgtgagtcacatcttgacatcttgttcaagggaaggtgtagggtgttaggtgcaaagatgcatgtagaagagaatgatgtattcggccttctgaatgtaagataatggtgtatgtcaaccatgttgatgataaatatgatactgttttgctatttgataaaacaaattcgagctaaatgtttattttttaatcttgcctgacatactatgtttgttcccttaaatcctatatctactgcgggtcggcaccatgtttctgttgtgaaagacaatgtgttgttgcaccatatccagacaatgtttatctgtttttttgaaactcaattggaatttctagaaagatgctaatgcagataatagtttatttgtatttattttctataatctatttgtaggcctttggggaagttttcgccctttcccttctgga

SEQ ID NO: 14052 - DNA, 548 bp, Brachypodium distachyon
  Intron number 4 from transcript Bradi1g04900.1 (locus Brad i1g04900) derived from phytozome v7.0 (chr-ID Bd1; pos 325 1668 to 3252215 reverse strand)
tacgtctccactgctttcttggagctggatcaagggtaacttatgtttttagtttttgtactccctctgatctataattagtgtcttggatttagtagacacttattatggatggatggagtacattgtttgataaattgttttcatgatgttgtcacaagtgaaccttacagaacatgagaatgcaaaaaaattgaatagtggcaaatactcctacttggttgcatacttgcattgcagtgcaaaaaatggaataggggcaaaatgatgtgtgaattttgtaaggccatgtatttggatgcattttgatacagtcggcatattttgcccattcaacagatcttgtatttaagaagccaatgttacacatccactagccatttttggaaccaggctatttaaagtaattgcaaactttgagtacttacatgctgcagacgaagctttctccccccccccccccccccccattttcttttctttttctttactgtcagatgcagcttgtctcatttgaacaagtaaccatctttcatatttttcttcag

SEQ ID NO: 14053 - DNA, 1005 bp, Brachypodium distachyon
  Intron number 1 from transcript Bradi1g27090.1 (locus Brad i1g27090) derived from phytozome v7.0 (chr-ID Bd1; pos 221 55142 to 22156146)
gagtgggacccagaggcagtatgataggcagttttcactgtgtagtatggggcgtggatctcgaggcacagcggacggatggcataggaggagtggtgtgctcgagagtagaaaaatcggtctcttctgtgatttgttctatataatcaagctcctgacttactgtcaacaaaagtcaagctcccggctttgtttttttgtactcgtgagttctggttttactccttatatggagtaataaaactcttgtttcatcgcaaaagaagtgaatcaaatcggccaataaatactacttgagatatatatatctaaattaagatccttattggggtttcttttgcatctacttaagcttattttgaattgtagagtttctccataataattcaagagtgatttgtttcttcagatttcaaaacttccttttatttgcaaccgcctagactcaattagttgatgttttaggaggctgttttttaattctgttgtaatcttgtactccgtacttggtttttgtgtttccattgtatttgttcaggcaagatgtattgcccctcgtgctcctttgagtaatacattcagctggggagacttccccggtgattctcaaactaataaataaataaatctagctgtctcactctctacctcctttatttagccgactgaacccgcctgacattctttattcactcttcagtacccactctccagccccaagagcaagcaccacaaagctattttttcttgaatttttgaagctcaaaaatattattattgtcttcgtctgtttcaccgtcagtttactctatttaattcgatatgaatatctgaagttaaaagaagcctatcttttatttataatgattcacagaactttatgttagttatatggttttacgaaataaaaatatggaagaaacatgagtttcaaaagcattttgagcttgtagtaccatgtgccaaaaaatgtaactctttctaccattttgtcttgcaggtgct

SEQ ID NO: 14054 - DNA, 596 bp, Brachypodium distachyon
  Intron number 1 from transcript Bradi1g07820.1 (locus Brad i1g07820) derived from phytozome v7.0 (chr-ID Bd1; pos 554 4073 to 5544668 reverse strand)
tagctattattaattacaagtagaagatataagtagatttcattcccttaaacatagtactccctccctctgtttcaaattataacatgttcttgctttgtcctaagtcaaattttcctaaagtttaagaaagttttaatacatttacaacactaaatttgttttattagatctgccatgatacatatcttcatagtatacttatttgatattgtagatatcaatacattttataatcttggtcaaatttgacttactacaaagctagaaagctagaacatcttacaatttggaacagagggagtacctaataaatgggcatcctagttataactatgcatgcatcccccgttctgctcctcgttttgctgtctagtatcgcaacccttaagaatggcaacactaattttttttatttaaaaaaaagttgcagtgaccctggttgtccttctgttgaaccgcaatatcagcctcataaatcaatgctgcattacccctttgtagtacttcaggaaactggtcaatgtttctttattaatgtttatctgatctcttgagcagattttgagctggcaacctcgtgcactatacttccc

SEQ ID NO: 14055 - DNA, 979 bp, Brachypodium distachyon
  Intron number 1 from transcript Bradi1g09740.1 (locus Brad i1g09740) derived from phytozome v7.0 (chr-ID Bd1; pos 697 8968 to 6979946)
tgctcgtcgccttctgtgctgctgctgccccgcaggttcgcttcttctaccgcgatcccatgttttagaaagtcaaagcccttcgatttcttcctcgcaagatccaaatcctgtttggttcgttacttagttagcggagattaactcggttgggttttccgtttaccgggaagttgggatcgccggctctagtttgtttttcaagaatttcagtatctctccgcgtttacgcaatcataatttattacaaatgggtaactgaagcggacagaaatgacaaatgtcgacaagaagaagaaaaatgtcaacaaatatctaccacaccaaccagtgaaggcctgcaggcagggctccagctgggtgcttcccttggctgtaatcgcctgcttattcactcgcattgcttggaagcaatactttgtgaaggtcttgtttgagttttgtccaagggaggcgaatgaagcggtaaacttgtttcttagaggaaaggctaagcggtaaacttgttagcgaatcacgctagatcatagacatctcagacctggttggatgatacaccgggatttttacttcataatgattaacgatgtaagttcgtttgttatgtaacaaagcagtcttttggtgtaaaagaaacccagtgaaggccaggccagagctctgctgttctctagtcactagtgctgcagacctcagaagcttagcagataggcttcttcatctgccgcaggtggacggcagtgataggcttgatgaatagctctgaaacaaaattcaatcttttcttttttggaagaacaaaactcgaaccctaacaccaagcaaataagtttggtgacaatatgcaccagtaacattaaggaatcaatcatgatgttatgcatctatctgaaccatatatatttgcttcaagatatgaatgacatttgtatatgtacgcgcagctcgttggagcagcaaggggagacaattccctcag

SEQ ID NO: 14056 - DNA, 868 bp, Brachypodium distachyon
  Intron number 2 from transcript Bradi1g28710.1 (locus Brad i1g28710) derived from phytozome v7.0 (chr-ID Bd1; pos 240 01210 to 24002077 reverse strand)
tctctttatccaaggtttgtgcagatgaaatccattgccttcatgtttgcagcattgattattttcctccgacatggttgcattaaccgccaagattcaattgccacatgaaccattttttttagcaaacactactggataataaacgagcgaaaatgtaaatagccttgccacttgccatatctattggttttgtttattattacttattttacttccatgaaactagtaggaattactttactgatgaccatatctgatcacaaattccatgcccccttgagtttgcttgtatcgtcgctcataatttccgtaaatagacatggtattcagtacacaactatattacgtgttcctacctggctaacctactagtgctatctgctcctagcacctgggcccagacacaaagccaacacttagctagtctggcacaaagtctcagcatatttttcatagttcatgcctgggttggttcttaggcttcattttcctcgcttagattgtcaacagtcaatatgaagcagcactacaagattgtttgacgagactagacaaatatacatgcagggattcagcatcttactgtaatacgtgtctcgtcttaatgtgagttatttacctggtctcgcctgattagtgtgcaaattaattttgaggctgtggctctttcaactcaaaacttagtgtgaacccaaattgagcttctttggtcttcctgcgtagcccaagcaggcaaatccatcttattttgtcttctttgcttttatcttcaccaccaaaaagataatgctcatattaatggtttagcattattatttgaagaggttacccagttgttatccttatctgtacactaggaactcca

SEQ ID NO: 14057 - DNA, 802 bp, Brachypodium distachyon
  Intron number 4 from transcript Bradi1g10570.1 (locus Brad i1g10570) derived from phytozome v7.0 (chr-ID Bd1; pos 766 1811 to 7662612)
caacgggaagctcggagatctctacaactgctcgggtaaactattttggaaatattcgctgcaaattaattaattctttgagtaatttgagaaaaccataccttttggagttagggtttcacggagacacaggttttgaggctaattgtttcagaaaatccaaatgacccggattaagcactttgacagcgaaaccgacagatattgcccacaagtaagtcgccacgtcacacgatctctcttttccccaacccttcgtcttagtttgtatttgcacccaactccaaatcacatctcaaaaacaaaaatagctaccgaagaacacgatggcagcagggggcaggggcgggtcgccgacggcggggcggggcaggcggaggcggcgccgagcaggtcgcgggctgcgggcaaggtatggaggaagaagaaggagggagaagttggtgaatacaacgaaggcgagggggctatgtgaataaatgagatggacaaaactgccaacgtggcgacttacctgtaaactgccaacatggcgacttacctgtgggccatatatatctgtcggtttcactgtcaaagtgcctaatccggatcatttggatttctgaaacaattagtcccaaaacctgtggttttctgttgcaaaccccaaaacctgtgtcttcgtgaaaccctagccccaaaaggtgtggttttctgaaatttactctaattctttcttctaaatgattacttcttcacaaacaaacatcatctaatttatacagggataacagaagacaacttcgctcttgacgtggag

SEQ ID NO: 14058 - DNA, 760 bp, Brachypodium distachyon
  Intron number 1 from transcript Bradi1g18560.1 (locus Brad i1g18560) derived from phytozome v7.0 (chr-ID Bd1; pos 148 83944 to 14884703 reverse strand)
tgtttggttagttgcctatattgatcaaatttgtggaaatgttttttcatatcccgatttttatatagacaaaaaataatattaagggcagaatgccaaaagcattttatttttgatgtcctatttttgtggaatacaaatggttaacatgcaagcaatgtttagctgcaatgaataaatttgagaataaaaaaatactactccatcactaagaagtgtaggaataaataaaaatgatttaacatttctaactcaaattaaatatagagagacttcaattcaatgatcagttgtgaatttttctggtggtgtgctttcttttttcaaaccacctatataaaagtaccatggatactttggattaaaatgttgaataataatatggagttacaccgtctttataaatatgaaacataaataattaggaacacaattgacttgcatgtggagcatgagattaccgaatgtggttactgcaaaacaaaatgtggtcgtcacctcaacaatgtcaactagcggggagtactggcactctaagctctctcgctgtctttagaaagaagaaaaagttaatgtcttactgtgctatggctagcgtcttttttttcaagaaaatgaaagcttttttattacctccggcatctgcaaacatcatatggctggctatggagggagaagtatattcaaccaagtgtggttggttaatttgtttgatgaaattgtagcacgttgaagccactttgttgtctgtggaattctg

SEQ ID NO: 14059 - DNA, 660 bp, Brachypodium distachyon
  Intron number 1 from transcript Bradi1g41860.1 (locus Brad i1g41860) derived from phytozome v7.0 (chr-ID Bd1; pos 385 89726 to 38590385 reverse strand)
tggtaagtatgcatgtttttagttatagtttccgagtaaactgtgttgtaccactaaatcaaaatgaccagtattgagtattgtgtagcaacgaaagttataagtaataaagcttccattttctaaaaaagaaatattcaaactaaccagttgatcctaatatttatggattttatccatcatcaagtgataagtaaatactccctccgatccataataagtgtcggggatttagtacaaagttgtgttattatggatcagagggagtagtttttctctgtagcaatgaaaacggatattggtcataatcacatgatgacgagaaataattatcttgtaaatatttttcttcaggttcttagcttttttaggcttgtatattgagatttcaggattttagagatgggccttgtaagccagaaaggaggtagtataatatgaaaacagaaaagagttccgaagatgcatggttggtacttggctggaacaaaatcataatatgaaagaaaaatcataatataacgtctaagaagttgttttattctaatttgtgtgtacgattctttctacttaattgttttttgttatatttatgaacttgatgcatttacatgtataatgatgtttgtttttttgttctttcttttgtgaaggtctctg

SEQ ID NO: 14060 - DNA, 1036 bp, Brachypodium distachyon
  Intron number 1 from transcript Bradi1g14430.1 (locus Brad i1g14430) derived from phytozome v7.0 (chr-ID Bd1; pos 113 63835 to 11364870 reverse strand)
acgcgccgctgccgcagctccgctcggattgctgggtgagtaacgcggcgagcagatgcccttgctggctcgccgtttgattaaatatgcgtaccggtttattggggcatccgcctcggcgagatcggggttgagctggctgatcgatttgagcatcccgctcccaatttcttcgcacggacttggtttatttttgcgtatatttttaaagagtatttacgcgcctatggattatgcttggaggttctctgttctctccaaaaaaataaaataccgcgctagttcagcgaagcgtctccagttctctccggtacggtacccagattgggtcctatggggcgcgactgttaatgctgacagtactaggacttcaatgtgtgatcaaagaaacaatatttccagtggcgacgagtgaccaaaatataatccgtgcagccatcttggtttaaatcttagttcagttgtaagattcttagtttagttcaattgaaaatctttcaccacaaaggtttgatcaatttcataaaggtcactaatttcccctgaaataatggtcttacaagaggacaatcagtttcgagtatgcagtgttgcttaattgtaacatgagaaatgtgtatcgttatatgcattttgttcaaatttaaattgtttcctttcttgaacgtgtaatttattgtacttaacataaccttaagcaccatacaagtcatgcatagtagcattggagttacctcgttgttccatggtaatgttttctatatttacaatcagcattagtaactgttcagaactcaaggactgaaatcaaagcatcataccgttcctggtatgctgatatttagttcagttcctctctcactaaaaaatcttattgtaccctcaattgtatatgtaattctgcattttctgggatttcaggtctccagtttagcaaactgcactttttttaggaagatgcttatggtttaagattttaacgtttataattgctgttgcaggccattacaccagagtccatttctgctgcacaggt

SEQ ID NO: 14061 - DNA, 1001 bp, Brachypodium distachyon
  Intron number 1 from transcript Bradi1g33530.1 (locus Brad i1g33530) derived from phytozome v7.0 (chr-ID Bd1; pos 291 06180 to 29107180)
gacgcgctgcccatccaggtacacacccctgctccttcctagctactacgccaacacgtgcttcctttttaatttttgtacttttaaacgacgaacgacgacgacgactcatcatgcagcgtactcatcttcttgttgctttgagtcccgttatatagatattgtttttgtagagttcaaacacgtgttttattctggtttttcgagatgtttatcttcttttggaattcggagagtggacagccacttggttgatgcgatgatcaccaatgcactaacttttcttcccctgaaaatggccgatttcctgcaatttccgtttggcctttgctcttcattcacctgaacacgtagtttgagaaattttggggtggggtcgatagtccgtgtatttgcacgtgcttgtttgtgtggggtctggtcacactggtccgtccttacagataagagtgggaataaaaggttctgaaatgcggtctggtgtggccgttttggaacaagtctccctgacttttgcaacccagctgcaattgctcgcggatatgaaaaacagaaaaaatagctttgctacatttctattgaaagctttacaacaccatgaccaaatgtgtatatacatgagcaggaaagcaagaacccaaaacaaaatgattccacgccgatgcctgaaatggcacctgtcgttggttaaatcccaggacgtgcaagccgcaattgcccagcgaaaaccccctctttctgagtgcccagaactggcagctttcacgtccactagaaagcaaaagagacttttctgcgaacctctttatttgttgcatcccatcgccttttgtctcttcaacaacacctgactgatgtttactacagcactctcttcattcttgtacaattatttccgaactgttaatcaaattctgtttgacacggctctgtttctgcttgtgccggttgggtcgatcatctcaggaggctgtagagtgggagcacaagagcaagaaccc

SEQ ID NO: 14062 - DNA, 929 bp, Brachypodium distachyon
  Intron number 1 from transcript Bradi1g29550.3 (locus Brad i1g29550) derived from phytozome v7.0 (chr-ID Bd1; pos 251 17326 to 25118254)
gagacgagccaggtggtgggagagtgaagatattggtaaggaatccgaacccttgtcgcttgcttcgatttccagtcttctgatcttctctttgctgatcacccccgatatatactctctcttcaaccacgccggatctcatctcctttgattttgttctctcaccctccacggcggcgagcgggacgaaccgacgaggtaacaacccttcccctgcccacttcgtttcctctggtccaatcacccgattcgtcgtcgaaatttgaaaacctaggtcgtggtatggagggggatttagtatcgtaggaggattgaggggatcatcgtagagggagagattaactaactgttcgccgaggtgattgaccggagttccggtcgaataatccaggccaaatctgcacatagccgtgctcttgtgcgccagtcatggggataaacctgcggtccagctgctcagtttcagagttttaagcctctcaagacatgacctgaatcttatgtctgaacagtttcaaagcttcaagcttttcgaacacagcctaacatctcgcgtcattttggttatatggcttgcttaaacttgttgtcctacgttcccacaaagagagagtggatgtctctttgtctgaggttggtttcgtgatatatctgttaaatggaatgccagcatttcatctgcttgagagttgagatctgtgtaactgttaagctatgagagtataactgaatatgtctaactctcagttatttcatctgcttgggagtataactgaatatgtcttccttatttcagtgctatgagattaagtgcataatttgtatatatttgaaaatttgtggttatgttaaatgaatgagcagccttagcttactcctgttaacaacctttttatcttcttttcatgtcaagcagccctgaagctacc

SEQ ID NO: 14063 - DNA, 623 bp, Brachypodium distachyon
  Intron number 4 from transcript Bradi1g29830.1 (locus Brad i1g29830) derived from phytozome v7.0 (chr-ID Bd1; pos 253 34894 to 25335516)
gcaacacaacctgcaagtgccccaccggtaatactcatgaaagcgattaaattttaaaatcgtactagctgttttgatactgtcttcactatgcattgctgtacttatctctgtaccttccaattatatatgttccagtatgtagcagaaattccataaatgccagttcaattttctgataataatgtgctgttggtgctctctgtaaattcagtgtagtttgaattagtacacctgatatcttcagatttgcacatacaatcttcaggatttggggatgatcaaatattgataaaatatatgcaatgtatcttcttattgaattgagtgcccttatatggtatattattagtgtaggctcaatggaatagctgtagattattcttcaaagatattagctgtagaatttattttgactgtgcaatgaattgtctccttttccatcttttgcaccagcatctgtgtttccttacttctgtgcactctgattttggttagtttacagctgcatattatatacttttcactatatttggactaaattacattagtaaaccgtcaactcaaggatctgaaattatttggcaggcacccgttggcagtgacaggcagaaaagaaacgc

SEQ ID NO: 14064 - DNA, 664 bp, Brachypodium distachyon
  Intron number 1 from transcript Bradi1g05810.1 (locus Brad i1g05810) derived from phytozome v7.0 (chr-ID Bd1; pos 393 5764 to 3936427)
ctatcgtcaccaccgctttctcgtcgtccaaacgagtacggcactgccccttctccctctctcgctcctgtttcacctgtaaattttaaatctttttgatgatgtactcatactgacgtccaatagttaccatataacacatccctggaagcaatttcgttctctgtatgagttacccttcagatttcgtcgagcaattgaacttttttttggaaaggcagaaattaaactggtagccacgaaaatttccccatcttatattttctaagaaaaaaatgcccattattggatcaatccatgttttttcggaatcatactgctgctgtagatggtgacagtgcaatttaagataattattttgctgcattttttgggttaattgatgtacttgttgtcaaaattgctcaattaggacacctcttatccatcttttggtgcacgctagagtaactgcgtaactatatgtctcttgatcttaaattgtttcgttgtttatgcaattatttagtttttcctgcaaaaggtgactttatttggtttgtctaggcctcagttattagatatcttgatagtaattacctttaagataagccacttatctgtctaagctgtttggaattcactcacaatacttccatattcttcctcatttgatccaaaccag

SEQ ID NO: 14065 - DNA, 472 bp, Brachypodium distachyon
  Intron number 3 from transcript Bradi1g19140.1 (locus Brad i1g19140) derived from phytozome v7.0 (chr-ID Bd1; pos 153 35941 to 15336412 reverse strand)
gcagaccgtttgttatccgtagcagtgaccgtgaggtaagcaaacttgtgtgctcttcctcttgtttgtgctgtattatgttttgggagtctggacttgcctcttttgactgggtactatggtgtgtggatttcgtggtcattcaatggtcacttggtcactattagtgtggtttagtcaaaactaaggtccattttagatatcaaagaaacaaaggagagctagcaaagatagtaagaacaataatggaggatagaagagtaggcttcgagctctgaaccagtgcagttttctatgtgctttactttttagtcattgtctactcttttgctctctgtgtatgacttgactattacttgtgccgtaattcgtctctctatatgtatactgtatatacctatagcaatcacctcttataagtctacactgcacaatcttttgctgcactaatctcagtggatatgtaggtaaa

SEQ ID NO: 14066 - DNA, 373 bp, Brachypodium distachyon
  Intron number 1 from transcript Bradi1g06920.1 (locus Brad i1g06920) derived from phytozome v7.0 (chr-ID Bd1; pos 485 8118 to 4858490 reverse strand)
gctgacgaactccaccctgtccagctcaaggttctgtttctttgtttcatgtatatctcactgattttactgcgaggaaattggcatgataactgtgatctttaactaccagaactttttatagctgatatggaagaatttcgattggcctaataagtgttttatcatcatgatcatttcacacttccatgtaacaatggtgtccgcaaaagataaactgacaaacccttttgataattgataccggatagttttacttgtgtgcttattgcactgctaaatgatattataatggcgcaattgtggcttcatgtatttttcagtgccttatatagccaatatgtttcttcttatttgtttgacagtgaaccac

SEQ ID NO: 14067 - DNA, 924 bp, Brachypodium distachyon
  Intron number 2 from transcript Bradi1g19750.1 (locus Brad i1g19750) derived from phytozome v7.0 (chr-ID Bd1; pos 158 12671 to 15813594)
cagctccaaatacagaagcagttaccttgcgaaaggtagaaggaggcgttgctgccgtgaaaaaattcaggaaggagctctacttgggttttaatcctgtaccgggcctccacgagaaaagtttttttttctttcggccggttgcgaacttgcgatagcagtggcccgtgggctatctgtgtgatgcgaccatcttgacctggatttctccaaaacaaaaataatcgactgagttgagctagatcaaacaactcattcctctcaaaaaaaaagttgagctagatcaaacaactcatcttcatgaaattgtctctcaaaaaaaaaactcatcttcataaaattgtcttttgccgcaaaaagcgagattaaaacataaaggatgctttctcaacaaaaaaacaaacataaacgaggctcacagatttaggtagggtttctccatcgccttcgtttggccgggcactacatgtttactgtgtttggccgatcgaaccaccgggaggctaacaattaaagcgacaagttttgtctgaaaaaaagtaatgctacaaacttctagaagacggatcgatttggttgagcggtcacccttttctttggcgagtcattaaaatggtgctattgacctttcaaaaaaaaaatggtgctattgatagccagcggcccatcttgatctgatctgcctcgatcccaaacctctttaaaaagtatcccgaattactgtaatttattatttatttcaatctttccgtgcaagtgtgcagcctgctcctgtcatacccatgctgtgtgctgctatattatacgaagtacgtactaatcttgaacaagaaatccttgaccaatcgccatagcctgctaaagtaaaccttttgctcctgccatataggagtatcactcggcagggcaggacgaactcagagt

SEQ ID NO: 14068 - DNA, 403 bp, Brachypodium distachyon
  Intron number 1 from transcript Bradi1g02160.1 (locus Brad i1g02160) derived from phytozome v7.0 (chr-ID Bd1; pos 146 7093 to 1467495)
aaaaggtaggttttggtttctgctcttgtttgattggcttgtggctgagttaattgtattgtttgcataagtaaaatgaaatagtaatcaccatctttaatatactacatattacaagccatctttttccttcctctctgtctcttcttgaaagttttgtttaccatctgtattttgtagtaatgaatcattgcattgttgcaagcataagtatgtgattgctctatcgcaaatctgtggtgtgttttacatcctgcaaatgcatggttttatgctattgcttctatatgttatggttcatgtatattcacaccaagcctagggggaaattgtcaaccaaagtttgcagcttgttttactagatgaagagattcaattcttcattcgcaggacattgagccag

SEQ ID NO: 14069 - DNA, 640 bp, Brachypodium distachyon
  Intron number 1 from transcript Bradi1g32550.1 (locus Brad i1g32550) derived from phytozome v7.0 (chr-ID Bd1; pos 279 38311 to 27938950)
cgtcctctcgggtcaggcggcagcgtcgccggaaggtactctattttttcttcttctgatacgcccggagttcgctgtcatagtcctccgtggcttgctcattaatgccctcgcggttcatttatttacagcgcgatttgaagtttataggactagtatttggttgacgtttgttcgtatggcttttttcaaagctctctacggatcatagtcgtatgatcaggccactgtccaatgctgcaaatatgggcctggtctaatatttggatttgtttggggatgttgcagtctacatcaaaatgattgttctgtgtatatgtgttttgggggtgattatatccccacgaaatttcagctccgtatcttttttcaaagggaattttcagttctgtaatctcgcccacttcccatccatttcttgctctatgcgttcattcgttggaatcgtcttttcctgaaaaaagcggatttgtgtttttcatctgaataatagcctactttccaggagggcgaaaaatgatagtcgtatcttaggccactaggaagtccatttcgttatagttcatgctccctagagctatcactgccaaccaaaatcaacactgataagtcttctgctcaaatacttttgccattgcag

SEQ ID NO: 14070 - DNA, 462 bp, Brachypodium distachyon
  Intron number 1 from transcript Bradi1g42270.1 (locus Brad i1g42270) derived from phytozome v7.0 (chr-ID Bd1; pos 392 64470 to 39264931)
tcgaccgggcgcttgttggatccagggccgcgcacgtatgccatcctctccttacttgcttttgcttccctttccttttccttcgttgttgttattcgtgtttgtttcgctcggtttgcttcggttgctgctgtggatttctgctctgctcttcgtatttggtgtttatttgactgaaaacgggataaggcattgttctctatttatcttctattttgcgtgtgatggggaataatttgcagcagactgggggtttatgcggatttcatatgtttccgtaaataactactccgtattttttttcctttgaattatgatgaataatcggatccgaatttcggattttgctacaaaattcgcttttctcaagtaatactgttggttgatataactctgaagaatgccgggttttgatttatttttgtagacatctgcgggcagcaagaagattgtgggcgtgtt

SEQ ID NO: 14071 - DNA, 853 bp, Brachypodium distachyon
  Intron number 1 from transcript Bradi1g32380.1 (locus Brad i1g32380) derived from phytozome v7.0 (chr-ID Bd1; pos 277 04393 to 27705245)
ggtaactgtccatctatgctttggttccttgggattaattaatttcttggctgtttaattcctctcagagttcttgtggtgcattttccatgtcttggaggaaaggagttggctttggtagttaggtgttggttttgcaatgtaattaaccccggattatttgtccggagtatagctagctgctgctttgtttttgtttttttttcctttgagtctaagggggtcagtgctgagttttcttgagtcttcaaagtatattactaattctgtagtccttgtagacttttcgtgtgcttggtcggtccaaattcttggcaaaggggcaagcttagaggcttaggtaatttgctgcatatttgcatggctccttaatttcgcacttgtggaatttatatggtgctactactgaattcagggatgaaaattaatggtgccatggatatgtaaatcgctttcttcttgcccggctttgagaggtcaaacctgtttatgttggcagccggtccaagtccatttcttggaagcacacgatggcttgcaacaaccatatataggtttctctgtcagatcagatcatcagaccgatcacctttgacggtcaaaatggacatattttgttttgtgctagacttaagtactagccccgactttcctgcctggcttgaagctagctatatgatcctacatagtatccatctaaatcaaagcttatctttctaaatacgaccttttgccctcaatggttttaatccagtaaataatatatcggtccagctagctgtaattaataaatatctggagtggctcatttcgtgtcgactactaaaattgaattaaattgtactgtgcaggg

SEQ ID NO: 14072 - DNA, 1030 bp, Brachypodium distachyon
  Intron number 1 from transcript Bradi1g16190.1 (locus Brad i1g16190) derived from phytozome v7.0 (chr-ID Bd1; pos 131 12331 to 13113360 reverse strand)
ccgtcaggtgcaacgccagctcccgggacgggagggtaaggaaggactcgtgtttcctcatcttctgttttcgcttttcccactccactttacttgcgatgtgaatttcgtcagatttggcacgcgcacgattcagtttggtgcaactgactcatggcgtgtcaccaattttgtctgatccgcgtttttcggatttacatctattactaacctctcacgaacaagtggtctccacgtcatgttaccagtgtttttcagtgtattgcctcgtattcatcatttggggcagtcagtatgttctttgtatatgaaattatatgatcttagttagctgcacattgtattgggtttgctatgctgttatcatcaaaagtttttttagacatcatcaaaagtgtggctctctttgaatcgctttgtcggctctgatctatcattaatgatacatttattatttaaactgaaaccttgtagtttcttaaattgataacgcatatatgatcactctgatgataagctcacattttggaaatgtaactatagactctaatttgaaatatgcaaagaaaattattttcatgttagctactgttgctagatttcattacaaaaatacaactcatagtcttttttatctaaaatcctaaaaatttccttcacctaacctgtaggaaactcattggttgggctggactagacacattgccttatcttattaacttttgcttgtgccacctcactctgatttattaccgcagtttcagctgggctaccactgcaattagctggtcatacagtttttagcctccatttgcaacacttgccgtatatgtacaacagtgctcaatagcctatgtttacacgggaaacatcatttttatgttataaactgctcacgaactcgattttctttgtcatattcttcatatggaatgcatatttctgatattccgttaatgtaagatgtagaaaagtcatgtggttattattatttctttggcttcagatcacacaacaagaatttactgag

SEQ ID NO: 14073 - DNA, 751 bp, Brachypodium distachyon
  Intron number 2 from transcript Bradi1g32430.1 (locus Brad i1g32430) derived from phytozome v7.0 (chr-ID Bd1; pos 277 42422 to 27743172 reverse strand)
ttccgcacgctgaagctctctacacccacctgtaagtgctaaatcttctccaagtttattttctgtccttttagcatgtattagtgcttagtaattgatgttttagtggactcttgtccttgttgacaacttgatgctttatttagacatgcttaattgtcacatgttccttctttcataatgctgtgcattagatggtatggtctaattggtgttgcattattataatttttgctcatgtttgatgctgtatgcgctgttggtattagctgtaggtccaatgagtatataattgattgtgatattcagttccatgtgttgtagttctccggattagtgtgagaggacttgacttttgagtggagtaacacgtttgccggcatatttgtgtaccttttgatgtgacaatgtacacagctgctgtaattctttcagtacacatgcttaagcctctagttatctgcatccaaacactgagttgtttacattgtattttctggcatatggagtgctactggtccttcactagaatcagtatttggttacactatatttttactctgtttgctgttacagtcatgcggtggactgaaaagatatctttgttgatatctgcactagcataagtgttgctgctctgtttaatctgttaacctgctcttacccctttttttcagttggtgatctcaaccccaccttatctctgcaaccatgagtggggttacctgctgtcttcgcttccctggtcagc

SEQ ID NO: 14074 - DNA, 767 bp, Brachypodium distachyon
  Intron number 2 from transcript Bradi1g04380.1 (locus Brad i1g04380) derived from phytozome v7.0 (chr-ID Bd1; pos 296 7794 to 2968560)
gctgttcgtgaaattaattgggatcaggtttccagtatgccctttaaattgattttgtttgtgcaatgaagatatgcaacggctcgatcaggtttaatttccatgtttggctgattgaaaatgcttccattggtattgcttcgtccaaatagaaattctttgctttggccctgtttgtttgggattaaaactgatttctgacttttgacttataagccacaaaagcaccaaattaggtgctttcggctttggcttttgacatttgacttgatattgttagatgatggtataagcaaaaagccaaagtcaaaaacaactatttaggtatttttgtgacttataagccaaaagtcaaaaagcaattttaagcccaaccacacagggcctttgtctagagaactactgatttatggtactgcataaaaggcactataattgttgcgaccttttctggattcctcgtctgctggaaaaaggcatcgaagttcagtcatcatcacaaattcatgcaaaataatataattcatggagaggtttcatatggcatgacttcattctacttattctcaggggttgcatctttttgacaatatagttttttcttcaaaaaatttacagtatagcagaaaaaccatcagtgtttatgtgttttatggctacaatagcaattttttttgtcttttgttctttctgttagtatgatatatatgttacaattgtcgaactctgcaggtgtctggaaagcccctcaagtttgtcggacgagg

SEQ ID NO: 14075 - DNA, 811 bp, Brachypodium distachyon
  Intron number 2 from transcript Bradi1g44670.1 (locus Brad i1g44670) derived from phytozome v7.0 (chr-ID Bd1; pos 428 14987 to 42815797)
tcgccgtaagacaagttcatcgtccatctgctctgtcttgttcttgtctgtgcttttccagtctgtttctgaacttgttttgttttccatagcccggaatctcaacgaataataaataatcaccatttcaattttctttccttgtagttgtcgtcaggagatttggttgctctatacataattaagagggttgtggcattagtatatcttactactagaataaggacatgttaggacaagatggaggaggtggcaccaatgtgggaaacactgattaatttacccttggttattttcagcaaaccaaaaattgcagtgggtttgtgacggatagagcacttcgaacaacatagtctatcaagtaaaaatattattttgcacttataatattcctgaattttctaaaaacaatgccacctgtcgtaatctttggattagcatccatccaaccatgttcatactctactaacttcctacataaaccctgcagactaaagtatgcactatatcaatactgcagttttagcctaaatgtgtaaaggaagctgcttagtactagtaccaatcaaagaaaagaattagcagaactactaattgggcctacatatgacaataggactctttctagtttttctttttaaacgatcctgcaatcggattccactattaccgataacggactacacagagttcaaaagtatccacagagttctaaacgcaccaagactcttcctagttgtaaaggaagctgcttagtactccacttttcactaacactgtttaattggcaggggctgataggactaacctc

SEQ ID NO: 14076 - DNA, 815 bp, Brachypodium distachyon
  Intron number 3 from transcript Bradi1g24540.1 (locus Brad i1g24540) derived from phytozome v7.0 (chr-ID Bd1; pos 197 90198 to 19791012)
taaaaaataattgcaggattaaaattgtaattcatgtacgttaccagcaattattattattttccgaaatggaatgttacgaagatatataacattggtagtaaacgaagctttggtatcaagatagtttcctacctggcatgtcagtttcattcatagagtctgctctaaagaagccactttcagtggatcacagacttgtcaaatatgctaaacaaagaagcatcattttgtcatttaaactgactctgcttgatgctcgccagttgtaacgagaaatacataaacaaaatagtagtgtaaaaatacatctcaagcatagaattgctcttgaagatttatgcagacactcatagcatagattaaatctggtgactatcgaagtgacaaagctcaaaaggcacatttcaattaagtattgcaatttcacttaaactgcagctggcaagaagtgtcacttgaggccgacgaggcgctggctcagacattcatgaagccagcaataaacgaggcaagtaaactaatatatagctcttaactgatactcccgcgttcctaaaagtaatatgttctatttttgtcataattcaaatttgaccaagtttatagaaaaatctatcaacccttcatcttcaaaatagttttactaaatccgttagatatatatcttcacagtacacttatttgatattgcaaataccagtatatttttctatagatttggtcaagcttgacgaattttgtcttagatacaaagggggtagtataattttttgatcccgatggaatttgtggcatttgatacgtacaggttg

SEQ ID NO: 14077 - DNA, 1053 bp, Brachypodium distachyon
  Intron number 1 from transcript Bradi1g35240.1 (locus Brad i1g35240) derived from phytozome v7.0 (chr-ID Bd1; pos 307 28405 to 30729457)
cgccttcctcctcgccgcttcccctttcgcacaaggtaacgacgccacatcccccatccctgcccccgcccctctcgatctccgccagttagatccgctcttccctctcgcgctcccgataattctgcggcggtgcagcggtagatctgtcggtctcgagcctccgcggtgcggggatggtaccgatcgggctctccaggggacgttgttgcgccggagctggctggatttagagcgagcgggattagatcggtgcgctcgtcggggtttagcggcgttggtgggatgcggcggttgtgcggtcttgggtgcgtcgggccgaggcttgagactagttggttggcaggggtcttgggcgaaatttacaggaggacactattttgagtgcctgttttttctgtgtttgcatgctgggaaattagcagcttctgaaatgctccgagttctcattattttgtggccagcatcggtagattggtgtaatagactttttttaaccacgctaaaatggtgtaactatactgttgactgttgaaggatagattaattgatcggtgttatttttttaccgtggtaaaatgttgtaactatgctgttggctgttgaaggatagattaattggctaaaatcactgtcccagcgagcagtttaagaattgggatatattagtttgattgtgtttgtaaaaggaaattgaagtcaaaagcatgacttataaaaagttcctattcttaagccctctcattttttgcacactatcctgtttttagtgaaatgccttacagtagatgcttcaagtagtttttgacattttgttgctcaccttattggataatttctattggtgaagaatctgatatcttgttatctgccctaatattgctagctttgctgcatgcataaatttctgcaatcacctagcatacaaatatacagttgatttttctttatggatatgtacaagtgataatttcattctttcctgccacatttcatcttgactgatttatattacttctgttcctgcagtcgggagagcccagtcggaggaag

SEQ ID NO: 14078 - DNA, 912 bp, Brachypodium distachyon
  Intron number 2 from transcript Bradi1g09870.1 (locus Brad i1g09870) derived from phytozome v7.0 (chr-ID Bd1; pos 710 8901 to 7109812 reverse strand)
acaggtctcgcaattttgattctttccttggtgcgaattctaggcaagaccagataatgaaaattaatttcttctaccaactgaaacaaatattcgcaccactaaattgcagcttcaatttactgacggtagattttatagatatttacttcttgatttgtaatggaagttatgtaacctgaaaagtacaacgactagggagttagtttctggtattaacagaagcttcctcctgacaattaagtgattttctccaacttattaggcacaagacattcacgaaatcacgactgagtttaggacattccaagaaatgctttaactagtaaccccatgcacgtagtatattgcctttacagtgaaatatcattttctgtcagaccaccagccctattgcctacatcgtagacttgtcctgtgcaaatcagcactttgtgcacattccatcagaatgaagtgtacaggtttcgaacaattttcaaaaaatctgtgtactagtacattcgtgccaaatttcaatacaaattcaagtacattgcgagaaacacaaatgcttagtgaacactgaacggtattgaaacatgactgtttgtcttttttgtacctcacaaagtacattgaattcagtgtaagagaccttaacggcttaacccagcactagcaatttgtttatatgtatttttgggaattttatctttcacactaaatgttcaaatgcacaatcgggtgtgaattttaacttccacactaaatgttcagatgccttgcgggtgtgaatgtcagaatctacttttatctatgataaatccagtgaactttcactctcatattcaattttattacatttacttatattatcctaaggatgatcttgaaacttcttgcctaacatttgaagggttgaactatttg

SEQ ID NO: 14079 - DNA, 407 bp, Brachypodium distachyon
  Intron number 1 from transcript Bradi1g25880.1 (locus Brad i1g25880) derived from phytozome v7.0 (chr-ID Bd1; pos 209 82068 to 20982474 reverse strand)
aacaatcttctgacggtacgttgttctttacagtccacaggattatttctgtccatattgtgcagttcctttctttttcttccttgttcttcaattttgtgtgcgagcggccaacaaacagagacagttcgcgcaaccaactgctttacagttccttttattcctttagtttcatcataggtcagtaattagacgacgacgggctgcgaaagccctgattaattcctgatatctcaagcatgagtgtgtgacgaactcagaatatcttaaaaaacttcttgaaacttgtagcaaacgactcaaacctgcaattatgccacagtagatgacttcacagcatatgattgttgataactagatagttcttgctgctgatgctttatatcgaattgtaggattcttttgaa

SEQ ID NO: 14080 - DNA, 700 bp, Brachypodium distachyon
  Intron number 1 from transcript Bradi1g02970.1 (locus Brad i1g02970) derived from phytozome v7.0 (chr-ID Bd1; pos 199 3438 to 1994137 reverse strand)
tgtgcattatttctgggtccagtagcgataattttgtaccctcccttttctttgccaggggagaagttatcctatgctatatgattaggttgccctgctgtttgggacttcgctccagcatttgccgtgcttgccaaatttcataaagatgtatacggacactcaactgatgtgaactattctaagtttctaacaccctttctggatctgactttttcccaggctgcattgaaaggtggtttcgggtgaggatctttctgctctaaactcttcagaatcgcggggtatgggggtgctcagaatgggaactcactgtttaatgcatattcaaaagggtatatgcctgtgtgctcatttggggattttcaatttgtggtaatatttgttttttacatttacctctatgtaattaattcttgctatcttcatgttggtaccgtgcctatgcagttgggaaaactgagtagagaatatattgagaaggaattaattacgactggactgtcgtctgaagctgtacatggtatcattgaagtgctttctcccaagtcactatccaaacttgcatatgttttgagaaaagaaagggaagtccatcgtggaatcctctgagagaagaaaggggggctactgttcatgcctcatatgttgatattcccatgcagaggtgccgggcctgccggcctggtgttgaaaccgt

SEQ ID NO: 14081 - DNA, 1023 bp, Brachypodium distachyon
  Intron number 2 from transcript Bradi1g27690.1 (locus Brad i1g27690) derived from phytozome v7.0 (chr-ID Bd1; pos 228 08067 to 22809089 reverse strand)
tgcaggaggagctcgacgccatccccaaggccaaggtatcatcctctgctcaaccccctggccccagattgctttatcccgtgctctgatgggttctggtctgtctgtggatgctaatttctctatttcctgagaagctagaactggcggggtagataagaagcaaggaaagggaaccattaaaaatatctggagagactaatctagtgatctagatggtggaacatttcaggttacagtgaacttgaggaggacttattaaaatattgaagtgattttgtacctatctcttgttactactctgattgtgggggaccagaggtgcaaattgtggaggcatggtggtgtttgtttactgaaacgggctacatcaaagatataggaagaagaacatacacaggaaattcatctcatttcatcccctgttcctctagcactaccttgtagctccaactcatatgtactccctcctatcctaaattcttgtcgtggttttagttcaaaataggatcggagggagtagaaaacttctcaaccttgaaactctgccactagtttcacttgatctatctgcagtaagcattatcactccttcagaaacaatcgactgggaaccaggatcccacggctgttactaaaattcgtttccaatggatcaacaggcagacatccttgcattgataatcaatctctttagcacatgaaactcagtcacttgatagctttgtaccatctgcatataagcctttgattcccactctaaggtcatgccaatttcatggacattctgatattgccaattgacgtgcacatagacatggtctaattcactaggatcagtggctgaagtgaaccatatactggttggtgtgctgcaataaaatacaaaccgagaatgggcatccaagcatcatagcaatgaagctgaagtgtgtacattggtaatccataacaaaaatgtgttggttgtccattctggactcaacagctaccatcgctttcttcaaagatttgcaaattgct

SEQ ID NO: 14082 - DNA, 583 bp, Brachypodium distachyon
  Intron number 1 from transcript Bradi1g17880.1 (locus Brad i1g17880) derived from phytozome v7.0 (chr-ID Bd1; pos 144 77247 to 14477829 reverse strand)
ctctggacaccatcaggatcgccgtggaggaggccgtgaggaacgagccccgcatgggggcctctctgctccggctgcacttccacgactgcttcgtccaagcaagtccctgtccatcattatttgccatgcttagttacttttctagtactaatactcttttctactgcagttactacttgtttactcaatttcgttatcatttttcgaccaatttaatcaagctgtggttaaattttaaagtcactatctaaagttgttggaattgacactacaagtgtattgtgtttgtgtacctaacctaactactcaaaagttgacacccggagactcaagtccaaggccttctaatttgactctttaaagtcttcttggcgccaattgcaaccaaccaaatctgttactagtatcacagaaaaattattactgctctctgcatctcttgtgaaaaaaatattactcctactactgtttacatattttgtttaactacccagtagtagcggttaataattgtgtgctaattaagtgtggaactggaaatgcatatcaaatcagggctgcgacgcatcggtgctgctga

SEQ ID NO: 14083 - DNA, 672 bp, Brachypodium distachyon
  Intron number 1 from transcript Bradi1g39300.1 (locus Brad i1g39300) derived from phytozome v7.0 (chr-ID Bd1; pos 359 48981 to 35949652 reverse strand)
agaatgtaagtgttcggatttgaatcagtgtatgtgagcaaaagaatgtttaaatttacttatgtgaaactaaaccaaacatcgcatctggatgagtgatgctgccaccataggaataaatcaatctttatcaataaataaatttggagccatgcatacactgatgtgcatcaaaatatgaacaattcccaggaaaataaaataaatggtcagtacaaattcagagttcaggcacgtttaatcagtaatatagtcctacctccccttttttatgcatcagagggttttgtcaaagcaaaagggaagtggtaggccttaattgtattgcttggaagaaaaagatgacgctcaaaggggtaggaataaatgtttacattccaaaatgtaggtctaactgtagatggattagttcatacaaaatgatgccaatgaaaaaagttctttcgaatataatgcaacatatcaattttgtatcaaagaatgcacatgtaggtgaacttatagttggtcaaagttacattttggaaaacctgcacgccctatattttggaatggagggattagttaatatgaggatatgttatgtactagtattaatataggtacttccatgtttctttaatctggatgcatttaggtttgggtctgacttcagttcattaggctcaaacc

SEQ ID NO: 14084 - DNA, 677 bp, Brachypodium distachyon
  Intron number 2 from transcript Bradi1g12280.1 (locus Brad i1g12280) derived from phytozome v7.0 (chr-ID Bd1; pos 919 7953 to 9198629)
tgcttttcaccgctccagactcaccagctgccaaggttcgtagtcaacaacaaaaaattagtcaggccaattttatatttgcaacacagctaggagcctagctgcgtagggcagatttagaatgacccatttcattatttagctttaaataaatcatatatgtgcataatggatctaaccctctgaatttcgcaaaataatactcctgagacactgcatccataagcagttgccagttggcatcaagtatatataacagtttgaatttcatgaagattctaatcatgtaataatgttgtagaactcagttaaagtcaaccgttgtgcttgctttcctaagtcatcaacaaacccttatttaatgtttcttggtactatcagtgtgtaaaatcccatgttgtagtttttctttttctcaaacacgcattttgatgtgtgtaattttgtattaggagtaccaaagaaagcaaaaccaaactctgagctaacagagcaaacagaaaagaacaaagcaaagctcaactatgctaagctagaatcagaacaacaaaagcaaacagaaaaaagcaagcaaacttaaacccatgttatagcttttcatgtgccttaaagagaatcaagagatttggataaccaatactaacactctcaggtggaaaaacttgcagaaatataac

SEQ ID NO: 14085 - DNA, 853 bp, Brachypodium distachyon
  Intron number 1 from transcript Bradi1g00990.1 (locus Brad i1g00990) derived from phytozome v7.0 (chr-ID Bd1; pos 690 420 to 691272 reverse strand)
ggcaagagggtcttcctcactggctccttcaccaggtttctttttttgcctaatcatcctctgcgctatacctatgtgtatctatgcatcccctgcgagtgattattctcgttgacctccagtatttattctgcagttattatgcgttgctctcactgtgctagggattgattcttcactgtccacaacagttttttttctttttgttcagctgttgttagctctagctagtgcgtgccgcctgtcgtaggaacgatgtagttttcggttcctttgaaaggcaacaggcccgtgtttacatgttgctcgcttcacgtgttatacatgcgtgccctgtttaatgcaaatttgattcattgaagtctaatgtttagtttttaattcacaaggattgaaggagaggatagtttatctccatgctatgtttgctgggggtctgtagggcgtatattgtggttaagacacgtgctatgatttatcttggttccatgcagttgcacaatagggtttgctatgatttatcttggttccatgcagttgcacaatagggcttactctagcactcagttactagttcacgcacgtgtaaatatggagggacacgttccctccccagtggttgcgcgtggcaggtagcgcccagccaaccgaggttcgagtcctgtactgtcgtgctggcacgtggagacaggaagcttctgaatggagataaatttggatatgtgccctgcttgggaaaaagcaagaaacagaatttgctcttctgttttcttccctcgataaatgacacccatgatatttaattttgcgtctcatggcacaattttgtcctaggtggtcagagcatttgccg

SEQ ID NO: 14086 - DNA, 706 bp, Brachypodium distachyon
  Intron number 2 from transcript Bradi1g28370.1 (locus Brad i1g28370) derived from phytozome v7.0 (chr-ID Bd1; pos 235 93269 to 23593974 reverse strand)
gtggcccgacagaggtatatatgtatatatgatattatgatgtgagcacgccatggtgttcagttttgcatatcagagcatgctatttgatcattgtatacagcaagggagctttctttgaccacttcccatcgttgagtagtgtttcaagttatcaaatgatgtgtatcttgctgcacaaagtagttgtctttgagttagtttatcctgtaatttcaaattccattggttccacactcgaatgcagagcaacatgatagatcatttagttgacgacatatgcgtttttgtagcctttattgaaccagggcttaaacgaatggtccgtcctattttgttttttccgaagagatcgctttttttttacttgccaaaaaattcaactcttaaggtgaaagcttctttcttgattaacctattctgtacttgaacagtagcatgcttatttctaagaatatcatatcatagctgaagaaattgaaccagaattattactttcttcctcgcaaaaaaagaattattactaatttcaagttgaagattattatggtatacaatagggttaatgtgtcccagcaacgtacaatgatggcatgagtcattgtaagctgctgcatcacacaattgcaacagaagttcaaaaaatgagaaggaaaatgatataatttttttgttcctgctatgaaggtctaccaacctctcggag

SEQ ID NO: 14087 - DNA, 705 bp, Brachypodium distachyon
  Intron number 1 from transcript Bradi1g43470.1 (locus Brad i1g43470) derived from phytozome v7.0 (chr-ID Bd1; pos 412 68379 to 41269083)
gccctggcaacaacgcaagagaaggtaaaactaatatcaaggggattctgtaacaaaagctacctcttttaaggttttttatttctgttattacattttcgtatttatatatttcatatattatgaatttgtggactgccacgaaaacattagtttcaaggattacctccgcagttgttcggttcccgtgcaatatgagagtgttcttgattcaaaataattcgaaatgtttttttttctctttagcggttgtttgattataggattgcaaactttatattattatttttacataaggttacttgcacttgatgtcttgattccgagttactgaaaatgttccatgtaatcaaattcatatggcccatgaattactatgttggtctcgtagtgcaaaaagaaaaacgcagtttgttgtagattctaggtagatgaaagccgtgaaatatctgggacagaacccagatattactcaagttattttctaaaccactcgatttccaatttctttcttaaaaatgcatgccaacatgataaggtttatctcagtgacaatgcggattgcaaatcatgagttattacagatattctttcctatttgttgcatctgactcctgctcgtcccggtaacattatgaaaagaaccaaattaatttcttgtgtggctcaggcaacagaaggacgaagttcccggctagctacctg

SEQ ID NO: 14088 - DNA, 863 bp, Brachypodium distachyon
  Intron number 1 from transcript Bradi1g34190.2 (locus Brad i1g34190) derived from phytozome v7.0 (chr-ID Bd1; pos 298 12101 to 29812963 reverse strand)
cagagattctcctccgaggactaacgcaaatcgaggtaatttagcctctctgtttttgactattttttcggggggtaattccggtcgttcttcgtcgttcccctgggttctgacactttgcgcgtattttgggcgatctattaaagtataaatttcggagcttgggggttaaattttgattatgtgctgaggttggggctgtggatacgtaggtacccgagggattcgttaggggagaattttacgcgcaattcgccgtcatcaggctataaatcgttggttctgctaagattgtatgatcaaataggattatctccgttctacagaaagagctgttcttgctgaaggaaattgcatttgtgcagtggaagctagtgcttcagtcttcacctttttcccctttatttttgcacacataatatttttcaccaaataggattttggtcgattcgttattggccgcagtggattctagtgtgggtacgaaccggttgtttgtcaatggggtaaaccggcgtgcatgcttaataaggcaaagcttattttccctaacgtgggaagctccgtagaaagggaggacacgatcagtcgcagtagcattaagctgtgcttgcagtacatatttctgcatttagtgtaagtggaaactacacctgattgtcatgtcaagtcaatgtttctgaataactgataactgtactgacaatgaagtattatgagaagtattcaatcctggacagttgaaccggtttgtgatccataaaaaaactgtgaaaggtgaaggccatgctgatttgcatctgctctcttggacttgtggcactgcaggagacccactggcttgctagcagcttagctttgcc

SEQ ID NO: 14089 - DNA, 701 bp, Brachypodium distachyon
  Intron number 1 from transcript Bradi1g06310.1 (locus Brad i1g06310) derived from phytozome v7.0 (chr-ID Bd1; pos 423 4784 to 4235484 reverse strand)
gggtggctgtagatcattctccgactgctgatgtaaggagttactttttgctcacgtaattttcttttgtgttagttctgagtccacgagcataggataacggataatttgttattgaggtgatttcagagatcatgcgggcattgctgacaaacaccatgaagttcacatagttagtctagattttttttgcagtttataaatgtgttgtctcagtgtgttctaaggtcaggttagccatggtttgcacacttcgactaaattatgtcaaaattgactatgtactttttgaagtgtgctagcaaaaaaattccatgtgaattgaggaactttggatcattaccttatttgaaatcagtcaggtggtttcaattgtttaattgagctaagtttctgtgtcatctttgattaccatgtcaggacctcttctgaatcacttatacaaggtgcaaatgtgcagttcccctgttcacgtatttgacctgcatttttaactgagcagtgtggattttaccttttagtttccttgctcagactgtcctctacaatacactttcattgctaagtatgttaggttaggaagaagcaatcaaatgcagctgtacttgtattaatcttgtttggatcttagatccctgtttgatttaattcatgtttaattttcaggttcctatcggtggtgttagttcccctgcagatct

SEQ ID NO: 14090 - DNA, 943 bp, Brachypodium distachyon
  Intron number 2 from transcript Bradi1g06500.1 (locus Brad i1g06500) derived from phytozome v7.0 (chr-ID Bd1; pos 437 9070 to 4380012 reverse strand)
tgatatttgatcctgtggtgtttccatctaaggtaagctacccacatccatattgtttcgattgtctgaatgtcgataacctggcaacttacatccaggcaagctaatcatggtagcgttattaaacaggaagaatgtgtatctcagtatgccctgatatctacttcactcaggtttccttctaacaagatgcattattgagctactatatttttcctcacgccagaagcatagatcctaaaactgacatggtaatttgccactgtttctttttgctaatatgggaaaaaataagtcactcagaagagcttaatgtagtatatgatcttcccatacatgttcttgttgaaacttactatatgatgtcttctaccacacaaaaagcatatttagcatattgaatattgattggcaagcgagttcacactatctgtatcctagcaaataattcttcagttgagaagcatattgtgtgccttactaccttaatgtcttctttgaattaagaaccagtttatgtacagatctttttcgttggttgctaaaccattctttgggaaaagttatcctagcgatatcttccctttgataattgctagtagcattgaaggaatttgctttcactgcttccctgcagttgctttttttgcatttatccctaacgagattgcatggatactagtattatcaatgttgtctattttgtccatcttttttatgtaaatgtatctccaagtattcactgcccaataacatctgaaccaacagccattccttagtttgtctggtctgttgttgttatcggcatatgtccgtgtctgtcatttgtttgtgctcaagttatcaacatttctggtttctgttgatttttccctctgatgtattacattgatacccaaatgtaatatctttttgttgatgattcagacagttgcaacatttt

SEQ ID NO: 14091 - DNA, 684 bp, Brachypodium distachyon
  Intron number 1 from transcript Bradi1g29030.1 (locus Brad i1g29030) derived from phytozome v7.0 (chr-ID Bd1; pos 245 31579 to 24532262 reverse strand)
caggtcagaagtgctattgtacctatgtttttatttgaaccatacactatgattgagtagttaacaatgtgattgagttctcaataggagtatctatttactttgtgaaatcatactgtgggtttgagtatttttatttttgattcggaacttaatattagtactgatgcctcactatttgatctagtcagtagctggggaatgtaataagtacattgtacttttatagacattctgtagcccagtatggagaacatgtacatgatgtaccaaatagaaatgtggacggcatgaatctccgaatattcagcacatgatttacttcacatttaatttggtacatattgtgttcgtagcactttaactgaatcaatactgccatgtaatgttctcagcaatttgtagagaaccaaatactatgaacatgtcaatattttgattgcgtacttaatattaggattgagtactcaatattaagattgagaactttaggttgtgatggagtacctatttagtttgtgaaagcatacagtcggatgtaccttgatttcagttaacacatttttacttgttaatttgctctgtttgtatttttctggtttacatctttcttctatattactgcaatactaattcaaaatttgatcaggtaccgtaggaaaaagtttgaaattggcccttcaa

SEQ ID NO: 14092 - DNA, 938 bp, Brachypodium distachyon
  Intron number 1 from transcript Bradi1g24850.2 (locus Brad i1g24850) derived from phytozome v7.0 (chr-ID Bd1; pos 201 03506 to 20104443 reverse strand)
gttgccatctgagtttcttgatcttgctgcaggaggtagaatatcttcgatctgggcgttggatctagaccgtaatggaattttcgtttgtagattttctgaaaggctgagatctcgagtagaagagcgacaattatggtagacaagttctaacatgattgttgccttaaatgcagtattgaggtgcatgcatcggtagaagtttgttacactgggagcttaggtgatagaactccttggcagactggaatcatgcaaataggacaaactttatgcatgagtttgatgtatgattaatttctagggaacagttgtctaaatttgccgtcgtgacacgcaggggggaaacattcttactgcatttggcacgagttcaatgctactttgtgataaccttacattaatctcaggatcttctaggcgtgcgcccctgggggatttctgtgggtgaaggaggcctccttccccaggttagggctgttatctaacttccgcatcttacaaaaaaaattggtctgcgtctaggaaagctgttaacaaattggcaagcaccccaagacgtttgtgaagccaagtcttatgggatgccctcccgtaatgtaataccaagtggattattttaattttgtgatgcatatgaaaagtatttggttactatattgatgttcaaatgctggcacgtgctagaaacttctacagaattacatagttattcaatggacatgcgaagtctgattgtttgaatctcttagatgtggagtttaatttatctctgtcttcatgagtgccgaatcactgtgtgtatgtgttagcatgtagcatggataaaaggaggcgaaataaggagatgaactccagttctgctccctgccttctaattgtttaatactttctcttctgtatagaaagctaataaacttctggcttgccttgtgtag

SEQ ID NO: 14093 - DNA, 934 bp, Brachypodium distachyon
  Intron number 2 from transcript Bradi1g31120.1 (locus Brad i1g31120) derived from phytozome v7.0 (chr-ID Bd1; pos 265 74320 to 26575253)
ccggtccaagtgttgcggcaaagggatctgcaccggtgagctccccaatccctcttcattcctgtcgtaatcttgctccaaattgtactgtaattctaggcatatggtgacctgagaactacagaatggcattgcattccatatggcttcagagttcggactccagagagcatttttcttttttctttttggcagaaaaatggcaagcgcctatagtgacccagttgggttttcgggttgggcacgccccacccaataatttttgaaatccttcttttatcaatagaaattatcaggaaaaaatagaactgttgtgtttttggcccactcaatattaaaaatgtagtgtttgctccaaccaatattcaaaatttgggtccgccatgctctatcgtgctttataggctaatattttagtaatccaatgaataaataaacacacggttacttattagaaattcccgacatgttaatctgaacgacgtaagtactgtgattctttggtccaatggaataagttcagcaaaacatttgcctgcaaagtttctgtatcttcagttttcttcttgcactaaaaagtggtactactacatctcggagatttttctcgtataatgaatctgacaagttttcgttcatcatgtcctgcagagtgcttcttgcagctgattccgtcgaccactactaaagctgttcagtatcctttttcgttacctagctagttaatgcgcaatgtgcatatacatctttactaaactcaacctcataatgcaatgcactgtgcttcatacttgcatttcacgctgaagagtaaggaatctttaccttgatattgtattgggcacaaaatagaactgtttgccagctgaattccttggggtccttaactagcaatgcagctgtcctttctgcaaaaccgcatcctacgctgttg

SEQ ID NO: 14094 - DNA, 573 bp, Brachypodium distachyon
  Intron number 2 from transcript Bradi1g13420.1 (locus Brad i1g13420) derived from phytozome v7.0 (chr-ID Bd1; pos 101 95883 to 10196455)
ttataatctgctcaagatcaggtttgaaagaactggttttaattgtttttttttagcatctccataataacaaggatatatttaagtatttaactgagaatatgatgcacgactaatttgtttactcggcatgtctcatttaccagttcctttgtttccaccgagggaactttggattaagaattggtggaataccagacaatctgaaactctcttaacttatattcaagagcttattttgatgtccggcatgtctcatttaccagttcctttgtttccaccgatggcttattttgatgtcctattgacttaccattaacttctgggtgatccgcctaatgtcgttgaacacttcctgcactattctaatttatcttaccgatctttcaaacaggtcttccatcaaaatggctaaaaggattaaatgttagaatgttatagagtcacttccaaaaaaataatgagatggaaaatatataagtaagttaaagctgatatgtgtttagtctttccttgacaagaaatctaccctctacagctgaaagggtagaatctgcaaccaacgacttgaaa

SEQ ID NO: 14095 - DNA, 760 bp, Brachypodium distachyon
  Intron number 2 from transcript Bradi1g44650.1 (locus Brad i1g44650) derived from phytozome v7.0 (chr-ID Bd1; pos 428 03967 to 42804726 reverse strand)
aagcaactggacgtctcagggggtatcttctgttatcaatctttctctctgttagcatcgtttccttagcaaacatgtattctgttcaataatctgttgaatgtagttgacattgctatctgagtatcttcttacctcatcaactgcattttggctgcactaccattcatccattatcaggataatctttgtctctttgctgctttgattttatattgacgcgcaaagcacatgccggttgctaggagatctatggttggtattttgatgtattttggtgcctttgtgaagtttgcagcttgccctatggactgcaatttcactattaggctcttgagatataaagttattgcagggagcatcacgatttcttcagttgtaatctatagtccttttttcttttttatattggtttggcatgttcattgggaaacaccgggtgttttctctaacagtgtgctagttgtggttttgctaattttggtcatgatgtttacaattagctgcatcggactttctgctatgtggagtcatatagatcttgacatcacgttagacgccttactgcttgtacattcagaatttgtttaggaggaaaccgaaacgagcgctcatttatggaagaaaatgattacaaattgtagcgctgctccagtttttccccataccaaaaataggttacaaaatcacggtattgtttcaattttattcttcattcatgccactttaagatgatggtgttttcatatttggcaggttc

SEQ ID NO: 14096 - DNA, 1054 bp, Brachypodium distachyon
  Intron number 1 from transcript Bradi1g27710.1 (locus Brad i1g27710) derived from phytozome v7.0 (chr-ID Bd1; pos 228 25884 to 22826937)
cgcacgtgttcctcgtcctcgccctcgcgctcaaggtgattggtcaatcgcctcttgtttatcattttcggctgatttttttccggctccaggcgaattgatgatgtcgtggcctcgaatgtgagggaattgggttttatagcagcccgcggcctatgcgaattgatcgagctcgtcgaggtggggttttgatggctaattgggttagctacctgtgtgacgttcgtgctcttgatgttagctgcatgttattttatttattttgtgtgaattttgtttagcaaacctttctcgtccacatttgattcacttaacccgtggatgctgattgttggagttgttcgtgctgttgttgcaataatctgaacatacactagtaaaagtagccgaggtctggacagacggttaacaagaggtcttttggttcacaaccatacgatcatcataacaaaacaaagcaagtgtagtatgtagatgatgaagtagctgagttaggctgtgtatttagagcaatgtgagtacttacaagattttcacttagcagttggtagggtcctgcttcaaacttccgattgctggcacgatggcattcgatacctactgaattattgttagctgggtgagtgctagttgtaactcatggaattgtacaatttaaacatcttagactatttccttattagtttgattttgaaggatgttaaacttctggtctggaatactgaaaaagcgagtttagacactgaggtgattgcggaacaaaggaataaaataaacagatcaccatttttggaaagcagcgtaactgtttcaatattgctacacggctatctctatgttggtgccttacataattttagctgaaagcatattgcctgagcattcagaatggtttgttagcaatttccggcaatgcaaaatattctcgggtgctgtaaatcaccacaaattcaaatgctcatattcttatcttttccaatgcagcagtgtgagacttacagtagttttctcccatgcagactttattttttgtccggttaacttcttcagagac

SEQ ID NO: 14097 - DNA, 1006 bp, Brachypodium distachyon
  Intron number 2 from transcript Bradi1g19300.1 (locus Brad i1g19300) derived from phytozome v7.0 (chr-ID Bd1; pos 154 44118 to 15445123)
ctgaccccaccacaggtaactcctatcctcctcctactccattgattaagattagagaagagtaagaaaaccgctcgattgctgcttgaccctcttttttttatcaacataattttttaatcggatttgctagattatattagttataaataaatatagttagataagctcgaggcttttacgacatgtgtgcttgtgtggagtgcgatcggctgttgcccggccccgggctggttggtagtacgcaagtactcctacaataatttcgcttggtacgactgcttggtttgggttaccattgtgtgtacgagtacttattttgcagagacctatactcctcgtcttatttgacatttccacataagaaactgtgcatatgggtggaattatgcttgtgcttgtgctacattgacatcatgatactactttttttattgttaaaaagtatactggggttgcatcatggagtaatttgatactgacagttgcgtttggtctcggggattaaaataagcagaacaccagtattttatttggcagaacattgatgattcgtgtaagttgagccatttcgactatagtacgtaccactgcagctcacatcaacaaccaaataattcatcaccgaatggagcagttctgtacaaaactcaaaattctcatctctgtgtagagcaatgcagcagcgatggtagtgtttgagacgatttctcaatcaaatcgatgttgcgccgcctaacgtatcactttactttaatctacccaaggagtcacggggaactttttaaagtaaaatacctttctggaatgtacccggaaatcgaatcgaatctttgttcacgactttatttgcaactggaatattccataggcggcgcctataatctattgccagtaatccagcattaccgtttagctcatgtaaaaaattggttgatttgattttcgtgttttgcgttaatttgctgcagccgctggcgtcgctgaactcgcgcgtgtacacgaa

SEQ ID NO: 14098 - DNA, 921 bp, Brachypodium distachyon
  Intron number 1 from transcript Bradi1g26310.3 (locus Brad i1g26310) derived from phytozome v7.0 (chr-ID Bd1; pos 213 60546 to 21361466)
tcggggctggggttcagagctcaggatctccctcggtacgtgtctccgccctggttcttgctcatgcttccatccttttgtggattggttgatcctgcgcttatgaaagattaggaactatcccgagtttggggattctctttttgcttggagattaagactttgatctgatggtaataatcgtgctttatctttggatctgacagtggtgcaactacttgttgtaagctgtgggagttattcctctcaagcgctctacttctgcattcctgattttatcaatctgtttgcgtgtatgttcgttcgtgaatcgtgcttatgttcttggaatcagtaatttctggtactgatgtttttacagaattatttcaggtggagtttagtgtttactactgttctgatctatggattccttgtctaaatcggtgggaacgatcttgtgtcctgtagttttctcttctttttccctgggtgcgccgcgttggccacgttgctttcggatggccctttcttttgtcttcttttaccgaatttgcttgtatccttatctcctcggattattgcttccggagtcaccaaagggaccggccatctaccttgtcttccagttattgcttttcttggacttggttgggagtacagagaggtcaactttgtgtcaaaggcaattgctgctgctgctgctgcttcttttttcctttcagctatgtttgagtcgttgggttgcttctagatccagttttggcttttcagtttgatttacttacttgaataaattgtgagtttttagattcatgggtggattcgtatttaatccagtataaatgtttcttgattgttttgcttgatttttgacagaggttgtcttcttgggttttgcttgcaggttcaggttttggttggtttcatctggtcggctac

SEQ ID NO: 14099 - DNA, 951 bp, Brachypodium distachyon
  Intron number 2 from transcript Bradi1g10060.1 (locus Brad i1g10060) derived from phytozome v7.0 (chr-ID Bd1; pos 724 7005 to 7247955)
acggtgtgtcctgcctcgccttccgcgtcatgtaaggatttcttgcatgtgtgctgcaacagacggtagtctgctggacgttttcccgagctgattatgcattttgctgtgttgatggtttggatcgaaatactgttttcgggtgagatagcgcatgaacaactggctaaagcaagctcgggggtttgatacattgttatggtgggattgacatgatatcttctgcgaataactttgaggaatagcttgcataggttgattccatcacgcgcatgcagcggaggagccaacactcaaacattggttgtacataattgctcaaaggtccgtgacaacactctctccagcttaccgtgatggcactgcctgtttcagttcgccggcagcctggcaggtcgatgccttgtatggtcgccctcgcacagcaatgagcgtacgtcccagctgtctaggcgctccctgcagaactgttccctcagcttgcggcccttgcttggtggcatagagccatcgcagtcgcccttttgagctaccgtgccctgccctgctcccaggtgctggcttgctgtgagacagcgattggaggcaggggtttccctcttgggccctttgctcatttgttttttgggaattcgcttttgagttcggaggaggaggagcatagtgagccctgattgttaatcttggctggagggagcagaatttgaggtagggaatggaggacgtaaagttaggcaatgagctgagtttgtttactacgatgttctgaattatttgatgtatatatggtgtgctgtgaattatacatatgtacttaagttttttctggaaaaaaaaaacttgtccctttgtagaactgtccctggactcatgtatgcaatgtttctaggacctctcttaaatttcatgactgtcatatgaacttatcccttgtgttgtctctgatcaggg

SEQ ID NO: 14100 - DNA, 957 bp, Brachypodium distachyon
  Intron number 1 from transcript Bradi1g08930.2 (locus Brad i1g08930) derived from phytozome v7.0 (chr-ID Bd1; pos 632 7860 to 6328816)
agattcggtggcgcgtctgcgatcgcttcgctgaggttgggccgcgagattttggaggttccagttggagcatgcggagatctaatcccatcttttggtttgttggggacatgtagagatgtcgttttcggcagcgcactggcctcttggcgctttgcattaatggcgattgttggggaaactaggtttttgctcaaattttggttgttatctctgttggtaagcaggaaatggatgtatgtgcagtttgtgtttagatgttgccatgtgttggtcgggtgttagtttcgtgcgttatgtagtgttgtctcaagcttttctaggctacggcgttgactgggagctcttcgatctaactgctcagatctgcaatagaagttatgggccggtgcggttttgattgttataatggattgttgatttactcatcatttcgtgttttcagatcctgtcagaatttaggcatcgcttaactgagatagtttccttcgtttgtttgatgcattttattcatggttacaagataactttatttgatcatttgtgcacgctagtaaaccagggaacctattagtacatttgtttaatcttaactgggtttactggtacctagggctagggaaccagtttaaacatataatttcagttagacggaaggtatagggtggtcgcatgtactgaaattttgctttagcagcttacgtctaggtctaggttgcaagtacttatgaatgctgtgtgttaaacaatcatggtcagctgagctgttgtggttgtccaaagttgaaactcgatgcttttctgtgaccaacaatgaattcttgtgaggagctgagatttgctatgagtcttggctaaacccgatgtcgtgacacataattatggatcctgataattactcctctatccagctacctgaattattcacctgactctgtgtttgtgatcctacacagg

SEQ ID NO: 14101 - DNA, 771 bp, Brachypodium distachyon
  Intron number 1 from transcript Bradi1g01730.4 (locus Brad i1g01730) derived from phytozome v7.0 (chr-ID Bd1; pos 114 5565 to 1146335)
ggaatttcttggaatcgtcttcgatcggaagaaatgtttgtggatttgccatttcttttcttcttctccttcccctaatgctagggttaatcaagttggcatgtcctgcttgctgatgcgggagacagattggattgttgatttttgtttttcaccatgaaatgtcgaaatttggtacccgaatggtcgccttgtctgcctctttttgttcagttaattaatacagctctagcagtagccaagatccagtctttgtgcatctgtggatgtggctttgttgcgtgtgcagtgttacatgggtaagcttttgggttgattcgtcgagttgtttatttgatttgatgaaaatatgattggttgaacaaaactgctatattggcatgacaagattgcagtaaagaatgtgcattgaagcaaggtcaaatgacaatgcttattttagtgagagtgataactaatcaaatggattaccaccgtatctttttttttcctgtgttacatgaaagaacacatgctccaggtgccaagatctagtagatcccacgttctgtttgctctagattcttattttagtggtggttaatcaactggagtacctctgcatcttaccaattgttttctggagttcacttaatatgataggtgttttgcctaaaaaatgctaggtgttactttaatctgcttatcacattttgataataaggtagtactgtgcttctttgtttaactgtgccaggagcataaaggagttcctaaatttggaagttggga

SEQ ID NO: 14102 - DNA, 995 bp, Brachypodium distachyon
  Intron number 3 from transcript Bradi1g33870.1 (locus Brad i1g33870) derived from phytozome v7.0 (chr-ID Bd1; pos 294 47970 to 29448964 reverse strand)
ctgaacttctgcccggcctgtgagaaggtcaccctgaataattagcccattcgaatggtcgacgcgatgagctagctagcatacaaagcagtgagttcttgtagattaatatagtgttctctataactttcacgctcttaaaaacgtagtacatgaggggtgacatgcccgttacactggatctccagattattatatatatatgtattcaactacacgctaatttgtttatctgctcctcgatggatttcaaaatagttgttttctctaccgacatttttttcttctctatcgacattgatcgtccaatcaaaacatccactaaattatgtagctgcacaaacttcatgcttaaattggatgattcttatcgtggcttttttcatgaggcagaacctggttggggcgaatcggttaacctttcgcatgaacttgatgattttgtttggagtcttatttcctcaggagtcttctctgtaaagtttatgtacgctaattttatgaaaggacatactgtttttcatcggaaatacttctggaagcttaaaattccatcaagaattaagattttatttttatgtggttttgatcgccaagttctgttattaactaaagataatctggcaaaacggcattgaaaagggagtttaaagttagcgaagccgatgagatgatatgtttgaataagcaacagcaatgacttccgacgtccgaagatggaatacaagctaggcaatgtaattttggcgtatttaatttctggctttctgcttccttctgtatactctctctcttttcctctttggagcatttttcttattggcttgattacttcctgttaagcatagcattgtgcccgggcatgcataacgattactgagcattaggcatgagagctaagagaaatattgcgcggtttacactgtcgagcgaaacttttgtgtgtgatttgagtatttgacaaactaactgctgctgatcagacaagcctggcc

SEQ ID NO: 14103 - DNA, 590 bp, Brachypodium distachyon; identical to SEQ ID NO: 13966
  Intron number 2 from transcript Bradi1g06860.2 (locus Brad i1g06860) derived from phytozome v7.0 (chr-ID Bd1; pos 468 4990 to 4685579 reverse strand)

SEQ ID NO: 14104 - DNA, 922 bp, Brachypodium distachyon
  Intron number 1 from transcript Bradi1g09100.1 (locus Brad i1g09100) derived from phytozome v7.0 (chr-ID Bd1; pos 646 8195 to 6469116 reverse strand)
gggagcgtgagctggagtcggacaaggttggtgtattctgaatttttgatgtgatcatactatcctagggtgttgttttagttagatttcatggtagttggtagaaactatcagtgttgtacacccgttagtccgtttaaggctttaagctgtccagcaactaggaatcacattttcttccactgacttttgctaaataataatgtaacagtgcgtggtggcttaaattagccccatttgctgggagcttaccctgataaaagcccaggcccacccaaccgaagacttgaatcaccagtcagtacggggtgaaaaaatagtagctttctgattcaaagttaatggatatcgcgctttgacttacgcctcatttgtagggagcttagatgagaacagcttctagcataaagccatgtttattgaggcttttctgcaaacccatgctccccaaatgggccatagcttagtttctgaattctaaagtgaaatgaacatcatacattaaattaagtagcccactctctaaaatcttagtgattttgaagtttcaccctgcatttttttgtggtatacatgagtaggcagggtgtgtattttttgttataagatagttatctgatcagtgaactcatgggaaaattgttaaagctctgcttagatgccctgttattgttgttgcctaaatgacgaatgatatgttctgttgtgaagttcaaatatgttcggaaagataattgattaatgattatgcagctgtaatttcaattgacctagtcacacgttctctgctcatgtcattcactcatctgctgtgataatcaattctctttgtataattaatttgccttcattcctgtgtaactcacaggccttctattatgtttcagatacagcaacttctaggagttcgacagtcacgata

SEQ ID NO: 14105 - DNA, 826 bp, Brachypodium distachyon
  Intron number 1 from transcript Bradi1g40360.2 (locus Brad i1g40360) derived from phytozome v7.0 (chr-ID Bd1; pos 370 18555 to 37019380 reverse strand)
cagaaaggcaacggaagcattcctgacaatagctggtacaaagttatccttttcatttgactgggttatttttgtagcttctagtaatgaacatgggaataggtgaactattcaattactcatgccggaaagttgggtgtaaaaaaacatctttgtgttttcttagtttcaagtattaaatttcttatacatcaaccagatggctcaactacactcgtaaattggacatggatgtaggatttcatgtatactagttaacattttgggacataggaaaatgtagtaaagatggaagaactccattttaccccccgccccccccgaactcatcagaaagttcaaaaatcatccggaactatgaaacccccctgaacttgaaaaccgcttttcccgaccccctctttccactgagaaacagccaaggggggttaggtaggatgcccggttttcaaagttcagagtggttttatacccagtttcatagttcagggtgtttttttgaacttcccagtgagttctgggggataaaatggacttctaaatgttgtatagaaacttctgaaatatcatttatacgagtttgtctagtttcaatttaaaaattctgcatgtagaataatagctttgcttcgtcaaggacatatctagcttgaaccatcattttgttgcaaacctgaaatactttgctggtttgagcaccaaatgcaggtagcagtgccactccagatttattttcagctaaagtattttcacaattgcagatcacaaagtagagatcgatgtagagaggacaagttgcacaaagacggacctaaacaatgataag

SEQ ID NO: 14106 - DNA, 641 bp, Brachypodium distachyon
  Intron number 2 from transcript Bradi1g42970.1 (locus Brad i1g42970) derived from phytozome v7.0 (chr-ID Bd1; pos 404 12034 to 40412674 reverse strand)
ccaagccatactcgaccagctaatacctcttgcaggttaagatctcactccctcccgtcctctctttgaacaaaatgcctctcttccactgttccacaaggcagggtggaaaaaaacagaagctcagttgaagactcaaagtagactttttttcccagaagttaataacgttagagcaagggtactccctactttccgaaaaacaatatatgtctagagaagtaagtttttttcaaaaagaggaataatcccggtccctgcattaaacgatgcacacaatcaataagtaaacatagtgtctaaaattacctagcaagcccttttgtacccatggaaatcaaatgatttcttccgtctacttttcttgcgtgctgcaagcttaaaatggtttgcttcgtttctgatgatgactaatgtatgtgcacaaaaatctcaatataacgcattttgtgtgatttgagcatattaattatgcacaaaaaaactatctgttggttgccccatgcatgctttgactgccttgagaagttcattttatgcaacctgtcttcaccactaacctactgataagtattatctacattttgttcgccatatgtgcattagtgcgtggctcccgagacagcacggctattggttct

SEQ ID NO: 14107 - DNA, 926 bp, Brachypodium distachyon
  Intron number 2 from transcript Bradi1g09180.1 (locus Brad i1g09180) derived from phytozome v7.0 (chr-ID Bd1; pos 656 0802 to 6561727 reverse strand)
tcgagaccacggtgagcacacaacctggatcattaaaatcctcaaggtttagccttgcgtactaagcttttctgaacttagtcctacctgcttgtattgacaataatgactggaccaaatttgaggttagaaaagaagcagcagttcagtcgcctacaagattttagaaatttccgtgttctattagtacagcgcatccctcccttacctcatcagatttgttagataggctgcatcgtcaactggataacgatgaagattatcaactatagaaaatgatagtctggtaatctgatagtgattttgtccaaaaattttctggaaaggtacgtaacgtcttagttgggatccctcaaaaaagaaacatcttagttgggagaatttgggttaagtcatatgaatattaaagaaaatatataaatcaaattgttttatgaaaatataagtagatttatttattttttgcgaggatataaatagatttctgaatagatcatcctcgcccggtttcatctgtgtaaaagttcctactaaacctgcagtccttgttctattttttccaaaaaggaggagatcctccagccttgcatccgtcgatacacgcaacaatagttcctattataattaatatgcaactgttgttagttggcatttacgttccaactgtcaaatcaatatctccttattatatcgaacaccaatatagaatccacaagcatccaggcaaccatgccgttttaaatttatcgatcatcaaatgaagcaagtcagcaccttttccaaagtgctaagcttgacatttagtacttaactttttaatgattgattaatcacagttagccgcttgtacactctaactaaccatgctttcctggtgtgtcgtattcacaggttgcggcttctgaagtggaaagggcagtggagga

SEQ ID NO: 14108 - DNA, 711 bp, Brachypodium distachyon
  Intron number 2 from transcript Bradi1g19030.1 (locus Brad i1g19030) derived from phytozome v7.0 (chr-ID Bd1; pos 152 19873 to 15220583)
tcccctcgattccgcagattcgcagggccgaacaggttggtttcgttccccagaactgtcaagattcaactacctgacttgctctttgttttctgttcagattttatttttaaatttgggtgctgtcgtatggtctaagtgtggtgtgtcgagctgttctgaagaatattgggtacttgcatataaacaggggctatgtagcatatgaagttagatactatgtggttggttggtgattagattaatgcgttgcaaacactaatcttacgtgcatcacatcaaggaaggaaacattaaaattacttttttttcgataaagattaaacttactgcttaacactgtaaagaaaagggtgctagttcatagcttaatacatcaagtgttgattggatatagagctatgatgacttcggttgcattcgagtgcctccgttatagaataccaaccccagtgtaaaatgaatcgacagtgttttgatttctattttgagcatcttatgatttagtactgggttatttctccgttttggctgttatattagccaggctagtgcaagctacataacttaactgcgtgaactgaagatgtctctggaaactgagaactttttaaattcattcgaagctcagtgataaacttgataacccaacctgacatttttgttgtggggaaatgccttaccctttcctcattactgtcagctcttcat

SEQ ID NO: 14109 - DNA, 536 bp, Brachypodium distachyon
  Intron number 2 from transcript Bradi1g26230.1 (locus Brad i1g26230) derived from phytozome v7.0 (chr-ID Bd1; pos 212 97141 to 21297676 reverse strand)
gttttctgcaagaggtaaatcctatgtgttgagaatgtggtagtcggagatctgcctatcttcaattgtatctacaattgcaataccaaaaattgttagtgaactcatttcacagacttatcaccaaaaatagctaaatgtagcatctaaggagtaatttattgcatgtattactgtaagttagatgtccattttttgtagtttcgaccaaccctatctatacagtagaataacagtcggttaaggcaatcactgacctttagaccatttatgctagaaattttgatatgtatttattagcctatatttgaggttataaatatttctatcatgttttcctatagaagaacaaaacgaagcagaatttccaagatactacggcgcgtacgcgacgacaacaagacacccaaagaagaactcagtgccatattccctcaaagcggaagcatagttcttcgatggaggtacaaacggatttattcataccattagagatgtataacttatacatctctaatgactgttttgctcctagg

SEQ ID NO: 14110 - DNA, 996 bp, Brachypodium distachyon
  Intron number 2 from transcript Bradi1g31050.1 (locus Brad i1g31050) derived from phytozome v7.0 (chr-ID Bd1; pos 265 17348 to 26518343)
cgtcctcgtcgtcctcgtggggtgccagcaactcggtaagcgacgcgatctcggaaagtatcttttttctatggtacccttatttattccgagtctggcgtgaaaattttgtaccaattcttcttctcgttgcacatggtttctgtttgtttctgcgatattcttacctaacacgcattggaaacccaggaaaaaaagtcctgattccgcctcctgaacgaatattcaaaataagctcagcaaacaaactgtagtgggctgttgcaactgtctttttgtttctttttcttttgacattcaactgtcaaaattattggtatgatcaaggagaattttcgaaataaacaagtcagaacgctgtttcacagcgtgtgcgattagcttgaccaaactaggccatatcgttagctagctgtatgcgtgctgtgggtgcagctagcagagcaaagaacagcaggctgcatgcatgatctcccatacggccatacagttggtcatgttctgtatcgacattcgacaatgaaaattaagccgacgagacactcgagctgagtagctggagaacacagctgtatgtgtcggttaaccaactgcacttctggtcctagattaattagagcgtctctgcctgctcatagatcgatcgaactgaccgccaccaaggaaaaataaagctctgctctgagttattctctgcgccattcctaaattaagctcttatcttttgtttgagatagtaaacaactactagagctttgtcgcactctacctacctaaaatcgccatctggatctgttggcaacatcatgcaacctcttgtctttctcctgtgataaaattatgacacacacttcaaatttctggatacctttctctcttttctgttgcattttctagtgctctcttgaaattcccatttgggttgagaccattactaacctgtagaaatgtactgtatgtcccttttaattcgagcagagcttggcgagccagagc

SEQ ID NO: 14111 - DNA, 881 bp, Brachypodium distachyon
  Intron number 1 from transcript Bradi1g35850.1 (locus Brad i1g35850) derived from phytozome v7.0 (chr-ID Bd1; pos 314 33549 to 31434429)
actagcggcgacccggcgctcaagaaggtggtgtggtacgcgaaagacccggccacagagtcggcggtcacggccacgagggcagccacgttgagcgtcaccctctacgggcagctctccctcaccgacaacaccacgggcagcaacacttggacgaacccaaacctgatggttcgttgcatgcaaaacaaaaattttcctacgagatgtgcggaagaaaaactcaagatcatatctagtagatgtaagtaacgagagggataatgagcattataccctcgtagaccacaaagcgttacgataacggcatcgttgttggcgtagtggaactttcgatgagatcaatctcagtgcagaaacgagacacctccttggtatccacacattcagcttcacgtcgtctcctcctttttgatccagcaagcgagaggaagaggtcgatgagattccagcagcacgacggcgtgatgtaggctatggtggagttctccatgggcagggcttcaccgtgcgcgtgagaggaggaggtcagggagaggagccgcgttaggccaaggggcagcccctcccctccttatataggggaggaggccgacggcaagacaggcaaagaagacaatctcacctttcctttcttgcctctcaaaaaataggaatttgatcacatagggatcaattcactaattcagtttttcccttatggcttatcactaaatagtacagctaataattcttcagaagaaattaggttttgttttatgttacttccatctaatttatcttcaatggatagttctgttgcataacacacaaacttcttataataatcaatgtagtgtctctgttgttttcaagtgtttttcattttagtcatacaaagc

SEQ ID NO: 14112 - DNA, 858 bp, Brachypodium distachyon
  Intron number 1 from transcript Bradi1g23770.1 (locus Brad i1g23770) derived from phytozome v7.0 (chr-ID Bd1; pos 191 37938 to 19138795 reverse strand)
cccaggtacgtgatccttcttgatctgcaaacgcattcctgtttcttaattccgtgaggcactgcttcgcgcgctagctagggttcaattacggttaaattaattcctaattacggttaaattaactccgaattattggttccttttatatcttctgttttgcctattttttcgattgcggatcgtggtcatctcggtggaaatttcctttctatcaatgattattatgttccgttgatccgttcgtttgtatttcccgttgagccttcgcgatgggcttttgggggaagtgtttttattggccggttgtcgagagactaatgagattgtactaatgagattagtgcaattggtctgtcctgttattctgttaactaggccggactgacgtcttgcagattgtactgcatttcgtaggccgaaaacctctttcgtaggcacgtactaggagacaattgcgagtttccatctctttgagatgcgagatctggaaatttagctctcgtagcatgcttaataaatattgtgtaacaggggagcaatgagtgcccgagggagcacggatcgtcctagattgaagagtttaatctggctagctattaaaagaggcatcctgccctgtggaggagaatttgttttgttgatttggtctagtgctaattttagaaccataaaagttgtgcaaacggtatcagaataggaagtcttgatataaagttataaacacggaagtctgaaacccttagggagcagaatgtgcaggccgttgataagtcagtgcactgagttcttccaatccaattcttaacactttccgtcgtttcatattcagtgatagcacagttggggtcgcgcacg

SEQ ID NO: 14113 - DNA, 881 bp, Brachypodium distachyon
  Intron number 2 from transcript Bradi1g24300.1 (locus Brad i1g24300) derived from phytozome v7.0 (chr-ID Bd1; pos 195 06712 to 19507592)
ccttcctcaggtaattaatgattgactccttccattctgaaaattctgggaatattatgtctgtgactatgaatgatgcactttatcttcttgtttataatctcttttattctgacttttatcttgtttgacattggctcctggtgatttagtggcatctgtctaaattaagcttgcaataaaggtttttttctgtcaattgtcatcatagaaacccgtaggttactatggtgtgtgccaaaagatcaaaatcttacaggtggttgttatgcattttccactggtgtcatacatagccgttaagaaaacctgctttgcttagaattagacatctattggcgtgcgtgctgttacactgacttcactgtttttttaaaggacagccacggagaatgcacaaaaatgatatactttcttcccagtgcaacgttttgtttaatgttttctaacttgaagcaacttaactgtatggcattttccttgaaaagtgtgtatcctaagtttgtgttatttttcattagctgaaacttaaagtcaaacatttttctagtgcactgatactctgcctgatgcatgatttccacttcgttgaatcagtacaaatgttcttactccttccgttgcagtatgtaaggtacacacacatcccaagatttaagtaacttaagtttgacaaacaattacactaacaaaaattgagttatatgggctaaacttaaacctttggatgtgtaggcgccttaaattttgctaccgggtataaagtatagtgtcttatgtttctattctgcacacttgcatgtattgccaaacaatatttttatcccttttcgtttttttacgcaggatatccgaggaggttgttgaggcagaacaagagt

SEQ ID NO: 14114 - DNA, 1046 bp, Brachypodium distachyon
  Intron number 2 from transcript Bradi1g45770.1 (locus Brad i1g45770) derived from phytozome v7.0 (chr-ID Bd1; pos 440 55112 to 44056157)
tggacagcgccggtgacgaggcgcttgccagcaaggtgacgtttttttgttttgcacgcagcttgtttgttgtattgcgtccgaggtattactgtctgactgtcaaataaaattatcaaccaagtatggaaggatcagcgcatgaagccattcatggcatctatagaggagctattttgctgtcaactctacgtcacatggagaatcaatacttatcctaactttgtggatgctcttagaaaagattaactgttatatgtcctaaaattagtaagttgtcaacagttcaacaccttaacaggttctttataaatattttttagagaatgaagttctttataaaaatcttattttctaattaagattcgaggatttagagttaatcatgcgctgatccttgatcctttggcacagattacatattgaaagactggcagtagttaagaaatgggcatttaccttctgtaacattttttaggggtaccttctgtatttgttcttctatatgtccaaaactcccaatttgttatgaggttggcaaaatttcttctagaagttgctaaaaaaacttctagaacagaagttagatgcagaaaactctggttctaatactgttgttaagttctgttttgtgatacccagaactgaaaatgctctaagcatcatcaatcagcatgcacatatagatataatttcagtagggaccttccctactgtattttgcatcaaaaaaatatagatataatttggctgatgatcttattggcttaatattcccatgattcttcatgtatttcaactcaatttaaacatattcttgtttgtttctggaactcacaagtgtgcgaaattatcactcttttctttgtttttccattgcgagttcacagaaagctgattttttgttcggccatataatttgcagaaagaacttaatattggttgttttagtttatttccaactatatgtggttggtttctgattattaatggattcttctttgctgttttgattttacagttcggcttcaaggagatatctgcat

SEQ ID NO: 14115 - DNA, 517 bp, Brachypodium distachyon
  Intron number 1 from transcript Bradi1g24060.1 (locus Brad i1g24060) derived from phytozome v7.0 (chr-ID Bd1; pos 193 08600 to 19309116)
gcagaaggttgggcacacttcaactcttggtattggtgtgtaatactagttgttttcctctgattgttgaccataactctgacaaatttgtttggtttatttcggaaatttctgcaaactacccgttggttttcgctctcagagccaaaaattgtgggggaaaggaaattaaccgacccagaacaacttaaccacccgaatgcgaactcctgcctgtagtaatgaaaccagtgcatagatagatatatgcctcatctttacgagatattttcctggggaatattatgtggacttgctgtttcaactgtagcaaattgttagaaacagcatatctagtgaaaaggaaatgaagtgtatatttacaattttgaagggaaaaatgaagtgtagcttttcccttctatttcagttcatgatgtctgcatttcttttccaaaaaatctgaccgattttttatttactattattattttctttgtcaggactggttttctgttcactgcagttgtcactggca

SEQ ID NO: 14116 - DNA, 531 bp, Brachypodium distachyon
  Intron number 3 from transcript Bradi1g04570.1 (locus Brad i1g04570) derived from phytozome v7.0 (chr-ID Bd1; pos 306 0357 to 3060887 reverse strand)
aggttggcgacatcattgttggccgtgtcattgaggtatgtgcactttaggtcacacttccaacgttcttctcatttttatagaatggtttctgttaggaatgcactgcatacctgtgtgataaaacatgtcatggatttcagtcaatgaagatcctctgcattttggcttgaagctttagttttaaatttctagcaatgttggacattgttaaaaattgctgaggacaatgtgtttagtcagatcctcattgtatatacatggattggacaatcggttttccaattgtttgataggttagtgatcccaattattttgtatgggtgtcatggctcacgctatttacatttgggtacatgtccatctgaagtgaatctggctattattatagttatgccatcacagtttgattcacaatctgcttgttcagcatccatgcaagcactgtataccatttgttaccaatattaattactatgttgattttcttctcaagattgctcctaaacgctggaggttggaaataaactt

SEQ ID NO: 14117 - DNA, 834 bp, Brachypodium distachyon
  Intron number 1 from transcript Bradi1g17870.1 (locus Brad i1g17870) derived from phytozome v7.0 (chr-ID Bd1; pos 144 72143 to 14472976 reverse strand)
tcctcaccctcgccgcccgggactccgtcgtcgccgtaaataagctcaaacaccttacatgcatacttaatgttccctccgtttctaaatgttccctccgtttctaaattgttgtcgtggttttaattcaaatttgaactaaaaccatgacaaaaaataaattaggaacgtagagagtacaatagctaggaagcacggatacgttgatacgtatctgatacgcgatacagggataccacgatacgtcaatttttttaaaacatagatacggggatacgtttctatatatatgttaaataaaaaaatacagaaagtacaaatttttatatgagaagcagtcaaaaatttaactccattgcaagattgttgcccagtttcctgcagtgctcgagctcaagctcccaactgaagctgatgctcttcttgctatggctgacctgggcagagaaggagagaactggagaaagaagtcatgaaatcaatcacccattccgcgtgaacagagaagggagatgggtaggataaatcgatggccgatgggcttcttctgatgtttagtttcccgtatcccacaagtatcgggaagtatccctcacgtatcggatatttaaaaaaaaaaattagatcgaaaaattatccgatacgggcaaaatatgtatcggggagtatccaggcgtatccatgcagtatccgatacggatacgccagctcagagtcgtatccgtgtttcgtactacaacagtacattgctcccaaggagatcattaataatcttgttttttgctcttctggtgcacagttgggagggccatcttggacggtgccgctgggcag

SEQ ID NO: 14118 - DNA, 965 bp, Brachypodium distachyon
  Intron number 3 from transcript Bradi1g19210.1 (locus Brad i1g19210) derived from phytozome v7.0 (chr-ID Bd1; pos 153 86272 to 15387236)
accccagcgagcctgtcgtgttcccaccactcaaggtattggataacttctgtgatgcatgatctctgcaaatgttgcttgcatctcttcttttgtgcggagagcatgataatgtattgtgtatttgtgtggatcctaagacgagggcaccaaattaagatgcacatttttttcaactgagccgatattatgctgtaaactttgctggacagctgttgagttaagtaaaccaccattctcatcttcaactagggttcactatgagcagaactgtcagccctacccactgcaggtcttagaaaatagcttcagcttgtactccctccgttcctaaattcttgtcgctgttttagttcaaatttgtactaaaacagtgacaagaatttaggaacagaggtagtagtttttatagcctggaagttattcctgggtcgagcaaattgtttttattgaccaaacaggtttttgtacagattcttaatgttttcttgctgcaaccaagtcgtgcatttgccacccactttccatcagcatgcgttttgtttcaacatgtttgttgtgaaatgttgatatgtctaatcctttcttctgggtgtggggaattaagaatcgattcaaatcttcatttaaaagaaattcagaatgaaataggtttaaatgcatgacctacctgtaagttagttaatgccttattggagagacatatattttgtatcatttgaatgatttttgctgaaggaacatgatggtggtagatttagcaaaatttttggtcgacttactgcatatttcatagttatacacgagcatgtctctctcagtttcaggtgttattttgatgtttacttttctcaccagttttgtacttctgtctaccttcttctgctcaccttcttatttgcatggttaatgactattgtaatttcccagactgttggctcgagtgctcaagctgaaatatcttg

SEQ ID NO: 14119 - DNA, 457 bp, Brachypodium distachyon
  Intron number 1 from transcript Bradi1g20200.1 (locus Brad i1g20200) derived from phytozome v7.0 (chr-ID Bd1; pos 161 78629 to 16179085 reverse strand)
atccaatttatagcccctagaggtattcattctgaccatactatttactttgatagcagcttcataaattggatccactagttcagcgggctttcgatgctgctttagctgtcaaagatcttcgaggtatctaaattccaagaaaaaattgctcacttgtttctatgattctgtttgaaagggataaactcttacatgcacttaattccaaggtttcattgcatgagcagtatctagctttctttagtatccactaattcacttggattcatgataaatatggggaagaagtcaaatatttcttttacagttcacatgatgtaaataattgtcagtgcaaaccatttaatcttccaaggaaggtcttaaattcattggtgttgggcttccaatgccttagcacttttccagtcctttcttcagacgctaaccttgccgttttctggcaaaggtttgt

SEQ ID NO: 14120 - DNA, 809 bp, Brachypodium distachyon
  Intron number 1 from transcript Bradi1g20860.1 (locus Brad i1g20860) derived from phytozome v7.0 (chr-ID Bd1; pos 167 61751 to 16762559 reverse strand)
cttcggggcgcggcggcgcggcgcggcccgctctggtgagacacgcacacacacatactctcgcgcatctctgctgcatttgtctattgtgtcgccccttggcttgctggaccatcccacgagagtgcgtgcgaatcggggcgcaatttcggagcatcggttgtatcgcccacggtaaaggtgccgggttttatcccgttctcggcgtcacattgtgcgtggtgcactcgtgatgcgagtggggagggcggatcattcctgttttattccaaggatcttggctcagtggttcatgcggggttttggtctcgctgtcagcttcggcgcttatgactgggattcacacgtttgtggtgaattggctgcatcgtcattgctctcgtttagcttggctggctctgcctgtttgcatttcttattagcacaagccacacggttttgactcttgactagagagtgtagacagaaatgagcttgcactagaataaaaatcgagctcattagttggaaggaagtacatgaaagactccaaaaaactgacaaatattgttataagaaacacaattttgattatctaataattagcgaacaaactgcagtcatacaatatttttttcttcaggcacggaataagttgtgtattagtgtgctttggcatgggatggcaaaagaggcacttgatgaagcgtgtgacatatgtgaatgtctgtggagaatgttacatgcctatcttgcctgccagttgttcctcacatgtgctgacccaaagcacacaagagtctaaacgattttcggtacaatttgcagga

SEQ ID NO: 14121 - DNA, 490 bp, Brachypodium distachyon
  Intron number 1 from transcript Bradi1g18650.1 (locus Brad i1g18650) derived from phytozome v7.0 (chr-ID Bd1; pos 149 59988 to 14960477 reverse strand)
gccgcgcccattggcgccgctcgtgctcggtgaaggtaggtgacctcgctccctctcccttctcggggttttttctgatttgttcctgtggtttgccactgagattgctggttcttggtagtttgtaaccatggcgccaatggcactagtacttagctgggtgaggtttcttgattcttcgaatctggcccgcattcccctttttcgtttgattccggaatctcttttctcacggtatcaagatttttcggagggatggaaacatgaagaataattttgtgtggggatcgctggcatgcatcaggggaacctcacatttcttggatccccaattcattgtctagggaggaatcctgagaccctgccgtagttaggagtggaaccttgggattcattcagctcgcaacctgctaatcttatgtttttttgcttccacgcgttcagcttgctaactttgctgcgattttttgttactgtttgctctgaagat

SEQ ID NO: 14122 - DNA, 655 bp, Brachypodium distachyon
  Intron number 3 from transcript Bradi1g66870.1 (locus Brad i1g66870) derived from phytozome v7.0 (chr-ID Bd1; pos 656 14716 to 65615370)
tgaaggtgaagtttctgttgcttgagcaatggtgctcgtgtcctcatggtacattggtacatatatacagatgcaaattcgacggaagtcctcattaaaaaccaaaccctgtacttggttcatgcaaggcatatctggatagattggatttgggccaatcaacttgaagattttagcctgcgaattagaaacgaaattttttcatgttgtggcccaggaattaaatctgaaatcatgcacatgtagttctggaagttaaaaatcgtgcacgggttttttgatagcacaagacaggtactcaacatccatcttgtgtagctagatcacttcgtttcttctttgcagaattccagctggattattactcaccaaaacttctctagatttttgtgaaacaaggcctgcgatgtgcctgtaacagctaaccattcttagactagtttgtttctgtcatgtcattgatttatttgttggcgggatacaattattttccttagttaacctgaacttgagcacttttttctctgcctgtgtaatgattcaaatttttttttttttgcacctgatataggaactttgtttatatgtgttttctttgcttcgtttgtttgttttggcaggaggtggacggaaagcacatacagatccagctgac

SEQ ID NO: 14123 - DNA, 799 bp, Brachypodium distachyon
  Intron number 1 from transcript Bradi2g07970.2 (locus Brad i2g07970) derived from phytozome v7.0 (chr-ID Bd2; pos 633 0749 to 6331547 reverse strand)
ttcagcggcaccagaccaggacgaaggaggagcaggtacgagggttccggtctgctgctcctcctcctcatctttgtcccctcttctgctctgctctgttcttctcgatcgtgctggtttgtctgtttgttctttgagttgcgttgggtttcttggctggtctgatctctgatgggaggaggagggatgactagtccgggatcgttttggggggttttctttcttgccctgcctgtctgcaatctctcgttttccttgttgcgttttcatgatgcggtgatgctcctcctgctcctggatagtgacggccccgactttaattcattctctctctggggtgttcttccttcccttctttctttctttctttttgtctgttcttgggttggtgctgtcacttgtccattggtccgaccatgccgtcactcatgcactgattggtactattgtagtgttttggggatttgtccatgaactagtggggccgatcgatgagcatgagttcttgaaaaataaaatactactagtagtagaaaggaaccaactggggaaagagttccttgcggcatgaggattccccaagattatggattttcttttccttttccgtttcttttctgcgactccttgttcttggtagaaaaccgtttacttgttaatgttttgatgttattcttgagacgaaactgtttgctgtgagtgttatgatcctaaatgtgtgatctttcttgctgctggttccaaattaaatgacgtttcgtgttttccaggtgctatttcgtgtgggtttgattaaacg

SEQ ID NO: 14124 - DNA, 861 bp, Brachypodium distachyon
  Intron number 1 from transcript Bradi1g60480.2 (locus Brad i1g60480) derived from phytozome v7.0 (chr-ID Bd1; pos 598 43529 to 59844389 reverse strand)
gaggcgaaagctattctcccgtttagctttgagaagtaagtccacttcttcacttctatgtgtttgcctttgttacttgtgtgaatatcttaagtgattctggaaagatttaaaatggagtgcatatgtgctctaccaaacgtgaagtgcacaaatcctaagccacttgtggttactgatcactaataagtgattgagatggcgaagttcacatagaatcactttcgtaaaaaaaaaaatttaaatttcttcaacccacaaaagttatggaacccatttatttgctaatcatatttattctcgggaaaactagacaagcatcaacatagtatatacggctttgtccttgcaaattgctgtcacaacaaaagatgcagtggtgcttgttcaaacttatacttctcagacaaaaagcaatgtaaatgcacagattttgatttttttgctggatatactaatatgagcatgactcttcaaaattcacagaatggcccagctgtgagaaattagatgccttgcgtcacaagtttacatatgttataatttttattttccaaaaagggtaaatatcaaatggattattttattgtgaatgtaattctaaatttcgtagcttgtaagaaaagctaaaaaactggaccttagttgaaccagctatatgtgctatgttgtgaaattttgctcttattattatttggtgtaattaacgttttaaccactatgataatatacctagcgttatttagactttctttttatcagtcctgccattttctttcaatggttcaatcttttttctgtcatatttctttaatatttccggcagatctcaatcctcacaggccgcagctagcaaaggtg

SEQ ID NO: 14125 - DNA, 1026 bp, Brachypodium distachyon
  Intron number 1 from transcript Bradi2g16620.2 (locus Brad i2g16620) derived from phytozome v7.0 (chr-ID Bd2; pos 146 06226 to 14607251)
gctggcggtgtgaggggattttgcttctctagcaggtactttccaattaaattttgctcctctaccccaaaatccttataccagctacttgcttaattggatgtttcgatatctaaaatactactagtaaattctagtcgccatccatccttttttgggttctgtgagctttaaaaggtagaagtcgatctaaaccgaagtccatctggtttcacacattctcttgcaaaggtcaggatttttttccaatccaattttgtctgccctgctggacctgattgcgtcctgagcgggaaacaataggtgagcaggctttaggaaaatatttcaacaggctcttgtggggaaaaagattcgttgctgttattaattgtgttcttttactgtcttgtgcttgactctataactgctcaaagtgcaatttggtttgtatgccacaatgtctcacaagtcacaaatataattcaggataatcaaacctaagtttatgatgtacatgagtggtctgcttgctagaatatgacattattcgcagccaagctgcaaattgttcgctaagataatttttccgtcttgtctgtcattaatatggctggttataggattcaaatcctgccataacatgtttgcatttcgtttgcttgtcagtttacatgttcaaagcagtattagtgaaagattattgaatttcaaatcaagcaaatgatttgtggagcctgaggtcttgcttgtcgtatcacttaactgctggcatggtaatgcgctttagaaaactagctctccgttatagttatcagtagaccaatgttttactcttgccctgtgaaatgctgctttggtagtcaactgtccaataaggcatgatataccggattagtaggacagattacttgtcaagatgccagcaatggcactagaaaaagagaaggtgggagatataagtcttgaaaagaaattaagaaatatgctagtagttcagctgtttcatccaaattttctcaggttttaatcttttacaggttgccc

SEQ ID NO: 14126 - DNA, 672 bp, Brachypodium distachyon
  Intron number 2 from transcript Bradi2g17860.2 (locus Brad i2g17860) derived from phytozome v7.0 (chr-ID Bd2; pos 158 93178 to 15893849 reverse strand)
gtcgtcaggacccctcgatcgattggccaggccatgtgagtatgaagtatttattgccatttgacttcttcttttttggggcgagggtatttgctttaggactctgtggaatcgatttacagggatttaaaaaggtgcatattttgattgtgtgggctcctcaaatcagtgacatggtttacaggatttagagtaccatctaaaaaactagagggtactatagtctatagctaatgcttctgcagaaaatcaacgacaagataaccaaaaaggaaaaaactgtagagtataacaaatacagagaatcagcatctactgttgttgatgtcaaattatgtaactaatctatgtgctcttcatattgtcttccaattttaagagtacgacgccgaactaatttggcgatgcactcactatcccttttttgtaaagcccccttctgccaaatcttcatactagcagtctagcacctgacgcaagtgtatattattatttaagcattcgggtacttgtatgtagcacaggctcttgttgtatctccttgtggaacaagataatctggatagcccgctaatctttttctgttactagagtgacactagctgctttgctttgagagatggaacattaacacattgttactggcttcagctttcgaagggttcacacata

SEQ ID NO: 14127 - DNA, 949 bp, Brachypodium distachyon
  Intron number 1 from transcript Bradi2g10680.1 (locus Brad i2g10680) derived from phytozome v7.0 (chr-ID Bd2; pos 888 6166 to 8887114)
atcaagaacgccttaccgtgcctcgcatagtggaggtctatgactctgtgttaagggctcctttgattcaaaggaatttcataagaaatttggagggttctattcctaaggaataattcctttataactcctttgatttgcaggatttgaaaccatgggaatattttttatggactagtttgcatgcaattccgaaggaaagtttcgatgaggtccaacttcatggaaaatttcctttgtctctgtgacgacaatgagtagcacataatcctttaagcaaatcttgcatttttcatgtggtgcaatcaaacaacttctactacacatttctgtattttgaattttcataagatttaacatggcatgacatttaaatcctatgtttttatatccccattttgaaatcctaggcatctccaagagtgagctcccatttgtccttttgaggagtctttggacaaatggaggtgagcaaaatattaagttgtccaatggtaatctcgcatttatctcttcatgagtctttgacatgtgggccaagaaaacaagtagacaaggtttagatgagttttgcacgaatggagactccccgtactctccccaaatttatgaaagaaatgggggtatggaccagttttggacaaatgaagattttcatcgggttctctattttgcttatggacctccgtatagacaaatttggacaagtagggggtttcgtcagagatgccctgagttttcttggaaaacaagttctgtaacaaagcccacgaaagggctcggcagcggccccgcactgtcatcttcccttgccctccacggctttttatccggctgaaacccccacccctcccaagcccaaagtcccaggcgcggcgctgcacaggcgcgcagcctgccgtggtaggttgctgagtgctcttgcttgctgttagctacagcggcggcg

SEQ ID NO: 14128 - DNA, 864 bp, Brachypodium distachyon
  Intron number 1 from transcript Bradi1g63140.1 (locus Brad i1g63140) derived from phytozome v7.0 (chr-ID Bd1; pos 623 55560 to 62356423)
gccctctgtgcaccagatcgtcggcagcgggaaaggtattgctactcttctacccccaactttcaggattccgtattttgctaagttcagcgtgacctgctgactgctgttatagccgtgtgattacaatacatacgcaaatttcatgccgagaagctgatacgaaaggttgtcacgtgttgcgatgtttccctcgattaggtaatgatgcggtgattgtagtatttgcggatgtagtggcagcgaaaaggtggttgacctttgggcttttgttttgtagggtactgaaagaagcgttcatgaatgcggtagggtgtgtctagttcagactgtttactatggtttcagaaagcataagataatgtgataaaattttgtgttgaattccagctggtgtttatcaactcactcacacttgaaatacttgggattacaatacaactcaatcaaaaatgtcatggaggccacctgtagatgttgaaatgataacctatgtgttaaactgttgtcattttaaatcatttcttgcaacgtgtttttactatcatatactaaagcgagaggccagccactaacctttcatactgcaaagtgatagctaaatcactggtacacttgtctcagataatacacttatttcacgggcttgagtcaggagatactgtttttaatatttttcttctgcattgctaaggataatattgatattatatgagtataacttgatctccatttgaaatttaccgatgctatgcttttcttttcatttttatgtttcaaggcacaattggctgccttctgtttctcatgttcatgcctgtgtgtgacatgttgttcctctctttcagctgccgatatcatctt

SEQ ID NO: 14129 - DNA, 838 bp, Brachypodium distachyon
  Intron number 3 from transcript Bradi2g23210.1 (locus Brad i2g23210) derived from phytozome v7.0 (chr-ID Bd2; pos 207 63368 to 20764205)
gtgcagcttggcaaagatgtacgttgtttaacgtgtttactagaatttcaccacatgacccctagaccctagtgcctgcagtgcaaaatcatggtgatatattagactgtttactgtttagtactccgtagtgcatatcaaagttaggggtattagaatagtgaaatctaaccactaaccggacatcttttgttggttttttcctcataatgcaagatgtgtagggaaaagtagcatgattttcacaccatttatgcttgcttctgatacacaatgcaactaagcagatcagtggaaaagtggtataattttgacaccttgggtaatccgcaacaaatcttcgcgtaaaagtgaagtgcagatcttttatttgagtttcttatttcctgttttggcatctccgagcaactagtaaactggatttgtgaagttttgaccacctaggtaaatatttagtttgcattttgccattttcttaggtaagttgaaagtatgttagtgtgtaatgcaaggacgcacccattcatcagtgatcatatgaataaagatctcacccatctgaatttggccctctagacaaaaaagttaacagttctctctaaaaaaaatctaaaaaaaaacacaaaaaagtgaagttgacacttgcataactttcagatacggggatattcttgtacaaatttgtagtattcccaagtgctccttgagtttaattgtccatgcccagcccagatgtatgggggtgctctctgttatttctatctcttaaaagttcttactgctgaaattgttattatattgacatggaaaatatatattactctctagggtacactag

SEQ ID NO: 14130 - DNA, 823 bp, Brachypodium distachyon
  Intron number 3 from transcript Bradi1g69490.1 (locus Brad i1g69490) derived from phytozome v7.0 (chr-ID Bd1; pos 679 98027 to 67998849 reverse strand)
gaattgattttccaaaggtatgtctcatcccttcctctctcttttttgtttggcctatgctcatcccttccctttttaaggacatgaaatgctagtttgttttgctcattcatttatgtgattatcatagactcttctacctttttagtgttgagtggttcttatgtccgctaccaagtgctaactatgtgattgttatttgctttatatttccattgaatgatgcattgcctctcaaattaaaaatgttaagtaactgtggagcatgatggggaataagaaacggatagaattttgtttctatgaaattgatctgaggccagcactatccagagtcaagctttcttggacctttgcttccgttttcttcatgtatgtcatgatctggtagaggcccattggactctccggatttagccttcagtttggctgattttgcacatgttgtgtgttttgctcgagtcggaatttgcagagcttgttaacatgttatggtgttgaggccgaaatagttgttcatacagataatgtgaggcttaacatttttgtttgtttttctttgtgttcttttctaataatctgatgatcatctcaggaaacagttatgatggaagtgtaagcatcttcatttttcttatctgcattagtaaatgcttatgcaagagttgaggttgtgcaaatgtctggtgttggcaaggacatgaacaaagttatcagttgtcactacttcccaagtgtgaattttcataatgtgctaaaagcattttgaatatttacttaggacttgaaaacgatgaatcctattgtaggcaccagcgattgg

SEQ ID NO: 14131 - DNA, 917 bp, Brachypodium distachyon
  Intron number 2 from transcript Bradi1g70390.7 (locus Brad i1g70390) derived from phytozome v7.0 (chr-ID Bd1; pos 687 41130 to 68742046)
gcatcattactccttcggaaacatttgaaggtgattgggtttatgcaacaaattctgtacgatttgatcttactaagatatgcaaatcgcacatatatgcaaattaaaagatatttatatttagatgcatcttcatagataaaagagaagctcgaccaatatagtacttccaacatccaacaaaggatgtctcaagtttgaccaaacttgaatgcatctatatatttagtcatgtctaaatacatccaaattttgacaaacttgagacatcttttttgttggacggagggagtagatattttagccgtagctacaggatacaaattagaccactgccatgccaagttgatcaatcccatccgataagtaattgcactccctgtgcatttcactctaataaaaacatgtttatttggtcatgccatgtttaagtgattttgctgatgggttcaacttttcttgatgctgattatatttaactgaaaaaatgacattatatccataccactcgaaatacctatatccaactttacattttcttttggtatcttaagtaactggttttacatagacgcgactcctaaatactccctccttccttaaattaggacgtatattgttttctttgaccgagcatttgactaagatttagtctattaatatataattgtaaaataaaattgatgtgattggattcgtattcaaaagtacttgtttatgattacgatttatatcgcataagccacatgttgatgaagtaatttttggtcaaacgctcggtcgaaggaaacaatataggtcttaatttgaggaacaaatggagtactgagcactctggaggcttcattttatattctaatccatgctaaacttactttggaatgcagggtctgtcgcaattggttttagcgttgcat

SEQ ID NO: 14132 - DNA, 1031 bp, Brachypodium distachyon
  Intron number 1 from transcript Bradi2g00840.1 (locus Brad i2g00840) derived from phytozome v7.0 (chr-ID Bd2; pos 526 392 to 527422 reverse strand)
cactgcgacccctccctcctccagcccctcgccaggtaagctcgctacccgacctacccccggaagctgctgctccttcagtcattccgtcccctgcgagcttgcttgtctccatgctggcgccagtgttcgcgggcgtggctgccttgccggacgtatgccacctgctcgacgaattgtgtcaactaggacgaggcattctctcggaatctcggatggaggtgcagccatgcgcaccacctgctcgatcaattacctgcattgatggggagggcagcgagtaatttacgcctgcccaactaaatggggttaggacgctaggtatatagtggcttggttcgtcttagggttttgtttgctgcaatggttgagatctttggactgtttacaaaactgactagttgaactaaatcatatgtttaggtgtgtcaatgtccatcaactcatcctcatttttgtgggtgtgggcatgtgtaatcaatccatatcatggagtgtcgcatgtatgatttcgtgtgccaaaaatgtagcccaagttgatgcgctgtacttggtttttgtgtgctttactattttttagttcatgtgtgtttcctgtaagaggatgcaagtgcatgcatgcttttactccattttacagagcgaacatatttgttttgctcatttttgttgactgatgtgatgatgctacataaatatagcagccattctttagttgattttatatgtgcagctttagtcaagtgaaaattttcccgttaggcttttaaatgtccatagatgacaaactagattgtttgcattgcataaatttttaatgtagactttggcgtgtttctttctgaaagccccatacagtatactaattaaatggagactttgttttgctgcatatatagcattagtatgcttattttagtccaaactgcagcaaaacaaagtgtccattttttattcaaacatattgaagatatgtttgacttatgcagataaagaatatttaatatcttccagggttgcgccaacaatag

SEQ ID NO: 14133 - DNA, 918 bp, Brachypodium distachyon
  Intron number 1 from transcript Bradi2g17950.1 (locus Brad i2g17950) derived from phytozome v7.0 (chr-ID Bd2; pos 159 82066 to 15982983)
cggtccaatcaatattgaaccacttggtgaacgtatgttatctttgtcacatgcttaagctagatcattcttcccggccggttttattttttcttcacttttatatactaaaattaacaaacaaaatgttacttggttataatactaatgtactaccctttcccatagacttgtttttgtgttacaactatttaccactgtagcagaggatggcttttaggatttacgtatatttaaagaaatgaatggttaaatattattttcctagctttgtgtcccaatctccagtagacgggtacccatggacacatggatgggtcaagcttgtgtctctcaatatacatattgcacaggaaatatactatactaagtttgctatcatatacagaaaactatatttaaaatctgacattaaatttattaatttcccacaacccatttgaagaaaaaagactgggccagcatcaatcatacgtcaaaacggccgggaaccataagcatgcagttaggaggtaattcgtatatgatttattactgcaataatctgcaactaagaggtaaactccaaggtcccaactttaatcatgagttgttgatgagagattagtacaaggttcaaatcagagttatctcacaacaactcataattttacaattatatagatgtaaatataggtatagatatggataaacaaagggtgacaaatccttccttattcctgaaaattgttgttatgctgaaacaagattcaaaactaaatacaatgtcaatggtttttacccattcttattagcaacaccaatctcatgctcttcagaaaccatgatgatttgattattactcgcatctatgtactataacttggttattctatttatgcagccaagaaagttgttgaagaggcggacaaggatata

SEQ ID NO: 14134 - DNA, 508 bp, Brachypodium distachyon
  Intron number 2 from transcript Bradi1g53870.3 (locus Brad i1g53870) derived from phytozome v7.0 (chr-ID Bd1; pos 522 75128 to 52275635 reverse strand)
gcttggcgagatcgtaactaccatcccaaccattggtaacaaatgatccctccctcgtctctgtggaaatatgttgttcttgcatctgatcagttttaattcattgattgaattgtgtgtatcgttgttggtttggtatttaataaactttaaagaaatacgattctgattatcaggctaacctacaaactgtgagaatcaggtgctagccatatggtttgttgcccttgcatggcttcggaccatacggcccttaatgaaatatttcttcacattgttcattattgagtgcttgtcacaattttgattcctttctaatgtgccagcactagaatgcttagtgttagtgcgttgttgcattcctttatgtggtgaattcttatgatggtgaatcagagcgagatttgttgtgtagtttgcatgcatccctgatgacttgagtcctatatgttcttttcttgttttggcaacttggaggatattgattttcttcaatgtgcagggttca

SEQ ID NO: 14135 - DNA, 867 bp, Brachypodium distachyon
  Intron number 2 from transcript Bradi2g05440.3 (locus Brad i2g05440) derived from phytozome v7.0 (chr-ID Bd2; pos 393 5289 to 3936155 reverse strand)
atatcatagttgcatctcctttagcgcttaaactggttagtattctttaacaaagtttttttttgctacactcattcactcatgattattcatgtgtccagcagctgtatattgttattgttctgaccttctggggacacattataggatactgtccaaattagcaccggacactgtataaaaaacataagtaattgctagaaatgccactatcctacttttgaaacaaccctgatgggttcaccagccccccagctctaaattctggcaaggaccggaaatggagtgtgaatgatagtaaaccagcagtgaggttgttgtttggcaaggcagggcagcatgtcgatgcactgagccgatgggtttcttaggagcatcagagtttcttaggtccagagggaggtacatatcgtattacggtacattatggacaaggtgctaaagttctgccgcttgtggcaattacaaactgcaagtctgtaggaagggttacttgccaaaagggaggtcttgtaagggtgaatagggtaggggaggattctttgatacaaggtacaaggtatcaagctgctgttggatttgctgatccactgagcaggtggtgctatcccattcgaagaaagaaaacatgatcccatcctaacaacaaatctgtgttgttacaatccgttattaagcaccattttgatttaactaaaattgatcttgatgttcccttccattactttgcttttaaatccatctcatctcttgtgttgctattctgattaaatgtgtacattgttgctgaagtttttattattctctgccttactatgccttttgttatcagaaaatcgacggaggtgaagatatcaagaaaaaggg

SEQ ID NO: 14136 - DNA, 697 bp, Brachypodium distachyon
  Intron number 4 from transcript Bradi1g47650.1 (locus Brad i1g47650) derived from phytozome v7.0 (chr-ID Bd1; pos 463 30576 to 46331272)
gagctgaacaaggtgaaaaggtattgttgcttctcactttgctactacctccatttgtaaatagatggcttcctagaaagcatgcagtcaaactttgacacttataatgtgtaattattttgatttatcatgaagattatttccatattatcatagttttacaatgtttcactactgacatattcgtatggaaagtaatggtcaaagaaaagtcacatgttggagactatactctaaaacgtcatcgatttatggagtagcagtatagcacttttctgttaatctgtcagtagacatcatcagatggctaagatggtgtgcataattaattttcagcatatgcttgtaaaattgatctattactgtcacaaattattcaatcaggacaggtgccatctagtggcatctgatgctctgttctttctgaatggttaatttcatgctttaagttttctgtctcgagagatcaaaatactataaacgcttgatgaggtgatacttacttttctttactggcccatccaaatacctatgttattcttgactttggccacgacaaattaaagtttatcttgccaattatatggttgagttattctttgaggtattctgtcctgaagtgtttattttcatcatcataaaatggcacattaattgtttgtacagaaactaagggaagcaattgctgcaacctact

SEQ ID NO: 14137 - DNA, 513 bp, Brachypodium distachyon
  Intron number 3 from transcript Bradi1g56800.1 (locus Brad i1g56800) derived from phytozome v7.0 (chr-ID Bd1; pos 554 21992 to 55422504)
caggcagaagtgtaaacatccctttgcccctcactccccctgtccaagcgaaataataatctgaagttcttatggctttgctctgatgtttatcatcaccatttaggggccattagacactacatcagcattactcaatcaaattatgtgggtgtggtgatcatttatttcaattggagtagctttgtgtttgatggagcttctgcactaggatagacataaaaatgcgtttgcactttgcagatgactttcattttgcttccatcacaaatccttatgctgcttctttatttgaaatgcatcttaattaccattcttcaacaagctgttagcttcgcattaaagttcaaatagttgcagaccgctgcattactataaagtactaacaaaaattgcctatttggaagagaggattcacacctagtcagatttctttaagtgttgagatttagtttcttttctgtgatgattaccacaggccagatacgaggcacatttttgtggatattggtc

SEQ ID NO: 14138 - DNA, 908 bp, Brachypodium distachyon
  Intron number 2 from transcript Bradi2g37320.1 (locus Brad i2g37320) derived from phytozome v7.0 (chr-ID Bd2; pos 376 34867 to 37635774 reverse strand)
gtgctcacacttatcagcgctctgtgtccttacctgtgagtatctcctgtgtttatcttttaccgaaaacaaatccagtaatttctcttaaatttatttcattttcctgcaaaatatactaaaaatgaacttagtgtttgctttgttgttgttaagaccaagcttttaaaatgtagcagcagaccagtttccaacaagtggctagtcgtggtggtttcaagcttgttcattgtttaatcatacactgaattacccaaacaaatatcctgtttgctgatctgtgaacactcagcagtgttttcattgtgaaggctcaatgtatagtggcagaaaaaaaaaatccatactagcaggaaccgggcagtgagattaataagaatttgatcaatttattattacgtggagataattgtctgagcttattaataaatcatgcattgatatttgttttggatatcaggaaatgtgtaagctgttgcttaccgcttaacattttgtgaactgcatgagatatgatgcctaggtctgttctttgtggtgcagggaagaaacgacaagcatgacactacaaatcaaatcatacaacatttacctgcatagattgatgcacgctttcttcagttgcactatcatgtatcgttaaacaaccgtggcatgcttctctagggctatccctagccatgcatgcagggttatatatagttggcaatttggcatcataaacgacaaaattgcttgtacatgtctgttggcctattatccacaccgtgttgaccgattgccatttaccttctggaacctcgtggcaagttggaaatgcttttgttgccatacgcactacttaatgatgaaactaactacttttcctttacttgtctccacagccaactgcgaagctcatctctgct

SEQ ID NO: 14139 - DNA, 764 bp, Brachypodium distachyon
  Intron number 4 from transcript Bradi1g75200.2 (locus Brad i1g75200) derived from phytozome v7.0 (chr-ID Bd1; pos 721 47846 to 72148609 reverse strand)
ctgcccgaagttgggattccaggtcgtttggaccagtaagttactttcagccaatttcttttcagcgaagactactctacgttgggttggatgatctaggaaaatgttagttatttgattgaaacttatcaatgtatccagcccagtgtcgttgctattagtattgataggttataactttggatcttgtttgtccagtgatggggttttgctgtatttttgccttggatgccagtactctgagtacaatcatgtaaatttgacggccaaagagactagttaccaacactggtagtgaagcagagaactgggagggcctattttcctctgggaaaaaaaaggaggtgtcgaagttatgcatgactggcaattttttatcctacttagtgtgatgattcaataatctcagtgcgtgcctataggaacaccatgtaccagcactagaaaccaaacaggatagggaggaaaagaataaagcaaaaacatgggagtctctcatgaaaatctgtattactctttttattcctttttgcttctatttttattcagagagtttcatattagactgaaaactagcaagcgatagagggcacaccagcaaataaagattttcatggcttgactgaaaaatagcaaatgcaagcgaaaatctgtatttgctagtgtgcttctatttttcttcacagattttcatactagactgaatacagttttttttttgctgtgaagaaaagccagcactaaactagacaggaagcaggagg

SEQ ID NO: 14140 - DNA, 987 bp, Brachypodium distachyon
  Intron number 1 from transcript Bradi1g69340.1 (locus Brad i1g69340) derived from phytozome v7.0 (chr-ID Bd1; pos 677 88428 to 67789414 reverse strand)
cgacggcttcctcgacggcgccggctgcaagaaaggtcagcagtacttcgccgcacgaacattttcttactccttttgtttaccgatttcctgtttcgtcggttgatttagttggtcaagttatgcgagctagccattactcccgacctctccctctcgttgaccacgcatctaatccgcagcgtcagctgcgtgtaccgagagttggaccattggcgttgcctatcaaacctttaaagacgaacaagaattgatcatccccggattagaccgattgtatcacccacatttttcaatcaaaccgcgaaaggctttgcccaccaacttctctgactcaaactcgcggataaaggtcaggtggcccgcctcctttcttggtactgtactatgttacaggtactacattcgacactgttgataaaaaacacacattactgaatttccagccggtacgtgcaataagcaatgtggtgaaatacggcaattgaaattgatcaatcgttggtgatcgctagcagagacagtcaagataactcttggttgcttgacgggaagtgtaataacatatcgtatcttaaatttgttggtggtagtaaatgagaacccccaaatgagtatgtatgtttgtcatatttcataaataagtacttccttggttttataattcttgtcgtgattttaattccaatttaaactaaaaccatgacaagattatggaacggagtgaatatacatttgccactctagtttgcggacactattttagtactgtgccatctgcaaatgacaaaagaaaactgttaaaaaaaagggctaaaggaagagttcttcaaactgcgtctaaatagtctaaatcatgttgaaattgttcaatgtgtgaactgaactttgctatgattgctcctcctcccccttcattcagttttcttacatttatgttggatggtttcagtgtccaagtgcgattcttcaaaatacctatcaggc

SEQ ID NO: 14141 - DNA, 803 bp, Brachypodium distachyon
  Intron number 2 from transcript Bradi2g38030.1 (locus Brad i2g38030) derived from phytozome v7.0 (chr-ID Bd2; pos 383 58809 to 38359611)
atcagctcggcctgccaaagcaaggaaagaagcaggttggtaaatgttgactgcatggcgtgtaactttagcagtaaatggtgggtgcataacttcatatacatcgtatggtaaattcctaagggcacatgggagcatgttctcctgggaaaaacaataatgttgacaatttaaaaaacccaaaacataagtactctatgcatgcaataatttgtgattttttccatttgtgttcttgaaaataaataaattcgatacgtatttagttgctatattgtccttcatccacctccttcccaaaaaggaggccgttttggttttttaccccataaaataagtcacattaggtaatcaaggcccactagccccttgcactaattaaggtctgaaaacaaggagcgtcccgcataaagtagcgttcactagtacgaatgcaaactgaggaagtttatcctactgctacatgaaacactataaatgctactgcagccagtacatgatcctccttggtattcgtgatagtattaaaataacctataaatttggaaggagggagtatttattttgggcgcacaaataggcatcaaatacatagaatctagagtctcgcaacatgtgcctcggagaattaaaatttaaagtagttcattcaaacttttaaacctccaatgagcactaaatccacaccctacataatattcttctaacaatgctatttcacagtttttagtttttgttatctaattcagtttcctaatctggccacaggatcttattgatagggtattggcactgttatctga

SEQ ID NO: 14142 - DNA, 959 bp, Brachypodium distachyon
  Intron number 1 from transcript Bradi1g65790.2 (locus Brad i1g65790) derived from phytozome v7.0 (chr-ID Bd1; pos 647 23248 to 64724206 reverse strand)
tcccagtcgtcaccggcgttgtcatcgccagcggcgtaagtggttacatgtttcctctccaccgcttgttttcgatagatctggttgtgttggggttggatctgacatttgaggggaattcgggtttggagcttgggattcaggagcactgagattgagatctaactgaggaggatctgtcgtactcatagtgtctaattatagaattaagtaaaatggtttgttgctctcttgagctgcctgatatggctatgattttggggatgatgagtttggcaaatttagacctcgtgtctagtcatctttcaacagctctttgattagctgcagattaatccggttggttgattgtctgcaatctatttgttatgcagaaaaactccagcaaacaaaaaagtccaagtcgtccttttgttgtgttctccctccgttccataattcttgtcgaaatattacatgtatatagacactttttaggaatagatacatccatttttgggcaaatttgagacaaaaattatggaaccgagggagtatagtactaggaaaagctgccatttatttgtttcccaacttattggttgatataagtatcttagtattggagatggcaaaaaaaacttatttttgattgacaagagacatgctcatgatatagagcatcgataatcttgacatgatagatttgttatgcttccatgagaccatggtgttaaccatcattaagattacccctttgcaatgcaatgtcctaggtcagcgaactgtgggacagtgaatagcatactacatctagtaaaattatgggggcttacatgtagcttatcaagtttgcaaactgctggttcttgcattctaagagatgtcctaggattttcctgttttctcatcaactaatatggatcacgcacatcaaatttacagggcgagcctagctttcatctgtttggattcatcat
